United States Patent Application Publication US 2022/0211838 A1 - sequence listing, part 2

SEQ ID NO: 1538 - protein, 666 aa, Artificial Sequence; identical to SEQ ID NO: 29
  SARS-CoV-2/Congo/158/2020__EPI_ISL_417950 spike protein (16-681)

SEQ ID NO: 1539 - protein, 666 aa, Artificial Sequence
  SARS-CoV-2/USA/UT-00034/2020__EPI_ISL_417977 spike protein (16-681)
VNLTTRTQLPPAYTNSFTRGVYYPDKVFRSSVLHSTQDLFLPFFSNVTWFHAIHVSGTNGTKRFDNPVLPFNDGVYFASTEKSNIIRGWIFGTTLDSKTQSLLIVNNATNVVIKVCEFQFCNDPFLGVYYYKNNKSWMESEFRVYSSANNCTFEYVSQPFLMDLEGKQGNFKNLREFVFKNIDGYFKIYSKHTPINLVRDLPQGFSALEPLVDLPIGINITRFQTLLALHRSYLTPGDSSSGWTAGAAAYYVGYLQPRTFLLKYNENGTITDAVDCALDPLSETKCTLKSFTVEKGIYQTSNFRVQPTESIVRFPNITNLCPFGEVFNATRFASVYAWNRKRISNCVADYSVLYNSASFSTFKCYGVSPTKLNDLCFTNVYADSFVIRGDEVRQIAPGQTGKIADYNYKLPDDFTGCVIAWNSNNLDSKVGGNYNYLYRLFRKSNLKPFERDISTEIYQAGSTPCNGVEGFNCYFPLQSYGFQPTNGVGYQPYRVVVLSFELLHAPATVCGPKKSTNLVKNKCVNFNFNGLTGTGVLTESNKKFLPFQQFGRDIADTTDAVRDPQTLEILDITPCSFGGVSVITPGTNTSNQVAVLYQGVNCTEVPVAIHADQLTPTWRVYSTGSNVFQTRAGCLIGAEHVNNSYECDIPIGAGICASYQTQTNSP

SEQ ID NO: 1540 - protein, 666 aa, Artificial Sequence
  SARS-CoV-2/USA/UT-00033/2020__EPI_ISL_417976 spike protein (16-681)
VNLTTRTQLPPAYTNSFTRGVYYPDKVFRSSVLHSTQDLFLPFFSNVTWFHAIHVSGTNGTKRFDNPVLPFNDGVYFASTEKSNIIRGWIFGTTLDSKTQSLLIVNNATNVVIKVCEFQFCNDPFLGVYYHKNNKSWMESEFRVYSSANNCTFEYVSQPFLMDLEGKQGNFKNLREFVFKNIDGYFKIYSKHTPINLVRDLPQGFSALEPLVDLPIGINITRFQTLLALHRSYLTPGDSSSGLTAGAAAYYVGYLQPRTFLLKYNENGTITDAVDCALDPLSETKCTLKSFTVEKGIYQTSNFRVQPTESIVRFPNITNLCPFGEVFNATRFASVYAWNRKRISNCVADYSVLYNSASFSTFKCYGVSPTKLNDLCFTNVYADSFVIRGDEVRQIAPGQTGKIADYNYKLPDDFTGCVIAWNSNNLDSKVGGNYNYLYRLFRKSNLKPFERDISTEIYQAGSTPCNGVEGFNCYFPLQSYGFQPTNGVGYQPYRVVVLSFELLHAPATVCGPKKSTNLVKNKCVNFNFNGLTGTGVLTESNKKFLPFQQFGRDIADTTDAVRDPQTLEILDITPCSFGGVSVITPGTNTSNQVAVLYQGVNCTEVPVAIHADQLTPTWRVYSTGSNVFQTRAGCLIGAEHVNNSYECDIPIGAGICASYQTQTNSP

SEQ ID NO: 1541 - protein, 666 aa, Artificial Sequence
  SARS-CoV-2/USA/WI-13/2020__EPI_ISL_417516 spike protein (16-681)
VNLTTRTQLPPAYTNSFTRGVYYPDKVFRSSVLHSTQDLFLPFFSNVTWFHAIHVSGTNGTKRFDNPVLPFNDGVYFASTEKSNIIRGWIFGTTLDSKTQSLLIVNNATNVVIKVCEFQFCNDPFLGVYYHKNNKSWMESEFRVYSSANNCTFEYVSQPFLMDLEGKQGNFKNLREFVFKNIDGYFKIYSKHTPINLVRDLPQGFSALEPLVDLPIGINITRFQTLLALHRSYLTPGDSSSGWTAGAAAYYVGYLQPRTFLLKYNENGTITDAVDCALDPLSETKCTLKSFTVEKGIYQTSNFRVLPTESIVRFPNITNLCPFGEVFNATRFASVYAWNRKRISNCVADYSVLYNSASFSTFKCYGVSPTKLNDLCFTNVYADSFVIRGDEVRQIAPGQTGKIADYNYKLPDDFTGCVIAWNSNNLDSKVGGNYNYLYRLFRKSNLKPFERDISTEIYQAGSTPCNGVEGFNCYFPLQSYGFQPTNGVGYQPYRVVVLSFELLHAPATVCGPKKSTNLVKNKCVNFNFNGLTGTGVLTESNKKFLPFQQFGRDIADTTDAVRDPQTLEILDITPCSFGGVSVITPGTNTSNQVAVLYQGVNCTEVPVAIHADQLTPTWRVYSTGSNVFQTRAGCLIGAEHVNNSYECDIPIGAGICASYQTQTNSP

SEQ ID NO: 1542 - protein, 665 aa, Artificial Sequence
  SARS-CoV-2/India/1-27/2020__EPI_ISL_413522 spike protein (16-680)
VNLTTRTQLPPAYTNSFTRGVYYPDKVFRSSVLHSTQDLFLPFFSNVTWFHAIHVSGTNGTKRFDNPVLPFNDGVYFASTEKSNIIRGWIFGTTLDSKTQSLLIVNNATNVVIKVCEFQFCNDPFLGVYHKNNKSWMESEFRVYSSANNCTFEYVSQPFLMDLEGKQGNFKNLREFVFKNIDGYFKIYSKHTPINLVRDLPQGFSALEPLVDLPIGINITRFQTLLALHRSYLTPGDSSSGWTAGAAAYYVGYLQPRTFLLKYNENGTITDAVDCALDPLSETKCTLKSFTVEKGIYQTSNFRVQPTESIVRFPNITNLCPFGEVFNATRFASVYAWNRKRISNCVADYSVLYNSASFSTFKCYGVSPTKLNDLCFTNVYADSFVIRGDEVIQIAPGQTGKIADYNYKLPDDFTGCVIAWNSNNLDSKVGGNYNYLYRLFRKSNLKPFERDISTEIYQAGSTPCNGVEGFNCYFPLQSYGFQPTNGVGYQPYRVVVLSFELLHAPATVCGPKKSTNLVKNKCVNFNFNGLTGTGVLTESNKKFLPFQQFGRDIADTTDAVRDPQTLEILDITPCSFGGVSVITPGTNTSNQVAVLYQDVNCTEVPVAIHADQLTPTWRVYSTGSNVFQTRAGCLIGAEHVNNSYECDIPIGAGICASYQTQTNSP

SEQ ID NO: 1543 - protein, 662 aa, Artificial Sequence
  SARS-CoV-2/pangolin/Guangxi/P4L/2017__EPI_ISL_410538 spike protein (16-677)
VNLTTRTGIPPGYTNSSTRGVYYPDKVFRSSILHLTQDLFLPFFSNVTWFNTINYQGGFKKFDNPVLPFNDGVYFASTEKSNIIRGWIFGTTLDARTQSLLIVNNATNVVIKVCEFQFCTDPFLGVYYHNNNKTWVENEFRVYSSANNCTFEYISQPFLMDLEGKQGNFKNLREFVFKNVDGYFKIYSKHTPIDLVRDLPRGFAALEPLVDLPIGINITRFQTLLALHRSYLTPGNLESGWTTGAAAYYVGYLQQRTFLLSYNQNGTITDAVDCSLDPLSETKCTLKSLTVEKGIYQTSNFRVQPTISIVRFPNITNLCPFGEVFNASKFASVYAWNRKRISNCVADYSVLYNSTSFSTFKCYGVSPTKLNDLCFTNVYADSFVVKGDEVRQIAPGQTGVIADYNYKLPDDFTGCVIAWNSVKQDALTGGNYGYLYRLFRKSKLKPFERDISTEIYQAGSTPCNGQVGLNCYYPLERYGFHPTTGVNYQPFRVVVLSFELLNGPATVCGPKLSTTLVKDKCVNFNFNGLTGTGVLTTSKKQFLPFQQFGRDISDTTDAVRDPQTLEILDITPCSFGGVSVITPGTNTSNQVAVLYQDVNCTEVPMAIHAEQLTPAWRVYSAGANVFQTRAGCLVGAEHVNNSYECDIPVGAGICASYHSMSS

SEQ ID NO: 1544 - protein, 662 aa, Artificial Sequence
  SARS-CoV-2/pangolin/Guangxi/P5L/2017__EPI_ISL_410540 spike protein (16-677)
VNLTTRTGIPPGYTNSSTRGVYYPDKVFRSSILHLTQDLFLPFFSNVTWFNTINYQGGFKKFDNPVLPFNDGVYFASTEKSNIIRGWIFGTTLDARTQSLLIVNNATNVVIKVCEFQFCTDPFLGVYYHNNNKTWVENEFRVYSSANNCTFEYISQPFLMDLEGKQGNFKNLREFVFKNVDGYFKIYSKHTPIDLVRDLPRGFAALEPLVDLPIGINITRFQTLLALHRSYLTPGKLESGWTTGAAAYYVGYLQQRTFLLSYNQNGTITDAVDCSLDPLSETKCTLKSLTVEKGIYQTSNFRVQPTISIVRFPNITNLCPFGEVFNASKFASVYAWNRKRISNCVADYSVLYNSTSFSTFKCYGVSPTKLNDLCFTNVYADSFVVKGDEVRQIAPGQTGVIADYNYKLPDDFTGCVIAWNSVKQDALTGGNYGYLYRLFRKSKLKPFERDISTEIYQAGSTPCNGQVGLNCYYPLERYGFHPTTGVNYQPFRVVVLSFELLNGPATVCGPKLSTTLVKDKCVNFNFNGLTGTGVLTTSKKQFLPFQQFGRDISDTTDAVRDPQTLEILDITPCSFGGVSVITPGTNTSNQVAVLYQDVNCTEVPMAIHAEQLTPAWRVYSAGANVFQTRAGCLVGAEHVNNSYECDIPVGAGICASYHSMSS

SEQ ID NO: 1545 - protein, 662 aa, Artificial Sequence
  SARS-CoV-2/pangolin/Guangxi/P5E/2017__EPI_ISL_410541 spike protein (16-677)
VNLTTRTGIPPGYTNSSTRGVYYPDKVFRSSILHLTQDLFLPFFSNVTWFNTITYQGGSKKFDNPVLPFNDGVYFASTEKSNIIRGWIFGTTLDARTQSLLIVNNATNVVIKVCEFQFCTDPFLGVYYHNNNKTWVENEFRVYSSANNCTFEYISQPFLMDLEGKQGNFKNLREFVFKNVDGYFKIYSKHTPIDLVRDLPRGFAALEPLVDLPIGINITRFQTLLALHRSYLTPGKLESGWTTGAAAYYVGYLQQRTFLLSYNQNGTITDAVDCSLDPLSETKCTLKSLTVEKGIYQTSNFRVQPTISIVRFPNITNLCPFGEVFNASKFASVYAWNRKRISNCVADYSVLYNSTSFSTFKCYGVSPTKLNDLCFTNVYADSFVVKGDEVRQIAPGQTGVIADYNYKLPDDFTGCVIAWNSVKQDALTGDNYGYLYRLFRKSKLKPFERDISTEIYQAGSTPCNGQVGLNCYYPLERYGFHPTTGVNYQPFRVVVLSFELLNGPATVCGPKLSTTLVKDKCVNFNFNGLTGTGVLTTSKKQFLPFQQFGRDISDTTDAVRDPQTLEILDITPCSFGGVSVITPGTNTSNQVAVLYQDVNCTEVPMAIHAEQLTPAWRVYSAGANVFQTRAGCLVGAEHVNNSYECDIPVGAGICASYHSMSS

SEQ ID NO: 1546 - protein, 660 aa, Artificial Sequence
  SARS-CoV-2/pangolin/Guangxi/P1E/2017__EPI_ISL_410539 spike protein (16-675)
VNLTTRTGIQPGYTNSSTRGVYYPDKVFRSSILHLTQDLFLPFFSNVTWFNTINYQGGFKKFDNPVLPFNDGVYFASTEKSNIIRGWIFGTTLDARTQSLLIVNNATNVVIKVCEFQFCTDPFLGVYYHNNNKTWVENEFRVYSSANNCTFEYISQPFLMDLEGKQGNFKNLREFVFKNVDGYFKIYSKHTPIDLVRDLPRGFAALEPLVDLPIGINITRFQTLLALHRSYLTPGKLESGWTTGAAAYYVGYLQQRTFLLSYNQNGTITDAVDCSLDPLSETKCTLKSLTVEKGIYQTSNFRVQPTISIVRFPNITNLCPFGEVFNASKFASVYAWNRKRISNCVADYSVLYNSTSFSTFKCYGVSPTKLNDLCFTNVYADSFVVKGDEVRQIAPGQTGVIADYNYKLPDDFTGCVIAWNSVKQDALTGGNYLYRLFRKSKLKPFERDISTEIYQAGSTPCNGQVGLNCYYPLERYGFHPTTGVNYQPFRVVVLSFELLNGPATVCGPKLSTTLVKDKCVNFNFNGLTGTGVLTTSKKQFLPFQQFGRDISDTTDAVRDPQTLEILDITPCSFGGVSVITPGTNTSNQVAVLYQDVNCTEVPMAIHAEQLTPAWRVYSAGANVFQTRAGCLVGAEHVNNSYECDIPVGAGICASYHSMSS

SEQ ID NO: 1547 - protein, 62 aa, Artificial Sequence; identical to SEQ ID NO: 49
  SARS-CoV-2/Wuhan/WIV05/2019__EPI_ISL_402128 spike protein (1212-1273)

SEQ ID NO: 1548 - protein, 62 aa, Artificial Sequence; identical to SEQ ID NO: 50
  SARS-CoV-2/bat/Yunnan/RaTG13/2013__EPI_ISL_402131 spike protein (1208-1269)

SEQ ID NO: 1549 - protein, 62 aa, Artificial Sequence; identical to SEQ ID NO: 49
  SARS-CoV-2/Wuhan/HBCDC-HB-01/2019__EPI_ISL_402132 spike protein (1212-1273)

SEQ ID NO: 1550 - protein, 62 aa, Artificial Sequence; identical to SEQ ID NO: 49
  SARS-CoV-2/Guangdong/20SF028/2020__EPI_ISL_403936 spike protein (1212-1273)

SEQ ID NO: 1551 - protein, 62 aa, Artificial Sequence; identical to SEQ ID NO: 53
  SARS-CoV-2/Shenzhen/SZTH-001/2020__EPI_ISL_406592 spike protein (1212-1273)

SEQ ID NO: 1552 - protein, 62 aa, Artificial Sequence; identical to SEQ ID NO: 49
  SARS-CoV-2/Shenzhen/SZTH-004/2020__EPI_ISL_406595 spike protein (1212-1273)

SEQ ID NO: 1553 - protein, 62 aa, Artificial Sequence; identical to SEQ ID NO: 49
  SARS-CoV-2/France/IDF0372/2020__EPI_ISL_406596 spike protein (1212-1273)

SEQ ID NO: 1554 - protein, 62 aa, Artificial Sequence; identical to SEQ ID NO: 49
  SARS-CoV-2/Australia/VIC01/2020__EPI_ISL_406844 spike protein (1212-1273)

SEQ ID NO: 1555 - protein, 62 aa, Artificial Sequence; identical to SEQ ID NO: 49
  SARS-CoV-2/Germany/BavPat1/2020__EPI_ISL_406862 spike protein (1212-1273)

SEQ ID NO: 1556 - protein, 62 aa, Artificial Sequence; identical to SEQ ID NO: 49
  SARS-CoV-2/Wuhan/HBCDC-HB-02/2020__EPI_ISL_412978 spike protein (1212-1273)

SEQ ID NO: 1557 - protein, 62 aa, Artificial Sequence; identical to SEQ ID NO: 49
  SARS-CoV-2/Australia/QLD02/2020__EPI_ISL_407896 spike protein (1212-1273)

SEQ ID NO: 1558 - protein, 62 aa, Artificial Sequence; identical to SEQ ID NO: 49
  SARS-CoV-2/India/1-31/2020__EPI_ISL_413523 spike protein (1212-1273)

SEQ ID NO: 1559 - protein, 62 aa, Artificial Sequence; identical to SEQ ID NO: 49
  SARS-CoV-2/Guangdong/GD2020087-P0008/2020__EPI_ISL_413863 spike protein (1212-1273)

SEQ ID NO: 1560 - protein, 62 aa, Artificial Sequence; identical to SEQ ID NO: 49
  SARS-CoV-2/Sweden/01/2020__EPI_ISL_411951 spike protein (1212-1273)

SEQ ID NO: 1561 - protein, 62 aa, Artificial Sequence; identical to SEQ ID NO: 49
  SARS-CoV-2/Tianmen/HBCDC-HB-07/2020__EPI_ISL_412983 spike protein (1212-1273)

SEQ ID NO: 1562 - protein, 62 aa, Artificial Sequence; identical to SEQ ID NO: 49
  SARS-CoV-2/Hong Kong/case42_VM20002493/2020__EPI_ISL_414527 spike protein (1212-1273)

SEQ ID NO: 1563 - protein, 62 aa, Artificial Sequence; identical to SEQ ID NO: 49
  SARS-CoV-2/USA/CruiseA-23/2020__EPI_ISL_414482 spike protein (1212-1273)

SEQ ID NO: 1564 - protein, 62 aa, Artificial Sequence; identical to SEQ ID NO: 49
  SARS-CoV-2/Hong Kong/case85_VM20002868/2020__EPI_ISL_414519 spike protein (1212-1273)

SEQ ID NO: 1565 - protein, 62 aa, Artificial Sequence
  SARS-CoV-2/England/200990660/2020__EPI_ISL_414523 spike protein (1212-1273)
WPWYIWLGFIAGLIAIVMVTIMLCCMTSCCSCLKGCCSCGSCCKFDEDDSELVLKGVKLHYT

SEQ ID NO: 1566 - protein, 62 aa, Artificial Sequence; identical to SEQ ID NO: 49
  SARS-CoV-2/Australia/NSW09/2020__EPI_ISL_413595 spike protein (1212-1273)

SEQ ID NO: 1567 - protein, 62 aa, Artificial Sequence
  SARS-CoV-2/Australia/NSW10/2020__EPI_ISL_413596 spike protein (1212-1273)
WPWYIWLGFIAGLIAIVMVTIMLCCMTSCCSCLKGCCSCGSCFKFDEDDSEPVLKGVKLHYT

SEQ ID NO: 1568 - protein, 62 aa, Artificial Sequence; identical to SEQ ID NO: 49
  SARS-CoV-2/Switzerland/1000477797/2020__EPI_ISL_413023 spike protein (1212-1273)

SEQ ID NO: 1569 - protein, 62 aa, Artificial Sequence; identical to SEQ ID NO: 49
  SARS-CoV-2/Belgium/BA-02291/2020__EPI_ISL_415159 spike protein (1212-1273)

SEQ ID NO: 1570 - protein, 62 aa, Artificial Sequence; identical to SEQ ID NO: 49
  SARS-CoV-2/USA/WA8-UW5/2020__EPI_ISL_413486 spike protein (1212-1273)

SEQ ID NO: 1571 - protein, 62 aa, Artificial Sequence; identical to SEQ ID NO: 49
  SARS-CoV-2/England/20102000506/2020__EPI_ISL_415147 spike protein (1212-1273)

SEQ ID NO: 1572 - protein, 62 aa, Artificial Sequence; identical to SEQ ID NO: 49
  SARS-CoV-2/Belgium/VAG-03013/2020__EPI_ISL_415155 spike protein (1212-1273)

SEQ ID NO: 1573 - protein, 62 aa, Artificial Sequence; identical to SEQ ID NO: 49
  SARS-CoV-2/Belgium/BC-03016/2020__EPI_ISL_415157 spike protein (1212-1273)

SEQ ID NO: 1574 - protein, 62 aa, Artificial Sequence; identical to SEQ ID NO: 49
  SARS-CoV-2/Germany/BavPat3/2020__EPI_ISL_414521 spike protein (1212-1273)

SEQ ID NO: 1575 - protein, 62 aa, Artificial Sequence; identical to SEQ ID NO: 49
  SARS-CoV-2/France/HF1805/2020__EPI_ISL_414628 spike protein (1212-1273)

SEQ ID NO: 1576 - protein, 62 aa, Artificial Sequence; identical to SEQ ID NO: 49
  SARS-CoV-2/Netherlands/ZuidHolland_9/2020__EPI_ISL_414445 spike protein (1212-1273)

SEQ ID NO: 1577 - protein, 62 aa, Artificial Sequence; identical to SEQ ID NO: 49
  SARS-CoV-2/Finland/FIN03032020A/2020__EPI_ISL_413602 spike protein (1212-1273)

SEQ ID NO: 1578 - protein, 62 aa, Artificial Sequence; identical to SEQ ID NO: 49
  SARS-CoV-2/France/GE1977/2020__EPI_ISL_414632 spike protein (1212-1273)

SEQ ID NO: 1579 - protein, 62 aa, Artificial Sequence; identical to SEQ ID NO: 49
  SARS-CoV-2/Finland/FIN-313/2020__EPI_ISL_414641 spike protein (1212-1273)

SEQ ID NO: 1580 - protein, 62 aa, Artificial Sequence; identical to SEQ ID NO: 49
  SARS-CoV-2/Netherlands/ZuidHolland_2/2020__EPI_ISL_414556 spike protein (1212-1273)

SEQ ID NO: 1581 - protein, 62 aa, Artificial Sequence; identical to SEQ ID NO: 49
  SARS-CoV-2/USA/WA-UW31/2020__EPI_ISL_414618 spike protein (1212-1273)

SEQ ID NO: 1582 - protein, 62 aa, Artificial Sequence; identical to SEQ ID NO: 49
  SARS-CoV-2/South Korea/SNU01/2020__EPI_ISL_411929 spike protein (1212-1273)

SEQ ID NO: 1583 - protein, 62 aa, Artificial Sequence; identical to SEQ ID NO: 49
  SARS-CoV-2/China/WF0004/2020__EPI_ISL_413694 spike protein (1212-1273)

SEQ ID NO: 1584 - protein, 62 aa, Artificial Sequence; identical to SEQ ID NO: 49
  SARS-CoV-2/China/WF0028/2020__EPI_ISL_413791 spike protein (1212-1273)

SEQ ID NO: 1585 - protein, 62 aa, Artificial Sequence; identical to SEQ ID NO: 49
  SARS-CoV-2/2019-nCoV/USA-CruiseA-18/2020__MT159716.1 spike protein (1212-1273)

SEQ ID NO: 1586 - protein, 62 aa, Artificial Sequence; identical to SEQ ID NO: 49
  SARS-CoV-2/SARS-CoV-2/Yunnan-01/human/2020/CHN__MT049951.1 spike protein (1212-1273)

SEQ ID NO: 1587 - protein, 62 aa, Artificial Sequence; identical to SEQ ID NO: 49
  SARS-CoV-2/USA/WA-UW292/2020__EPI_ISL_418077 spike protein (1212-1273)

SEQ ID NO: 1588 - protein, 62 aa, Artificial Sequence; identical to SEQ ID NO: 49
  SARS-CoV-2/Iceland/192/2020__EPI_ISL_417819 spike protein (1212-1273)

SEQ ID NO: 1589 - protein, 62 aa, Artificial Sequence; identical to SEQ ID NO: 49
  SARS-CoV-2/Belgium/ULG-6939/2020__EPI_ISL_417020 spike protein (1212-1273)

SEQ ID NO: 1590 - protein, 62 aa, Artificial Sequence; identical to SEQ ID NO: 49
  SARS-CoV-2/France/HF2496/2020__EPI_ISL_418231 spike protein (1212-1273)

SEQ ID NO: 1591 - protein, 62 aa, Artificial Sequence; identical to SEQ ID NO: 49
  SARS-CoV-2/USA/WA-UW291/2020__EPI_ISL_418076 spike protein (1212-1273)

SEQ ID NO: 1592 - protein, 62 aa, Artificial Sequence
  SARS-CoV-2/Portugal/PT0034/2020__EPI_ISL_418019 spike protein (1212-1273)
WPWYIWLGFIAGLIAIVMVTIMLCCITSCCSCLKGCCSCGSCCKFDEDDSEPVLKGVKLHYT

SEQ ID NO: 1593 - protein, 62 aa, Artificial Sequence; identical to SEQ ID NO: 49
  SARS-CoV-2/Iceland/202/2020__EPI_ISL_417750 spike protein (1212-1273)

SEQ ID NO: 1594 - protein, 62 aa, Artificial Sequence; identical to SEQ ID NO: 49
  SARS-CoV-2/USA/WA-UW261/2020__EPI_ISL_418046 spike protein (1212-1273)

SEQ ID NO: 1595 - protein, 62 aa, Artificial Sequence; identical to SEQ ID NO: 49
  SARS-CoV-2/Portugal/PT0035/2020__EPI_ISL_418020 spike protein (1212-1273)

SEQ ID NO: 1596 - protein, 62 aa, Artificial Sequence; identical to SEQ ID NO: 49
  SARS-CoV-2/USA/NY-NYUMC7/2020__EPI_ISL_418192 spike protein (1212-1273)

SEQ ID NO: 1597 - protein, 62 aa, Artificial Sequence; identical to SEQ ID NO: 49
  SARS-CoV-2/Iceland/189/2020__EPI_ISL_417709 spike protein (1212-1273)

SEQ ID NO: 1598 - protein, 62 aa, Artificial Sequence; identical to SEQ ID NO: 49
  SARS-CoV-2/Australia/NSW56/2020__EPI_ISL_417408 spike protein (1212-1273)

SEQ ID NO: 1599 - protein, 62 aa, Artificial Sequence; identical to SEQ ID NO: 49
  SARS-CoV-2/Iceland/280/2020__EPI_ISL_417608 spike protein (1212-1273)

SEQ ID NO: 1600 - protein, 62 aa, Artificial Sequence
  SARS-CoV-2/Iceland/247/2020__EPI_ISL_417575 spike protein (1212-1273)
WPWYIWLGFIAGLIAIVIVTIMLCCMTSCCSCLKGCCSCGSCCKFDEDDSEPVLKGVKLHYT

SEQ ID NO: 1601 - protein, 62 aa, Artificial Sequence; identical to SEQ ID NO: 49
  SARS-CoV-2/Iceland/238/2020__EPI_ISL_417566 spike protein (1212-1273)

SEQ ID NO: 1602 - protein, 62 aa, Artificial Sequence; identical to SEQ ID NO: 49
  SARS-CoV-2/Greece/16/2020__EPI_ISL_418265 spike protein (1212-1273)

SEQ ID NO: 1603 - protein, 62 aa, Artificial Sequence; identical to SEQ ID NO: 49
  SARS-CoV-2/Iceland/319/2020__EPI_ISL_417648 spike protein (1212-1273)

SEQ ID NO: 1604 - protein, 62 aa, Artificial Sequence; identical to SEQ ID NO: 49
  SARS-CoV-2/Congo/94/2020__EPI_ISL_417947 spike protein (1212-1273)

SEQ ID NO: 1605 - protein, 62 aa, Artificial Sequence; identical to SEQ ID NO: 49
  SARS-CoV-2/Congo/158/2020__EPI_ISL_417950 spike protein (1212-1273)

SEQ ID NO: 1606 - protein, 62 aa, Artificial Sequence; identical to SEQ ID NO: 49
  SARS-CoV-2/USA/UT-00034/2020__EPI_ISL_417977 spike protein (1212-1273)

SEQ ID NO: 1607 - protein, 62 aa, Artificial Sequence; identical to SEQ ID NO: 49
  SARS-CoV-2/USA/UT-00033/2020__EPI_ISL_417976 spike protein (1212-1273)

SEQ ID NO: 1608 - protein, 62 aa, Artificial Sequence; identical to SEQ ID NO: 49
  SARS-CoV-2/USA/WI-13/2020__EPI_ISL_417516 spike protein (1212-1273)

SEQ ID NO: 1609 - protein, 62 aa, Artificial Sequence; identical to SEQ ID NO: 49
  SARS-CoV-2/India/1-27/2020__EPI_ISL_413522 spike protein (1211-1272)

SEQ ID NO: 1610 - protein, 62 aa, Artificial Sequence; identical to SEQ ID NO: 50
  SARS-CoV-2/pangolin/Guangxi/P4L/2017__EPI_ISL_410538 spike protein (1206-1267)

SEQ ID NO: 1611 - protein, 62 aa, Artificial Sequence; identical to SEQ ID NO: 50
  SARS-CoV-2/pangolin/Guangxi/P5L/2017__EPI_ISL_410540 spike protein (1206-1267)

SEQ ID NO: 1612 - protein, 62 aa, Artificial Sequence; identical to SEQ ID NO: 50
  SARS-CoV-2/pangolin/Guangxi/P5E/2017__EPI_ISL_410541 spike protein (1206-1267)

SEQ ID NO: 1613 - protein, 62 aa, Artificial Sequence; identical to SEQ ID NO: 50
  SARS-CoV-2/pangolin/Guangxi/P1E/2017__EPI_ISL_410539 spike protein (1204-1265)

SEQ ID NO: 1614 - protein, 1211 aa, Artificial Sequence; identical to SEQ ID NO: 31
  SARS-CoV-2/Wuhan/WIV05/2019__EPI_ISL_402128 spike protein (1-1211)

SEQ ID NO: 1615 - protein, 1207 aa, Artificial Sequence; identical to SEQ ID NO: 32
  SARS-CoV-2/bat/Yunnan/RaTG13/2013__EPI_ISL_402131 spike protein (1-1207)

SEQ ID NO: 1616 - protein, 1211 aa, Artificial Sequence; identical to SEQ ID NO: 33
  SARS-CoV-2/Wuhan/HBCDC-HB-01/2019__EPI_ISL_402132 spike protein (1-1211)

SEQ ID NO: 1617 - protein, 1211 aa, Artificial Sequence; identical to SEQ ID NO: 34
  SARS-CoV-2/Guangdong/20SF028/2020__EPI_ISL_403936 spike protein (1-1211)

SEQ ID NO: 1618 - protein, 1211 aa, Artificial Sequence; identical to SEQ ID NO: 35
  SARS-CoV-2/Shenzhen/SZTH-001/2020__EPI_ISL_406592 spike protein (1-1211)

SEQ ID NO: 1619 - protein, 1211 aa, Artificial Sequence; identical to SEQ ID NO: 36
  SARS-CoV-2/Shenzhen/SZTH-004/2020__EPI_ISL_406595 spike protein (1-1211)

SEQ ID NO: 1620 - protein, 1211 aa, Artificial Sequence; identical to SEQ ID NO: 37
  SARS-CoV-2/France/IDF0372/2020__EPI_ISL_406596 spike protein (1-1211)

SEQ ID NO: 1621 - protein, 1211 aa, Artificial Sequence; identical to SEQ ID NO: 38
  SARS-CoV-2/Australia/VIC01/2020__EPI_ISL_406844 spike protein (1-1211)

SEQ ID NO: 1622 - protein, 1211 aa, Artificial Sequence; identical to SEQ ID NO: 39
  SARS-CoV-2/Germany/BavPat1/2020__EPI_ISL_406862 spike protein (1-1211)

SEQ ID NO: 1623 - protein, 1211 aa, Artificial Sequence
  SARS-CoV-2/Wuhan/HBCDC-HB-02/2020__EPI_ISL_412978 spike protein (1-1211)
MFVFLVLLPLVSSQCVNLTTRTQLPPAYTNSFTRGVYYPDKVFRSSVLHSTQDLFLPFFSNVTWFHAIHVSGTNGTKRFDNPVLPFNDGVYFASTEKSNIIRGWIFGTTLDSKTQSLLIVNNATNVVIKVCEFQFCNDPFLGVYYHKNNKSWMESEFRVYSSANNCTFEYVSQPFLMDLEGKQGNFKNLREFVFKNIDGYFKIYSKHTPINLVRDLPQGFSALEPLVDLPIGINITRFQTLLALHRSYLTPGDSSSGWTAGAAAYYVGYLQPRTFLLKYNENGTITDAVDCALDPLSETKCTLKSFTVEKGIYQTSNFRVQPTESIVRFPNITNLCPFGEVFNATRFASVYAWNRKRISNCVADYSVLYNSASFSTFKCYGVSPTKLNDLCFTNVYADSFVIRGDEVRQIAPGQTGKIADYNYKLPDDFTGCVIAWNSNNLDSKVGGNYNYLYRLFRKSNLKPFERDISTEIYQAGSTPCNGVEGFNCYFPLQSYGFQPTNGVGYQPYRVVVLSFELLHAPATVCGPKKSTNLVKNKCVNFNFNGLTGTGVLTESNKKFLPFQQFGRDIADTTDAVRDPQTLEILDITPCSFGGVSVITPGTNTSNQVAVLYQDVNCTEVPVAIHADQLTPTWRVYSTGSNVFQTRAGCLIGAEHVNNSYECDIPIGAGICASYQTQTNSPRRARSVASQSIIAYTMSLGAENSVAYSNNSIAIPTNFTISVTTEILPVSMTKTSVDCTMYICGDSTECSNFLLQYGSFCTQLNRALTGIAVEQDKNTQEVFAQVKQIYKTPPIKDFGGFNFSQILPDPSKPSKRSFIEDLLFNKVTLADAGFIKQYGDCLGDIAARDLICAQKFNGLTVLPPLLTDEMIAQYTSALLAGTITSGWTFGAGAALQIPFAMQMAYRFNGIGVTQNVLYENQKLIANQFNSAIGKIQDSLSSTASALGKLQDVVNQNAQALNTLVKQLSSNFGAISSVLNDILSRLDKVEAEVQIDRLITGRLQSLQTYVTQQLIRAAEIRASANLAATKMSECVLGQSKRVDFCGKGYHLMSFPQSAPHGVVFLHVTYVPAQEKNFTTAPAICHDGKAHFPREGVFVSNGTHWFVTQRNFYEPQIITTDNTFVSGNCDVVIGIVNNTVYDPLQPELDSFKEELDKYFKNHTSPDVDLGDISGINASVVNIQKEIDRLNEVAKNLNESLIDLQELGKYEQYIK

SEQ ID NO: 1624 - protein, 1211 aa, Artificial Sequence
  SARS-CoV-2/Australia/QLD02/2020__EPI_ISL_407896 spike protein (1-1211)
MFVFLVLLPLVSSQCVNLTTRTQLPPAYTNSFTRGVYYPDKVFRSSVLHSTQDLFLPFFSNVTWFHAIHVSGTNGTKRFDNPVLPFNDGVYFASTEKSNIIRGWIFGTTLDSKTQSLLIVNNATNVVIKVCEFQFCNDPFLGVYYHKNNKSWMESEFRVYSSANNCTFEYVSQPFLMDLEGKQGNFKNLREFVFKNIDGYFKIYSKHTPINLVRDLPQGFSALEPLVDLPIGINITRFQTLLALHRSYLTPGDSSSGWTAGAAAYYVGYLQPRTFLLKYNENGTITDAVDCALDPLSETKCTLKSFTVEKGIYQTSNFRVQPTESIVRFPNITNLCPFGEVFNATRFASVYAWNRKRISNCVADYSVLYNSASFSTFKCYGVSPTKLNDLCFTNVYADSFVIRGDEVRQIAPGQTGKIADYNYKLPDDFTGCVIAWNSNNLDSKVGGNYNYLYRLFRKSNLKPFERDISTEIYQAGSTPCNGVEGFNCYFPLQSYGFQPTNGVGYQPYRVVVLSFELLHAPATVCGPKKSTNLVKNKCVNFNFNGLTGTGVLTESNKKFLPFQQFGRDIADTTDAVRDPQTLEILDITPCSFGGVSVITPGTNTSNQVAVLYQDVNCTEVPVAIHADQLTPTWRVYSTGSNVFQTRAGCLIGAEHVNNSYECDIPIGAGICASYQTQTNSPRRARSVASQSIIAYTMSLGAENSVAYSNNSIAIPTNFTISVTTEILPVSMTKTSVDCTMYICGDSTECSNLLLQYGSFCTQLNRALTGIAVEQDKNTQEVFAQVKQIYKTPPIKDFGGFNFSQILPDPSKPSKRSFIEDLLFNKVTLADAGFIKQYGDCLGDIAARDLICAQKFNGLTVLPPLLTDEMIAQYTSALLAGTITSGWTFGAGAALQIPFAMQMAYRFNGIGVTQNVLYENQKLIANQFNSAIGKIQDSLSSTASALGKLQDVVNQNAQALNTLVKQLSSNFGAISSVLNDILSRLDKVEAEVQIDRLITGRLQSLQTYVTQQLIRAAEIRASANLAATKMSECVLGQSKRVDFCGKGYHLMSFPQSAPHGVVFLHVTYVPAQEKNFTTAPAICHDGKAHFPREGVFVSNGTHWFVTQRNFYEPQIITTDNTFVSGNCDVVIGIVNNTVYDPLQLELDSFKEELDKYFKNHTSPDVDLGDISGINASVVNIQKEIDRLNEVAKNLNESLIDLQELGKYEQYIK

SEQ ID NO: 1625 - protein, 1211 aa, Artificial Sequence
  SARS-CoV-2/India/1-31/2020__EPI_ISL_413523 spike protein (1-1211)
MFVFLVLLPLVSSQCVNLTTRTQLPPAYTNSFTRGVYYPDKVFRSSVLHSTQDLFLPFFSNVTWFHAIHVSGTNGTKRFDNPVLPFNDGVYFASTEKSNIIRGWIFGTTLDSKTQSLLIVNNATNVVIKVCEFQFCNDPFLGVYYHKNNKSWMESEFRVYSSANNCTFEYVSQPFLMDLEGKQGNFKNLREFVFKNIDGYFKIYSKHTPINLVRDLPQGFSALEPLVDLPIGINITRFQTLLALHRSYLTPGDSSSGWTAGAAAYYVGYLQPRTFLLKYNENGTITDAVDCALDPLSETKCTLKSFTVEKGIYQTSNFRVQPTESIVRFPNITNLCPFGEVFNATRFASVYAWNRKRISNCVADYSVLYNSASFSTFKCYGVSPTKLNDLCFTNVYADSFVIRGDEVRQIAPGQTGKIADYNYKLPDDFTGCVIAWNSNNLDSKVGGNYNYLYRLFRKSNLKPFERDISTEIYQAGSTPCNGVEGFNCYFPLQSYGFQPTNGVGYQPYRVVVLSFELLHAPATVCGPKKSTNLVKNKCVNFNFNGLTGTGVLTESNKKFLPFQQFGRDIADTTDAVRDPQTLEILDITPCSFGGVSVITPGTNTSNQVAVLYQDVNCTEVPVAIHADQLTPTWRVYSTGSNVFQTRAGCLIGAEHVNNSYECDIPIGAGICASYQTQTNSPRRARSVASQSIIAYTMSLGAENSVAYSNNSIAIPTNFTISVTTEILPVSMTKTSVDCTMYICGDSTECSNLLLQYGSFCTQLNRALTGIAVEQDKNTQEVFAQVKQIYKTPPIKDFGGFNFSQILPDPSKPSKRSFIEDLLFNKVTLADAGFIKQYGDCLGDIAARDLICAQKFNGLTVLPPLLTDEMIAQYTSALLAGTITSGWTFGAGAALQIPFAMQMAYRFNGIGVTQNVLYENQKLIANQFNSVIGKIQDSLSSTASALGKLQDVVNQNAQALNTLVKQLSSNFGAISSVLNDILSRLDKVEAEVQIDRLITGRLQSLQTYVTQQLIRAAEIRASANLAATKMSECVLGQSKRVDFCGKGYHLMSFPQSAPHGVVFLHVTYVPAQEKNFTTAPAICHDGKAHFPREGVFVSNGTHWFVTQRNFYEPQIITTDNTFVSGNCDVVIGIVNNTVYDPLQPELDSFKEELDKYFKNHTSPDVDLGDISGINASVVNIQKEIDRLNEVAKNLNESLIDLQELGKYEQYIK

SEQ ID NO: 1626 - protein, 1211 aa, Artificial Sequence
  SARS-CoV-2/Guangdong/GD2020087-P0008/2020__EPI_ISL_413863 spike protein (1-1211)
MFVFLVLLPLVSSQCVNLTTRTQLPPAYTNSFTRGVYYPDKVFRSSVLHSTQDLFLPFFSNVTWFHAIHVSGTNGTKRFDNPVLPFNDGVYFASTEKSNIIRGWIFGTTLDSKTQSLLIVNNATNVVIKVCEFQFCNDPFLGVYYHKNNKSWMESEFRVYSSANNCTFEYVSQPFLMDLEGKQGNFKNLREFVFKNIDGYFKIYSKHTPINLVRDLPQGFSALEPLVDLPIGINITRFQTLLALHRSYLTPGDSSSGWTAGAAAYYVGYLQPRTFLLKYNENGTITDAVDCALDPLSETKCTLKSFTVEKGIYQTSNFRVQPTESIVRFPNITNLCPFGEVFNATRFASVYAWNRKRISNCVADYSVLYNSASFSTFKCYGVSPTKLNDLCFTNVYADSFVIRGDEVREIAPGQTGKIADYNYKLPDDFTGCVIAWNSNNLDSKVGGNYNYLYRLFRKSNLKPFERDISTEIYQAGSTPCNGVEGFNCYFPLQSYGFQPTNGVGYQPYRVVVLSFELLHAPATVCGPKKSTNLVKNKCVNFNFNGLTGTGVLTESNKKFLPFQQFGRDIADTTDAVRDPQTLEILDITPCSFGGVSVITPGTNTSNQVAVLYQDVNCTEVPVAIHADQLTPTWRVYSTGSNVFQTRAGCLIGAEHVNNSYECDIPIGAGICASYQTQTNSPRRARSVASQSIIAYTMSLGAENSVAYSNNSIAIPTNFTISVTTEILPVSMTKTSVDCTMYICGDSTECSNLLLQYGSFCTQLNRALTGIAVEQDKNTQEVFAQVKQIYKTPPIKDFGGFNFSQILPDPSKPSKRSFIEDLLFNKVTLADAGFIKQYGDCLGDIAARDLICAQKFNGLTVLPPLLTDEMIAQYTSALLAGTITSGWTFGAGAALQIPFAMQMAYRFNGIGVTQNVLYENQKLIANQFNSAIGKIQDSLSSTASALGKLQDVVNQNAQALNTLVKQLSSNFGAISSVLNDILSRLDKVEAEVQIDRLITGRLQSLQTYVTQQLIRAAEIRASANLAATKMSECVLGQSKRVDFCGKGYHLMSFPQSAPHGVVFLHVTYVPAQEKNFTTAPAICHDGKAHFPREGVFVSNGTHWFVTQRNFYEPQIITTDNTFVSGNCDVVIGIVNNTVYDPLQPELDSFKEELDKYFKNHTSPDVDLGDISGINASVVNIQKEIDRLNEVAKNLNESLIDLQELGKYEQYIK

SEQ ID NO: 1627 - protein, 1211 aa, Artificial Sequence
  SARS-CoV-2/Sweden/01/2020__EPI_ISL_411951 spike protein (1-1211)
MFVFLVLLPLVSSQCVNLTTRTQLPPAYTNSFTRGVYYPDKVFRSSVLHSTQDLFLPFFSNVTWFHAIHVSGTNGTKRFDNPVLPFNDGVYFASTEKSNIIRGWIFGTTLDSKTQSLLIVNNATNVVIKVCEFQFCNDPFLGVYYHKNNKSWMESEFRVYSSANNCTFEYVSQPFLMDLEGKQGNFKNLREFVFKNIDGYFKIYSKHTPINLVRDLPQGFSALEPLVDLPIGINITRFQTLLALHRSYLTPGDSSSGWTAGAAAYYVGYLQPRTFLLKYNENGTITDAVDCALDPLSETKCTLKSFTVEKGIYQTSNFRVQPTESIVRFPNITNLCPFGEVFNATRFASVYAWNRKRISNCVADYSVLYNSASFSTFKCYGVSPTKLNDLCFTNVYADSFVIRGDEVRQIAPGQTGKIADYNYKLPDDFTGCVIAWNSNNLDSKVGGNYNYLYRLFRKSNLKPFERDISTEIYQAGSTPCNGVEGFNCYFPLQSYGFQPTNGVGYQPYRVVVLSFELLHAPATVCGPKKSTNLVKNKCVNFNFNGLTGTGVLTESNKKFLPFQQFGRDIADTTDAVRDPQTLEILDITPCSFGGVSVITPGTNTSNQVAVLYQDVNCTEVPVAIHADQLTPTWRVYSTGSNVFQTRAGCLIGAEHVNNSYECDIPIGAGICASYQTQTNSPRRARSVASQSIIAYTMSLGAENSVAYSNNSIAIPTNFTISVTTEILPVSMTKTSVDCTMYICGDSTECSNLLLQYGSFCTQLNRALTGIAVEQDKNTQEVFAQVKQIYKTPPIKDCGGFNFSQILPDPSKPSKRSFIEDLLFNKVTLADAGFIKQYGDCLGDIAARDLICAQKFNGLTVLPPLLTDEMIAQYTSALLAGTITSGWTFGAGAALQIPFAMQMAYRFNGIGVTQNVLYENQKLIANQFNSAIGKIQDSLSSTASALGKLQDVVNQNAQALNTLVKQLSSNFGAISSVLNDILSRLDKVEAEVQIDRLITGRLQSLQTYVTQQLIRAAEIRASANLAATKMSECVLGQSKRVDFCGKGYHLMSFPQSAPHGVVFLHVTYVPAQEKNFTTAPAICHDGKAHFPREGVFVSNGTHWFVTQRNFYEPQIITTDNTFVSGNCDVVIGIVNNTVYDPLQPELDSFKEELDKYFKNHTSPDVDLGDISGINASVVNIQKEIDRLNEVAKNLNESLIDLQELGKYEQYIK

SEQ ID NO: 1628 - protein, 1211 aa, Artificial Sequence
  SARS-CoV-2/Tianmen/HBCDC-HB-07/2020__EPI_ISL_412983 spike protein (1-1211)
MFVFLVLLPLVSSQCVNLTTRTQLPPAYTNSFTRGVYYPDKVFRSSVLHSTQDLFLPFFSNVTWFHAIHVSGTNGTKRFDNPVLPFNDGVYFASTEKSNIIRGWIFGTTLDSKTQSLLIVNNATNVVIKVCEFQFCNDPFLGVYYHKNNKSWMESEFRVYSSANNCTFEYVSQPFLMDLEGKQGNFKNLREFVFKNIDGYFKIYSKHTPINLVRDLPQGFSALEPLVDLPIGINITRFQTLLALHRSYLTPGDSSSGWTAGAAAYYVGYLQPRTFLLKYNENGTITDAVDCALDPLSETKCTLKSFTVEKGIYQTSNFRVQPTESIVRFPNITNLCPFGEVFNATRFASVYAWNRKRISNCVADYSVLYNSASFSTFKCYGVSPTKLNDLCFTNVYADSFVIRGDEVRQIAPGQTGKIADYNYKLPDDFTGCVIAWNSNNLDSKVGGNYNYLYRLFRKSNLKPFERDISTEIYQAGSTPCNGVEGFNCYFPLQSYGFQPTNGVGYQPYRVVVLSFELLHAPATVCGPKKSTNLVKNKCVNFNFNGLTGTGVLTESNKKFLPFQQFGRDIADTTDAVRDPQTLEILDITPCSFGGVSVITPGTNTSNQVAVLYQDLNCTEVPVAIHADQLTPTWRVYSTGSNVFQTRAGCLIGAEHVNNSYECDIPIGAGICASYQTQTNSPRRARSVASQSIIAYTMSLGAENSVAYSNNSIAIPTNFTISVTTEILPVSMTKTSVDCTMYICGDSTECSNLLLQYGSFCTQLNRALTGIAVEQDKNTQEVFAQVKQIYKTPPIKDFGGFNFSQILPDPSKPSKRSFIEDLLFNKVTLADAGFIKQYGDCLGDIAARDLICAQKFNGLTVLPPLLTDEMIAQYTSALLAGTITSGWTFGAGAALQIPFAMQMAYRFNGIGVTQNVLYENQKLIANQFNSAIGKIQDSLSSTASALGKLQDVVNQNAQALNTLVKQLSSNFGAISSVLNDILSRLDKVEAEVQIDRLITGRLQSLQTYVTQQLIRAAEIRASANLAATKMSECVLGQSKRVDFCGKGYHLMSFPQSAPHGVVFLHVTYVPAQEKNFTTAPAICHDGKAHFPREGVFVSNGTHWFVTQRNFYEPQIITTDNTFVSGNCDVVIGIVNNTVYDPLQPELDSFKEELDKYFKNHTSPDVDLGDISGINASVVNIQKEIDRLNEVAKNLNESLIDLQELGKYEQYIK

SEQ ID NO: 1629 - protein, 1211 aa, Artificial Sequence
  SARS-CoV-2/Hong Kong/case42_VM20002493/2020__EPI_ISL_414527 spike protein (1-1211)
MFVFLVLLPLVSSQCVNLTTRTQLPPAYTNSFTRGVYYPDKVFRSSVLHSTQDLFLPFFSNVTWFHAIHVSGTNGTKRFDNPVLPFNDGVYFASTEKSNIIRGWIFGTTLDSKTQSLLIVNNATNVVIKVCEFQFCNDPFLGVYYHKNNKSWMESEFRVYSSANNCTFEYVSQPFLMDLEGKQGNFKNLREFVFKNIDGYFKIYSKHTPINLVRDLPQGFSALEPLVDLPIGINITRFQTLLALHRSYLTPGDSSSGWTAGAAAYYVGYLQPRTFLLKYNENGTITDAVDCALDPLSETKCTLKSFTVEKGIYQTSNFRVQPTESIVRFPNITNLCPFGEVFNATRFASVYAWNRKRISNCVADYSVLYNSASFSTFKCYGVSPTKLNDLCFTNVYADSFVIRGDEVRQIAPGQTGKIADYNYKLPDDFTGCVIAWNSNNLDSKVGGNYNYLYRLFRKSNLKPFERDISTEIYQAGSTPCNGVEGFNCYFPLQSYGFQPTNGVGYQPYRVVVLSFELLHAPATVCGPKKSTNLVKNKCVNFNFNGLTGTGVLTESNKKFLPFQQFGRDIADTTDAVRDPQTLEILDITPCSFGGVSVITPGTNTSNQVAVLYQDVNCTEVPVAIHADQLTPTWRVYSTGSNVFQTRAGCLIGAEHVNNSYECDIPIGAGICASYQTQTNSPRRARSVASQSIIAYTMSLGAENSVAYSNNSIAIPTNFAISVTTEILPVSMTKTSVDCTMYICGDSTECSNLLLQYGSFCTQLNRALTGIAVEQDKNTQEVFAQVKQIYKTPPIKDFGGFNFSQILPDPSKPSKRSFIEDLLFNKVTLADAGFIKQYGDCLGDIAARDLICAQKFNGLTVLPPLLTDEMIAQYTSALLAGTITSGWTFGAGAALQIPFAMQMAYRFNGIGVTQNVLYENQKLIANQFNSAIGKIQDSLSSTASALGKLQDVVNQNAQALNTLVKQLSSNFGAISSVLNDILSRLDKVEAEVQIDRLITGRLQSLQTYVTQQLIRAAEIRASANLAATKMSECVLGQSKRVDFCGKGYHLMSFPQSAPHGVVFLHVTYVPAQEKNFTTAPAICHDGKAHFPREGVFVSNGTHWFVTQRNFYEPQIITTDNTFVSGNCDVVIGIVNNTVYDPLQPELDSFKEELDKYFKNHTSPDVDLGDISGINASVVNIQKEIDRLNEVAKNLNESLIDLQELGKYEQYIK

SEQ ID NO: 1630 - protein, 1211 aa, Artificial Sequence
  SARS-CoV-2/USA/CruiseA-23/2020__EPI_ISL_414482 spike protein (1-1211)
MFVFLVLLPLVSSQCVNLTTRTQLPPAYTNSFTRGVYYPDKVFRSSVLHSTQDLFLPFFSNVTWFHAIHVSGTNGTKRFDNPVLPFNDGVYFASTEKSNIIRGWIFGTTLDSKTQSLLIVNNATNVVIKVCEFQFCNDPFLGVYYHKNNKSWMESEFRVYSSANNCTFEYVSQPFLMDLEVKQGNFKNLREFVFKNIDGYFKIYSKHTPINLVRDLPQGFSALEPLVDLPIGINITRFQTLLALHRSYLTPGDSSSGWTAGAAAYYVGYLQPRTFLLKYNENGTITDAVDCALDPLSETKCTLKSFTVEKGIYQTSNFRVQPTESIVRFPNITNLCPFGEVFNATRFASVYAWNRKRISNCVADYSVLYNSASFSTFKCYGVSPTKLNDLCFTNVYADSFVIRGDEVRQIAPGQTGKIADYNYKLPDDFTGCVIAWNSNNLDSKVGGNYNYLYRLFRKSNLKPFERDISTEIYQAGSTPCNGVEGFNCYFPLQSYGFQPTNGVGYQPYRVVVLSFELLHAPATVCGPKKSTNLVKNKCVNFNFNGLTGTGVLTESNKKFLPFQQFGRDIADTTDAVRDPQTLEILDITPCSFGGVSVITPGTNTSNQVAVLYQDVNCTEVPVAIHADQLTPTWRVYSTGSNVFQTRAGCLIGAEHVNNSYECDIPIGAGICASYQTQTNSPRRARSVASQSIIAYTMSLGAENSVAYSNNSIAIPTNFTISVTTEILPVSMTKTSVDCTMYICGDSTECSNLLLQYGSFCTQLNRALTGIAVEQDKNTQEVFAQVKQIYKTPPIKDFGGFNFSQILPDPSKPSKRSFIEDLLFNKVTLADAGFIKQYGDCLGDIAARDLICAQKFNGLTVLPPLLTDEMIAQYTSALLAGTITSGWTFGAGAALQIPFAMQMAYRFNGIGVTQNVLYENQKLIANQFNSAIGKIQDSLSSTASALGKLQDVVNQNAQALNTLVKQLSSNFGAISSVLNDILSRLDKVEAEVQIDRLITGRLQSLQTYVTQQLIRAAEIRASANLAATKMSECVLGQSKRVDFCGKGYHLMSFPQSAPHGVVFLHVTYVPAQEKNFTTAPAICHDGKAHFPREGVFVSNGTHWFVTQRNFYEPQIITTDNTFVSGNCDVVIGIVNNTVYDPLQPELDSFKEELDKYFKNHTSPDVDLGDISGINASVVNIQKEIDRLNEVAKNLNESLIDLQELGKYEQYIK

SEQ ID NO: 1631 - protein, 1211 aa, Artificial Sequence
  SARS-CoV-2/Hong Kong/case85_VM20002868/2020__EPI_ISL_414519 spike protein (1-1211)
MFVFLVLVPLVSSQCVNLTTRTQLPPAYTNSFTRGVYYPDKVFRSSVLHSTQDLFLPFFSNVTWFHAIHVSGTNGTKRFDNPVLPFNDGVYFASTEKSNIIRGWIFGTTLDSKTQSLLIVNNATNVVIKVCEFQFCNDPFLGVYYHKNNKSWMESEFRVYSSANNCTFEYVSQPFLMDLEGKQGNFKNLREFVFKNIDGYFKIYSKHTPINLVRDLPQGFSALEPLVDLPIGINITRFQTLLALHRSYLTPGDSSSGWTAGAAAYYVGYLQPRTFLLKYNENGTITDAVDCALDPLSETKCTLKSFTVEKGIYQTSNFRVQPTESIVRFPNITNLCPFGEVFNATRFASVYAWNRKRISNCVADYSVLYNSASFSTFKCYGVSPTKLNDLCFTNVYADSFVIRGDEVRQIAPGQTGKIADYNYKLPDDFTGCVIAWNSNNLDSKVGGNYNYLYRLFRKSNLKPFERDISTEIYQAGSTPCNGVEGFNCYFPLQSYGFQPTNGVGYQPYRVVVLSFELLHAPATVCGPKKSTNLVKNKCVNFNFNGLTGTGVLTESNKKFLPFQQFGRDIADTTDAVRDPQTLEILDITPCSFGGVSVITPGTNTSNQVAVLYQDVNCTEVPVAIHADQLTPTWRVYSTGSNVFQTRAGCLIGAEHVNNSYECDIPIGAGICASYQTQTNSPRRARSVASQSIIAYTMSLGAENSVAYSNNSIAIPTNFTISVTTEILPVSMTKTSVDCTMYICGDSTECSNLLLQYGSFCTQLNRALTGIAVEQDKNTQEVFAQVKQIYKTPPIKDFGGFNFSQILPDPSKPSKRSFIEDLLFNKVTLADAGFIKQYGDCLGDIAARDLICAQKFNGLTVLPPLLTDEMIAQYTSALLAGTITSGWTFGAGAALQIPFAMQMAYRFNGIGVTQNVLYENQKLIANQFNSAIGKIQDSLSSTASALGKLQDVVNQNAQALNTLVKQLSSNFGAISSVLNDILSRLDKVEAEVQIDRLITGRLQSLQTYVTQQLIRAAEIRASANLAATKMSECVLGQSKRVDFCGKGYHLMSFPQSAPHGVVFLHVTYVPAQEKNFTTAPAICHDGKAHFPREGVFVSNGTHWFVTQRNFYEPQIITTDNTFVSGNCDVVIGIVNNTVYDPLQPELDSFKEELDKYFKNHTSPDVDLGDISGINASVVNIQKEIDRLNEVAKNLNESLIDLQELGKYEQYIK

SEQ ID NO: 1632 - protein, 1211 aa, Artificial Sequence; identical to SEQ ID NO: 39
  SARS-CoV-2/England/200990660/2020__EPI_ISL_414523 spike protein (1-1211)

SEQ ID NO: 1633 - protein, 1211 aa, Artificial Sequence
  SARS-CoV-2/Australia/NSW09/2020__EPI_ISL_413595 spike protein (1-1211)
MFVFLVLLPLVSSQCVNLTTRTQLPPAYTNSFTRGVYYPDKVFRSSVLHSTQDLFLPFFSNVTWFHAIHVSGTNGTKRFDNPVLPFNDGVYFASTEKSNIIRGWIFGTTLDSKTQSLLIVNNATNVVIKVCEFQFCNDPFLGVYYHKNNKSWMESEFRVYSSANNCTFEYVSQPFLMDLEGKQGNFKNLREFVFKNIDGYFKIYSKHTPINLVRDLPQGFSALEPLVDLPIGINITRFQTLLALHRSYLTPGDSSSGWTAGAAAYYVGYLQPRTFLLKYNENGTITDAVDCALDPLSETKCTLKSFTVEKGIYQTSNFRVQPTESIVRFPNITNLCPFGEVFNATRFASVYAWNRKRISNCVADYSVLYNSASFSTFKCYGVSPTKLNDLCFTNVYADSFVIRGDEVRQIAPGQTGKIADYNYKLPDDFTGCVIAWNSNNLDSKVGGNYNYLYRLFRKSNLKPFERDISTEIYQAGSTPCNGVEGFNCYFPLQSYGFQPTNGVGYQPYRVVVLSFELLHAPATVCGPKKSTNLVKNKCVNFNFNGLTGTGVLTESNKKFLPFQQFGRDIADTTDAVRDPQTLEILDITPCSFGGVSVITPGTNTSNQVAVLYQDVNCTEVPVAIHADQLTPTWRVYSTGSNVFQTRAGCLIGAEHVNNSYECDIPIGAGICASYQTQTNSPRRARSVASQSIIAYTMSLGAENSVAYSNNSIAIPTNFTISVTTEILPVSMTKTSVDCTMYICGDSTECSNLLLQYGSFCTQLNRALTGIAVEQDKNTQEVFAQVKQIYKTPPIKDFGGFNFSQILPDPSKPSKRSFIEDLLFNKVTLADAGFIKQYGDCLGDIAARDLICAQKFNGLTVLPPLLTDEMIAQYTSALLAGTITSGWTFGAGAALQIPFAMQMAYRFNGIGVTQNVLYENQKLIANQFNSAIGKIQDSLSFTASALGKLQDVVNQNAQALNTLVKQLSSNFGAISSVLNDILSRLDKVEAEVQIDRLITGRLQSLQTYVTQQLIRAAEIRASANLAATKMSECVLGQSKRVDFCGKGYHLMSFPQSAPHGVVFLHVTYVPAQEKNFTTAPAICHDGKAHFPREGVFVSNGTHWFVTQRNFYEPQIITTDNTFVSGNCDVVIGIVNNTVYDPLQPELDSFKEELDKYFKNHTSPDVDLGDISGINASVVNIQKEIDRLNEVAKNLNESLIDLQELGKYEQYIK

SEQ ID NO: 1634 - protein, 1211 aa, Artificial Sequence; identical to SEQ ID NO: 31
  SARS-CoV-2/Australia/NSW10/2020__EPI_ISL_413596 spike protein (1-1211)

SEQ ID NO: 1635 - protein, 1211 aa, Artificial Sequence
  SARS-CoV-2/Switzerland/1000477797/2020__EPI_ISL_413023 spike protein (1-1211)
MFVFLVLLPLVSSQCVNLTTRTQLPPAYTNSFTRGVYYPDKVFRSSVLHSTQDLFLPFFSNVTWFHAIHVSGTNGTKRFDNPVLPFNDGVYFASTEKSNIIRGWIFGTTLDSKTQSLLIVNNATNVVIKVCEFQFCNDPFLGVYYHKNNKSWMESEFRVYSSANNCTFEYVSQPFLMDLEGKQGNFKNLREFVFKNIDGYFNIYSKHTPINLVRDLPQGFSALEPLVDLPIGINITRFQTLLALHRSYLTPGDSSSGWTAGAAAYYVGYLQPRTFLLKYNENGTITDAVDCALDPLSETKCTLKSFTVEKGIYQTSNFRVQPTESIVRFPNITNLCPFGEVFNATRFASVYAWNRKRISNCVADYSVLYNSASFSTFKCYGVSPTKLNDLCFTNVYADSFVIRGDEVRQIAPGQTGKIADYNYKLPDDFTGCVIAWNSNNLDSKVGGNYNYLYRLFRKSNLKPFERDISTEIYQAGSTPCNGVEGFNCYFPLQSYGFQPTNGVGYQPYRVVVLSFELLHAPATVCGPKKSTNLVKNKCVNFNFNGLTGTGVLTESNKKFLPFQQFGRDIADTTDAVRDPQTLEILDITPCSFGGVSVITPGTNTSNQVAVLYQGVNCTEVPVAIHADQLTPTWRVYSTGSNVFQTRAGCLIGAEHVNNSYECDIPIGAGICASYQTQTNSPRRARSVASQSIIAYTMSLGAENSVAYSNNSIAIPTNFTISVTTEILPVSMTKTSVDCTMYICGDSTECSNLLLQYGSFCTQLNRALTGIAVEQDKNTQEVFAQVKQIYKTPPIKDFGGFNFSQILPDPSKPSKRSFIEDLLFNKVTLADAGFIKQYGDCLGDIAARDLICAQKFNGLTVLPPLLTDEMIAQYTSALLAGTITSGWTFGAGAALQIPFAMQMAYRFNGIGVTQNVLYENQKLIANQFNSAIGKIQDSLSSTASALGKLQDVVNQNAQALNTLVKQLSSNFGAISSVLNDILSRLDKVEAEVQIDRLITGRLQSLQTYVTQQLIRAAEIRASANLAATKMSECVLGQSKRVDFCGKGYHLMSFPQSAPHGVVFLHVTYVPAQEKNFTTAPAICHDGKAHFPREGVFVSNGTHWFVTQRNFYEPQIITTDNTFVSGNCDVVIGIVNNTVYDPLQPELDSFKEELDKYFKNHTSPDVDLGDISGINASVVNIQKEIDRLNEVAKNLNESLIDLQELGKYEQYIK

SEQ ID NO: 1636 - protein, 1211 aa, Artificial Sequence
  SARS-CoV-2/Belgium/BA-02291/2020__EPI_ISL_415159 spike protein (1-1211)
MFVFLVLLPLVSSQCVNLTTRTQLPPAYTNSFTRGVYYPDKVFRSSVLHSTQDLFLPFFSNVTWFHAIHVSGTNGTKRFDNPVLPFNDGVYFASTEKSNIIRGWIFGTTLDSKTQSLLIVNNATNVVIKVCEFQFCNDPFLGVYYHKNNKSWMESEFRVYSSANNCTFEYVSQPFLMDLEGKQGNFKNLREFVFKNIDGYFKIYSKHTPINLVRDLPQGFSALEPLVDLPIGINITRFQTLLALHRSYLTPGDSSSGWTAGAAAYYVGYLQPRTFLLKYNENGTITDAVDCALDPLSETKCTLKSFTVEKGIYQTSNFRVQPTESIVRFPNITNLCPFGEVFNATRFASVYAWNRKRISNCVADYSVLYNSASFSTFKCYGVSPTKLNDLCFTNVYADSFVIRGDEVRQIAPGQTGKIADYNYKLPDDFTGCVIAWNSNNLDSKVGGNYNYLYRLFRRSNLKPFERDISTEIYQAGSTPCNGVEGFNCYFPLQSYGFQPTNGVGYQPYRVVVLSFELLPAPATVCGPKKSTNLVKNKCVNFNFNGLTGTGVLTESNKKFLPFQQFGRDIADTTDAVRDPQTLEILDITPCSFGGVSVITPGTNTSNQVAVLYQGVNCTEVPVAIHADQLTPTWRVYSTGSNVFQTRAGCLIGAEHVNNSYECDIPIGAGICASYQTQTNSPRRARSVASQSIIAYTMSLGAENSVAYSNNSIAIPTNFTISVTTEILPVSMTKTSVDCTMYICGDSTECSNLLLQYGSFCTQLNRALTGIAVEQDKNTQEVFAQVKQIYKTPPIKDFGGFNFSQILPDPSKPSKRSFIEDLLFNKVTLADAGFIKQYGDCLGDIAARDLICAQKFNGLTVLPPLLTDEMIAQYTSALLAGTITSGWTFGAGAALQIPFAMQMAYRFNGIGVTQNVLYENQKLIANQFNSAIGKIQDSLSSAAPALGKLQDVVNQNAQALNTLVKQLSSNFGAISSVLNDILSRLDKVEAEVQIDRLITGRLQSLQTYVTQQLIRAAEIRASANLAATKMSECVLGQSKRVDFCGKGYHLMSFPQSAPHGVVFLHVTYVPAQEKNFTTAPAICHDGKAHFPREGVFVSNGTHWFVTQRNFYEPQIITTDNTFVSGNCDVVIGIVNNTVYDPLQPELDSFKEELDKYFKNHTSPDVDLGDISGINASVVNIQKEIDRLNEVAKNLNESLIDLQELGKYEQYIK

SEQ ID NO: 1637 - protein, 1211 aa, Artificial Sequence
  SARS-CoV-2/USA/WA8-UW5/2020__EPI_ISL_413486 spike protein (1-1211)
MFVFLVLLPLVSSQCVNLTTRTQLPPAYTNSFTRGVYYPDKVFRSSVLHSTQDLFLPFFSNVTWFHAIHVSGTNGTKRFDNPVLPFNDGVYFASTEKSNIIRGWIFGTTLDSKTQSLLIVNNATNVVIKVCEFQFCNDPFLGVYYHKNNKSWMESEFRVYSSANNCTFEYVSQPFLMDLEGKQGNFKNLREFVFKNIDGYFKIYSKHTPINLVRDLPQGFSALEPLVDLPIGINITRFQTLLALHRSYLTPGDSSSGWTAGAAAYYVGYLQPRTFLLKYNENGTITDAVDCALDPLSETKCTLKSFTVEKGIYQTSNFRVQPTESIVRFPNITNLCPFGEVFNATRFASVYAWNRKRISNCVADYSVLYNSASFSTFKCYGVSPTKLNDLCFTNVYADSFVIRGDEVRQIAPGQTGKIADYNYKLPDDFTGCVIAWNSNNLDSKVGGNYNYLYRLFRKSNLKPFERDISTEIYQAGSTPCNGVEGFNCYFPLQSYGFQPTNGVGYQPYRVVVLSFELLHAPATVCGPKKSTNLVKNKCVNFNFNGLTGTGVLTESNKKFLPFQQFGRDIADTTDAVRDPQTLEILDITPCSFGGVSVITPGTNTSNQVAVLYQDVNCTEVPVAIHADQLTPTWRVYSTGSNVFQTRAGCLIGAEYVNNSYECDIPIGAGICASYQTQTNSPRRARSVASQSIIAYTMSLGAENSVAYSNNSIAIPTNFTISVTTEILPVSMTKTSVDCTMYICGDSTECSNLLLQYGSFCTQLNRALTGIAVEQDKNTQEVFAQVKQIYKTPPIKDFGGFNFSQILPDPSKPSKRSFIEDLLFNKVTLADAGFIKQYGDCLGDIAARDLICAQKFNGLTVLPPLLTDEMIAQYTSALLAGTITSGWTFGAGAALQIPFAMQMAYRFNGIGVTQNVLYENQKLIANQFNSAIGKIQDSLSSTASALGKLQDVVNQNAQALNTLVKQLSSNFGAISSVLNDILSRLDKVEAEVQIDRLITGRLQSLQTYVTQQLIRAAEIRASANLAATKMSECVLGQSKRVDFCGKGYHLMSFPQSAPHGVVFLHVTYVPAQEKNFTTAPAICHDGKAHFPREGVFVSNGTHWFVTQRNFYEPQIITTDNTFVSGNCDVVIGIVNNTVYDPLQPELDSFKEELDKYFKNHTSPDVDLGDISGINASVVNIQKEIDRLNEVAKNLNESLIDLQELGKYEQYIK

SEQ ID NO: 1638 - protein, 1211 aa, Artificial Sequence
  SARS-CoV-2/England/20102000506/2020__EPI_ISL_415147 spike protein (1-1211)
MFVFLVLLPLVSSQCVNLTTRTQLPPAYTNSFTRGVYYPDKVFRSSVLHSTQDLFLPFFSNVTWFHAIHVSGTNGTKRFDNPVLPFNDGVYFASTEKSNIIRGWIFGTTLDSKTQSLLIVNNATNVVIKVCEFQFCNDPFLGVYYHKNNKSWMESEFRVYSSANNCTFEYVSQPFLMDLEGKQGNFKNLREFVFKNIDGYFKIYSKHTPINLVRDLPQGFSALEPLVDLPIGINITRFQTLLALHRSYLTPGDSSSGWTAGAAAYYVGYLQPRTFLLKYNENGTITDAVDCALDPLSETKCTLKSFTVEKGIYQTSNFRVQPTESIVRFPNITNLCPFGEVFNATRFASVYAWNRKRISNCVADYSVLYNSASFSTFKCYGVSPTKLNDLCFTNVYADSFVIRGDEVRQIAPGQTGKIADYNYKLPDDFTGCVIAWNSNNLDSKVGGNYNYLYRLFRKSNLKPFERDISTEIYQAGSTPCNGVEGFNCYFPLQSYGFQPTNGVGYQPYRVVVLSFELLHAPATVCGPKKSTNLVKNKCVNFNFNGLTGTGVLTESNKKFLPFQQFGRDIADTTDAVRDPQTLEILDITPCSFGGVSVITPGTNTSNQVAVLYQGVNCTEVPVAIHADQLTPTWRVYSTGSNVFQTRAGCLIGAEHVNNSYECDIPIGAGICASYQTQTNSPRRARSVASQSIIAYTMSLGAENSVAYSNNSIAIPTNFTISVTTEILPVSMTKTSVDCTMYICGDSTECSNLLLQYGSFCTQLNRALTGIAVEQDKNTQEVFAQVKQIYKTPPIKDFGGFNFSQILPDPSKPSKRSFIEDLLFNKVTLADAGFIKQYGYCLGDIAARDLICAQKFNGLTVLPPLLTDEMIAQYTSALLAGTITSGWTFGAGAALQIPFAMQMAYRFNGIGVTQNVLYENQKLIANQFNSAIGKIQDSLSSTASALGKLQDVVNQNAQALNTLVKQLSSNFGAISSVLNDILSRLDKVEAEVQIDRLITGRLQSLQTYVTQQLIRAAEIRASANLAATKMSECVLGQSKRVDFCGKGYHLMSFPQSAPHGVVFLHVTYVPAQEKNFTTAPAICHDGKAHFPREGVFVSNGTHWFVTQRNFYEPQIITTDNTFVSGNCDVVIGIVNNTVYDPLQPELDSFKEELDKYFKNHTSPDVDLGDISGINASVVNIQKEIDRLNEVAKNLNESLIDLQELGKYEQYIK

SEQ ID NO: 1639 - protein, 1211 aa, Artificial Sequence
  SARS-CoV-2/Belgium/VAG-03013/2020__EPI_ISL_415155 spike protein (1-1211)
MFVFLVLLPLVSSQCVNLTTRTQLPPAYTNSFTRGVYYPDKVFRSSVLHSTQDLFLPFFSNVTWFHAIHVSGTNGTKRFDNPVLPFNDGVYFASTEKSNIIRGWIFGTTLDSKTQSLLIVNNATNVVIKVCEFQFCNDPFLGVYYHKNNKSWMESEFRVYSSANNCTFEYVSQPFLMDLEGKQGNFKNLREFVFKNIDGYFKIYSKHTPINLVRDLPQGFSALEPLVDLPIGINITRFQTLLALHRSYLTPGDSSSGWTAGAAAYYVGYLQPRTFLLKYNENGTITDAVDCALDPLSETKCTLKSFTVEKGIYQTSNFRVQPTESIVRFPNITNLCPFGEVFNATRFASVYAWNRKRISNCVADYSVLYNSASFSTFKCYGVSPTKLNDLCFTNVYADSFVIRGDEVRQIAPGQTGKIADYNYKLPDDFTGCVIAWNSNNLDSKVGGNYNYLYRLFRKSNLKPFERDISTEIYQAGSTPCNGVEGFNCYFPLQSYGFQPTNGVGYQPYRVVVLSFELLHAPATVCGPKKSTNLVKNKCVNFNFNGLTGTGVLTESNKKFLPFQQFGRDIADTTDAVRDPQTLEILDITPCSFGGVSVITPGTNTSNQVAVLYQGVNCTEVPVAIHADQLTPTWRVYSTGSNVFQTRAGCLIGAEHVNNSYECDIPIGAGICASYQTQTNSPRRARSVASQSIIAYTMSLGAENSVAYSNNSIAIPTNFTISVTTEILPVSMTKTSVDCTMYICGDSTECSNLLLQYGSFCTQLNRALTGIAVEQDKNTQEVFAQVKQIYKTPPIKDFGGFNFSQILPDPSKPSKRSFIEDLLFNKVTLADAGFIKQYGDCLGDIAARDLICAQKFNGLTVLPPLLTDEMIAQYTSALLAGTITSGWTFGAGAALQIPFAMQMAYRFNGIGVTQNVLYENQKLIANQFNSAIGKIQDSLSSTATALGKLQDVVNQNAQALNTLVKQLSSNFGAISSVLNDILSRLDKVEAEVQIDRLITGRLQSLQTYVTQQLIRAAEIRASANLAATKMSECVLGQSKRVDFCGKGYHLMSFPQSAPHGVVFLHVTYVPAQEKNFTTAPAICHDGKAHFPREGVFVSNGTHWFVTQRNFYEPQIITTDNTFVSGNCDVVIGIVNNTVYDPLQPELDSFKEELDKYFKNHTSPDVDLGDISGINASVVNIQKEIDRLNEVAKNLNESLIDLQELGKYEQYIK

SEQ ID NO: 1640 - protein, 1211 aa, Artificial Sequence
  SARS-CoV-2/Belgium/BC-03016/2020__EPI_ISL_415157 spike protein (1-1211)
MFVFLVLLPLVSSQCVNLTTRTQLPPAYTNSFTRGVYYPDKVFRSSVLHSTQDLFLPFFSNVTWFHAIHVSGTNGTKRFDNPVLPFNDGVYFASTEKSNIIRGWIFGTTLDSKTQSLLIVNNATNVVIKVCEFQFCNDPFLGVYYHKNNKSWMESEFRVYSSANNCTFEYVSQPFLMDLEGKQGNFKNLREFVFKNIDGYFKIYSKHTPINLVRDLPQGFSALEPLVDLPIGINITRFQTLLALHRSYLTPGDSSSGWTAGAAAYYVGYLQPRTFLLKYNENGTITDAVDCALDPLSETKCTLKSFTVEKGIYQTSNFRVQPTESIVRFPNITNLCPFGEVFNATRFASVYAWNRKRISNCVADYSVLYNSASFSTFKCYGVSPTKLNDLCFTNVYADSFVIRGDEVRQIAPGQTGKIADYNYKLPDDFTGCVIAWNSNNLDSKVGGNYNYLYRLFRKSNLKPFERDISTEIYQAGSTPCNGVEGFNCYFPLQSYGFQPTNGVGYQPYRVVVLSFELLHAPATVCGPKKSTNLVKNKCVNFNFNGLTGTGVLTESNKKFLPFQQFGRDIADTTDAVRDPQTLEILDITPCSFGGVSVITPGTNTSNQVAVLYQGVNCTEVPVAIHADQLTPTWRVYSTGSNVFQTRAGCLIGAEHVNNSYECDIPIGAGICASYQTQTNSPRRARSVASQSIIAYTMSLGAENSVAYSNNSIAIPTNFTISVTTEILPVSMTKTSVDCTMYICGDSTECSNLLLQYGSFCTQLNRALTGIAVEQDKNTQEVFAQVKQIYKTPPIKDFGGFNFSQILPDPSKPSKRSFIEDLLFNKVTLADAGFIKQYGDCLGDIAARDLICAQKFNGLTVLPPLLTDEMIAQYTSALLAGTITSGWTFGAGAALQIPFAMQMAYRFNGIGVTQNVLYENQKLIANQFNSAIGKIQDSLSSTAPALGKLQDVVNQNAQALNTLVKQLSSNFGAISSVLNDILSRLDKVEAEVQIDRLITGRLQSLQTYVTQQLIRAAEIRASANLAATKMSECVLGQSKRVDFCGKGYHLMSFPQSAPHGVVFLHVTYVPAQEKNFTTAPAICHDGKAHFPREGVFVSNGTHWFVTQRNFYEPQIITTDNTFVSGNCDVVIGIVNNTVYDPLQPELDSFKEELDKYFKNHTSPDVDLGDISGINASVVNIQKEIDRLNEVAKNLNESLIDLQELGKYEQYIK

SEQ ID NO: 1641 - protein, 1211 aa, Artificial Sequence
  SARS-CoV-2/Germany/BavPat3/2020__EPI_ISL_414521 spike protein (1-1211)
MFVFLVLLPLVSSQCVNLTTRTQLPPAYTNSFTRGVYYPDKVFRSSVLHSTQDLFLPFFSNVTWFHAIHVSGTNGTKRFDNPVLPFNDGVYFASTEKSNIIRGWIFGTTLDSKTQSLLIVNNATNVVIKVCEFQFCNDPFLGVYYHKNNKSWMESEFRVYSSANNCTFEYVSQPFLMDLEGKQGNFKNLREFVFKNIDGYFKIYSKHTPINLVRDLPQGFSALEPLVDLPIGINITRFQTLLALHRSYLTPGDSSSGWTAGAAAYYVGYLQPRTFLLKYNENGTITDAVDCALDPLSETKCTLKSFTVEKGIYQTSNFRVQPTESIVRFPNITNLCPFGEVFNATRFASVYAWNRKRISNCVADYSVLYNSASFSTFKCYGVSPTKLNDLCFTNVYADSFVIRGDEVRQIAPGQTGKIADYNYKLPDDFTGCVIAWNSNNLDSKVGGNYNYLYRLFRKSNLKPFERDISTEIYQAGSTPCNGVEGFNCYFPLQSYGFQPTNGVGYQPYRVVVLSFELLHAPATVCGPKKSTNLVKNKCVNFNFNGLTGTGVLTESNKKFLPFQQFGRDIADTTDAVRDPQTLEILDITPCSFGGVSVITPGTNTSNQVAVLYQDVNCTEVPVAIHADQLTPTWRVYSTGSNVFQTRAGCLIGAEHVNNSYECDIPIGAGICASYQTQTNSPRRARSVASQSIIAYTMSLGAENSVAYSNNSIAIPTNFTISVTTEILPVSMTKTSVDCTMYICGDSTECSNLLLQYGSFCTQLNRALTGIAVEQDKNTQQVFAQVKQIYKTPPIKDFGGFNFSQILPDPSKPSKRSFIEDLLFNKVTLADAGFIKQYGDCLGDIAARDLICAQKFNGLTVLPPLLTDEMIAQYTSALLAGTITSGWTFGAGAALQIPFAMQMAYRFNGIGVTQNVLYENQKLIANQFNSAIGKIQDSLSSTASALGKLQDVVNQNAQALNTLVKQLSSNFGAISSVLNDILSRLDKVEAEVQIDRLITGRLQSLQTYVTQQLIRAAEIRASANLAATKMSECVLGQSKRVDFCGKGYHLMSFPQSAPHGVVFLHVTYVPAQEKNFTTAPAICHDGKAHFPREGVFVSNGTHWFVTQRNFYEPQIITTDNTFVSGNCDVVIGIVNNTVYDPLQPELDSFKEELDKYFKNHTSPDVDLGDISGINASVVNIQKEIDRLNEVAKNLNESLIDLQELGKYEQYIK

SEQ ID NO: 1642 - protein, 1211 aa, Artificial Sequence
  SARS-CoV-2/France/HF1805/2020__EPI_ISL_414628 spike protein (1-1211)
MFVFLVLLPLVSSQCVNLTTRTQLPPAYTNSFTRGVYYPDKVFRSSVLHSTQDLFLPFFSNVTWFHAIHVSGTNGTKRFDNPVLPFNDGVYFASTEKSNIIRGWIFGTTLDSKTQSLLIVNNATNVVIKVCEFQFCNDPFLGVYYHKNNKSWMESEFRVYSSANNCTFEYVSQPFLMDLEGKQGNFKNLREFVFKNIDGYFKIYSKHTPINLVRDLPQGFSALEPLVDLPIGINITRFQTLLALHRSYLTPGDSSSGWTAGAAAYYVGYLQPRTFLLKYNENGTITDAVDCALDPLSETKCTLKSFTVEKGIYQTSNFRVQPTESIVRFPNITNLCPFGEVFNATRFASVYAWNRKRISNCVADYSVLYNSASFSTFKCYGVSPTKLNDLCFTNVYADSFVIRGDEVRQIAPGQTGKIADYNYKLPDDFTGCVIAWNSNNLDSKVGGNYNYLYRLFRKSNLKPFERDISTEIYQAGSTPCNGVEGFNCYFPLQSYGFQPTNGVGYQPYRVVVLSFELLHAPATVCGPKKSTNLVKNKCVNFNFNGLTGTGVLTESNKKFLPFQQFGRDIADTTDAVRDPQTLEILDITPCSFGGVSVITPGTNTSNQVAVLYQGVNCTEVPVAIHADQLTPTWRVYSTGSNVFQTRAGCLIGAEHVNNSYECDIPIGAGICASYQTQTNSPRRARSVASQSIIAYTMSLGAENSVAYSNNSIAIPTNFTISVTTEILPVSMTKTSVDCTMYICGDSTECSNLLLQYGSFCTQLNRALTGIAVEQDKNTQEVFAQVKQIYKTPPIKDFGGFNFSQILPDPSKPSKRSFIEDLLFNKVTLADAGFIKQYGDCLGDIAARDLICAQKFNGLTVLPPLLTDEMIAQYTSALLAGTITSGWTFGAGAALQIPFAMQMAYRFNGIGVTQNVLYENQKLIANQFNSAIGKIQDSLSSTASALGKLQDVVNQNAQALNTLVKQLSSNFGAISSVLNDILSRLDKVEAEVQIDRLITGRLQSLQTYVTQQLIRAAEIRASANLAATKMSECVLGQSKRVDFCGKGYHLMSFPQSAPHGVVFLHVTYVPAQEKNFTTAPAICHDGKAHFPREGVFVSNGTHWFVTQRNFYEPQIITTDNTFVSGNCDVVIGVVNNTVYDPLQPELDSFKEELDKYFKNHTSPDVDLGDISGINASVVNIQKEIDRLNEVAKNLNESLIDLQELGKYEQYIK

SEQ ID NO: 1643 - protein, 1211 aa, Artificial Sequence
  SARS-CoV-2/Netherlands/ZuidHolland_9/2020__EPI_ISL_414445 spike protein (1-1211)
MFVFLVLLPLVSSQCVNLTTRTQLPPAYTNSFTRGVYYPDKVFRSSVLHSTQDLFLPFFSNVTWFHAIHVSGTNGTKRFDNPVLPFNDGVYFASTEKSNIIRGWIFGTTLDSKTQSLLIVNNATNVVIKVCEFQFCNDPFLGVYYHKNNKSWMESEFRVYSSANNCTFEYVSQPFLMDLEGKQGNFKNLREFVFKNIDGYFKIYSKHTPINLVRDLPQGFSALEPLVDLPIGINITRFQTLLALHRSYLTPGDSSSGWTAGAAAYYVGYLQPRTFLLKYNENGTITDAVDCALDPLSETKCTLKSFTVEKGIYQTSNFRVQPTESIVRFPNITNLCPFGEVFNATRFASVYAWNRKRISNCVADYSVLYNSASFSTFKCYGVSPTKLNDLCFTNVYADSFVIRGDEVRQIAPGQTGKIADYNYKLPDDFTGCVIAWNSNNLDSKVGGNYNYLYRLFRKSNLKPFERDISTEIYQAGSTPCNGVEGFNCYFPLQSYGFQPTNGVGYQPYRVVVLSFELLHAPATVCGPKKSTNLVKNKCVNFNFNGLTGTGVLTESNKKFLPFQQFGRDIADTTDAVRDPQTLEILDITPCSFGGVSVITPGTNTSNQVAVLYQGVNCTEVPVAIHADQLTPTWRVYSTGSNVFQTRAGCLIGAEHVNNSYECDIPIGAGICASYQTQTNSPRRARSVASQSIIAYTMSLGAENSVAYSNNSIAIPTNFTISVTTEILPVSMTKTSVDCTMYICGDSTECSNLLLQYGSFCTQLNRALTGIAVEQDKNTQEVFAQVKQIYKTPPIKDFGGFNFSQILPDPSKPSKRSFIEDLLFNKVTLADAGFIKQYGDCLGDIAARDLICVQKFNGLTVLPPLLTDEMIAQYTSALLAGTITSGWTFGAGAALQIPFAMQMAYRFNGIGVTQNVLYENQKLIANQFNSAIGKIQDSLSSTASALGKLQDVVNQNAQALNTLVKQLSSNFGAISSVLNDILSRLDKVEAEVQIDRLITGRLQSLQTYVTQQLIRAAEIRASANLAATKMSECVLGQSKRVDFCGKGYHLMSFPQSAPHGVVFLHVTYVPAQEKNFTTAPAICHDGKAHFPREGVFVSNGTHWFVTQRNFYEPQIITTDNTFVSGNCDVVIGIVNNTVYDPLQPELDSFKEELDKYFKNHTSPDVDLGDISGINASVVNIQKEIDRLNEVAKNLNESLIDLQELGKYEQYIK

SEQ ID NO: 1644 - protein, 1211 aa, Artificial Sequence
  SARS-CoV-2/Finland/FIN03032020A/2020__EPI_ISL_413602 spike protein (1-1211)
MFVFLVLLPLVSSQCVNLTTRTQLPPAYTNSFTRGVYYPDKVFRSSVLHSTQDLFLPFFSNVTWFHAIHVSGTNGTKRFDNPVLPFNDGVYFASTEKSNIIRGWIFGTTLDSKTQSLLIVNNATNVVIKVCEFQFCNDPFLGVYYHKNNKSWMESEFRVYSSANNCTFEYVSQPFLMDLEGKQGNFKNLREFVFKNIDGYFKIYSKHTPINLVRDLPQGFSALEPLVDLPIGINITRFQTLLALHRSYLTPGDSSSGWTAGAAAYYVGYLQPRTFLLKYNENGTITDAVDCALDPLSETKCTLKSFTVEKGIYQTSNFRVQPTESIVRFPNITNLCPFGEVFNATRFASVYAWNRKRISNCVADYSVLYNSASFSTFKCYGVSPTKLNDLCFTNVYADSFVIRGDEVRQIAPGQTGKIADYNYKLPDDFTGCVISWNSNNLDSKVGGNYNYLYRLFRKSNLKPFERDISTEIYQAGSTPCNGVEGFNCYFPLQSYGFQPTNGVGYQPYRVVVLSFELLHAPATVCGPKKSTNLVKNKCVNFNFNGLTGTGVLTESNKKFLPFQQFGRDIADTTDAVRDPQTLEILDITPCSFGGVSVITPGTNTSNQVAVLYQGVNCTEVPVAIHADQLTPTWRVYSTGSNVFQTRAGCLIGAEHVNNSYECDIPIGAGICASYQTQTNSPRRARSVASQSIIAYTMSLGAENSVAYSNNSIAIPTNFTISVTTEILPVSMTKTSVDCTMYICGDSTECSNLLLQYGSFCTQLNRALTGIAVEQDKNTQEVFAQVKQIYKTPPIKDFGGFNFSQILPDPSKPSKRSFIEDLLFNKVTLADAGFIKQYGDCLGDIAARDLICAQKFNGLTVLPPLLTDEMIAQYTSALLAGTITSGWTFGAGAALQIPFAMQMAYRFNGIGVTQNVLYENQKLIANQFNSAIGKIQDSLSSTASALGKLQDVVNQNAQALNTLVKQLSSNFGAISSVLNDILSRLDKVEAEVQIDRLITGRLQSLQTYVTQQLIRAAEIRASANLAATKMSECVLGQSKRVDFCGKGYHLMSFPQSAPHGVVFLHVTYVPAQEKNFTTAPAICHDGKAHFPREGVFVSNGTHWFVTQRNFYEPQIITTDNTFVSGNCDVVIGIVNNTVYDPLQPELDSFKEELDKYFKNHTSPDVDLGDISGINASVVNIQKEIDRLNEVAKNLNESLIDLQELGKYEQYIK

SEQ ID NO: 1645 - protein, 1211 aa, Artificial Sequence
  SARS-CoV-2/France/GE1977/2020__EPI_ISL_414632 spike protein (1-1211)
MFVFLVLLPLVSSQCVNLTTRTQLPPAYTNSFTRGVYYPDKVFRSSVLHSTQDLFLPFFSNVTWFHAIHVSGTNGTKRFDNPVLPFNDGVYFASTEKSNIIRGWIFGTTLDSKTQSLLIVNNATNVVIKVCEFQFCNDPFLGVYYHKNNKSWMESEFRVYSSANNCTFEYVSQPFLMDLEGKQGNFKNLREFVFKNIDGYFKIYSKHTPINLVRDLPQGFSALEPLVDLPIGINITRFQTLLALHRSYLTPGDSSSGWTAGAAAYYVGYLQPRTFLLKYNENGTITDAVDCALDPLSETKCTLKSFTVEKGIYQTSNFRVQPTESIVRFPNITNLCPFGEVFNATRFASVYAWNRKRISNCVADYSVLYNSASFSTFKCYGVSPTKLNDLCFTNVYADSFVIRGDEVRQIAPGQTGKIADYNYKLPDDFTGCVIAWNSNNLDSKVGGNYNYLYRLFRKSNLKPFERDISTEIYQAGSTPCNGVEGFNCYFPLQSYGFQPTNGVGYQPYRVVVLSFELLHAPATVCGPKKSTNLVKNKCVNFNFNGLTGTGVLTESNKKFLPFQQFGRDIADTTDAVRDPQTLEILDITPCSFGGVSVITPGTNTSNQVAVLYQGVNCTEVPVAIHADQLTPTWRVYSTGSNVFQTRAGCLIGAEHVNNSYECDIPIGAGICASYQTQTNSPRRARSVASQSIIAYTMSLGAENSVAYSNNSIAIPTNFTISVTTEILPVSMTKTSVDCTMYICGDSTECSNLLLQYGSFCTQLNRALTGIAVEQDKNTQEVFAQVKQIYKTPPIKDFGGFNFSQILPDPSKPSKRSFIEDLLFNKVTLADAGFIKQYGDCLGDIAARDLICAQKFNGLTVLPPLLTDEMIAQYTSALLAGTITSGWTFGAGAALQIPFAMQMAYRFNGIGVTQNVLYENQKLIANQFNSAIGKIQDSLFSTASALGKLQDVVNQNAQALNTLVKQLSSNFGAISSVLNDILSRLDKVEAEVQIDRLITGRLQSLQTYVTQQLIRAAEIRASANLAATKMSECVLGQSKRVDFCGKGYHLMSFPQSAPHGVVFLHVTYVPAQEKNFTTAPAICHDGKAHFPREGVFVSNGTHWFVTQRNFYEPQIITTDNTFVSGNCDVVIGIVNNTVYDPLQPELDSFKEELDKYFKNHTSPDVDLGDISGINASVVNIQKEIDRLNEVAKNLNESLIDLQELGKYEQYIK

SEQ ID NO: 1646 - protein, 1211 aa, Artificial Sequence
  SARS-CoV-2/Finland/FIN-313/2020__EPI_ISL_414641 spike protein (1-1211)
MFVFLVLLPLVSSQCVNLTTRTQLPPAYTNSFTRGVYYPDKVFRSSVLHSTQDLFLPFFSNVTWFHAIHVSGTNGTKRFDNPVLPFNDGVYFASTEKSNIIRGWIFGTTLDSKTQSLLIVNNATNVVIKVCEFQFCNDPFLGVYYHKNNKSWMESEFRVYSSANNCTFEYVSQPFLMDLEGKQGNFKNLREFVFKNIDGYFKIYSKHTPINLVRDLPQGFSALEPLVDLPIGINITRFKTLLALHRSYLTPGDSSSGWTAGAAAYYVGYLQPRTFLLKYNENGTITDAVDCALDPLSETKCTLKSFTVEKGIYQTSNFRVQPTESIVRFPNITNLCPFGEVFNATRFASVYAWNRKRISNCVADYSVLYNSASFSTFKCYGVSPTKLNDLCFTNVYADSFVIRGDEVRQIAPGQTGKIADYNYKLPDDFTGCVIAWNSNNLDSKVGGNYNYLYRLFRKSNLKPFERDISTEIYQAGSTPCNGVEGFNCYFPLQSYGFQPTNGVGYQPYRVVVLSFELLHAPATVCGPKKSTNLVKNKCVNFNFNGLTGTGVLTESNKKFLPFQQFGRDIADTTDAVRDPQTLEILDITPCSFGGVSVITPGTNTSNQVAVLYQGVNCTEVPVAIHADQLTPTWRVYSTGSNVFQTRAGCLIGAEHVNNSYECDIPIGAGICASYQTQTNSPRRARSVASQSIIAYTMSLGAENSVAYSNNSIAIPTNFTISVTTEILPVSMTKTSVDCTMYICGDSTECSNLLLQYGSFCTQLNRALTGIAVEQDKNTQEVFAQVKQIYKTPPIKDFGGFNFSQILPDPSKPSKRSFIEDLLFNKVTLADAGFIKQYGDCLGDIAARDLICAQKFNGLTVLPPLLTDEMIAQYTSALLAGTITSGWTFGAGAALQIPFAMQMAYRFNGIGVTQNVLYENQKLIANQFNSAIGKIQDSLSSTASALGKLQDVVNQNAQALNTLVKQLSSNFGAISSVLNDILSRLDKVEAEVQIDRLITGRLQSLQTYVTQQLIRAAEIRASANLAATKMSECVLGQSKRVDFCGKGYHLMSFPQSAPHGVVFLHVTYVPAQEKNFTTAPAICHDGKAHFPREGVFVSNGTHWFVTQRNFYEPQIITTDNTFVSGNCDVVIGIVNNTVYDPLQPELDSFKEELDKYFKNHTSPDVDLGDISGINASVVNIQKEIDRLNEVAKNLNESLIDLQELGKYEQYIK

SEQ ID NO: 1647 - protein, 1211 aa, Artificial Sequence
  SARS-CoV-2/Netherlands/ZuidHolland_2/2020__EPI_ISL_414556 spike protein (1-1211)
MFVFLVLLPLVSSQCVNLTTRTQLPPAYTNSFTRGVYYPDKVFRSSVLHSTQDLFLPFFSNVTWFHAIHVSGTNGTKRFDNPVLPFNDGVYFASTEKSNIIRGWIFGTTLDSKTQSLLIVNNATNVVIKVCEFQFCNDPFLGVYYHKNNKSWMESEFRVYSSANNCTFEYVSQPFLMDLEGKQGNFKNLREFVFKNIDGYFKIYSKHTPINLVRDLPQGFSALEPLVDLPIGINITRFQTLLALHRSYLTPGDSSSGWTAGAAAYYVGYLQPRTFLLKYNENGTITDAVDCALDPLSETKCTLKSFTVEKGIYQTSNFRVQPTESIVRFPNITNLCPFGEVFNATRFASVYAWNRKRISNCVADYSVLYNSASFSTFKCYGVSPTKLNDLCFTNVYADSFVIRGDEVRQIAPGQTGKIADYNYKLPDDFTGCVIAWNSNNLDSKVGGNYNYLYRLFRKSNLKPFERDISTEIYQAGSTPCNGVEGFNCYFPLQSYGFQPTNGVGYQPYRVVVLSFELLHAPATVCGPKKSTNLVKNKCVNFNFNGLTGTGVLTESNKKFLPFQQFGRDIADTTDAVRDPQTLEILDITPCSFGGVSVITPGTNTSNQVAVLYQGVNCTEVPVAIHADQLTPTWRVYSTGSNVFQTRAGCLIGAEHVNNSYECDIPIGAGICASYQTQTNSPRRARSVASQSIIAYTMSLGAENSVAYSNNSIAIPTNFTISVTTEILPVSMTKTSVDCTMYICGDSTECSNLLLQYGSFCTQLNRALTGIALEQDKNTQEVFAQVKQIYKTPPIKDFGGFNFSQILPDPSKPSKRSFIEDLLFNKVTLADAGFIKQYGDCLGDIAARDLICAQKFNGLTVLPPLLTDEMIAQYTSALLAGTITSGWTFGAGAALQIPFAMQMAYRFNGIGVTQNVLYENQKLIANQFNSAIGKIQDSLSSTASALGKLQDVVNQNAQALNTLVKQLSSNFGAISSVLNDILSRLDKVEAEVQIDRLITGRLQSLQTYVTQQLIRAAEIRASANLAATKMSECVLGQSKRVDFCGKGYHLMSFPQSAPHGVVFLHVTYVPAQEKNFTTAPAICHDGKAHFPREGVFVSNGTHWFVTQRNFYEPQIITTDNTFVSGNCDVVIGIVNNTVYDPLQPELDSFKEELDKYFKNHTSPDVDLGDISGINASVVNIQKEIDRLNEVAKNLNESLIDLQELGKYEQYIK

SEQ ID NO: 1648 - protein, 1211 aa, Artificial Sequence
  SARS-CoV-2/USA/WA-UW31/2020__EPI_ISL_414618 spike protein (1-1211)
MFVFLVLLPLVSSQCVNLTTRTQLPPAYTNSFTRGVYYPDKVFRSSVLHSTQDLFLPFFSNVTWFHAIHVSGTNGTKRFDNPVLPFNDGVYFASTEKSNIIRGWIFGTTLDSKTQSLLIVNNATNVVIKVCEFQFCNDPFLGVYYHKNNKSWMESEFRVYSSANNCTFEYVSQPFLMDLEGKQGNFKNLREFVFKNIDGYFKIYSKHTPINLVRDLPQGFSALEPLVDLPIGINITRFQTLLALHRSYLTPGDSSSGWTAGAAAYYVGYLQPRTFLLKYNENGTITDAVDCALDPLSETKCTLKSFTVEKGIYQTSNFRVQPTESIVRFPNITNLCPFGEVFNATRFASVYAWNRKRISNCVADYSVLYNSASFSTFKCYGVSPTKLNDLCFTNVYADSFVIRGDEVRQIAPGQTGKIADYNYKLPDDFTGCVIAWNSNNLDSKVGGNYNYLYRLFRKSNLKPFERDISTEIYQAGSTPCNGAEGFNCYFPLQSYGFQPTNGVGYQPYRVVVLSFELLHAPATVCGPKKSTNLVKNKCVNFNFNGLTGTGVLTESNKKFLPFQQFGRDIADTTDAVRDPQTLEILDITPCSFGGVSVITPGTNTSNQVAVLYQDVNCTEVPVAIHADQLTPTWRVYSTGSNVFQTRAGCLIGAEHVNNSYECDIPIGAGICASYQTQTNSPRRARSVASQSIIAYTMSLGAENSVAYSNNSIAIPTNFTISVTTEILPVSMTKTSVDCTMYICGDSTECSNLLLQYGSFCTQLNRALTGIAVEQDKNTQEVFAQVKQIYKTPPIKDFGGFNFSQILPDPSKPSKRSFIEDLLFNKVTLADAGFIKQYGDCLGDIAARDLICAQKFNGLTVLPPLLTDEMIAQYTSALLAGTITSGWTFGAGAALQIPFAMQMAYRFNGIGVTQNVLYENQKLIANQFNSAIGKIQDSLSSTASALGKLQDVVNQNAQALNTLVKQLSSNFGAISSVLNDILSRLDKVEAEVQIDRLITGRLQSLQTYVTQQLIRAAEIRASANLAATKMSECVLGQSKRVDFCGKGYHLMSFPQSAPHGVVFLHVTYVPAQEKNFTTAPAICHDGKAHFPREGVFVSNGTHWFVTQRNFYEPQIITTDNTFVSGNCDVVIGIVNNTVYDPLQPELDSFKEELDKYFKNHTSPDVDLGDISGINASVVNIQKEIDRLNEVAKNLNESLIDLQELGKYEQYIK

SEQ ID NO: 1649 - protein, 1211 aa, Artificial Sequence
  SARS-CoV-2/South Korea/SNU01/2020__EPI_ISL_411929 spike protein (1-1211)
MFVFLVLLPLVSSQCVNLTTRTQLPPAYTNSFTRGVYYPDKVFRSSVLHSTQDLFLPFFSNVTWFHAIHVSGTNGTKRFDNPVLPFNDGVYFASTEKSNIIRGWIFGTTLDSKTQSLLIVNNATNVVIKVCEFQFCNDPFLGVYYHKNNKSWMESEFRVYSSANNCTFEYVSQPFLMDLEGKQGNFKNLREFVFKNIDGYFKIYSKHTPINLVRDLPQGFWALEPLVDLPIGINITRFQTLLALHRSYLTPGDSSSGWTAGAAAYYVGYLQPRTFLLKYNENGTITDAVDCALDPLSETKCTLKSFTVEKGIYQTSNFRVQPTESIVRFPNITNLCPFGEVFNATRFASVYAWNRKRISNCVADYSVLYNSASFSTFKCYGVSPTKLNDLCFTNVYADSFVIRGDEVRQIAPGQTGKIADYNYKLPDDFTGCVIAWNSNNLDSKVGGNYNYLYRLFRKSNLKPFERDISTEIYQAGSTPCNGVEGFNCYFPLQSYGFQPTNGVGYQPYRVVVLSFELLHAPATVCGPKKSTNLVKNKCVNFNFNGLTGTGVLTESNKKFLPFQQFGRDIADTTDAVRDPQTLEILDITPCSFGGVSVITPGTNTSNQVAVLYQDVNCTEVPVAIHADQLTPTWRVYSTGSNVFQTRAGCLIGAEHVNNSYECDIPIGAGICASYQTQTNSPRRARSVASQSIIAYTMSLGAENSVAYSNNSIAIPTNFTISVTTEILPVSMTKTSVDCTMYICGDSTECSNLLLQYGSFCTQLNRALTGIAVEQDKNTQEVFAQVKQIYKTPPIKDFGGFNFSQILPDPSKPSKRSFIEDLLFNKVTLADAGFIKQYGDCLGDIAARDLICAQKFNGLTVLPPLLTDEMIAQYTSALLAGTITSGWTFGAGAALQIPFAMQMAYRFNGIGVTQNVLYENQKLIANQFNSAIGKIQDSLSSTASALGKLQDVVNQNAQALNTLVKQLSSNFGAISSVLNDILSRLDKVEAEVQIDRLITGRLQSLQTYVTQQLIRAAEIRASANLAATKMSECVLGQSKRVDFCGKGYHLMSFPQSAPHGVVFLHVTYVPAQEKNFTTAPAICHDGKAHFPREGVFVSNGTHWFVTQRNFYEPQIITTDNTFVSGNCDVVIGIVNNTVYDPLQPELDSFKEELDKYFKNHTSPDVDLGDISGINASVVNIQKEIDRLNEVAKNLNESLIDLQELGKYEQYIK

SEQ ID NO: 1650 - protein, 1211 aa, Artificial Sequence
  SARS-CoV-2/China/WF0004/2020__EPI_ISL_413694 spike protein (1-1211)
MFVFLVLLPLVSSQCVNLTTRTQLPPAYTNSFTRGVYYPDKVFRSSVLHSTQDLFLPFFSNVTWFHAIHVSGTNGTKRFDNPVLPFNDGVYFASTEKSNIIRGWIFGTTLDSKTQSLLIVNNATNVVIKVCEFQFCNDPFLGVYYHKNNKSWTESEFRVYSSANNCTFEYVSQPFLMDLEGKQGNFKNLREFVFKNIDGYFKIYSKHTPINLVRDLPQGFSALEPLVDLPIGINITRFQTLLALHRSYLTPGDSSSGWTAGAAAYYVGYLQPRTFLLKYNENGTITDAVDCALDPLSETKCTLKSFTVEKGIYQTSNFRVQPTESIVRFPNITNLCPFGEVFNATRFASVYAWNRKRISNCVADYSVLYNSASFSTFKCYGVSPTKLNDLCFTNVYADSFVIRGDEVRQIAPGQTGKIADYNYKLPDDFTGCVIAWNSNNLDSKVGGNYNYLYRLFRKSNLKPFERDISTEIYQAGSTPCNGVEGFNCYFPLQSYGFQPTNGVGYQPYRVVVLSFELLHAPATVCGPKKSTNLVKNKCVNFNFNGLTGTGVLTESNKKFLPFQQFGRDIADTTDAVRDPQTLEILDITPCSFGGVSVITPGTNTSNQVAVLYQDVNCTEVPVAIHADQLTPTWRVYSTGSNVFQTRAGCLIGAEHVNNSYECDIPIGAGICASYQTQTNSPRRARSVASQSIIAYTMSLGAENSVAYSNNSIAIPTNFTISVTTEILPVSMTKTSVDCTMYICGDSTECSNLLLQYGSFCTQLNRALTGIAVEQDKNTQEVFAQVKQIYKTPPIKDFGGFNFSQILPDPSKPSKRSFIEDLLFNKVTLADAGFIKQYGDCLGDIAARDLICAQKFNGLTVLPPLLTDEMIAQYTSALLAGTITSGWTFGAGAALQIPFAMQMAYRFNGIGVTQNVLYENQKLIANQFNSAIGKIQDSLSSTASALGKLQDVVNQNAQALNTLVKQLSSNFGAISSVLNDILSRLDKVEAEVQIDRLITGRLQSLQTYVTQQLIRAAEIRASANLAATKMSECVLGQSKRFDFCGKGYHLMSFPQSAPHGVVFLHVTYVPAQEKNFTTAPAICHDGKAHFPREGVFVSNGTHWFVTQRNFYEPQIITTDNTFVSGNCDVVIGIVNNTVYDPLQPELDSFKEELDKYFKNHTSPDVDLGDISGINASVVNIQKEIDRLNEVAKNLNESLIDLQELGKYEQYIK

SEQ ID NO: 1651 - protein, 1211 aa, Artificial Sequence
  SARS-CoV-2/China/WF0028/2020__EPI_ISL_413791 spike protein (1-1211)
MFVFLVLLPLVSSQCVNLTTRTQLPPAYTNSFTRGVYYPDKVFRSSVLHSTQDLFLPFFSNVTWFHAIHVSGTNGTKRFDNPVLPFNDGVYFASTEKSNIIRGWIFGTTLDSKTQSLLIVNNATNVVIKVCEFQFCNDPFLGVYYHKNNKSWMESEFRVYSSANNCTFEYVSQPFLMDLEGKQGNFKNLREFVFKNIDGYFKIYSKHTPINLVRDLPQGFSALEPLVDLPIGINITRFQTLLALHRSYLTPGDSSSGWTAGAAAYYVGYLQPRTFLLKYNENGTITDAVDCALDPLSETKCTLKSFTVEKGIYQTSNFRVQPTESIVRFPNITNLCPFGEVFNATRFASVYAWNRKRISNCVADYSVLYNSASFSTFKCYGVSPTKLNDLCFTNVYADSFVIRGDEVRQIAPGQTGKIADYNYKLPDDFTGCVIAWNSNNLDSKVGGNYNYLYRLFRKSNLKPFERDISTEIYQAGSTPCNGVEGFNCYFPLQSYGFQPTNGVGYQPYRVVVLSFELLHAPATVCGPKKSTNLVKNKCVNFNFNGLTGTGVLTESNKKFLPFQQFGRDIADTTDAVRDPQTLEILDITPCSFGGVSVITPGTNTSNQVAVLYQDVNCTEVPVAIHADQLTPTWRVYSTGSNVFQTRAGCLIGAEHVNNSYECDIPIGAGICASYQTQTNSPRRARSVASQSIIAYTMSLGAENSVAYSNNSIAIPTNFTISVTTEILPVSMTKTSVDCTMYICGDSTECSNLLLQYGSFCTQLNRALTGIAVEQDKNTQEVFAQVKQIYKTPPIKDFGGFNFSQILPDPSKPSKRSFIEDLLFNKVTLADAGFIKQYGDCLGDIAARDLICAQKFNGLTVLPPLLTDEMIAQYTSALLAGTITSGWTFGAGAALQIPFAMQMAYRFNGIGVTQNVLYENQKLIANQFNSAIGKIQDSLSSTASALGKLQDVVNQNAQALNTLVKQLSSNFGAISSVLNDILSRLDKVEAEVQIDRLITGRLQSLQTYVTQQLIRAAEIRASANLAATKMSECVLGQSKRVDFCGKGYHLMSFPQSAPHGVVFLHVTYVPAQEKNFTTAPAICHDGKAHFPREGVFVSNGTHWFVTQRNFYEPQIITTDNTFVSGNCDVVIGIVNNTVYDPLQPELESFKEELDKYFKNHTSPDVDLGDISGINASVVNIQKEIDRLNEVAKNLNESLIDLQELGKYEQYIK

SEQ ID NO: 1652 - protein, 1211 aa, Artificial Sequence
  SARS-CoV-2/2019-nCoV/USA-CruiseA-18/2020__MT159716.1 spike protein (1-1211)
MFVFLVLLPLVSSQCVNLTTRTQLPPAYTNSFTRGVYYPDKVFRSSVLHSTQDLFLPFFSNVTWFHAIHVSGTNGTKRFDNPVLPFNDGVYFASTEKSNIIRGWIFGTTLDSKTQSLLIVNNATNVVIKVCEFQFCNDPFLGVYYHKNNKSWMESELRVYSSANNCTFEYVSQPFLMDLEGKQGNFKNLREFVFKNIDGYFKIYSKHTPINLVRDLPQGFSALEPLVDLPIGINITRFQTLLALHRSYLTPGDSSSGWTAGAAAYYVGYLQPRTFLLKYNENGTITDAVDCALDPLSETKCTLKSFTVEKGIYQTSNFRVQPTESIVRFPNITNLCPFGEVFNATRFASVYAWNRKRISNCVADYSVLYNSASFSTFKCYGVSPTKLNDLCFTNVYADSFVIRGDEVRQIAPGQTGKIADYNYKLPDDFTGCVIAWNSNNLDSKVGGNYNYLYRLFRKSNLKPFERDISTEIYQAGSTPCNGVEGFNCYFPLQSYGFQPTNGVGYQPYRVVVLSFELLHAPATVCGPKKSTNLVKNKCVNFNFNGLTGTGVLTESNKKFLPFQQFGRDIADTTDAVRDPQTLEILDITPCSFGGVSVITPGTNTSNQVAVLYQDVNCTEVPVAIHADQLTPTWRVYSTGSNVFQTRAGCLIGAEHVNNSYECDIPIGAGICASYQTQTNSPRRARSVASQSIIAYTMSLGAENSVAYSNNSIAIPTNFTISVTTEILPVSMTKTSVDCTMYICGDSTECSNLLLQYGSFCTQLNRALTGIAVEQDKNTQEVFAQVKQIYKTPPIKDFGGFNFSQILPDPSKPSKRSFIEDLLFNKVTLADAGFIKQYGDCLGDIAARDLICAQKFNGLTVLPPLLTDEMIAQYTSALLAGTITSGWTFGAGAALQIPFAMQMAYRFNGIGVTQNVLYENQKLIANQFNSAIGKIQDSLSSTASALGKLQDVVNQNAQALNTLVKQLSSNFGAISSVLNDILSRLDKVEAEVQIDRLITGRLQSLQTYVTQQLIRAAEIRASANLAATKMSECVLGQSKRVDFCGKGYHLMSFPQSAPHGVVFLHVTYVPAQEKNFTTAPAICHDGKAHFPREGVFVSNGTHWFVTQRNFYEPQIITTDNTFVSGNCDVVIGIVNNTVYDPLQPELDSFKEELDKYFKNHTSPDVDLGDISGINASVVNIQKEIDRLNEVAKNLNESLIDLQELGKYEQYIK

SEQ ID NO: 1653 - protein, 1211 aa, Artificial Sequence
  SARS-CoV-2/SARS-CoV-2/Yunnan-01/human/2020/CHN__MT049951.1 spike protein (1-1211)
MFVFLVLLPLVSSQCVNLTTRTQLPPANTNSFTRGVYYPDKVFRSSVLHSTQDLFLPFFSNVTWFHAIHVSGTNGTKRFDNPVLPFNDGVYFASTEKSNIIRGWIFGTTLDSKTQSLLIVNNATNVVIKVCEFQFCNDPFLGVYYHKNNKSWMESEFRVYSSANNCTFEYVSQPFLMDLEGKQGNFKNLREFVFKNIDGYFKIYSKHTPINLVRDLPQGFSALEPLVDLPIGINITRFQTLLALHRSYLTPGDSSSGWTAGAAAYYVGYLQPRTFLLKYNENGTITDAVDCALDPLSETKCTLKSFTVEKGIYQTSNFRVQPTESIVRFPNITNLCPFGEVFNATRFASVYAWNRKRISNCVADYSVLYNSASFSTFKCYGVSPTKLNDLCFTNVYADSFVIRGDEVRQIAPGQTGKIADYNYKLPDDFTGCVIAWNSNNLDSKVGGNYNYLYRLFRKSNLKPFERDISTEIYQAGSTPCNGVEGFNCYFPLQSYGFQPTNGVGYQPYRVVVLSFELLHAPATVCGPKKSTNLVKNKCVNFNFNGLTGTGVLTESNKKFLPFQQFGRDIADTTDAVRDPQTLEILDITPCSFGGVSVITPGTNTSNQVAVLYQDVNCTEVPVAIHADQLTPTWRVYSTGSNVFQTRAGCLIGAEHVNNSYECDIPIGAGICASYQTQTNSPRRARSVASQSIIAYTMSLGAENSVAYSNNSIAIPTNFTISVTTEILPVSMTKTSVDCTMYICGDSTECSNLLLQYGSFCTQLNRALTGIAVEQDKNTQEVFAQVKQIYKTPPIKDFGGFNFSQILPDPSKPSKRSFIEDLLFNKVTLADAGFIKQYGDCLGDIAARDLICAQKFNGLTVLPPLLTDEMIAQYTSALLAGTITSGWTFGAGAALQIPFAMQMAYRFNGIGVTQNVLYENQKLIANQFNSAIGKIQDSLSSTASALGKLQDVVNQNAQALNTLVKQLSSNFGAISSVLNDILSRLDKVEAEVQIDRLITGRLQSLQTYVTQQLIRAAEIRASANLAATKMSECVLGQSKRVDFCGKGYHLMSFPQSAPHGVVFLHVTYVPAQEKNFTTAPAICHDGKAHFPREGVFVSNGTHWFVTQRNFYEPQIITTDNTFVSGNCDVVIGIVNNTVYDPLQPELDSFKEELDKYFKNHTSPDVDLGDISGINASVVNIQKEIDRLNEVAKNLNESLIDLQELGKYEQYIK

SEQ ID NO: 1654 - protein, 1211 aa, Artificial Sequence
  SARS-CoV-2/USA/WA-UW292/2020__EPI_ISL_418077 spike protein (1-1211)
MFVFLVLLPLVSSQCVNLTTRTQLPPAYTNSFTRGVYYPDKVFRSSVLHSTQDLFLPFFSNVTWFHAIHVSGTNGTKRFDNPVLPFNDGVYFASTEKSNIIRGWIFGTTLDSKTQSLLIVNNATNVVIKVCEFQFCNDPFLGVYYHKNNKSWMESEFRVYSSANNCTFEYVSQPFLMDLEGKQGNFKNLREFVFKNIDGYFKIYSKHTPINLVRDLPQGFSALEPLVDLPIGINITRFQTLLALHRSYLTPGDSSSGWTAGAAAYYVGYLQPRTFLLKYNENGTITDAVDCALDPLSETKCTLKSFTVEKGIYQTSNFRVQPTESIVRFPNITNLCPFGEVFNATRFASVYAWNRKRISNCVADYSVLYNSASFSTFKCYGVSPTKLNDLCFTNVYADSFVIRGDEVRQIAPGQTGKIADYNYKLPDDFTGCVIAWNSNNLDSKVGGNYNYLYRLFRKSNLKPFERDISTEIYQASSTPCNGVEGFNCYFPLQSYGFQPTNGVGYQPYRVVVLSFELLHAPATVCGPKKSTNLVKNKCVNFNFNGLTGTGVLTESNKKFLPFQQFGRDIADTTDAVRDPQTLEILDITPCSFGGVSVITPGTNTSNQVAVLYQDVNCTEVPVAIHADQLTPTWRVYSTGSNVFQTRAGCLIGAEHVNNSYECDIPIGAGICASYQTQTNSPRRARSVASQSIIAYTMSLGAENSVAYSNNSIAIPTNFTISVTTEILPVSMTKTSVDCTMYICGDSTECSNLLLQYGSFCTQLNRALTGIAVEQDKNTQEVFAQVKQIYKTPPIKDFGGFNFSQILPDPSKPSKRSFIEDLLFNKVTLADAGFIKQYGDCLGDIAARDLICAQKFNGLTVLPPLLTDEMIAQYTSALLAGTITSGWTFGAGAALQIPFAMQMAYRFNGIGVTQNVLYENQKLIANQFNSAIGKIQDSLSSTASALGKLQDVVNQNAQALNTLVKQLSSNFGAISSVLNDILSRLDKVEAEVQIDRLITGRLQSLQTYVTQQLIRAAEIRASANLAATKMSECVLGQSKRVDFCGKGYHLMSFPQSAPHGVVFLHVTYVPAQEKNFTTAPAICHDGKAHFPREGVFVSNGTHWFVTQRNFYEPQIITTDNTFVSGNCDVVIGIVNNTVYDPLQPELDSFKEELDKYFKNHTSPDVDLGDISGINASVVNIQKEIDRLNEVAKNLNESLIDLQELGKYEQYIK

SEQ ID NO: 1655 - protein, 1211 aa, Artificial Sequence
  SARS-CoV-2/Iceland/192/2020__EPI_ISL_417819 spike protein (1-1211)
MFVFFVLLPLVSSQCVNLTTRTQLPPAYTNSFTRGVYYPDKVFRSSVLHSTQDLFLPFFSNVTWFHAIHVSGTNGTKRFDNPVLPFNDGVYFASTEKSNIIRGWIFGTTLDSKTQSLLIVNNATNVVIKVCEFQFCNDPFLGVYYHKNNKSWMESEFRVYSSANNCTFEYVSQPFLMDLEGKQGNFKNLREFVFKNIDGYFKIYSKHTPINLVRDLPQGFSALEPLVDLPIGINITRFQTLLALHRSYLTPGDSSSGWTAGAAAYYVGYLQPRTFLLKYNENGTITDAVDCALDPLSETKCTLKSFTVEKGIYQTSNFRVQPTESIVRFPNITNLCPFGEVFNATRFASVYAWNRKRISNCVADYSVLYNSASFSTFKCYGVSPTKLNDLCFTNVYADSFVIRGDEVRQIAPGQTGKIADYNYKLPDDFTGCVIAWNSNNLDSKVGGNYNYLYRLFRKSNLKPFERDISTEIYQAGSTPCNGVEGFNCYFPLQSYGFQPTNGVGYQPYRVVVLSFELLHAPATVCGPKKSTNLVKNKCVNFNFNGLTGTGVLTESNKKFLPFQQFGRDIADTTDAVRDPQTLEILDITPCSFGGVSVITPGTNTSNQVAVLYQGVNCTEVPVAIHADQLTPTWRVYSTGSNVFQTRAGCLIGAEHVNNSYECDIPIGAGICASYQTQTNSPRRARSVASQSIIAYTMSLGAENSVAYSNNSIAIPTNFTISVTTEILPVSMTKTSVDCTMYICGDSTECSNLLLQYGSFCTQLNRALTGIAVEQDKNTQEVFAQVKQIYKTPPIKDFGGFNFSQILPDPSKPSKRSFIEDLLFNKVTLADAGFIKQYGDCLGDIAARDLICAQKFNGLTVLPPLLTDEMIAQYTSALLAGTITSGWTFGAGAALQIPFAMQMAYRFNGIGVTQNVLYENQKLIANQFNSAIGKIQDSLSSTASALGKLQDVVNQNAQALNTLVKQLSSNFGAISSVLNDILSRLDKVEAEVQIDRLITGRLQSLQTYVTQQLIRAAEIRASANLAATKMSECVLGQSKRVDFCGKGYHLMSFPQSAPHGVVFLHVTYVPAQEKNFTTAPAICHDGKAHFPREGVFVSNGTHWFVTQRNFYEPQIITTDNTFVSGNCDVVIGIVNNTVYDPLQPELDSFKEELDKYFKNHTSPDVDLGDISGINASVVNIQKEIDRLNEVAKNLNESLIDLQELGKYEQYIK

SEQ ID NO: 1656 - protein, 1211 aa, Artificial Sequence
  SARS-CoV-2/Belgium/ULG-6939/2020__EPI_ISL_417020 spike protein (1-1211)
MFVFLVLLPLVSSQCVNLTTRTQLPPAYTNSFTRGVYYPDKVFRSSVLHSTQDLFLPFFSNVTWFHAIHVSGTNGTKRFDNPVLPFNDGVYFASTEKSNIIRGWIFGTTLDSKTQSLLIVNNATNVVIKVCEFQFCNDPFLGVYYHKNNKSWMESEFRVYSSANNCTFEYVSQPFLMDLEGKQGNFKNLREFVFKNIDGYFKIYSKHTPINLVRDLPQGFSALEPLVDLPIGINITRFQTLLALHRSYLTPGDSSSGWTAGAAAYYVGYLQPRTFLLKYNENGTITDAVDCALDPLSETKCTLKSFTVEKGIYQTSNFRVQPTESIVRFPNITNLCPFGEVFNATRFASVYAWNRKRISNCVADYSVLYNSASFSTFKCYGVSPTKLNDLCFTNVYADSFVIRGDEVRQIAPGQTGKIADYNYKLPDDFTGCVIAWNSNNLDSKVGGNYNYLYRLFRKSNLKPFERDISTEIYQAGSTPCNGVEGFNCYFPLQSYGFQPTNGVGYQPYRVVVLSFELLHAPATVCGPKKSTNLVKNKCVNFNFNGLTGTGVLTESNKKFLPFQQFGRDIADTTDAVRDPQTLEILDITPCSFGGVSVITPGTNTSNQVAVLYQGVNCTEVPVAIHADQLTPTWRVYSTGSNVFQTRAGCLIGAEHVNNSYECDIPIGAGICASYQTQTNSPRRARSVASQSIIAYTMSLGAENSVVYSNNSIAIPTNFTISVTTEILPVSMTKTSVDCTMYICGDSTECSNLLLQYGSFCTQLNRALTGIAVEQDKNTQEVFAQVKQIYKTPPIKDFGGFNFSQILPDPSKPSKRSFIEDLLFNKVTLADAGFIKQYGDCLGDIAARDLICAQKFNGLTVLPPLLTDEMIAQYTSALLAGTITSGWTFGAGAALQIPFAMQMAYRFNGIGVTQNVLYENQKLIANQFNSAIGKIQDSLSSTASALGKLQDVVNQNAQALNTLVKQLSSNFGAISSVLNDILSRLDKVEAEVQIDRLITGRLQSLQTYVTQQLIRAAEIRASANLAATKMSECVLGQSKRVDFCGKGYHLMSFPQSAPHGVVFLHVTYVPAQEKNFTTAPAICHDGKAHFPREGVFVSNGTHWFVTQRNFYEPQIITTDNTFVSGNCDVVIGIVNNTVYDPLQPELDSFKEELDKYFKNHTSPDVDLGDISGINASVVNIQKEIDRLNEVAKNLNESLIDLQELGKYEQYIK

SEQ ID NO: 1657 - protein, 1211 aa, Artificial Sequence
  SARS-CoV-2/France/HF2496/2020__EPI_ISL_418231 spike protein (1-1211)
MFVFLVLLPLVSSQCVNLTTRTQLPPAYTNSFTRGVYYPDKVFRSSVLHSTQDLFLPFFSNVTWFHAIHVSGTNGTKRFDNPVLPFNDGVYFASTEKSNIIRGWIFGTTLDSKTQSLLIVNNATNVVIKVCEFQFCNDPFLGVYYHKNNKSWMESEFRVYSSANNCTFEYVSQPFLMDLEGKQGNFKNLREFVFKNIDGYFKIYSKHTPINLVRDLPQGFSALEPLVDLPIGINITRFQTLLALHRSYLTPGDSSSGWTAGAAAYYVGYLQPRTFLLKYNENGTITDAVDCALDPLSETKCTLKSFTVEKGIYQTSNFRVQPTESIVRFPNITNLCPFGEVFNATRFASVYAWNRKRISNCVADYSVLYNSASFSTFKCYGVSPTKLNDLCFTNVYADSFVIRGDEVRQIAPGQTGKIADYNYKLPDDFTGCVIAWNSNNLDSKVGGNYNYLYRLFRKSNLKPFERDISTEIYQAGSTPCNGVEGFNCYFPLQSYGFQPTNGVGYQPYRVVVLSFELLHAPATVCGPKKSTNLVKNKCVNFNFNGLTGTGVLTESNKKFLPFQQFGRDIADTTDAVRDPQTLEILDITPCSFGGVSVITPGTNTSNQVAVLYQGVNCTEVPVAIHADQLTPTWRVYSTGSNVFQTRAGCLIGAEHVNNSYECDIPIGAGICASYQTQTNSPRRARSVASQSIIAYTMSLGAENSVAYSNNSIAIPTNFTISVTTEILPVSMTKTSVDCTMYICGDSTECSNLLLQYGSFCTQLNRALTGIAVEQDKNTQEVFAQVKQIYKTPPIKDFGGFNFSQILPDPSKPSKRSFIEDLLFNKVTLADAGFIKQYGDCLGDIVARDLICAQKFNGLTVLPPLLTDEMIAQYTSALLAGTITSGWTFGAGAALQIPFAMQMAYRFNGIGVTQNVLYENQKLIANQFNSAIGKIQDSLSSTASALGKLQDVVNQNAQALNTLVKQLSSNFGAISSVLNDILSRLDKVEAEVQIDRLITGRLQSLQTYVTQQLIRAAEIRASANLAATKMSECVLGQSKRVDFCGKGYHLMSFPQSAPHGVVFLHVTYVPAQEKNFTTAPAICHDGKAHFPREGVFVSNGTHWFVTQRNFYEPQIITTDNTFVSGNCDVVIGIVNNTVYDPLQPELDSFKEELDKYFKNHTSPDVDLGDISGINASVVNIQKEIDRLNEVAKNLNESLIDLQELGKYEQYIK

SEQ ID NO: 1658 - protein, 1211 aa, Artificial Sequence
  SARS-CoV-2/USA/WA-UW291/2020__EPI_ISL_418076 spike protein (1-1211)
MFVFLVLLPLVSSQCVNLTTRTQLPPAYTNSFTRGVYYPDKVFRSSVLHSTQDLFLPFFSNVTWFHAIHVSGTNGTKRFDNPVLPFNDGVYFASTEKSNIIRGWIFGTTLDSKTQSLLIVNNATNVVIKVCEFQFCNDPFLGVYYHKNNKSWMESEFRVYSSANNCTFEYVSQPFLMDLEGKQGNFKNLREFVFKNIDGYFKIYSKHTPINLVRDLPQGFSALEPLVDLPIGINITRFQTLLALHRSYLTPGDSSSGWTAGAAAYYVGYLQPRTFLLKYNENGTITDAVDCALDPLSETKCTLKSFTVEKGIYQTSNFRVQPTESIVRFPNITNLCPFGEVFNATRFASVYAWNRKRISNCVADYSVLYNSASFSTFKCYGVSPTKLNDLCFTNVYADSFVIRGDEVRQIAPGQTGKIADYNYKLPDDFTGCVIAWNSNNLDSKVGGNYNYLYRLFRKSNLKPFERDISTEIYQAGSTPCNGVEGFNCYFPLQSYGFQPTNGVGYQPYRVVVLSFELLHAPATVCGPKKSTNLVKNKCVNFNFNGLTGTGVLTESNKKFLPFQQFGRDIADTTDAVRDPQTLEILDITPCSFGGVSVITPGTNTSNQVAVLYQGVNCTEVPVAIHADQLTPTWRVYSTGSNVFQTRAGCLIGAEHVNNSYECDIPIGAGICASYQTQTNSPRRARSVASQSIIAYTMSLGAENSVAYSNNSIAIPTNFTISVTTEILPVSMTKTSVDCTMYICGDSTECSNLLLQYGSFCTQLNRALTGIAVEQDKNTQEVFAQVKQIYKTPPIKDFGGFNFSQILPDPSKPSKRSFIEDLLFNKVTLADAGFIKQYGDCLGDIAARDLICAQKFNGLTVLPPLLTDEMIAQYTSALLAGTITSGWTFGAGAALQIPFAMQMAYRFNGIGVTQNVLYENQKLIANQFNSAIGKIQYSLSSTASALGKLQDVVNQNAQALNTLVKQLSSNFGAISSVLNDILSRLDKVEAEVQIDRLITGRLQSLQTYVTQQLIRAAEIRASANLAATKMSECVLGQSKRVDFCGKGYHLMSFPQSAPHGVVFLHVTYVPAQEKNFTTAPAICHDGKAHFPREGVFVSNGTHWFVTQRNFYEPQIITTDNTFVSGNCDVVIGIVNNTVYDPLQPELDSFKEELDKYFKNHTSPDVDLGDISGINASVVNIQKEIDRLNEVAKNLNESLIDLQELGKYEQYIK

SEQ ID NO: 1659 - protein, 1211 aa, Artificial Sequence; identical to SEQ ID NO: 39
  SARS-CoV-2/Portugal/PT0034/2020__EPI_ISL_418019 spike protein (1-1211)

SEQ ID NO: 1660 - protein, 1211 aa, Artificial Sequence
  SARS-CoV-2/Iceland/202/2020__EPI_ISL_417750 spike protein (1-1211)
MFVFLVLLPLVSSQCVNLTTRTQLPPAYTNSFTRGVYYPDKVFRSSVLHSTQDLFLPFFSNVTWFHAIHVSGTNGTKRFDNPVLPFNDGVYFASTEKSNIIRGWIFGTTLDSKTQSLLIVNNATNVVIKVCEFQFCNDPFLGVYYHKNNKSWMESEFRVYSSANNCTFEYVSQPFLMDLEGKQGNFKNLREFVFKNIDGYFKIYSKHTPINLVRDLPQGFSALEPLVDLPIGINITRFQTLLALHRSYLTPGDSSSGWTAGAAAYYVGYLQPRTFLLKYNENGTITDAVDCALDPLSETKCTLKSFTVEKGIYQTSNFRVQPTESIVRFPNITNLCPFGEVFNATRFASVYAWNRKRISNCVADYSVLYNSASFSTFKCYGVSPTKLNDLCFTNVYADSFVIRGDEVRQIAPGQTGKIADYNYKLPDDFTGCVIAWNSNNLDSKVGGNYNYLYRLFRKSNLKPFERDISTEIYQAGSTPCNGVEGFNCYFPLQSYGFQPTNGVGYQPYRVVVLSFELLHAPATVCGPKKSTNLVKNKCVNFNFNGLTGTGVLTESNKKFLPFQQFGRDIADTTDAVRDPQTLEILDITPCSFGGVSVITPGTNTSNQVAVLYQDVNCTEVPVAIHADQLTPTWRVYSTGSNVFQTRAGCLIGAEHVNNSYECDIPIGAGICASYQTQTNSPRRARSVASQSIIAYTMSLGAENSVAYSNNSIAIPTNFTISVTTEILPVSMTKTSVDCTMYICGDSTECSNLLLQYGSFCTQLNRALTGIAVEQDKNTQEVFAQVKQIYKTPPIKDFGGFNFSQILPDPSKPSKRSFIEDLLFNKVTLADAGFIKQYGDCLGDIAARDLICAQKFNGLTVLPPLLTDEMIAQYTSALLAGTITSGWTFGAGAALQIPFAMQMAYRFNGIGVTQNVLYENQKLIANQFNSAIGKIQDSLSSTASALGKLQDVVNQNAQALNTLVKQLSSNFGAISSVLNDILSRLDKVEAEVQIDRLITGRLQSLQTYVTQQLIRAAEIRASANLAATKMSECVLGQSKRVDFCGKGYHLMSFPQSAPHGVVFLHVTYVPAQEKNFTTAPAICHDGKAHFPREGVFVSNGTHWFVTQRNFYEPQIITTDNTFVSGNCDVVIGIVNNTVYDPLQPELDSFKEELDKYFKNHTSPDVDLGDIPGINASVVNIQKEIDRLNEVAKNLNESLIDLQELGKYEQYIK

SEQ ID NO: 1661 - protein, 1211 aa, Artificial Sequence
  SARS-CoV-2/USA/WA-UW261/2020__EPI_ISL_418046 spike protein (1-1211)
MFVFLVLLPLVSSQCVNLTTRTQLPPAYTNSFTRGVYYPDKVFRSSVLHSTQDLFLPFFSNVTWFHAIHVSGTNGTKRFDNPVLPFNDGVYFASTEKSNIIRGWIFGTTLDSKTQSLLIVNNATNVVIKVCEFQFCNDPFLGVYYHKNNKSWMESEFRVYSSANNCTFEYVSQPFLMDLEGKQGNFKNLREFVFKNIDGYFKIYSKHTPINLVRDLPQGFSALEPLVDLPIGINITRFQTLLALHRSYLTPGDSSSGWTAGAAAYYVGYLQPRTFLLKYNENGTITDAVDCALDPLSETKCTLKSFTVEKGIYQTSNFRVQPTESIVRFPNITNLCPFGEVFNATRFTSVYAWNRKRISNCVADYSVLYNSASFSTFKCYGVSPTKLNDLCFTNVYADSFVIRGDEVRQIAPGQTGKIADYNYKLPDDFTGCVIAWNSNNLDSKVGGNYNYLYRLFRKSNLKPFERDISTEIYQAGSTPCNGVEGFNCYFPLQSYGFQPTNGVGYQPYRVVVLSFELLHAPATVCGPKKSTNLVKNKCVNFNFNGLTGTGVLTESNKKFLPFQQFGRDIADTTDAVRDPQTLEILDITPCSFGGVSVITPGTNTSNQVAVLYQDVNCTEVPVAIHADQLTPTWRVYSTGSNVFQTRAGCLIGAEHVNNSYECDIPIGAGICASYQTQTNSPRRARSVASQSIIAYTMSLGAENSVAYSNNSIAIPTNFTISVTTEILPVSMTKTSVDCTMYICGDSTECSNLLLQYGSFCTQLNRALTGIAVEQDKNTQEVFAQVKQIYKTPPIKDFGGFNFSQILPDPSKPSKRSFIEDLLFNKVTLADAGFIKQYGDCLGDIAARDLICAQKFNGLTVLPPLLTDEMIAQYTSALLAGTITSGWTFGAGAALQIPFAMQMAYRFNGIGVTQNVLYENQKLIANQFNSAIGKIQDSLSSTASALGKLQDVVNQNAQALNTLVKQLSSNFGAISSVLNDILSRLDKVEAEVQIDRLITGRLQSLQTYVTQQLIRAAEIRASANLAATKMSECVLGQSKRVDFCGKGYHLMSFPQSAPHGVVFLHVTYVPAQEKNFTTAPAICHDGKAHFPREGVFVSNGTHWFVTQRNFYEPQIITTDNTFVSGNCDVVIGIVNNTVYDPLQPELDSFKEELDKYFKNHTSPDVDLGDISGINASVVNIQKEIDRLNEVAKNLNESLIDLQELGKYEQYIK

SEQ ID NO: 1662 - protein, 1211 aa, Artificial Sequence
  SARS-CoV-2/Portugal/PT0035/2020__EPI_ISL_418020 spike protein (1-1211)
MFVFLVLLPLVSSQCVNLTTRTQLPPAYTNSFTRGVYYPDKVFRSSVLHSTQDLFLPFFSNVTWFHAIHVSGTNGTKRFDNPVLPFNDGVYFASTEKSNIIRGWIFGTTLDSKTQSLLIVNNATNVVIKVCEFQFCNDPFLGVYYHKNNKSWMESEFRVYSSANNCTFEYVSQPFLMDLEGKQGNFKNLREFVFKNIDGYFKIYSKHTPINLVRDLPQGFSALEPLVDLPIGINITRFQTLLALHRSYLTPGDSSSGWTAGAAAYYVGYLQPRTFLLKYNENGTITDAVDCALDPLSETKCTLKSFTVEKGIYQTSNFRVQPTESIVRFPNITNLCPFGEVFNATRFASVYAWNRKRISNCVADYSVLYNSASFSTFKCYGVSPTKLNDLCFTNVYADSFVIRGDEVRQIAPGQTGKIADYNYKLPDDFTGCVIAWNSNNLDSKVGGNYNYLYRLFRKSNLKPFERDISTEIYQAGSTPCNGVEGFNCYFPLQSYGFQPTNGVGYQPYRVVVLSFELLHAPATVCGPKKSTNLVKNKCVNFNFNGLTGTGVLTESNKKFLPFQQFGRDIADTTDAVRDPQTLEILDITPCSFGGVSVITPGTNTSNQVAVLYQDVNCTEVPVAIHADQLTPTWRVYSTGSNVFQTRAGCLIGAEHVNNSYECDIPIGAGICASYQTQTNSPRRARSVASQSIIAYTMSLGAENSVAYSNNSIAIPTNFTISVTTEILPVSMTKTSVDCTMYICGDSTECSNLLLQYGSFCTQLNRALTGIAVEQDKNTQEVFAQVKQIYKTPPIKDFGGFNFSQILPDPSKPSKRSFIEDLLFNKVTLADAGFIKQYGDCLGDISARDLICAQKFNGLTVLPPLLTDEMIAQYTSALLAGTITSGWTFGAGAALQIPFAMQMAYRFNGIGVTQNVLYENQKLIANQFNSAIGKIQDSLSSTASALGKLQDVVNQNAQALNTLVKQLSSNFGAISSVLNDILSRLDKVEAEVQIDRLITGRLQSLQTYVTQQLIRAAEIRASANLAATKMSECVLGQSKRVDFCGKGYHLMSFPQSAPHGVVFLHVTYVPAQEKNFTTAPAICHDGKAHFPREGVFVSNGTHWFVTQRNFYEPQIITTDNTFVSGNCDVVIGIVNNTVYDPLQPELDSFKEELDKYFKNHTSPDVDLGDISGINASVVNIQKEIDRLNEVAKNLNESLIDLQELGKYEQYIK

SEQ ID NO: 1663 - protein, 1211 aa, Artificial Sequence
  SARS-CoV-2/USA/NY-NYUMC7/2020__EPI_ISL_418192 spike protein (1-1211)
MFVFLVLLPLVSSQCVNLTTRTQLPPAYTNSFTRGVYYPDKVFRSSVLHSTQDLFLPFFSNVTWFHAIHVSGTNGTKRFDNPVLPFNDGVYFASTEKSNIIRGWIFGTTLDSKTQSLLIVNNATNVVIKVCEFQFCNDPFLGVYHHKNNKSWMESEFRVYSSANNCTFEYVSQPFLMDLEGKQGNFKNLREFVFKNIDGYFKIYSKHTPINLVRDLPQGFSALEPLVDLPIGINITRFQTLLALHRSYLTPGDSSSGWTAGAAAYYVGYLQPRTFLLKYNENGTITDAVDCALDPLSETKCTLKSFTVEKGIYQTSNFRVQPTESIVRFPNITNLCPFGEVFNATRFASVYAWNRKRISNCVADYSVLYNSASFSTFKCYGVSPTKLNDLCFTNVYADSFVIRGDEVRQIAPGQTGKIADYNYKLPDDFTGCVIAWNSNNLDSKVGGNYNYLYRLFRKSNLKPFERDISTEIYQAGSTPCNGVEGFNCYFPLQSYGFQPTNGVGYQPYRVVVLSFELLHAPATVCGPKKSTNLVKNKCVNFNFNGLTGTGVLTESNKKFLPFQQFGRDIADTTDAVRDPQTLEILDITPCSFGGVSVITPGTNTSNQVAVLYQGVNCTEVPVAIHADQLTPTWRVYSTGSNVFQTRAGCLIGAEHVNNSYECDIPIGAGICASYQTQTNSPRRARSVASQSIIAYTMSLGAENSVAYSNNSIAIPTNFTISVTTEILPVSMTKTSVDCTMYICGDSTECSNLLLQYGSFCTQLNRALTGIAVEQDKNTQEVFAQVKQIYKTPPIKDFGGFNFSQILPDPSKPSKRSFIEDLLFNKVTLADAGFIKQYGDCLGDIAARDLICAQKFNGLTVLPPLLTDEMIAQYTSALLAGTITSGWTFGAGAALQIPFAMQMAYRFNGIGVTQNVLYENQKLIANQFNSAIGKIQDSLSSTASALGKLQDVVNQNAQALNTLVKQLSSNFGAISSVLNDILSRLDKVEAEVQIDRLITGRLQSLQTYVTQQLIRAAEIRASANLAATKMSECVLGQSKRVDFCGKGYHLMSFPQSAPHGVVFLHVTYVPAQEKNFTTAPAICHDGKAHFPREGVFVSNGTHWFVTQRNFYEPQIITTDNTFVSGNCDVVIGIVNNTVYDPLQPELDSFKEELDKYFKNHTSPDVDLGDISGINASVVNIQKEIDRLNEVAKNLNESLIDLQELGKYEQYIK

SEQ ID NO: 1664 - protein, 1211 aa, Artificial Sequence
  SARS-CoV-2/Iceland/189/2020__EPI_ISL_417709 spike protein (1-1211)
MFVFLVLLPLVSSQCVNLTTRTQLPPAYTNSFTRGVYYPDKVFRSSVLHSTQDLFLPFFSNVTWFHAIHVSGTNGTKRFDNPVLPFNDGVYFASTEKSNIIRGWIFGTTLDSKTQSLLIVNNATNVVIKVCEFQFCNDPFLGVYYHKNNKSWMESEFRVYSSANNCTFEYVSQPFLMDLEGKQGNFKNLREFVFKNIDGYFKIYSKHTPINLVRDLPQGFSALEPLVDLPIGINITRFQTLLALHRSYLTPGDSSSGWTAGAAAYYVGYLQPRTFLLKYNENGTITDAVDCALDPLSETKCTLKSFTVEKGIYQTSNFRVQPTESIVRFPNITNLCPFGEVFNATRFASVYAWNRKRISNCVADYSVLYNSASFSTFKCYGVSPTKLNDLCFTNVYADSFVIRGDEVRQIAPGQTGKIADYNYKLPDDFTGCVIAWNSNNLDSKVGGNYNYLYRLFRKSNLKPFERDISTEIYQAGSTPCNGVEGFNCYFPLQSYGFQPTNGVGYQPYRVVVLSFELLHAPATVCGPKKSTNLVKNKCVNFNFNGLTGTGVLTESNKKFLPFQQFGRDIADTTDAVRDPQTLEILDITPCSFGGVSVITPGTNTSNQVAVLYQGVNCTEVPVAIHADQLTPTWRVYSTGSNVFQTRAGCLIGAEHVNNSYECDIPIGAGICASYQTQTNSPRRARSVASQSIIAYTMSLGAENSVAYSNNSIAIPTNFTISVTTEILPVSMTKTSVDCTMYICGDSTECSNLLLQYGSFCTQLNRALTGIAVEQDKNTQEVFAQVKQIYKTPPIKDFGGFNFSQILPDPSKPSKRSFIEDLLFNKVTLADAGFTKQYGDCLGDIAARDLICAQKFNGLTVLPPLLTDEMIAQYTSALLAGTITSGWTFGAGAALQIPFAMQMAYRFNGIGVTQNVLYENQKLIANQFNSAIGKIQDSLSSTASALGKLQDVVNQNAQALNTLVKQLSSNFGAISSVLNDILSRLDKVEAEVQIDRLITGRLQSLQTYVTQQLIRAAEIRASANLAATKMSECVLGQSKRVDFCGKGYHLMSFPQSAPHGVVFLHVTYVPAQEKNFTTAPAICHDGKAHFPREGVFVSNGTHWFVTQRNFYEPQIITTDNTFVSGNCDVVIGIVNNTVYDPLQPELDSFKEELDKYFKNHTSPDVDLGDISGINASVVNIQKEIDRLNEVAKNLNESLIDLQELGKYEQYIK

SEQ ID NO: 1665 - protein, 1211 aa, Artificial Sequence
  SARS-CoV-2/Australia/NSW56/2020__EPI_ISL_417408 spike protein (1-1211)
MFVFLVLLPLVSSQCVNLTTRTQLPPAYTNSFTRGVYYPDKVFRSSVLHSTQDLFLPFFSNVTWFHAIHVSGTNGTKRFDNPVLPFNDGVYFASTEKSNIIRGWIFGTTLDSKTQSLLIVNNATNVVIKVCEFQFCNDPFLGVYYHKNNKSWMESEFRVYSSANNCTFEYVSQPFLMDLEGKQGNFKNLREFVFKNIDGYFKIYSKHTPINLVRDLPQGFSALEPLVDLPIGINITRFQTLLALHRSYLTPGDSSSGWTAGAAAYYVGYLQPRTFLLKYNENGTITDAVDCALDPLSETKCTLKSFTVEKGIYQTSNFRVQPTESIVRFPNITNLCPFGEVFNATRFASVYAWNRKRISNCVADYSVLYNSASFSTFKCYGVSPTKLNDLCFTNVYADSFVIRGDEVRQIAPGQTGKIADYNYKLPDDFTGCVIAWNSNNLDSKVGGNYNYLYRLFRKSNLKPFERDISTEIYQAGSTPCNGVEGFNCYFPLQSYGFQPTNGVGYQPYRVVVLSFELLHAPATVCGPKKSTNLVKNKCVNFNFNGLTGTGVLTESNKKFLPFQQFGRDIADTTDAVRDPQTLEILDITPCSFGGVSVITPGTNTSNQVAVLYQDVNCTEVPVAIHADQLTPTWRVYSTGSNVFQTRAGCLIGAEHVNNSYECDIPIGAGICASYQTQTNSPRRARSVASQSIIAYTMSLGAENSVAYSNNSIAIPTNFTISVTTEILPVSMTKTSVDCTMYICGDSTECSNLLLQYGSFCTQLNRALTGIAVEQDKNTQEVFAQVKQIYKTPPIKDFGGFNFSQILPDSSKPSKRSFIEDLLFNKVTLADAGFIKQYGDCLGDIAARDLICAQKFNGLTVLPPLLTDEMIAQYTSALLAGTITSGWTFGAGAALQIPFAMQMAYRFNGIGVTQNVLYENQKLIANQFNSAIGKIQDSLSSTASALGKLQDVVNQNAQALNTLVKQLSSNFGAISSVLNDILSRLDKVEAEVQIDRLITGRLQSLQTYVTQQLIRAAEIRASANLAATKMSECVLGQSKRVDFCGKGYHLMSFPQSAPHGVVFLHVTYVPAQEKNFTTAPAICHDGKAHFPREGVFVSNGTHWFVTQRNFYEPQIITTDNTFVSGNCDVVIGIVNNTVYDPLQPELDSFKEELDKYFKNHTSPDVDLGDISGINASVVNIQKEIDRLNEVAKNLNESLIDLQELGKYEQYIK

SEQ ID NO: 1666 - protein, 1211 aa, Artificial Sequence
  SARS-CoV-2/Iceland/280/2020__EPI_ISL_417608 spike protein (1-1211)
MFVFLVLLPLVSSQCVNLTTRTQLPPAYTNSFTRGVYYPDKVFRSSVLHSTQDLFLPFFSNVTWFHAIHVSGTNGTKRFDNPVLPFNDGVYFASTEKSNIIRGWIFGTTLDSKTQSLLIVNNATNVVIKVCEFQFCNDPFLGVYYHKNNKSWMESEFRVYSSANNCTFEYVSQPFLMDLEGKQGNFKNLREFVFKNIDGYFKIYSKHTPINLVRDLPQGFSALEPLVDLPIGINITRFQTLLALHRSYLTPGDSSSGWTAGAAAYYVGYLQPRTFLLKYNENGTITDAVDCALDPLSETKCTLKSFTVEKGIYQTSNFRVQPTESIVRFPNITNLCPFGEVFNATRFASVYAWNRKRISNCVADYSVLYNSASFSTFKCYGVSPTKLNDLCFTNVYADSFVIRGDEVRQIAPGQTGKIADYNYKLPDDFTGCVIAWNSNNLDSKVGGNYNYLYRLFRKSNLKPFERDISTEIYQAGSTPCNGVEGFNCYFPLQSYGFQPTNGVGYQPYRVVVLSFELLHAPATVCGPKKSTNLVKNKCVNFNFNGLTGTGVLTESNKKFLPFQQFGRDIADTTDAVRDPQTLEILDITPCSFGGVSVITPGTNTSNQVAVLYQGVNCTEVPVAIHADQLTPTWRVYSTGSNVFQTRAGCLIGAEHVNNSYECDIPIGAGICASYHTQTNSPRRARSVASQSIIAYTMSLGAENSVAYSNNSIAIPTNFTISVTTEILPVSMTKTSVDCTMYICGDSTECSNLLLQYGSFCTQLNRALTGIAVEQDKNTQEVFAQVKQIYKTPPIKDFGGFNFSQILPDPSKPSKRSFIEDLLFNKVTLADAGFIKQYGDCLGDIAARDLICAQKFNGLTVLPPLLTDEMIAQYTSALLAGTITSGWTFGAGAALQIPFAMQMAYRFNGIGVTQNVLYENQKLIANQFNSAIGKIQDSLSSTASALGKLQDVVNQNAQALNTLVKQLSSNFGAISSVLNDILSRLDKVEAEVQIDRLITGRLQSLQTYVTQQLIRAAEIRASANLAATKMSECVLGQSKRVDFCGKGYHLMSFPQSAPHGVVFLHVTYVPAQEKNFTTAPAICHDGKAHFPREGVFVSNGTHWFVTQRNFYEPQIITTDNTFVSGNCDVVIGIVNNTVYDPLQPELDSFKEELDKYFKNHTSPDVDLGDISGINASVVNIQKEIDRLNEVAKNLNESLIDLQELGKYEQYIK

SEQ ID NO: 1667 - protein, 1211 aa, Artificial Sequence; identical to SEQ ID NO: 39
  SARS-CoV-2/Iceland/247/2020__EPI_ISL_417575 spike protein (1-1211)

SEQ ID NO: 1668 - protein, 1211 aa, Artificial Sequence
  SARS-CoV-2/Iceland/238/2020__EPI_ISL_417566 spike protein (1-1211)
MFVFLVLLPLVSSQCVNLTTRTQLPPAYTNSFTRGVYYPDKVFRSSVLHSTQDLFLPFFSNVTWFHAIHVSGTNGTKRFDNPVLPFNDGVYFASTEKSNIIRGWIFGTTLDSKTQSLLIVNNATNVVIKVCEFQFCNDPFLGVYYHKNNKSWMESEFRVYSSANNCTFEYVSQPFLMDLEGKQGNFKNLREFVFKNIDGYFKIYSKHTPINLVRDLPQGFSALEPLVDLPIGINITRFQTLLALHRSYLTPGDSSSGWTAGAAAYYVGYLQPRTFLLKYNENGTITDAVDCALDPLSETKCTLKSFTVEKGIYQTSNFRVQPTESIVRFPNITNLCPFGEVFNATRFASVYAWNRKRISNCVADYSVLYNSASFSTFKCYGVSPTKLNDLCFTNVYADSFVIRGDEVRQIAPGQTGKIADYNYKLPDDFTGCVIAWNSNNLDSKVGGNYNYLYRLFRKSNLKPFERDISTEIYQAGSTPCNGVEGFNCYFPLQSYGFQPTNGVGYQPYRVVVLSFELLHAPATVCGPKKSTNLVKNKCVNFNFNGLTGTGVLTESNKKFLPFQQFGRDIADTTDAVRDPQTLEILDITPCSFGGVSVITPGTNTSNQVAVLYQGVNCTEVPVAIHADQLTPTWRVYSTGSNVFQTRAGCLIGAEHVNNSYECDIPIGAGICASYQTQTNSPRRARSVASQSIIAYTMSLGAENSVAYSNNSIAIPTNFTISVTTEILPVSMTKTSVDCTMYICGDSTECSNLLLQYGSFCTQLNRALTGIAVEQDKNTQEVFAQVKQIYKTPPIKDFGGFNFSQILPDPSKPSKRSFIEDLLFNKVTLADVGFIKQYGDCLGDIAARDLICAQKFNGLTVLPPLLTDEMIAQYTSALLAGTITSGWTFGAGAALQIPFAMQMAYRFNGIGVTQNVLYENQKLIANQFNSAIGKIQDSLSSTASALGKLQDVVNQNAQALNTLVKQLSSNFGAISSVLNDILSRLDKVEAEVQIDRLITGRLQSLQTYVTQQLIRAAEIRASANLAATKMSECVLGQSKRVDFCGKGYHLMSFPQSAPHGVVFLHVTYVPAQEKNFTTAPAICHDGKAHFPREGVFVSNGTHWFVTQRNFYEPQIITTDNTFVSGNCDVVIGIVNNTVYDPLQPELDSFKEELDKYFKNHTSPDVDLGDISGINASVVNIQKEIDRLNEVAKNLNESLIDLQELGKYEQYIK

SEQ ID NO: 1669 - protein, 1211 aa, Artificial Sequence
  SARS-CoV-2/Greece/16/2020__EPI_ISL_418265 spike protein (1-1211)
MFVFLVLLPLVSSQCVNLTTRTQLPPAYTNSFTRGVYYPDKVFRSSVLHSTQDLFLPFFSNVTWFHAIHVSGTNGTKRFDNPVLPFNDGVYFASTEKSNIIRGWIFGTTLDSKTQSLLIVNNATNVVIKVCEFQFCNDPFLGVYYHKNNKSWMESEFRVYSSANNCTFEYVSQPFLMDLEGKQGNFKNLREFVFKNVDGYFKIYSKHTPINLVRDLPQGFSALEPLVDLPIGINITRFQTLLALHRSYLTPGDSSSGWTAGAAAYYVGYLQPRTFLLKYNENGTITDAVDCALDPLSETKCTLKSFTVEKGIYQTSNFRVQPTESIVRFPNITNLCPFGEVFNATRFASVYAWNRKRISNCVADYSVLYNSASFSTFKCYGVSPTKLNDLCFTNVYADSFVIRGDEVRQIAPGQTGKIADYNYKLPDDFTGCVIAWNSNNLDSKVGGNYNYLYRLFRKSNLKPFERDISTEIYQAGSTPCNGVEGFNCYFPLQSYGFQPTNGVGYQPYRVVVLSFELLHAPATVCGPKKSTNLVKNKCVNFNFNGLTGTGVLTESNKKFLPFQQFGRDIADTTDAVRDPQTLEILDITPCSFGGVSVITPGTNTSNQVAVLYQDVNCTEVPVAIHADQLTPTWRVYSTGSNVFQTRAGCLIGAEHVNNSYECDIPIGAGICASYQTQTNSPRRARSVASQSIIAYTMSLGAENSVAYSNNSIAIPTNFTISVTTEILPVSMTKTSVDCTMYICGDSTECSNLLLQYGSFCTQLNRALTGIAVEQDKNTQEVFAQVKQIYKTPPIKDFGGFNFSQILPDPSKPSKRSFIEDLLFNKVTLADAGFIKQYGDCLGDIAARDLICAQKFNGLTVLPPLLTDEMIAQYTSALLAGTITSGWTFGAGAALQIPFAMQMAYRFNGIGVTQNVLYENQKLIANQFNSAIGKIQDSLSSTASALGKLQDVVNQNAQALNTLVKQLSSNFGAISSVLNDILSRLDKVEAEVQIDRLITGRLQSLQTYVTQQLIRAAEIRASANLAATKMSECVLGQSKRVDFCGKGYHLMSFPQSAPHGVVFLHVTYVPAQEKNFTTAPAICHDGKAHFPREGVFVSNGTHWFVTQRNFYEPQIITTDNTFVSGNCDVVIGIVNNTVYDPLQPELDSFKEELDKYFKNHTSPDVDLGDISGINASVVNIQKEIDRLNEVAKNLNESLIDLQELGKYEQYIK

SEQ ID NO: 1670 - protein, 1211 aa, Artificial Sequence
  SARS-CoV-2/Iceland/319/2020__EPI_ISL_417648 spike protein (1-1211)
MFVFLVLLPLVSSQCVNLTTRTQLPPAYTNSFTRGVYYPDKVFRSSVLHSTQDLFLPFFSNVTWFHAIHVSGTNGTKRFDNPVLPFNDGVYFASTEKSNIIRGWIFGTTLDSKTQSLLIVNNATNVVIKVCEFQFCNDPFLGVYYHKNNKSWMESEFRVYSSANNCTFEYVSQPFLIDLEGKQGNFKNLREFVFKNIDGYFKIYSKHTPINLVRDLPQGFSALEPLVDLPIGINITRFQTLLALHRSYLTPGDSSSGWTAGAAAYYVGYLQPRTFLLKYNENGTITDAVDCALDPLSETKCTLKSFTVEKGIYQTSNFRVQPTESIVRFPNITNLCPFGEVFNATRFASVYAWNRKRISNCVADYSVLYNSASFSTFKCYGVSPTKLNDLCFTNVYADSFVIRGDEVRQIAPGQTGKIADYNYKLPDDFTGCVIAWNSNNLDSKVGGNYNYLYRLFRKSNLKPFERDISTEIYQAGSTPCNGVEGFNCYFPLQSYGFQPTNGVGYQPYRVVVLSFELLHAPATVCGPKKSTNLVKNKCVNFNFNGLTGTGVLTESNKKFLPFQQFGRDIADTTDAVRDPQTLEILDITPCSFGGVSVITPGTNTSNQVAVLYQGVNCTEVPVAIHADQLTPTWRVYSTGSNVFQTRAGCLIGAEHVNNSYECDIPIGAGICASYQTQTNSPRRARSVASQSIIAYTMSLGAENSVAYSNNSIAIPTNFTISVTTEILPVSMTKTSVDCTMYICGDSTECSNLLLQYGSFCTQLNRALTGIAVEQDKNTQEVFAQVKQIYKTPPIKDFGGFNFSQILPDPSKPSKRSFIEDLLFNKVTLADAGFIKQYGDCLGDIAARDLICAQKFNGLTVLPPLLTDEMIAQYTSALLAGTITSGWTFGAGAALQIPFAMQMAYRFNGIGVTQNVLYENQKLIANQFNSAIGKIQDSLSSTASALGKLQDVVNQNAQALNTLVKQLSSNFGAISSVLNDILSRLDKVEAEVQIDRLITGRLQSLQTYVTQQLIRAAEIRASANLAATKMSECVLGQSKRVDFCGKGYHLMSFPQSAPHGVVFLHVTYVPAQEKNFTTAPAICHDGKAHFPREGVFVSNGTHWFVTQRNFYEPQIITTDNTFVSGNCDVVIGIVNNTVYDPLQPELDSFKEELDKYFKNHTSPDVDLGDISGINASVVNIQKEIDRLNEVAKNLNESLIDLQELGKYEQYIK

SEQ ID NO: 1671 - protein, 1211 aa, Artificial Sequence
  SARS-CoV-2/Congo/94/2020__EPI_ISL_417947 spike protein (1-1211)
MFVFLVLLPLVSSQCVNLTTRTQLPPAYTNSFTRGVYYPDKVFRSSVLHSTQDLFLPFFSNVTWFHAIHVSGTNGTKRFDNPVLPFNDGVYFASTEKSNIIRGWIFGTTLDSKTQSLLIVNNATNVVIKVCEFQFCNDPFLGVYYHKNNKSWMESEFRVYSSANNCTFEYVSQPFLMDLEGKQGNFKNLREFVFKNIDGYFKIYSKHTPINLVRDLPQGFSALEPLVDLPIGINITRFQTLLALHRSYLTPGDSSSGWTAGAAAYYVGYLQPRTFLLKYNENGTITDAVDCALDPLSETKCTLKSFTVEKGIYQTSNFRVQPTESIVRFPNITNLCPFGEVFNATRFASVYAWNRKRISNCVADYSVLYNSASFSTFKCYGVSPTKLNDLCFTNVYADSFVIRGDEVRQIAPGQTGKIADYNYKLPDDFTGCVIAWNSNNLDSKVGGNYNYLYRLFRKSNLKPFERDISTEIYQAGSTPCNGVEGFNCYFPLQSYGFQPTNGVGYQPYRVVVLSFELLHAPATVCGPKKSTNLVKNKCVNFNFNGLTGTGVLTESNKKFLPFQQFGRDIADTTDAVRDPQTLEILDITPCSFGGVSVITPGTNTSNQVAVLYQGVNCTEVPVAIHADQLTPTWRVYSTGSNVFQTRAGCLIGAEHVNNSYECDIPIGAGICASYQTQTNSPRRARSVASQSIIAYTMSLGAENSVAYSNNSIAIPTNFTISVTTEILPVSMTKTSVDCTMYICGDSTECSNLLLQYGSFCTQLNRALTGIAVEQDKNTQEVFAQVKQIYKTPPIKDFGGFNFSQILPDPSKPSKRSFIEDILFNKVTLADAGFIKQYGDCLGDIAARDLICAQKFNGLTVLPPLLTDEMIAQYTSALLAGTITSGWTFGAGAALQIPFAMQMAYRFNGIGVTQNVLYENQKLIANQFNSAIGKIQDSLSSTASALGKLQDVVNQNAQALNTLVKQLSSNFGAISSVLNDILSRLDKVEAEVQIDRLITGRLQSLQTYVTQQLIRAAEIRASANLAATKMSECVLGQSKRVDFCGKGYHLMSFPQSAPHGVVFLHVTYVPAQEKNFTTAPAICHDGKAHFPREGVFVSNGTHWFVTQRNFYEPQIITTDNTFVSGNCDVVIGIVNNTVYDPLQPELDSFKEELDKYFKNHTSPDVDLGDISGINASVVNIQKEIDRLNEVAKNLNESLIDLQELGKYEQYIK

SEQ ID NO: 1672 - protein, 1211 aa, Artificial Sequence
  SARS-CoV-2/Congo/158/2020__EPI_ISL_417950 spike protein (1-1211)
MFVFLVLLPLVSSQCVNLTTRTQLPPAYTNSFTRGVYYPDKVFRSSVLHSTQDLFLPFFSNVTWFHAIHVSGTNGTKRFDNPVLPFNDGVYFASTEKSNIIRGWIFGTTLDSKTQSLLIVNNATNVVIKVCEFQFCNDPFLGVYYHKNNKSWMESEFRVYSSANNCTFEYVSQPFLMDLEGKQGNFKNLREFVFKNIDGYFKIYSKHTPINLVRDLPQGFSALEPLVDLPIGINITRFQTLLALHRSYLTPGDSSSGWTAGAAAYYVGYLQPRTFLLKYNENGTITDAVDCALDPLSETKCTLKSFTVEKGIYQTSNFRVQPTESIVRFPNITNLCPFGEVFNATRFASVYAWNRKRISNCVADYSVLYNSASFSTFKCYGVSPTKLNDLCFTNVYADSFVIRGDEVRQIAPGQTGKIADYNYKLPDDFTGCVIAWNSNNLDSKVGGNYNYLYRLFRKSNLKPFERDISTEIYQAGSTPCNGVEGFNCYFPLQSYGFQPTNGVGYQPYRVVVLSFELLHAPATVCGPKKSTNLVKNKCVNFNFNGLTGTGVLTESNKKFLPFQQFGRDIADTTDAVRDPQTLEILDITPCSFGGVSVITPGTNTSNQVAVLYQDVNCTEVPVAIHADQLTPTWRVYSTGSNVFQTRAGCLIGAEHVNNSYECDIPIGAGICASYQTQTNSPRRARSVASQSIIAYTMSLGAENSVAYSNNSIAIPTNFTISVTTEILPVSMTKTSVDCTMYICGDSTECSNLLLQYGSFCTQLNRALTGIAVEQDKNTQEVFAQVKQIYKTPPIKDFGGFNFSQILPDPSKPSKRSFIEDLLFNKVTLADAGFIKQYGDCLGDIAARDLICAQKFNGLTVLPPLLTDEMIAQYTSALLAGTITSGWTFGAGAALQIPFAMQMAYRFNGIGVTQNVLYENQKLIANQFNSAIGKIQDSLSSTASALGKLQDVVNQNAQALNTLVKQLSSNFGAISSVLNDILSRLDKVEAEVQIDRLITGRLQSLQTYVTQQLIRAAEIRASANLAATKMSECVLGQSKRVDFCGKGYHLMSFPQSAPHGVVFLHVTYVPAQEKNFTTAPAICHDGKAHFPREGVFVSNGTHWFVTQRNFYEPQIITTDNTFLSGNCDVVIGIVNNTVYDPLQPELDSFKEELDKYFKNHTSPDVDLGDISGINASVVNIQKEIDRLNEVAKNLNESLIDLQELGKYEQYIK

SEQ ID NO: 1673 - protein, 1211 aa, Artificial Sequence
  SARS-CoV-2/USA/UT-00034/2020__EPI_ISL_417977 spike protein (1-1211)
MFVFLVLLPLVSSQCVNLTTRTQLPPAYTNSFTRGVYYPDKVFRSSVLHSTQDLFLPFFSNVTWFHAIHVSGTNGTKRFDNPVLPFNDGVYFASTEKSNIIRGWIFGTTLDSKTQSLLIVNNATNVVIKVCEFQFCNDPFLGVYYYKNNKSWMESEFRVYSSANNCTFEYVSQPFLMDLEGKQGNFKNLREFVFKNIDGYFKIYSKHTPINLVRDLPQGFSALEPLVDLPIGINITRFQTLLALHRSYLTPGDSSSGWTAGAAAYYVGYLQPRTFLLKYNENGTITDAVDCALDPLSETKCTLKSFTVEKGIYQTSNFRVQPTESIVRFPNITNLCPFGEVFNATRFASVYAWNRKRISNCVADYSVLYNSASFSTFKCYGVSPTKLNDLCFTNVYADSFVIRGDEVRQIAPGQTGKIADYNYKLPDDFTGCVIAWNSNNLDSKVGGNYNYLYRLFRKSNLKPFERDISTEIYQAGSTPCNGVEGFNCYFPLQSYGFQPTNGVGYQPYRVVVLSFELLHAPATVCGPKKSTNLVKNKCVNFNFNGLTGTGVLTESNKKFLPFQQFGRDIADTTDAVRDPQTLEILDITPCSFGGVSVITPGTNTSNQVAVLYQGVNCTEVPVAIHADQLTPTWRVYSTGSNVFQTRAGCLIGAEHVNNSYECDIPIGAGICASYQTQTNSPRRARSVASQSIIAYTMSLGAENSVAYSNNSIAIPTNFTISVTTEILPVSMTKTSVDCTMYICGDSTECSNLLLQYGSFCTQLNRALTGIAVEQDKNTQEVFAQVKQIYKTPPIKDFGGFNFSQILPDPSKPSKRSFIEDLLFNKVTLADAGFIKQYGDCLGDIAARDLICAQKFNGLTVLPPLLTDEMIAQYTSALLAGTITSGWTFGAGAALQIPFAMQMAYRFNGIGVTQNVLYENQKLIANQFNSAIGKIQDSLSSTASALGKLQDVVNQNAQALNTLVKQLSSNFGAISSVLNDILSRLDKVEAEVQIDRLITGRLQSLQTYVTQQLIRAAEIRASANLAATKMSECVLGQSKRVDFCGKGYHLMSFPQSAPHGVVFLHVTYVPAQEKNFTTAPAICHDGKAHFPREGVFVSNGTHWFVTQRNFYEPQIITTDNTFVSGNCDVVIGIVNNTVYDPLQPELDSFKEELDKYFKNHTSPDVDLGDISGINASVVNIQKEIDRLNEVAKNLNESLIDLQELGKYEQYIK

SEQ ID NO: 1674 - protein, 1211 aa, Artificial Sequence
  SARS-CoV-2/USA/UT-00033/2020__EPI_ISL_417976 spike protein (1-1211)
MFVFLVLLPLVSSQCVNLTTRTQLPPAYTNSFTRGVYYPDKVFRSSVLHSTQDLFLPFFSNVTWFHAIHVSGTNGTKRFDNPVLPFNDGVYFASTEKSNIIRGWIFGTTLDSKTQSLLIVNNATNVVIKVCEFQFCNDPFLGVYYHKNNKSWMESEFRVYSSANNCTFEYVSQPFLMDLEGKQGNFKNLREFVFKNIDGYFKIYSKHTPINLVRDLPQGFSALEPLVDLPIGINITRFQTLLALHRSYLTPGDSSSGLTAGAAAYYVGYLQPRTFLLKYNENGTITDAVDCALDPLSETKCTLKSFTVEKGIYQTSNFRVQPTESIVRFPNITNLCPFGEVFNATRFASVYAWNRKRISNCVADYSVLYNSASFSTFKCYGVSPTKLNDLCFTNVYADSFVIRGDEVRQIAPGQTGKIADYNYKLPDDFTGCVIAWNSNNLDSKVGGNYNYLYRLFRKSNLKPFERDISTEIYQAGSTPCNGVEGFNCYFPLQSYGFQPTNGVGYQPYRVVVLSFELLHAPATVCGPKKSTNLVKNKCVNFNFNGLTGTGVLTESNKKFLPFQQFGRDIADTTDAVRDPQTLEILDITPCSFGGVSVITPGTNTSNQVAVLYQGVNCTEVPVAIHADQLTPTWRVYSTGSNVFQTRAGCLIGAEHVNNSYECDIPIGAGICASYQTQTNSPRRARSVASQSIIAYTMSLGAENSVAYSNNSIAIPTNFTISVTTEILPVSMTKTSVDCTMYICGDSTECSNLLLQYGSFCTQLNRALTGIAVEQDKNTQEVFAQVKQIYKTPPIKDFGGFNFSQILPDPSKPSKRSFIEDLLFNKVTLADAGFIKQYGDCLGDIAARDLICAQKFNGLTVLPPLLTDEMIAQYTSALLAGTITSGWTFGAGAALQIPFAMQMAYRFNGIGVTQNVLYENQKLIANQFNSAIGKIQDSLSSTASALGKLQDVVNQNAQALNTLVKQLSSNFGAISSVLNDILSRLDKVEAEVQIDRLITGRLQSLQTYVTQQLIRAAEIRASANLAATKMSECVLGQSKRVDFCGKGYHLMSFPQSAPHGVVFLHVTYVPAQEKNFTTAPAICHDGKAHFPREGVFVSNGTHWFVTQRNFYEPQIITTDNTFVSGNCDVVIGIVNNTVYDPLQPELDSFKEELDKYFKNHTSPDVDLGDISGINASVVNIQKEIDRLNEVAKNLNESLIDLQELGKYEQYIK

SEQ ID NO: 1675 - protein, 1211 aa, Artificial Sequence
  SARS-CoV-2/USA/WI-13/2020__EPI_ISL_417516 spike protein (1-1211)
MFVFLVLLPLVSSQCVNLTTRTQLPPAYTNSFTRGVYYPDKVFRSSVLHSTQDLFLPFFSNVTWFHAIHVSGTNGTKRFDNPVLPFNDGVYFASTEKSNIIRGWIFGTTLDSKTQSLLIVNNATNVVIKVCEFQFCNDPFLGVYYHKNNKSWMESEFRVYSSANNCTFEYVSQPFLMDLEGKQGNFKNLREFVFKNIDGYFKIYSKHTPINLVRDLPQGFSALEPLVDLPIGINITRFQTLLALHRSYLTPGDSSSGWTAGAAAYYVGYLQPRTFLLKYNENGTITDAVDCALDPLSETKCTLKSFTVEKGIYQTSNFRVLPTESIVRFPNITNLCPFGEVFNATRFASVYAWNRKRISNCVADYSVLYNSASFSTFKCYGVSPTKLNDLCFTNVYADSFVIRGDEVRQIAPGQTGKIADYNYKLPDDFTGCVIAWNSNNLDSKVGGNYNYLYRLFRKSNLKPFERDISTEIYQAGSTPCNGVEGFNCYFPLQSYGFQPTNGVGYQPYRVVVLSFELLHAPATVCGPKKSTNLVKNKCVNFNFNGLTGTGVLTESNKKFLPFQQFGRDIADTTDAVRDPQTLEILDITPCSFGGVSVITPGTNTSNQVAVLYQGVNCTEVPVAIHADQLTPTWRVYSTGSNVFQTRAGCLIGAEHVNNSYECDIPIGAGICASYQTQTNSPRRARSVASQSIIAYTMSLGAENSVAYSNNSIAIPTNFTISVTTEILPVSMTKTSVDCTMYICGDSTECSNLLLQYGSFCTQLNRALTGIAVEQDKNTQEVFAQVKQIYKTPPIKDFGGFNFSQILPDPSKPSKRSFIEDLLFNKVTLADAGFIKQYGDCLGDIAARDLICAQKFNGLTVLPPLLTDEMIAQYTSALLAGTITSGWTFGAGAALQIPFAMQMAYRFNGIGVTQNVLYENQKLIANQFNSAIGKIQDSLSSTASALGKLQDVVNQNAQALNTLVKQLSSNFGAISSVLNDILSRLDKVEAEVQIDRLITGRLQSLQTYVTQQLIRAAEIRASANLAATKMSECVLGQSKRVDFCGKGYHLMSFPQSAPHGVVFLHVTYVPAQEKNFTTAPAICHDGKAHFPREGVFVSNGTHWFVTQRNFYEPQIITTDNTFVSGNCDVVIGIVNNTVYDPLQPELDSFKEELDKYFKNHTSPDVDLGDISGINASVVNIQKEIDRLNEVAKNLNESLIDLQELGKYEQYIK

SEQ ID NO: 1676 - protein, 1210 aa, Artificial Sequence
  SARS-CoV-2/India/1-27/2020__EPI_ISL_413522 spike protein (1-1210)
MFVFLVLLPLVSSQCVNLTTRTQLPPAYTNSFTRGVYYPDKVFRSSVLHSTQDLFLPFFSNVTWFHAIHVSGTNGTKRFDNPVLPFNDGVYFASTEKSNIIRGWIFGTTLDSKTQSLLIVNNATNVVIKVCEFQFCNDPFLGVYHKNNKSWMESEFRVYSSANNCTFEYVSQPFLMDLEGKQGNFKNLREFVFKNIDGYFKIYSKHTPINLVRDLPQGFSALEPLVDLPIGINITRFQTLLALHRSYLTPGDSSSGWTAGAAAYYVGYLQPRTFLLKYNENGTITDAVDCALDPLSETKCTLKSFTVEKGIYQTSNFRVQPTESIVRFPNITNLCPFGEVFNATRFASVYAWNRKRISNCVADYSVLYNSASFSTFKCYGVSPTKLNDLCFTNVYADSFVIRGDEVIQIAPGQTGKIADYNYKLPDDFTGCVIAWNSNNLDSKVGGNYNYLYRLFRKSNLKPFERDISTEIYQAGSTPCNGVEGFNCYFPLQSYGFQPTNGVGYQPYRVVVLSFELLHAPATVCGPKKSTNLVKNKCVNFNFNGLTGTGVLTESNKKFLPFQQFGRDIADTTDAVRDPQTLEILDITPCSFGGVSVITPGTNTSNQVAVLYQDVNCTEVPVAIHADQLTPTWRVYSTGSNVFQTRAGCLIGAEHVNNSYECDIPIGAGICASYQTQTNSPRRARSVASQSIIAYTMSLGAENSVAYSNNSIAIPTNFTISVTTEILPVSMTKTSVDCTMYICGDSTECSNLLLQYGSFCTQLNRALTGIAVEQDKNTQEVFAQVKQIYKTPPIKDFGGFNFSQILPDPSKPSKRSFIEDLLFNKVTLADAGFIKQYGDCLGDIAARDLICAQKFNGLTVLPPLLTDEMIAQYTSALLAGTITSGWTFGAGAALQIPFAMQMAYRFNGIGVTQNVLYENQKLIANQFNSAIGKIQDSLSSTASALGKLQDVVNQNAQALNTLVKQLSSNFGAISSVLNDILSRLDKVEAEVQIDRLITGRLQSLQTYVTQQLIRAAEIRASANLAATKMSECVLGQSKRVDFCGKGYHLMSFPQSAPHGVVFLHVTYVPAQEKNFTTAPAICHDGKAHFPREGVFVSNGTHWFVTQRNFYEPQIITTDNTFVSGNCDVVIGIVNNTVYDPLQPELDSFKEELDKYFKNHTSPDVDLGDISGINASVVNIQKEIDRLNEVAKNLNESLIDLQELGKYEQYIK

SEQ ID NO: 1677 - protein, 1205 aa, Artificial Sequence
  SARS-CoV-2/pangolin/Guangxi/P4L/2017__EPI_ISL_410538 spike protein (1-1205)
MFVFLFVLPLVSSQCVNLTTRTGIPPGYTNSSTRGVYYPDKVFRSSILHLTQDLFLPFFSNVTWFNTINYQGGFKKFDNPVLPFNDGVYFASTEKSNIIRGWIFGTTLDARTQSLLIVNNATNVVIKVCEFQFCTDPFLGVYYHNNNKTWVENEFRVYSSANNCTFEYISQPFLMDLEGKQGNFKNLREFVFKNVDGYFKIYSKHTPIDLVRDLPRGFAALEPLVDLPIGINITRFQTLLALHRSYLTPGNLESGWTTGAAAYYVGYLQQRTFLLSYNQNGTITDAVDCSLDPLSETKCTLKSLTVEKGIYQTSNFRVQPTISIVRFPNITNLCPFGEVFNASKFASVYAWNRKRISNCVADYSVLYNSTSFSTFKCYGVSPTKLNDLCFTNVYADSFVVKGDEVRQIAPGQTGVIADYNYKLPDDFTGCVIAWNSVKQDALTGGNYGYLYRLFRKSKLKPFERDISTEIYQAGSTPCNGQVGLNCYYPLERYGFHPTTGVNYQPFRVVVLSFELLNGPATVCGPKLSTTLVKDKCVNFNFNGLTGTGVLTTSKKQFLPFQQFGRDISDTTDAVRDPQTLEILDITPCSFGGVSVITPGTNTSNQVAVLYQDVNCTEVPMAIHAEQLTPAWRVYSAGANVFQTRAGCLVGAEHVNNSYECDIPVGAGICASYHSMSSLRSVNQRSIIAYTMSLGAENSVAYSNNSIAIPTNFTISVTTEILPVSMTKTSVDCTMYICGDSIECSNLLLQYGSFCTQLNRALTGIAVEQDKNTQEVFAQVKQIYKTPPIKDFGGFNFSQILPDPSKPSKRSFIEDLLFNKVTLADAGFIKQYGDCLGDIAARDLICAQKFNGLTVLPPLLTDEMIAQYTSALLAGTITSGWTFGAGAALQIPFAMQMAYRFNGIGVTQNVLYENQKLIANQFNSAIGKIQDSLSSTASALGKLQDVVNQNAQALNTLVKQLSSNFGAISSVLNDILSRLDKVEAEVQIDRLITGRLQSLQTYVTQQLIRAAEIRASANLAATKMSECVLGQSKRVDFCGKGYHLMSFPQSAPHGVVFLHVTYVPAQEKNFTTAPAICHEGKAHFPREGVFVSNGTHWFITQRNFYEPQIITTDNTFVSGSCDVVIGIVNNTVYDPLQPELDSFKEELDKYFKNHTSPDVDLGDISGINASVVNIQKEIDRLNEVAKNLNESPIDLQELGKYEQYIK

SEQ ID NO: 1678 - protein, 1205 aa, Artificial Sequence
  SARS-CoV-2/pangolin/Guangxi/P5L/2017__EPI_ISL_410540 spike protein (1-1205)
MFVFLFVLPLVSSQCVNLTTRTGIPPGYTNSSTRGVYYPDKVFRSSILHLTQDLFLPFFSNVTWFNTINYQGGFKKFDNPVLPFNDGVYFASTEKSNIIRGWIFGTTLDARTQSLLIVNNATNVVIKVCEFQFCTDPFLGVYYHNNNKTWVENEFRVYSSANNCTFEYISQPFLMDLEGKQGNFKNLREFVFKNVDGYFKIYSKHTPIDLVRDLPRGFAALEPLVDLPIGINITRFQTLLALHRSYLTPGKLESGWTTGAAAYYVGYLQQRTFLLSYNQNGTITDAVDCSLDPLSETKCTLKSLTVEKGIYQTSNFRVQPTISIVRFPNITNLCPFGEVFNASKFASVYAWNRKRISNCVADYSVLYNSTSFSTFKCYGVSPTKLNDLCFTNVYADSFVVKGDEVRQIAPGQTGVIADYNYKLPDDFTGCVIAWNSVKQDALTGGNYGYLYRLFRKSKLKPFERDISTEIYQAGSTPCNGQVGLNCYYPLERYGFHPTTGVNYQPFRVVVLSFELLNGPATVCGPKLSTTLVKDKCVNFNFNGLTGTGVLTTSKKQFLPFQQFGRDISDTTDAVRDPQTLEILDITPCSFGGVSVITPGTNTSNQVAVLYQDVNCTEVPMAIHAEQLTPAWRVYSAGANVFQTRAGCLVGAEHVNNSYECDIPVGAGICASYHSMSSFRSVNQRSIIAYTMSLGAENSVAYSNNSIAIPTNFTISVTTEILPVSMTKTSVDCTMYICGDSIECSNLLLQYGSFCTQLNRALTGIAVEQDKNTQEVFAQVKQIYKTPPIKDFGGFNFSQILPDPSKPSKRSFIEDLLFNKVTLADAGFIKQYGDCLGDIAARDLICAQKFNGLTVLPPLLTDEMIAQYTSALLAGTITSGWTFGAGAALQIPFAMQMAYRFNGIGVTQNVLYENQKLIANQFNSAIGKIQDSLSSTASALGKLQDVVNQNAQALNTLVKQLSSNFGAISSVLNDILSRLDKVEAEVQIDRLITGRLQSLQTYVTQQLIRAAEIRASANLAATKMSECVLGQSKRVDFCGKGYHLMSFPQSAPHGVVFLHVTYVPAQEKNFTTAPAICHEGKAHFPREGVFVSNGTHWFITQRNFYEPQIITTDNTFVSGSCDVVIGIVNNTVYDPLQPELDSFKEELDKYFKNHTSPDVDLGDISGINASVVNIQKEIDRLNEVAKNLNESLIDLQELGKYEQYIK

SEQ ID NO: 1679 - protein, 1205 aa, Artificial Sequence
  SARS-CoV-2/pangolin/Guangxi/P5E/2017__EPI_ISL_410541 spike protein (1-1205)
MFVFLFVLPLVSSQCVNLTTRTGIPPGYTNSSTRGVYYPDKVFRSSILHLTQDLFLPFFSNVTWFNTITYQGGSKKFDNPVLPFNDGVYFASTEKSNIIRGWIFGTTLDARTQSLLIVNNATNVVIKVCEFQFCTDPFLGVYYHNNNKTWVENEFRVYSSANNCTFEYISQPFLMDLEGKQGNFKNLREFVFKNVDGYFKIYSKHTPIDLVRDLPRGFAALEPLVDLPIGINITRFQTLLALHRSYLTPGKLESGWTTGAAAYYVGYLQQRTFLLSYNQNGTITDAVDCSLDPLSETKCTLKSLTVEKGIYQTSNFRVQPTISIVRFPNITNLCPFGEVFNASKFASVYAWNRKRISNCVADYSVLYNSTSFSTFKCYGVSPTKLNDLCFTNVYADSFVVKGDEVRQIAPGQTGVIADYNYKLPDDFTGCVIAWNSVKQDALTGDNYGYLYRLFRKSKLKPFERDISTEIYQAGSTPCNGQVGLNCYYPLERYGFHPTTGVNYQPFRVVVLSFELLNGPATVCGPKLSTTLVKDKCVNFNFNGLTGTGVLTTSKKQFLPFQQFGRDISDTTDAVRDPQTLEILDITPCSFGGVSVITPGTNTSNQVAVLYQDVNCTEVPMAIHAEQLTPAWRVYSAGANVFQTRAGCLVGAEHVNNSYECDIPVGAGICASYHSMSSFRSVNQRSIIAYTMSLGAENSVAYSNNSIAIPTNFTISVTTEILPVSMTKTSVDCTMYICGDSIECSNLLLQYGSFCTQLNRALTGIAVEQDKNTQEVFAQVKQIYKTPPIKDFGGFNFSQILPDPSKPSKRSFIEDLLFNKVTLADAGFIKQYGDCLGDIAARDLICAQKFNGLTVLPPLLTDEMIAQYTSALLAGTITSGWTFGAGAALQIPFAMQMAYRFNGIGVTQNVLYENQKLIANQFNSAIGKIQDSLSSTASALGKLQDVVNQNAQALNTLVKQLSSNFGAISSVLNDILSRLDKVEAEVQIDRLITGRLQSLQTYVTQQLIRAAEIRASANLAATKMSECVLGQSKRVDFCGKGYHLMSFPQSAPHGVVFLHVTYVPAQEKNFTTAPAICHEGKAHFPREGVFVSNGTHWFITQRNFYEPQIITTDNTFVSGSCDVVIGIVNNTVYDPLQPELDSFKEELDKYFKNHTSPDVDLGDISGINASVVNIQKEIDRLNEVAKNLNESLIDLQELGKYEQYIK

SEQ ID NO: 1680 - protein, 1203 aa, Artificial Sequence
  SARS-CoV-2/pangolin/Guangxi/P1E/2017__EPI_ISL_410539 spike protein (1-1203)
MFVFLFVLPLVSSQCVNLTTRTGIQPGYTNSSTRGVYYPDKVFRSSILHLTQDLFLPFFSNVTWFNTINYQGGFKKFDNPVLPFNDGVYFASTEKSNIIRGWIFGTTLDARTQSLLIVNNATNVVIKVCEFQFCTDPFLGVYYHNNNKTWVENEFRVYSSANNCTFEYISQPFLMDLEGKQGNFKNLREFVFKNVDGYFKIYSKHTPIDLVRDLPRGFAALEPLVDLPIGINITRFQTLLALHRSYLTPGKLESGWTTGAAAYYVGYLQQRTFLLSYNQNGTITDAVDCSLDPLSETKCTLKSLTVEKGIYQTSNFRVQPTISIVRFPNITNLCPFGEVFNASKFASVYAWNRKRISNCVADYSVLYNSTSFSTFKCYGVSPTKLNDLCFTNVYADSFVVKGDEVRQIAPGQTGVIADYNYKLPDDFTGCVIAWNSVKQDALTGGNYLYRLFRKSKLKPFERDISTEIYQAGSTPCNGQVGLNCYYPLERYGFHPTTGVNYQPFRVVVLSFELLNGPATVCGPKLSTTLVKDKCVNFNFNGLTGTGVLTTSKKQFLPFQQFGRDISDTTDAVRDPQTLEILDITPCSFGGVSVITPGTNTSNQVAVLYQDVNCTEVPMAIHAEQLTPAWRVYSAGANVFQTRAGCLVGAEHVNNSYECDIPVGAGICASYHSMSSLRSVNQRSIIAYTMSLGAENSVAYSNNSIAIPTNFTISVTTEILPVSMTKTSVDCTMYICGDSIECSNLLLQYGSFCTQLNRALTGIAVEQDKNTQEVFAQVKQIYKTPPIKDFGGFNFSQILPDPSKPSKRSFIEDLLFNKVTLADAGFIKQYGDCLGDIAARDLICAQKFNGLTVLPPLLTDEMIAQYTSALLAGTITSGWTFGAGAALQIPFAMQMAYRFNGIGVTQNVLYENQKLIANQFNSAIGKIQDSLSSTASALGKLQDVVNQNAQALNTLVKQLSSNFGAISSVLNDILSRLDKVEAEVQIDRLITGRLQSLQTYVTQQLIRAAEIRASANLAATKMSECVLGQSKRVDFCGKGYHLMSFPQSAPHGVVFLHVTYVPAQEKNFTTAPAICHEGKAHFPREGVFVSNGTHWFITQRNFYEPQIITTDNTFVSGSCDVVIGIVNNTVYDPLQPELDSFKEELDKYFKNHTSPDVDLGDISGINASVVNIQKEIDRLNEVAKNLNESLIDLQELGKYEQYIK

SEQ ID NO: 1681 - protein, 1211 aa, Artificial Sequence; identical to SEQ ID NO: 40
  SARS-CoV-2/Wuhan/WIV05/2019__EPI_ISL_402128 spike protein (1-1211)(K986P_V987P)

SEQ ID NO: 1682 - protein, 1207 aa, Artificial Sequence; identical to SEQ ID NO: 41
  SARS-CoV-2/bat/Yunnan/RaTG13/2013__EPI_ISL_402131 spike protein (1-1207)(K982P_V983P)

SEQ ID NO: 1683 - protein, 1211 aa, Artificial Sequence; identical to SEQ ID NO: 42
  SARS-CoV-2/Wuhan/HBCDC-HB-01/2019__EPI_ISL_402132 spike protein (1-1211)(K986P_V987P)

SEQ ID NO: 1684 - protein, 1211 aa, Artificial Sequence; identical to SEQ ID NO: 43
  SARS-CoV-2/Guangdong/20SF028/2020__EPI_ISL_403936 spike protein (1-1211)(K986P_V987P)

SEQ ID NO: 1685 - protein, 1211 aa, Artificial Sequence; identical to SEQ ID NO: 44
  SARS-CoV-2/Shenzhen/SZTH-001/2020__EPI_ISL_406592 spike protein (1-1211)(K986P_V987P)

SEQ ID NO: 1686 - protein, 1211 aa, Artificial Sequence; identical to SEQ ID NO: 45
  SARS-CoV-2/Shenzhen/SZTH-004/2020__EPI_ISL_406595 spike protein (1-1211)(K986P_V987P)

SEQ ID NO: 1687 - protein, 1211 aa, Artificial Sequence; identical to SEQ ID NO: 46
  SARS-CoV-2/France/IDF0372/2020__EPI_ISL_406596 spike protein (1-1211)(K986P_V987P)

SEQ ID NO: 1688 - protein, 1211 aa, Artificial Sequence; identical to SEQ ID NO: 47
  SARS-CoV-2/Australia/VIC01/2020__EPI_ISL_406844 spike protein (1-1211)(K986P_V987P)

SEQ ID NO: 1689 - protein, 1211 aa, Artificial Sequence; identical to SEQ ID NO: 48
  SARS-CoV-2/Germany/BavPat1/2020__EPI_ISL_406862 spike protein (1-1211)(K986P_V987P)

SEQ ID NO: 1690 - protein, 1211 aa, Artificial Sequence
  SARS-CoV-2/Wuhan/HBCDC-HB-02/2020__EPI_ISL_412978 spike protein (1-1211)(K986P_V987P)
MFVFLVLLPLVSSQCVNLTTRTQLPPAYTNSFTRGVYYPDKVFRSSVLHSTQDLFLPFFSNVTWFHAIHVSGTNGTKRFDNPVLPFNDGVYFASTEKSNIIRGWIFGTTLDSKTQSLLIVNNATNVVIKVCEFQFCNDPFLGVYYHKNNKSWMESEFRVYSSANNCTFEYVSQPFLMDLEGKQGNFKNLREFVFKNIDGYFKIYSKHTPINLVRDLPQGFSALEPLVDLPIGINITRFQTLLALHRSYLTPGDSSSGWTAGAAAYYVGYLQPRTFLLKYNENGTITDAVDCALDPLSETKCTLKSFTVEKGIYQTSNFRVQPTESIVRFPNITNLCPFGEVFNATRFASVYAWNRKRISNCVADYSVLYNSASFSTFKCYGVSPTKLNDLCFTNVYADSFVIRGDEVRQIAPGQTGKIADYNYKLPDDFTGCVIAWNSNNLDSKVGGNYNYLYRLFRKSNLKPFERDISTEIYQAGSTPCNGVEGFNCYFPLQSYGFQPTNGVGYQPYRVVVLSFELLHAPATVCGPKKSTNLVKNKCVNFNFNGLTGTGVLTESNKKFLPFQQFGRDIADTTDAVRDPQTLEILDITPCSFGGVSVITPGTNTSNQVAVLYQDVNCTEVPVAIHADQLTPTWRVYSTGSNVFQTRAGCLIGAEHVNNSYECDIPIGAGICASYQTQTNSPRRARSVASQSIIAYTMSLGAENSVAYSNNSIAIPTNFTISVTTEILPVSMTKTSVDCTMYICGDSTECSNFLLQYGSFCTQLNRALTGIAVEQDKNTQEVFAQVKQIYKTPPIKDFGGFNFSQILPDPSKPSKRSFIEDLLFNKVTLADAGFIKQYGDCLGDIAARDLICAQKFNGLTVLPPLLTDEMIAQYTSALLAGTITSGWTFGAGAALQIPFAMQMAYRFNGIGVTQNVLYENQKLIANQFNSAIGKIQDSLSSTASALGKLQDVVNQNAQALNTLVKQLSSNFGAISSVLNDILSRLDPPEAEVQIDRLITGRLQSLQTYVTQQLIRAAEIRASANLAATKMSECVLGQSKRVDFCGKGYHLMSFPQSAPHGVVFLHVTYVPAQEKNFTTAPAICHDGKAHFPREGVFVSNGTHWFVTQRNFYEPQIITTDNTFVSGNCDVVIGIVNNTVYDPLQPELDSFKEELDKYFKNHTSPDVDLGDISGINASVVNIQKEIDRLNEVAKNLNESLIDLQELGKYEQYIK

SEQ ID NO: 1691 - protein, 1211 aa, Artificial Sequence
  SARS-CoV-2/Australia/QLD02/2020__EPI_ISL_407896 spike protein (1-1211)(K986P_V987P)
MFVFLVLLPLVSSQCVNLTTRTQLPPAYTNSFTRGVYYPDKVFRSSVLHSTQDLFLPFFSNVTWFHAIHVSGTNGTKRFDNPVLPFNDGVYFASTEKSNIIRGWIFGTTLDSKTQSLLIVNNATNVVIKVCEFQFCNDPFLGVYYHKNNKSWMESEFRVYSSANNCTFEYVSQPFLMDLEGKQGNFKNLREFVFKNIDGYFKIYSKHTPINLVRDLPQGFSALEPLVDLPIGINITRFQTLLALHRSYLTPGDSSSGWTAGAAAYYVGYLQPRTFLLKYNENGTITDAVDCALDPLSETKCTLKSFTVEKGIYQTSNFRVQPTESIVRFPNITNLCPFGEVFNATRFASVYAWNRKRISNCVADYSVLYNSASFSTFKCYGVSPTKLNDLCFTNVYADSFVIRGDEVRQIAPGQTGKIADYNYKLPDDFTGCVIAWNSNNLDSKVGGNYNYLYRLFRKSNLKPFERDISTEIYQAGSTPCNGVEGFNCYFPLQSYGFQPTNGVGYQPYRVVVLSFELLHAPATVCGPKKSTNLVKNKCVNFNFNGLTGTGVLTESNKKFLPFQQFGRDIADTTDAVRDPQTLEILDITPCSFGGVSVITPGTNTSNQVAVLYQDVNCTEVPVAIHADQLTPTWRVYSTGSNVFQTRAGCLIGAEHVNNSYECDIPIGAGICASYQTQTNSPRRARSVASQSIIAYTMSLGAENSVAYSNNSIAIPTNFTISVTTEILPVSMTKTSVDCTMYICGDSTECSNLLLQYGSFCTQLNRALTGIAVEQDKNTQEVFAQVKQIYKTPPIKDFGGFNFSQILPDPSKPSKRSFIEDLLFNKVTLADAGFIKQYGDCLGDIAARDLICAQKFNGLTVLPPLLTDEMIAQYTSALLAGTITSGWTFGAGAALQIPFAMQMAYRFNGIGVTQNVLYENQKLIANQFNSAIGKIQDSLSSTASALGKLQDVVNQNAQALNTLVKQLSSNFGAISSVLNDILSRLDPPEAEVQIDRLITGRLQSLQTYVTQQLIRAAEIRASANLAATKMSECVLGQSKRVDFCGKGYHLMSFPQSAPHGVVFLHVTYVPAQEKNFTTAPAICHDGKAHFPREGVFVSNGTHWFVTQRNFYEPQIITTDNTFVSGNCDVVIGIVNNTVYDPLQLELDSFKEELDKYFKNHTSPDVDLGDISGINASVVNIQKEIDRLNEVAKNLNESLIDLQELGKYEQYIK

SEQ ID NO: 1692 - protein, 1211 aa, Artificial Sequence
  SARS-CoV-2/India/1-31/2020__EPI_ISL_413523 spike protein (1-1211)(K986P_V987P)
MFVFLVLLPLVSSQCVNLTTRTQLPPAYTNSFTRGVYYPDKVFRSSVLHSTQDLFLPFFSNVTWFHAIHVSGTNGTKRFDNPVLPFNDGVYFASTEKSNIIRGWIFGTTLDSKTQSLLIVNNATNVVIKVCEFQFCNDPFLGVYYHKNNKSWMESEFRVYSSANNCTFEYVSQPFLMDLEGKQGNFKNLREFVFKNIDGYFKIYSKHTPINLVRDLPQGFSALEPLVDLPIGINITRFQTLLALHRSYLTPGDSSSGWTAGAAAYYVGYLQPRTFLLKYNENGTITDAVDCALDPLSETKCTLKSFTVEKGIYQTSNFRVQPTESIVRFPNITNLCPFGEVFNATRFASVYAWNRKRISNCVADYSVLYNSASFSTFKCYGVSPTKLNDLCFTNVYADSFVIRGDEVRQIAPGQTGKIADYNYKLPDDFTGCVIAWNSNNLDSKVGGNYNYLYRLFRKSNLKPFERDISTEIYQAGSTPCNGVEGFNCYFPLQSYGFQPTNGVGYQPYRVVVLSFELLHAPATVCGPKKSTNLVKNKCVNFNFNGLTGTGVLTESNKKFLPFQQFGRDIADTTDAVRDPQTLEILDITPCSFGGVSVITPGTNTSNQVAVLYQDVNCTEVPVAIHADQLTPTWRVYSTGSNVFQTRAGCLIGAEHVNNSYECDIPIGAGICASYQTQTNSPRRARSVASQSIIAYTMSLGAENSVAYSNNSIAIPTNFTISVTTEILPVSMTKTSVDCTMYICGDSTECSNLLLQYGSFCTQLNRALTGIAVEQDKNTQEVFAQVKQIYKTPPIKDFGGFNFSQILPDPSKPSKRSFIEDLLFNKVTLADAGFIKQYGDCLGDIAARDLICAQKFNGLTVLPPLLTDEMIAQYTSALLAGTITSGWTFGAGAALQIPFAMQMAYRFNGIGVTQNVLYENQKLIANQFNSVIGKIQDSLSSTASALGKLQDVVNQNAQALNTLVKQLSSNFGAISSVLNDILSRLDPPEAEVQIDRLITGRLQSLQTYVTQQLIRAAEIRASANLAATKMSECVLGQSKRVDFCGKGYHLMSFPQSAPHGVVFLHVTYVPAQEKNFTTAPAICHDGKAHFPREGVFVSNGTHWFVTQRNFYEPQIITTDNTFVSGNCDVVIGIVNNTVYDPLQPELDSFKEELDKYFKNHTSPDVDLGDISGINASVVNIQKEIDRLNEVAKNLNESLIDLQELGKYEQYIK

SEQ ID NO: 1693 - protein, 1211 aa, Artificial Sequence
  SARS-CoV-2/Guangdong/GD2020087-P0008/2020__EPI_ISL_413863 spike protein (1-1211)(K986P_V987P)
MFVFLVLLPLVSSQCVNLTTRTQLPPAYTNSFTRGVYYPDKVFRSSVLHSTQDLFLPFFSNVTWFHAIHVSGTNGTKRFDNPVLPFNDGVYFASTEKSNIIRGWIFGTTLDSKTQSLLIVNNATNVVIKVCEFQFCNDPFLGVYYHKNNKSWMESEFRVYSSANNCTFEYVSQPFLMDLEGKQGNFKNLREFVFKNIDGYFKIYSKHTPINLVRDLPQGFSALEPLVDLPIGINITRFQTLLALHRSYLTPGDSSSGWTAGAAAYYVGYLQPRTFLLKYNENGTITDAVDCALDPLSETKCTLKSFTVEKGIYQTSNFRVQPTESIVRFPNITNLCPFGEVFNATRFASVYAWNRKRISNCVADYSVLYNSASFSTFKCYGVSPTKLNDLCFTNVYADSFVIRGDEVREIAPGQTGKIADYNYKLPDDFTGCVIAWNSNNLDSKVGGNYNYLYRLFRKSNLKPFERDISTEIYQAGSTPCNGVEGFNCYFPLQSYGFQPTNGVGYQPYRVVVLSFELLHAPATVCGPKKSTNLVKNKCVNFNFNGLTGTGVLTESNKKFLPFQQFGRDIADTTDAVRDPQTLEILDITPCSFGGVSVITPGTNTSNQVAVLYQDVNCTEVPVAIHADQLTPTWRVYSTGSNVFQTRAGCLIGAEHVNNSYECDIPIGAGICASYQTQTNSPRRARSVASQSIIAYTMSLGAENSVAYSNNSIAIPTNFTISVTTEILPVSMTKTSVDCTMYICGDSTECSNLLLQYGSFCTQLNRALTGIAVEQDKNTQEVFAQVKQIYKTPPIKDFGGFNFSQILPDPSKPSKRSFIEDLLFNKVTLADAGFIKQYGDCLGDIAARDLICAQKFNGLTVLPPLLTDEMIAQYTSALLAGTITSGWTFGAGAALQIPFAMQMAYRFNGIGVTQNVLYENQKLIANQFNSAIGKIQDSLSSTASALGKLQDVVNQNAQALNTLVKQLSSNFGAISSVLNDILSRLDPPEAEVQIDRLITGRLQSLQTYVTQQLIRAAEIRASANLAATKMSECVLGQSKRVDFCGKGYHLMSFPQSAPHGVVFLHVTYVPAQEKNFTTAPAICHDGKAHFPREGVFVSNGTHWFVTQRNFYEPQIITTDNTFVSGNCDVVIGIVNNTVYDPLQPELDSFKEELDKYFKNHTSPDVDLGDISGINASVVNIQKEIDRLNEVAKNLNESLIDLQELGKYEQYIK

SEQ ID NO: 1694 - protein, 1211 aa, Artificial Sequence
  SARS-CoV-2/Sweden/01/2020__EPI_ISL_411951 spike protein (1-1211)(K986P_V987P)
MFVFLVLLPLVSSQCVNLTTRTQLPPAYTNSFTRGVYYPDKVFRSSVLHSTQDLFLPFFSNVTWFHAIHVSGTNGTKRFDNPVLPFNDGVYFASTEKSNIIRGWIFGTTLDSKTQSLLIVNNATNVVIKVCEFQFCNDPFLGVYYHKNNKSWMESEFRVYSSANNCTFEYVSQPFLMDLEGKQGNFKNLREFVFKNIDGYFKIYSKHTPINLVRDLPQGFSALEPLVDLPIGINITRFQTLLALHRSYLTPGDSSSGWTAGAAAYYVGYLQPRTFLLKYNENGTITDAVDCALDPLSETKCTLKSFTVEKGIYQTSNFRVQPTESIVRFPNITNLCPFGEVFNATRFASVYAWNRKRISNCVADYSVLYNSASFSTFKCYGVSPTKLNDLCFTNVYADSFVIRGDEVRQIAPGQTGKIADYNYKLPDDFTGCVIAWNSNNLDSKVGGNYNYLYRLFRKSNLKPFERDISTEIYQAGSTPCNGVEGFNCYFPLQSYGFQPTNGVGYQPYRVVVLSFELLHAPATVCGPKKSTNLVKNKCVNFNFNGLTGTGVLTESNKKFLPFQQFGRDIADTTDAVRDPQTLEILDITPCSFGGVSVITPGTNTSNQVAVLYQDVNCTEVPVAIHADQLTPTWRVYSTGSNVFQTRAGCLIGAEHVNNSYECDIPIGAGICASYQTQTNSPRRARSVASQSIIAYTMSLGAENSVAYSNNSIAIPTNFTISVTTEILPVSMTKTSVDCTMYICGDSTECSNLLLQYGSFCTQLNRALTGIAVEQDKNTQEVFAQVKQIYKTPPIKDCGGFNFSQILPDPSKPSKRSFIEDLLFNKVTLADAGFIKQYGDCLGDIAARDLICAQKFNGLTVLPPLLTDEMIAQYTSALLAGTITSGWTFGAGAALQIPFAMQMAYRFNGIGVTQNVLYENQKLIANQFNSAIGKIQDSLSSTASALGKLQDVVNQNAQALNTLVKQLSSNFGAISSVLNDILSRLDPPEAEVQIDRLITGRLQSLQTYVTQQLIRAAEIRASANLAATKMSECVLGQSKRVDFCGKGYHLMSFPQSAPHGVVFLHVTYVPAQEKNFTTAPAICHDGKAHFPREGVFVSNGTHWFVTQRNFYEPQIITTDNTFVSGNCDVVIGIVNNTVYDPLQPELDSFKEELDKYFKNHTSPDVDLGDISGINASVVNIQKEIDRLNEVAKNLNESLIDLQELGKYEQYIK

SEQ ID NO: 1695 - protein, 1211 aa, Artificial Sequence
  SARS-CoV-2/Tianmen/HBCDC-HB-07/2020__EPI_ISL_412983 spike protein (1-1211)(K986P_V987P)
MFVFLVLLPLVSSQCVNLTTRTQLPPAYTNSFTRGVYYPDKVFRSSVLHSTQDLFLPFFSNVTWFHAIHVSGTNGTKRFDNPVLPFNDGVYFASTEKSNIIRGWIFGTTLDSKTQSLLIVNNATNVVIKVCEFQFCNDPFLGVYYHKNNKSWMESEFRVYSSANNCTFEYVSQPFLMDLEGKQGNFKNLREFVFKNIDGYFKIYSKHTPINLVRDLPQGFSALEPLVDLPIGINITRFQTLLALHRSYLTPGDSSSGWTAGAAAYYVGYLQPRTFLLKYNENGTITDAVDCALDPLSETKCTLKSFTVEKGIYQTSNFRVQPTESIVRFPNITNLCPFGEVFNATRFASVYAWNRKRISNCVADYSVLYNSASFSTFKCYGVSPTKLNDLCFTNVYADSFVIRGDEVRQIAPGQTGKIADYNYKLPDDFTGCVIAWNSNNLDSKVGGNYNYLYRLFRKSNLKPFERDISTEIYQAGSTPCNGVEGFNCYFPLQSYGFQPTNGVGYQPYRVVVLSFELLHAPATVCGPKKSTNLVKNKCVNFNFNGLTGTGVLTESNKKFLPFQQFGRDIADTTDAVRDPQTLEILDITPCSFGGVSVITPGTNTSNQVAVLYQDLNCTEVPVAIHADQLTPTWRVYSTGSNVFQTRAGCLIGAEHVNNSYECDIPIGAGICASYQTQTNSPRRARSVASQSIIAYTMSLGAENSVAYSNNSIAIPTNFTISVTTEILPVSMTKTSVDCTMYICGDSTECSNLLLQYGSFCTQLNRALTGIAVEQDKNTQEVFAQVKQIYKTPPIKDFGGFNFSQILPDPSKPSKRSFIEDLLFNKVTLADAGFIKQYGDCLGDIAARDLICAQKFNGLTVLPPLLTDEMIAQYTSALLAGTITSGWTFGAGAALQIPFAMQMAYRFNGIGVTQNVLYENQKLIANQFNSAIGKIQDSLSSTASALGKLQDVVNQNAQALNTLVKQLSSNFGAISSVLNDILSRLDPPEAEVQIDRLITGRLQSLQTYVTQQLIRAAEIRASANLAATKMSECVLGQSKRVDFCGKGYHLMSFPQSAPHGVVFLHVTYVPAQEKNFTTAPAICHDGKAHFPREGVFVSNGTHWFVTQRNFYEPQIITTDNTFVSGNCDVVIGIVNNTVYDPLQPELDSFKEELDKYFKNHTSPDVDLGDISGINASVVNIQKEIDRLNEVAKNLNESLIDLQELGKYEQYIK

SEQ ID NO: 1696 - protein, 1211 aa, Artificial Sequence
  SARS-CoV-2/Hong Kong/case42_VM20002493/2020__EPI_ISL_414527 spike protein (1-1211)(K986P_V987P)
MFVFLVLLPLVSSQCVNLTTRTQLPPAYTNSFTRGVYYPDKVFRSSVLHSTQDLFLPFFSNVTWFHAIHVSGTNGTKRFDNPVLPFNDGVYFASTEKSNIIRGWIFGTTLDSKTQSLLIVNNATNVVIKVCEFQFCNDPFLGVYYHKNNKSWMESEFRVYSSANNCTFEYVSQPFLMDLEGKQGNFKNLREFVFKNIDGYFKIYSKHTPINLVRDLPQGFSALEPLVDLPIGINITRFQTLLALHRSYLTPGDSSSGWTAGAAAYYVGYLQPRTFLLKYNENGTITDAVDCALDPLSETKCTLKSFTVEKGIYQTSNFRVQPTESIVRFPNITNLCPFGEVFNATRFASVYAWNRKRISNCVADYSVLYNSASFSTFKCYGVSPTKLNDLCFTNVYADSFVIRGDEVRQIAPGQTGKIADYNYKLPDDFTGCVIAWNSNNLDSKVGGNYNYLYRLFRKSNLKPFERDISTEIYQAGSTPCNGVEGFNCYFPLQSYGFQPTNGVGYQPYRVVVLSFELLHAPATVCGPKKSTNLVKNKCVNFNFNGLTGTGVLTESNKKFLPFQQFGRDIADTTDAVRDPQTLEILDITPCSFGGVSVITPGTNTSNQVAVLYQDVNCTEVPVAIHADQLTPTWRVYSTGSNVFQTRAGCLIGAEHVNNSYECDIPIGAGICASYQTQTNSPRRARSVASQSIIAYTMSLGAENSVAYSNNSIAIPTNFAISVTTEILPVSMTKTSVDCTMYICGDSTECSNLLLQYGSFCTQLNRALTGIAVEQDKNTQEVFAQVKQIYKTPPIKDFGGFNFSQILPDPSKPSKRSFIEDLLFNKVTLADAGFIKQYGDCLGDIAARDLICAQKFNGLTVLPPLLTDEMIAQYTSALLAGTITSGWTFGAGAALQIPFAMQMAYRFNGIGVTQNVLYENQKLIANQFNSAIGKIQDSLSSTASALGKLQDVVNQNAQALNTLVKQLSSNFGAISSVLNDILSRLDPPEAEVQIDRLITGRLQSLQTYVTQQLIRAAEIRASANLAATKMSECVLGQSKRVDFCGKGYHLMSFPQSAPHGVVFLHVTYVPAQEKNFTTAPAICHDGKAHFPREGVFVSNGTHWFVTQRNFYEPQIITTDNTFVSGNCDVVIGIVNNTVYDPLQPELDSFKEELDKYFKNHTSPDVDLGDISGINASVVNIQKEIDRLNEVAKNLNESLIDLQELGKYEQYIK

SEQ ID NO: 1697 - protein, 1211 aa, Artificial Sequence
  SARS-CoV-2/USA/CruiseA-23/2020__EPI_ISL_414482 spike protein (1-1211)(K986P_V987P)
MFVFLVLLPLVSSQCVNLTTRTQLPPAYTNSFTRGVYYPDKVFRSSVLHSTQDLFLPFFSNVTWFHAIHVSGTNGTKRFDNPVLPFNDGVYFASTEKSNIIRGWIFGTTLDSKTQSLLIVNNATNVVIKVCEFQFCNDPFLGVYYHKNNKSWMESEFRVYSSANNCTFEYVSQPFLMDLEVKQGNFKNLREFVFKNIDGYFKIYSKHTPINLVRDLPQGFSALEPLVDLPIGINITRFQTLLALHRSYLTPGDSSSGWTAGAAAYYVGYLQPRTFLLKYNENGTITDAVDCALDPLSETKCTLKSFTVEKGIYQTSNFRVQPTESIVRFPNITNLCPFGEVFNATRFASVYAWNRKRISNCVADYSVLYNSASFSTFKCYGVSPTKLNDLCFTNVYADSFVIRGDEVRQIAPGQTGKIADYNYKLPDDFTGCVIAWNSNNLDSKVGGNYNYLYRLFRKSNLKPFERDISTEIYQAGSTPCNGVEGFNCYFPLQSYGFQPTNGVGYQPYRVVVLSFELLHAPATVCGPKKSTNLVKNKCVNFNFNGLTGTGVLTESNKKFLPFQQFGRDIADTTDAVRDPQTLEILDITPCSFGGVSVITPGTNTSNQVAVLYQDVNCTEVPVAIHADQLTPTWRVYSTGSNVFQTRAGCLIGAEHVNNSYECDIPIGAGICASYQTQTNSPRRARSVASQSIIAYTMSLGAENSVAYSNNSIAIPTNFTISVTTEILPVSMTKTSVDCTMYICGDSTECSNLLLQYGSFCTQLNRALTGIAVEQDKNTQEVFAQVKQIYKTPPIKDFGGFNFSQILPDPSKPSKRSFIEDLLFNKVTLADAGFIKQYGDCLGDIAARDLICAQKFNGLTVLPPLLTDEMIAQYTSALLAGTITSGWTFGAGAALQIPFAMQMAYRFNGIGVTQNVLYENQKLIANQFNSAIGKIQDSLSSTASALGKLQDVVNQNAQALNTLVKQLSSNFGAISSVLNDILSRLDPPEAEVQIDRLITGRLQSLQTYVTQQLIRAAEIRASANLAATKMSECVLGQSKRVDFCGKGYHLMSFPQSAPHGVVFLHVTYVPAQEKNFTTAPAICHDGKAHFPREGVFVSNGTHWFVTQRNFYEPQIITTDNTFVSGNCDVVIGIVNNTVYDPLQPELDSFKEELDKYFKNHTSPDVDLGDISGINASVVNIQKEIDRLNEVAKNLNESLIDLQELGKYEQYIK

SEQ ID NO: 1698 - protein, 1211 aa, Artificial Sequence
  SARS-CoV-2/Hong Kong/case85_VM20002868/2020__EPI_ISL_414519 spike protein (1-1211)(K986P_V987P)
MFVFLVLVPLVSSQCVNLTTRTQLPPAYTNSFTRGVYYPDKVFRSSVLHSTQDLFLPFFSNVTWFHAIHVSGTNGTKRFDNPVLPFNDGVYFASTEKSNIIRGWIFGTTLDSKTQSLLIVNNATNVVIKVCEFQFCNDPFLGVYYHKNNKSWMESEFRVYSSANNCTFEYVSQPFLMDLEGKQGNFKNLREFVFKNIDGYFKIYSKHTPINLVRDLPQGFSALEPLVDLPIGINITRFQTLLALHRSYLTPGDSSSGWTAGAAAYYVGYLQPRTFLLKYNENGTITDAVDCALDPLSETKCTLKSFTVEKGIYQTSNFRVQPTESIVRFPNITNLCPFGEVFNATRFASVYAWNRKRISNCVADYSVLYNSASFSTFKCYGVSPTKLNDLCFTNVYADSFVIRGDEVRQIAPGQTGKIADYNYKLPDDFTGCVIAWNSNNLDSKVGGNYNYLYRLFRKSNLKPFERDISTEIYQAGSTPCNGVEGFNCYFPLQSYGFQPTNGVGYQPYRVVVLSFELLHAPATVCGPKKSTNLVKNKCVNFNFNGLTGTGVLTESNKKFLPFQQFGRDIADTTDAVRDPQTLEILDITPCSFGGVSVITPGTNTSNQVAVLYQDVNCTEVPVAIHADQLTPTWRVYSTGSNVFQTRAGCLIGAEHVNNSYECDIPIGAGICASYQTQTNSPRRARSVASQSIIAYTMSLGAENSVAYSNNSIAIPTNFTISVTTEILPVSMTKTSVDCTMYICGDSTECSNLLLQYGSFCTQLNRALTGIAVEQDKNTQEVFAQVKQIYKTPPIKDFGGFNFSQILPDPSKPSKRSFIEDLLFNKVTLADAGFIKQYGDCLGDIAARDLICAQKFNGLTVLPPLLTDEMIAQYTSALLAGTITSGWTFGAGAALQIPFAMQMAYRFNGIGVTQNVLYENQKLIANQFNSAIGKIQDSLSSTASALGKLQDVVNQNAQALNTLVKQLSSNFGAISSVLNDILSRLDPPEAEVQIDRLITGRLQSLQTYVTQQLIRAAEIRASANLAATKMSECVLGQSKRVDFCGKGYHLMSFPQSAPHGVVFLHVTYVPAQEKNFTTAPAICHDGKAHFPREGVFVSNGTHWFVTQRNFYEPQIITTDNTFVSGNCDVVIGIVNNTVYDPLQPELDSFKEELDKYFKNHTSPDVDLGDISGINASVVNIQKEIDRLNEVAKNLNESLIDLQELGKYEQYIK

SEQ ID NO: 1699 - protein, 1211 aa, Artificial Sequence; identical to SEQ ID NO: 48
  SARS-CoV-2/England/200990660/2020__EPI_ISL_414523 spike protein (1-1211)(K986P_V987P)

SEQ ID NO: 1700 - protein, 1211 aa, Artificial Sequence
  SARS-CoV-2/Australia/NSW09/2020__EPI_ISL_413595 spike protein (1-1211)(K986P_V987P)
MFVFLVLLPLVSSQCVNLTTRTQLPPAYTNSFTRGVYYPDKVFRSSVLHSTQDLFLPFFSNVTWFHAIHVSGTNGTKRFDNPVLPFNDGVYFASTEKSNIIRGWIFGTTLDSKTQSLLIVNNATNVVIKVCEFQFCNDPFLGVYYHKNNKSWMESEFRVYSSANNCTFEYVSQPFLMDLEGKQGNFKNLREFVFKNIDGYFKIYSKHTPINLVRDLPQGFSALEPLVDLPIGINITRFQTLLALHRSYLTPGDSSSGWTAGAAAYYVGYLQPRTFLLKYNENGTITDAVDCALDPLSETKCTLKSFTVEKGIYQTSNFRVQPTESIVRFPNITNLCPFGEVFNATRFASVYAWNRKRISNCVADYSVLYNSASFSTFKCYGVSPTKLNDLCFTNVYADSFVIRGDEVRQIAPGQTGKIADYNYKLPDDFTGCVIAWNSNNLDSKVGGNYNYLYRLFRKSNLKPFERDISTEIYQAGSTPCNGVEGFNCYFPLQSYGFQPTNGVGYQPYRVVVLSFELLHAPATVCGPKKSTNLVKNKCVNFNFNGLTGTGVLTESNKKFLPFQQFGRDIADTTDAVRDPQTLEILDITPCSFGGVSVITPGTNTSNQVAVLYQDVNCTEVPVAIHADQLTPTWRVYSTGSNVFQTRAGCLIGAEHVNNSYECDIPIGAGICASYQTQTNSPRRARSVASQSIIAYTMSLGAENSVAYSNNSIAIPTNFTISVTTEILPVSMTKTSVDCTMYICGDSTECSNLLLQYGSFCTQLNRALTGIAVEQDKNTQEVFAQVKQIYKTPPIKDFGGFNFSQILPDPSKPSKRSFIEDLLFNKVTLADAGFIKQYGDCLGDIAARDLICAQKFNGLTVLPPLLTDEMIAQYTSALLAGTITSGWTFGAGAALQIPFAMQMAYRFNGIGVTQNVLYENQKLIANQFNSAIGKIQDSLSFTASALGKLQDVVNQNAQALNTLVKQLSSNFGAISSVLNDILSRLDPPEAEVQIDRLITGRLQSLQTYVTQQLIRAAEIRASANLAATKMSECVLGQSKRVDFCGKGYHLMSFPQSAPHGVVFLHVTYVPAQEKNFTTAPAICHDGKAHFPREGVFVSNGTHWFVTQRNFYEPQIITTDNTFVSGNCDVVIGIVNNTVYDPLQPELDSFKEELDKYFKNHTSPDVDLGDISGINASVVNIQKEIDRLNEVAKNLNESLIDLQELGKYEQYIK

SEQ ID NO: 1701 - protein, 1211 aa, Artificial Sequence; identical to SEQ ID NO: 40
  SARS-CoV-2/Australia/NSW10/2020__EPI_ISL_413596 spike protein (1-1211)(K986P_V987P)

SEQ ID NO: 1702 - protein, 1211 aa, Artificial Sequence
  SARS-CoV-2/Switzerland/1000477797/2020__EPI_ISL_413023 spike protein (1-1211)(K986P_V987P)
MFVFLVLLPLVSSQCVNLTTRTQLPPAYTNSFTRGVYYPDKVFRSSVLHSTQDLFLPFFSNVTWFHAIHVSGTNGTKRFDNPVLPFNDGVYFASTEKSNIIRGWIFGTTLDSKTQSLLIVNNATNVVIKVCEFQFCNDPFLGVYYHKNNKSWMESEFRVYSSANNCTFEYVSQPFLMDLEGKQGNFKNLREFVFKNIDGYFNIYSKHTPINLVRDLPQGFSALEPLVDLPIGINITRFQTLLALHRSYLTPGDSSSGWTAGAAAYYVGYLQPRTFLLKYNENGTITDAVDCALDPLSETKCTLKSFTVEKGIYQTSNFRVQPTESIVRFPNITNLCPFGEVFNATRFASVYAWNRKRISNCVADYSVLYNSASFSTFKCYGVSPTKLNDLCFTNVYADSFVIRGDEVRQIAPGQTGKIADYNYKLPDDFTGCVIAWNSNNLDSKVGGNYNYLYRLFRKSNLKPFERDISTEIYQAGSTPCNGVEGFNCYFPLQSYGFQPTNGVGYQPYRVVVLSFELLHAPATVCGPKKSTNLVKNKCVNFNFNGLTGTGVLTESNKKFLPFQQFGRDIADTTDAVRDPQTLEILDITPCSFGGVSVITPGTNTSNQVAVLYQGVNCTEVPVAIHADQLTPTWRVYSTGSNVFQTRAGCLIGAEHVNNSYECDIPIGAGICASYQTQTNSPRRARSVASQSIIAYTMSLGAENSVAYSNNSIAIPTNFTISVTTEILPVSMTKTSVDCTMYICGDSTECSNLLLQYGSFCTQLNRALTGIAVEQDKNTQEVFAQVKQIYKTPPIKDFGGFNFSQILPDPSKPSKRSFIEDLLFNKVTLADAGFIKQYGDCLGDIAARDLICAQKFNGLTVLPPLLTDEMIAQYTSALLAGTITSGWTFGAGAALQIPFAMQMAYRFNGIGVTQNVLYENQKLIANQFNSAIGKIQDSLSSTASALGKLQDVVNQNAQALNTLVKQLSSNFGAISSVLNDILSRLDPPEAEVQIDRLITGRLQSLQTYVTQQLIRAAEIRASANLAATKMSECVLGQSKRVDFCGKGYHLMSFPQSAPHGVVFLHVTYVPAQEKNFTTAPAICHDGKAHFPREGVFVSNGTHWFVTQRNFYEPQIITTDNTFVSGNCDVVIGIVNNTVYDPLQPELDSFKEELDKYFKNHTSPDVDLGDISGINASVVNIQKEIDRLNEVAKNLNESLIDLQELGKYEQYIK

SEQ ID NO: 1703 - protein, 1211 aa, Artificial Sequence
  SARS-CoV-2/Belgium/BA-02291/2020__EPI_ISL_415159 spike protein (1-1211)(K986P_V987P)
MFVFLVLLPLVSSQCVNLTTRTQLPPAYTNSFTRGVYYPDKVFRSSVLHSTQDLFLPFFSNVTWFHAIHVSGTNGTKRFDNPVLPFNDGVYFASTEKSNIIRGWIFGTTLDSKTQSLLIVNNATNVVIKVCEFQFCNDPFLGVYYHKNNKSWMESEFRVYSSANNCTFEYVSQPFLMDLEGKQGNFKNLREFVFKNIDGYFKIYSKHTPINLVRDLPQGFSALEPLVDLPIGINITRFQTLLALHRSYLTPGDSSSGWTAGAAAYYVGYLQPRTFLLKYNENGTITDAVDCALDPLSETKCTLKSFTVEKGIYQTSNFRVQPTESIVRFPNITNLCPFGEVFNATRFASVYAWNRKRISNCVADYSVLYNSASFSTFKCYGVSPTKLNDLCFTNVYADSFVIRGDEVRQIAPGQTGKIADYNYKLPDDFTGCVIAWNSNNLDSKVGGNYNYLYRLFRRSNLKPFERDISTEIYQAGSTPCNGVEGFNCYFPLQSYGFQPTNGVGYQPYRVVVLSFELLPAPATVCGPKKSTNLVKNKCVNFNFNGLTGTGVLTESNKKFLPFQQFGRDIADTTDAVRDPQTLEILDITPCSFGGVSVITPGTNTSNQVAVLYQGVNCTEVPVAIHADQLTPTWRVYSTGSNVFQTRAGCLIGAEHVNNSYECDIPIGAGICASYQTQTNSPRRARSVASQSIIAYTMSLGAENSVAYSNNSIAIPTNFTISVTTEILPVSMTKTSVDCTMYICGDSTECSNLLLQYGSFCTQLNRALTGIAVEQDKNTQEVFAQVKQIYKTPPIKDFGGFNFSQILPDPSKPSKRSFIEDLLFNKVTLADAGFIKQYGDCLGDIAARDLICAQKFNGLTVLPPLLTDEMIAQYTSALLAGTITSGWTFGAGAALQIPFAMQMAYRFNGIGVTQNVLYENQKLIANQFNSAIGKIQDSLSSAAPALGKLQDVVNQNAQALNTLVKQLSSNFGAISSVLNDILSRLDPPEAEVQIDRLITGRLQSLQTYVTQQLIRAAEIRASANLAATKMSECVLGQSKRVDFCGKGYHLMSFPQSAPHGVVFLHVTYVPAQEKNFTTAPAICHDGKAHFPREGVFVSNGTHWFVTQRNFYEPQIITTDNTFVSGNCDVVIGIVNNTVYDPLQPELDSFKEELDKYFKNHTSPDVDLGDISGINASVVNIQKEIDRLNEVAKNLNESLIDLQELGKYEQYIK

SEQ ID NO: 1704 - protein, 1211 aa, Artificial Sequence
  SARS-CoV-2/USA/WA8-UW5/2020__EPI_ISL_413486 spike protein (1-1211)(K986P_V987P)
MFVFLVLLPLVSSQCVNLTTRTQLPPAYTNSFTRGVYYPDKVFRSSVLHSTQDLFLPFFSNVTWFHAIHVSGTNGTKRFDNPVLPFNDGVYFASTEKSNIIRGWIFGTTLDSKTQSLLIVNNATNVVIKVCEFQFCNDPFLGVYYHKNNKSWMESEFRVYSSANNCTFEYVSQPFLMDLEGKQGNFKNLREFVFKNIDGYFKIYSKHTPINLVRDLPQGFSALEPLVDLPIGINITRFQTLLALHRSYLTPGDSSSGWTAGAAAYYVGYLQPRTFLLKYNENGTITDAVDCALDPLSETKCTLKSFTVEKGIYQTSNFRVQPTESIVRFPNITNLCPFGEVFNATRFASVYAWNRKRISNCVADYSVLYNSASFSTFKCYGVSPTKLNDLCFTNVYADSFVIRGDEVRQIAPGQTGKIADYNYKLPDDFTGCVIAWNSNNLDSKVGGNYNYLYRLFRKSNLKPFERDISTEIYQAGSTPCNGVEGFNCYFPLQSYGFQPTNGVGYQPYRVVVLSFELLHAPATVCGPKKSTNLVKNKCVNFNFNGLTGTGVLTESNKKFLPFQQFGRDIADTTDAVRDPQTLEILDITPCSFGGVSVITPGTNTSNQVAVLYQDVNCTEVPVAIHADQLTPTWRVYSTGSNVFQTRAGCLIGAEYVNNSYECDIPIGAGICASYQTQTNSPRRARSVASQSIIAYTMSLGAENSVAYSNNSIAIPTNFTISVTTEILPVSMTKTSVDCTMYICGDSTECSNLLLQYGSFCTQLNRALTGIAVEQDKNTQEVFAQVKQIYKTPPIKDFGGFNFSQILPDPSKPSKRSFIEDLLFNKVTLADAGFIKQYGDCLGDIAARDLICAQKFNGLTVLPPLLTDEMIAQYTSALLAGTITSGWTFGAGAALQIPFAMQMAYRFNGIGVTQNVLYENQKLIANQFNSAIGKIQDSLSSTASALGKLQDVVNQNAQALNTLVKQLSSNFGAISSVLNDILSRLDPPEAEVQIDRLITGRLQSLQTYVTQQLIRAAEIRASANLAATKMSECVLGQSKRVDFCGKGYHLMSFPQSAPHGVVFLHVTYVPAQEKNFTTAPAICHDGKAHFPREGVFVSNGTHWFVTQRNFYEPQIITTDNTFVSGNCDVVIGIVNNTVYDPLQPELDSFKEELDKYFKNHTSPDVDLGDISGINASVVNIQKEIDRLNEVAKNLNESLIDLQELGKYEQYIK

SEQ ID NO: 1705 - protein, 1211 aa, Artificial Sequence
  SARS-CoV-2/England/20102000506/2020__EPI_ISL_415147 spike protein (1-1211)(K986P_V987P)
MFVFLVLLPLVSSQCVNLTTRTQLPPAYTNSFTRGVYYPDKVFRSSVLHSTQDLFLPFFSNVTWFHAIHVSGTNGTKRFDNPVLPFNDGVYFASTEKSNIIRGWIFGTTLDSKTQSLLIVNNATNVVIKVCEFQFCNDPFLGVYYHKNNKSWMESEFRVYSSANNCTFEYVSQPFLMDLEGKQGNFKNLREFVFKNIDGYFKIYSKHTPINLVRDLPQGFSALEPLVDLPIGINITRFQTLLALHRSYLTPGDSSSGWTAGAAAYYVGYLQPRTFLLKYNENGTITDAVDCALDPLSETKCTLKSFTVEKGIYQTSNFRVQPTESIVRFPNITNLCPFGEVFNATRFASVYAWNRKRISNCVADYSVLYNSASFSTFKCYGVSPTKLNDLCFTNVYADSFVIRGDEVRQIAPGQTGKIADYNYKLPDDFTGCVIAWNSNNLDSKVGGNYNYLYRLFRKSNLKPFERDISTEIYQAGSTPCNGVEGFNCYFPLQSYGFQPTNGVGYQPYRVVVLSFELLHAPATVCGPKKSTNLVKNKCVNFNFNGLTGTGVLTESNKKFLPFQQFGRDIADTTDAVRDPQTLEILDITPCSFGGVSVITPGTNTSNQVAVLYQGVNCTEVPVAIHADQLTPTWRVYSTGSNVFQTRAGCLIGAEHVNNSYECDIPIGAGICASYQTQTNSPRRARSVASQSIIAYTMSLGAENSVAYSNNSIAIPTNFTISVTTEILPVSMTKTSVDCTMYICGDSTECSNLLLQYGSFCTQLNRALTGIAVEQDKNTQEVFAQVKQIYKTPPIKDFGGFNFSQILPDPSKPSKRSFIEDLLFNKVTLADAGFIKQYGYCLGDIAARDLICAQKFNGLTVLPPLLTDEMIAQYTSALLAGTITSGWTFGAGAALQIPFAMQMAYRFNGIGVTQNVLYENQKLIANQFNSAIGKIQDSLSSTASALGKLQDVVNQNAQALNTLVKQLSSNFGAISSVLNDILSRLDPPEAEVQIDRLITGRLQSLQTYVTQQLIRAAEIRASANLAATKMSECVLGQSKRVDFCGKGYHLMSFPQSAPHGVVFLHVTYVPAQEKNFTTAPAICHDGKAHFPREGVFVSNGTHWFVTQRNFYEPQIITTDNTFVSGNCDVVIGIVNNTVYDPLQPELDSFKEELDKYFKNHTSPDVDLGDISGINASVVNIQKEIDRLNEVAKNLNESLIDLQELGKYEQYIK

SEQ ID NO: 1706 - protein, 1211 aa, Artificial Sequence
  SARS-CoV-2/Belgium/VAG-03013/2020__EPI_ISL_415155 spike protein (1-1211)(K986P_V987P)
MFVFLVLLPLVSSQCVNLTTRTQLPPAYTNSFTRGVYYPDKVFRSSVLHSTQDLFLPFFSNVTWFHAIHVSGTNGTKRFDNPVLPFNDGVYFASTEKSNIIRGWIFGTTLDSKTQSLLIVNNATNVVIKVCEFQFCNDPFLGVYYHKNNKSWMESEFRVYSSANNCTFEYVSQPFLMDLEGKQGNFKNLREFVFKNIDGYFKIYSKHTPINLVRDLPQGFSALEPLVDLPIGINITRFQTLLALHRSYLTPGDSSSGWTAGAAAYYVGYLQPRTFLLKYNENGTITDAVDCALDPLSETKCTLKSFTVEKGIYQTSNFRVQPTESIVRFPNITNLCPFGEVFNATRFASVYAWNRKRISNCVADYSVLYNSASFSTFKCYGVSPTKLNDLCFTNVYADSFVIRGDEVRQIAPGQTGKIADYNYKLPDDFTGCVIAWNSNNLDSKVGGNYNYLYRLFRKSNLKPFERDISTEIYQAGSTPCNGVEGFNCYFPLQSYGFQPTNGVGYQPYRVVVLSFELLHAPATVCGPKKSTNLVKNKCVNFNFNGLTGTGVLTESNKKFLPFQQFGRDIADTTDAVRDPQTLEILDITPCSFGGVSVITPGTNTSNQVAVLYQGVNCTEVPVAIHADQLTPTWRVYSTGSNVFQTRAGCLIGAEHVNNSYECDIPIGAGICASYQTQTNSPRRARSVASQSIIAYTMSLGAENSVAYSNNSIAIPTNFTISVTTEILPVSMTKTSVDCTMYICGDSTECSNLLLQYGSFCTQLNRALTGIAVEQDKNTQEVFAQVKQIYKTPPIKDFGGFNFSQILPDPSKPSKRSFIEDLLFNKVTLADAGFIKQYGDCLGDIAARDLICAQKFNGLTVLPPLLTDEMIAQYTSALLAGTITSGWTFGAGAALQIPFAMQMAYRFNGIGVTQNVLYENQKLIANQFNSAIGKIQDSLSSTATALGKLQDVVNQNAQALNTLVKQLSSNFGAISSVLNDILSRLDPPEAEVQIDRLITGRLQSLQTYVTQQLIRAAEIRASANLAATKMSECVLGQSKRVDFCGKGYHLMSFPQSAPHGVVFLHVTYVPAQEKNFTTAPAICHDGKAHFPREGVFVSNGTHWFVTQRNFYEPQIITTDNTFVSGNCDVVIGIVNNTVYDPLQPELDSFKEELDKYFKNHTSPDVDLGDISGINASVVNIQKEIDRLNEVAKNLNESLIDLQELGKYEQYIK

SEQ ID NO: 1707 - protein, 1211 aa, Artificial Sequence
  SARS-CoV-2/Belgium/BC-03016/2020__EPI_ISL_415157 spike protein (1-1211)(K986P_V987P)
MFVFLVLLPLVSSQCVNLTTRTQLPPAYTNSFTRGVYYPDKVFRSSVLHSTQDLFLPFFSNVTWFHAIHVSGTNGTKRFDNPVLPFNDGVYFASTEKSNIIRGWIFGTTLDSKTQSLLIVNNATNVVIKVCEFQFCNDPFLGVYYHKNNKSWMESEFRVYSSANNCTFEYVSQPFLMDLEGKQGNFKNLREFVFKNIDGYFKIYSKHTPINLVRDLPQGFSALEPLVDLPIGINITRFQTLLALHRSYLTPGDSSSGWTAGAAAYYVGYLQPRTFLLKYNENGTITDAVDCALDPLSETKCTLKSFTVEKGIYQTSNFRVQPTESIVRFPNITNLCPFGEVFNATRFASVYAWNRKRISNCVADYSVLYNSASFSTFKCYGVSPTKLNDLCFTNVYADSFVIRGDEVRQIAPGQTGKIADYNYKLPDDFTGCVIAWNSNNLDSKVGGNYNYLYRLFRKSNLKPFERDISTEIYQAGSTPCNGVEGFNCYFPLQSYGFQPTNGVGYQPYRVVVLSFELLHAPATVCGPKKSTNLVKNKCVNFNFNGLTGTGVLTESNKKFLPFQQFGRDIADTTDAVRDPQTLEILDITPCSFGGVSVITPGTNTSNQVAVLYQGVNCTEVPVAIHADQLTPTWRVYSTGSNVFQTRAGCLIGAEHVNNSYECDIPIGAGICASYQTQTNSPRRARSVASQSIIAYTMSLGAENSVAYSNNSIAIPTNFTISVTTEILPVSMTKTSVDCTMYICGDSTECSNLLLQYGSFCTQLNRALTGIAVEQDKNTQEVFAQVKQIYKTPPIKDFGGFNFSQILPDPSKPSKRSFIEDLLFNKVTLADAGFIKQYGDCLGDIAARDLICAQKFNGLTVLPPLLTDEMIAQYTSALLAGTITSGWTFGAGAALQIPFAMQMAYRFNGIGVTQNVLYENQKLIANQFNSAIGKIQDSLSSTAPALGKLQDVVNQNAQALNTLVKQLSSNFGAISSVLNDILSRLDPPEAEVQIDRLITGRLQSLQTYVTQQLIRAAEIRASANLAATKMSECVLGQSKRVDFCGKGYHLMSFPQSAPHGVVFLHVTYVPAQEKNFTTAPAICHDGKAHFPREGVFVSNGTHWFVTQRNFYEPQIITTDNTFVSGNCDVVIGIVNNTVYDPLQPELDSFKEELDKYFKNHTSPDVDLGDISGINASVVNIQKEIDRLNEVAKNLNESLIDLQELGKYEQYIK

SEQ ID NO: 1708 - protein, 1211 aa, Artificial Sequence
  SARS-CoV-2/Germany/BavPat3/2020__EPI_ISL_414521 spike protein (1-1211)(K986P_V987P)
MFVFLVLLPLVSSQCVNLTTRTQLPPAYTNSFTRGVYYPDKVFRSSVLHSTQDLFLPFFSNVTWFHAIHVSGTNGTKRFDNPVLPFNDGVYFASTEKSNIIRGWIFGTTLDSKTQSLLIVNNATNVVIKVCEFQFCNDPFLGVYYHKNNKSWMESEFRVYSSANNCTFEYVSQPFLMDLEGKQGNFKNLREFVFKNIDGYFKIYSKHTPINLVRDLPQGFSALEPLVDLPIGINITRFQTLLALHRSYLTPGDSSSGWTAGAAAYYVGYLQPRTFLLKYNENGTITDAVDCALDPLSETKCTLKSFTVEKGIYQTSNFRVQPTESIVRFPNITNLCPFGEVFNATRFASVYAWNRKRISNCVADYSVLYNSASFSTFKCYGVSPTKLNDLCFTNVYADSFVIRGDEVRQIAPGQTGKIADYNYKLPDDFTGCVIAWNSNNLDSKVGGNYNYLYRLFRKSNLKPFERDISTEIYQAGSTPCNGVEGFNCYFPLQSYGFQPTNGVGYQPYRVVVLSFELLHAPATVCGPKKSTNLVKNKCVNFNFNGLTGTGVLTESNKKFLPFQQFGRDIADTTDAVRDPQTLEILDITPCSFGGVSVITPGTNTSNQVAVLYQDVNCTEVPVAIHADQLTPTWRVYSTGSNVFQTRAGCLIGAEHVNNSYECDIPIGAGICASYQTQTNSPRRARSVASQSIIAYTMSLGAENSVAYSNNSIAIPTNFTISVTTEILPVSMTKTSVDCTMYICGDSTECSNLLLQYGSFCTQLNRALTGIAVEQDKNTQQVFAQVKQIYKTPPIKDFGGFNFSQILPDPSKPSKRSFIEDLLFNKVTLADAGFIKQYGDCLGDIAARDLICAQKFNGLTVLPPLLTDEMIAQYTSALLAGTITSGWTFGAGAALQIPFAMQMAYRFNGIGVTQNVLYENQKLIANQFNSAIGKIQDSLSSTASALGKLQDVVNQNAQALNTLVKQLSSNFGAISSVLNDILSRLDPPEAEVQIDRLITGRLQSLQTYVTQQLIRAAEIRASANLAATKMSECVLGQSKRVDFCGKGYHLMSFPQSAPHGVVFLHVTYVPAQEKNFTTAPAICHDGKAHFPREGVFVSNGTHWFVTQRNFYEPQIITTDNTFVSGNCDVVIGIVNNTVYDPLQPELDSFKEELDKYFKNHTSPDVDLGDISGINASVVNIQKEIDRLNEVAKNLNESLIDLQELGKYEQYIK

SEQ ID NO: 1709 - protein, 1211 aa, Artificial Sequence
  SARS-CoV-2/France/HF1805/2020__EPI_ISL_414628 spike protein (1-1211)(K986P_V987P)
MFVFLVLLPLVSSQCVNLTTRTQLPPAYTNSFTRGVYYPDKVFRSSVLHSTQDLFLPFFSNVTWFHAIHVSGTNGTKRFDNPVLPFNDGVYFASTEKSNIIRGWIFGTTLDSKTQSLLIVNNATNVVIKVCEFQFCNDPFLGVYYHKNNKSWMESEFRVYSSANNCTFEYVSQPFLMDLEGKQGNFKNLREFVFKNIDGYFKIYSKHTPINLVRDLPQGFSALEPLVDLPIGINITRFQTLLALHRSYLTPGDSSSGWTAGAAAYYVGYLQPRTFLLKYNENGTITDAVDCALDPLSETKCTLKSFTVEKGIYQTSNFRVQPTESIVRFPNITNLCPFGEVFNATRFASVYAWNRKRISNCVADYSVLYNSASFSTFKCYGVSPTKLNDLCFTNVYADSFVIRGDEVRQIAPGQTGKIADYNYKLPDDFTGCVIAWNSNNLDSKVGGNYNYLYRLFRKSNLKPFERDISTEIYQAGSTPCNGVEGFNCYFPLQSYGFQPTNGVGYQPYRVVVLSFELLHAPATVCGPKKSTNLVKNKCVNFNFNGLTGTGVLTESNKKFLPFQQFGRDIADTTDAVRDPQTLEILDITPCSFGGVSVITPGTNTSNQVAVLYQGVNCTEVPVAIHADQLTPTWRVYSTGSNVFQTRAGCLIGAEHVNNSYECDIPIGAGICASYQTQTNSPRRARSVASQSIIAYTMSLGAENSVAYSNNSIAIPTNFTISVTTEILPVSMTKTSVDCTMYICGDSTECSNLLLQYGSFCTQLNRALTGIAVEQDKNTQEVFAQVKQIYKTPPIKDFGGFNFSQILPDPSKPSKRSFIEDLLFNKVTLADAGFIKQYGDCLGDIAARDLICAQKFNGLTVLPPLLTDEMIAQYTSALLAGTITSGWTFGAGAALQIPFAMQMAYRFNGIGVTQNVLYENQKLIANQFNSAIGKIQDSLSSTASALGKLQDVVNQNAQALNTLVKQLSSNFGAISSVLNDILSRLDPPEAEVQIDRLITGRLQSLQTYVTQQLIRAAEIRASANLAATKMSECVLGQSKRVDFCGKGYHLMSFPQSAPHGVVFLHVTYVPAQEKNFTTAPAICHDGKAHFPREGVFVSNGTHWFVTQRNFYEPQIITTDNTFVSGNCDVVIGVVNNTVYDPLQPELDSFKEELDKYFKNHTSPDVDLGDISGINASVVNIQKEIDRLNEVAKNLNESLIDLQELGKYEQYIK

SEQ ID NO: 1710 - protein, 1211 aa, Artificial Sequence
  SARS-CoV-2/Netherlands/ZuidHolland_9/2020__EPI_ISL_414445 spike protein (1-1211)(K986P_V987P)
MFVFLVLLPLVSSQCVNLTTRTQLPPAYTNSFTRGVYYPDKVFRSSVLHSTQDLFLPFFSNVTWFHAIHVSGTNGTKRFDNPVLPFNDGVYFASTEKSNIIRGWIFGTTLDSKTQSLLIVNNATNVVIKVCEFQFCNDPFLGVYYHKNNKSWMESEFRVYSSANNCTFEYVSQPFLMDLEGKQGNFKNLREFVFKNIDGYFKIYSKHTPINLVRDLPQGFSALEPLVDLPIGINITRFQTLLALHRSYLTPGDSSSGWTAGAAAYYVGYLQPRTFLLKYNENGTITDAVDCALDPLSETKCTLKSFTVEKGIYQTSNFRVQPTESIVRFPNITNLCPFGEVFNATRFASVYAWNRKRISNCVADYSVLYNSASFSTFKCYGVSPTKLNDLCFTNVYADSFVIRGDEVRQIAPGQTGKIADYNYKLPDDFTGCVIAWNSNNLDSKVGGNYNYLYRLFRKSNLKPFERDISTEIYQAGSTPCNGVEGFNCYFPLQSYGFQPTNGVGYQPYRVVVLSFELLHAPATVCGPKKSTNLVKNKCVNFNFNGLTGTGVLTESNKKFLPFQQFGRDIADTTDAVRDPQTLEILDITPCSFGGVSVITPGTNTSNQVAVLYQGVNCTEVPVAIHADQLTPTWRVYSTGSNVFQTRAGCLIGAEHVNNSYECDIPIGAGICASYQTQTNSPRRARSVASQSIIAYTMSLGAENSVAYSNNSIAIPTNFTISVTTEILPVSMTKTSVDCTMYICGDSTECSNLLLQYGSFCTQLNRALTGIAVEQDKNTQEVFAQVKQIYKTPPIKDFGGFNFSQILPDPSKPSKRSFIEDLLFNKVTLADAGFIKQYGDCLGDIAARDLICVQKFNGLTVLPPLLTDEMIAQYTSALLAGTITSGWTFGAGAALQIPFAMQMAYRFNGIGVTQNVLYENQKLIANQFNSAIGKIQDSLSSTASALGKLQDVVNQNAQALNTLVKQLSSNFGAISSVLNDILSRLDPPEAEVQIDRLITGRLQSLQTYVTQQLIRAAEIRASANLAATKMSECVLGQSKRVDFCGKGYHLMSFPQSAPHGVVFLHVTYVPAQEKNFTTAPAICHDGKAHFPREGVFVSNGTHWFVTQRNFYEPQIITTDNTFVSGNCDVVIGIVNNTVYDPLQPELDSFKEELDKYFKNHTSPDVDLGDISGINASVVNIQKEIDRLNEVAKNLNESLIDLQELGKYEQYIK

SEQ ID NO: 1711 - protein, 1211 aa, Artificial Sequence
  SARS-CoV-2/Finland/FIN03032020A/2020__EPI_ISL_413602 spike protein (1-1211)(K986P_V987P)
MFVFLVLLPLVSSQCVNLTTRTQLPPAYTNSFTRGVYYPDKVFRSSVLHSTQDLFLPFFSNVTWFHAIHVSGTNGTKRFDNPVLPFNDGVYFASTEKSNIIRGWIFGTTLDSKTQSLLIVNNATNVVIKVCEFQFCNDPFLGVYYHKNNKSWMESEFRVYSSANNCTFEYVSQPFLMDLEGKQGNFKNLREFVFKNIDGYFKIYSKHTPINLVRDLPQGFSALEPLVDLPIGINITRFQTLLALHRSYLTPGDSSSGWTAGAAAYYVGYLQPRTFLLKYNENGTITDAVDCALDPLSETKCTLKSFTVEKGIYQTSNFRVQPTESIVRFPNITNLCPFGEVFNATRFASVYAWNRKRISNCVADYSVLYNSASFSTFKCYGVSPTKLNDLCFTNVYADSFVIRGDEVRQIAPGQTGKIADYNYKLPDDFTGCVISWNSNNLDSKVGGNYNYLYRLFRKSNLKPFERDISTEIYQAGSTPCNGVEGFNCYFPLQSYGFQPTNGVGYQPYRVVVLSFELLHAPATVCGPKKSTNLVKNKCVNFNFNGLTGTGVLTESNKKFLPFQQFGRDIADTTDAVRDPQTLEILDITPCSFGGVSVITPGTNTSNQVAVLYQGVNCTEVPVAIHADQLTPTWRVYSTGSNVFQTRAGCLIGAEHVNNSYECDIPIGAGICASYQTQTNSPRRARSVASQSIIAYTMSLGAENSVAYSNNSIAIPTNFTISVTTEILPVSMTKTSVDCTMYICGDSTECSNLLLQYGSFCTQLNRALTGIAVEQDKNTQEVFAQVKQIYKTPPIKDFGGFNFSQILPDPSKPSKRSFIEDLLFNKVTLADAGFIKQYGDCLGDIAARDLICAQKFNGLTVLPPLLTDEMIAQYTSALLAGTITSGWTFGAGAALQIPFAMQMAYRFNGIGVTQNVLYENQKLIANQFNSAIGKIQDSLSSTASALGKLQDVVNQNAQALNTLVKQLSSNFGAISSVLNDILSRLDPPEAEVQIDRLITGRLQSLQTYVTQQLIRAAEIRASANLAATKMSECVLGQSKRVDFCGKGYHLMSFPQSAPHGVVFLHVTYVPAQEKNFTTAPAICHDGKAHFPREGVFVSNGTHWFVTQRNFYEPQIITTDNTFVSGNCDVVIGIVNNTVYDPLQPELDSFKEELDKYFKNHTSPDVDLGDISGINASVVNIQKEIDRLNEVAKNLNESLIDLQELGKYEQYIK

SEQ ID NO: 1712 - protein, 1211 aa, Artificial Sequence
  SARS-CoV-2/France/GE1977/2020__EPI_ISL_414632 spike protein (1-1211)(K986P_V987P)
MFVFLVLLPLVSSQCVNLTTRTQLPPAYTNSFTRGVYYPDKVFRSSVLHSTQDLFLPFFSNVTWFHAIHVSGTNGTKRFDNPVLPFNDGVYFASTEKSNIIRGWIFGTTLDSKTQSLLIVNNATNVVIKVCEFQFCNDPFLGVYYHKNNKSWMESEFRVYSSANNCTFEYVSQPFLMDLEGKQGNFKNLREFVFKNIDGYFKIYSKHTPINLVRDLPQGFSALEPLVDLPIGINITRFQTLLALHRSYLTPGDSSSGWTAGAAAYYVGYLQPRTFLLKYNENGTITDAVDCALDPLSETKCTLKSFTVEKGIYQTSNFRVQPTESIVRFPNITNLCPFGEVFNATRFASVYAWNRKRISNCVADYSVLYNSASFSTFKCYGVSPTKLNDLCFTNVYADSFVIRGDEVRQIAPGQTGKIADYNYKLPDDFTGCVIAWNSNNLDSKVGGNYNYLYRLFRKSNLKPFERDISTEIYQAGSTPCNGVEGFNCYFPLQSYGFQPTNGVGYQPYRVVVLSFELLHAPATVCGPKKSTNLVKNKCVNFNFNGLTGTGVLTESNKKFLPFQQFGRDIADTTDAVRDPQTLEILDITPCSFGGVSVITPGTNTSNQVAVLYQGVNCTEVPVAIHADQLTPTWRVYSTGSNVFQTRAGCLIGAEHVNNSYECDIPIGAGICASYQTQTNSPRRARSVASQSIIAYTMSLGAENSVAYSNNSIAIPTNFTISVTTEILPVSMTKTSVDCTMYICGDSTECSNLLLQYGSFCTQLNRALTGIAVEQDKNTQEVFAQVKQIYKTPPIKDFGGFNFSQILPDPSKPSKRSFIEDLLFNKVTLADAGFIKQYGDCLGDIAARDLICAQKFNGLTVLPPLLTDEMIAQYTSALLAGTITSGWTFGAGAALQIPFAMQMAYRFNGIGVTQNVLYENQKLIANQFNSAIGKIQDSLFSTASALGKLQDVVNQNAQALNTLVKQLSSNFGAISSVLNDILSRLDPPEAEVQIDRLITGRLQSLQTYVTQQLIRAAEIRASANLAATKMSECVLGQSKRVDFCGKGYHLMSFPQSAPHGVVFLHVTYVPAQEKNFTTAPAICHDGKAHFPREGVFVSNGTHWFVTQRNFYEPQIITTDNTFVSGNCDVVIGIVNNTVYDPLQPELDSFKEELDKYFKNHTSPDVDLGDISGINASVVNIQKEIDRLNEVAKNLNESLIDLQELGKYEQYIK

SEQ ID NO: 1713 - protein, 1211 aa, Artificial Sequence
  SARS-CoV-2/Finland/FIN-313/2020__EPI_ISL_414641 spike protein (1-1211)(K986P_V987P)
MFVFLVLLPLVSSQCVNLTTRTQLPPAYTNSFTRGVYYPDKVFRSSVLHSTQDLFLPFFSNVTWFHAIHVSGTNGTKRFDNPVLPFNDGVYFASTEKSNIIRGWIFGTTLDSKTQSLLIVNNATNVVIKVCEFQFCNDPFLGVYYHKNNKSWMESEFRVYSSANNCTFEYVSQPFLMDLEGKQGNFKNLREFVFKNIDGYFKIYSKHTPINLVRDLPQGFSALEPLVDLPIGINITRFKTLLALHRSYLTPGDSSSGWTAGAAAYYVGYLQPRTFLLKYNENGTITDAVDCALDPLSETKCTLKSFTVEKGIYQTSNFRVQPTESIVRFPNITNLCPFGEVFNATRFASVYAWNRKRISNCVADYSVLYNSASFSTFKCYGVSPTKLNDLCFTNVYADSFVIRGDEVRQIAPGQTGKIADYNYKLPDDFTGCVIAWNSNNLDSKVGGNYNYLYRLFRKSNLKPFERDISTEIYQAGSTPCNGVEGFNCYFPLQSYGFQPTNGVGYQPYRVVVLSFELLHAPATVCGPKKSTNLVKNKCVNFNFNGLTGTGVLTESNKKFLPFQQFGRDIADTTDAVRDPQTLEILDITPCSFGGVSVITPGTNTSNQVAVLYQGVNCTEVPVAIHADQLTPTWRVYSTGSNVFQTRAGCLIGAEHVNNSYECDIPIGAGICASYQTQTNSPRRARSVASQSIIAYTMSLGAENSVAYSNNSIAIPTNFTISVTTEILPVSMTKTSVDCTMYICGDSTECSNLLLQYGSFCTQLNRALTGIAVEQDKNTQEVFAQVKQIYKTPPIKDFGGFNFSQILPDPSKPSKRSFIEDLLFNKVTLADAGFIKQYGDCLGDIAARDLICAQKFNGLTVLPPLLTDEMIAQYTSALLAGTITSGWTFGAGAALQIPFAMQMAYRFNGIGVTQNVLYENQKLIANQFNSAIGKIQDSLSSTASALGKLQDVVNQNAQALNTLVKQLSSNFGAISSVLNDILSRLDPPEAEVQIDRLITGRLQSLQTYVTQQLIRAAEIRASANLAATKMSECVLGQSKRVDFCGKGYHLMSFPQSAPHGVVFLHVTYVPAQEKNFTTAPAICHDGKAHFPREGVFVSNGTHWFVTQRNFYEPQIITTDNTFVSGNCDVVIGIVNNTVYDPLQPELDSFKEELDKYFKNHTSPDVDLGDISGINASVVNIQKEIDRLNEVAKNLNESLIDLQELGKYEQYIK

SEQ ID NO: 1714 - protein, 1211 aa, Artificial Sequence
  SARS-CoV-2/Netherlands/ZuidHolland_2/2020__EPI_ISL_414556 spike protein (1-1211)(K986P_V987P)
MFVFLVLLPLVSSQCVNLTTRTQLPPAYTNSFTRGVYYPDKVFRSSVLHSTQDLFLPFFSNVTWFHAIHVSGTNGTKRFDNPVLPFNDGVYFASTEKSNIIRGWIFGTTLDSKTQSLLIVNNATNVVIKVCEFQFCNDPFLGVYYHKNNKSWMESEFRVYSSANNCTFEYVSQPFLMDLEGKQGNFKNLREFVFKNIDGYFKIYSKHTPINLVRDLPQGFSALEPLVDLPIGINITRFQTLLALHRSYLTPGDSSSGWTAGAAAYYVGYLQPRTFLLKYNENGTITDAVDCALDPLSETKCTLKSFTVEKGIYQTSNFRVQPTESIVRFPNITNLCPFGEVFNATRFASVYAWNRKRISNCVADYSVLYNSASFSTFKCYGVSPTKLNDLCFTNVYADSFVIRGDEVRQIAPGQTGKIADYNYKLPDDFTGCVIAWNSNNLDSKVGGNYNYLYRLFRKSNLKPFERDISTEIYQAGSTPCNGVEGFNCYFPLQSYGFQPTNGVGYQPYRVVVLSFELLHAPATVCGPKKSTNLVKNKCVNFNFNGLTGTGVLTESNKKFLPFQQFGRDIADTTDAVRDPQTLEILDITPCSFGGVSVITPGTNTSNQVAVLYQGVNCTEVPVAIHADQLTPTWRVYSTGSNVFQTRAGCLIGAEHVNNSYECDIPIGAGICASYQTQTNSPRRARSVASQSIIAYTMSLGAENSVAYSNNSIAIPTNFTISVTTEILPVSMTKTSVDCTMYICGDSTECSNLLLQYGSFCTQLNRALTGIALEQDKNTQEVFAQVKQIYKTPPIKDFGGFNFSQILPDPSKPSKRSFIEDLLFNKVTLADAGFIKQYGDCLGDIAARDLICAQKFNGLTVLPPLLTDEMIAQYTSALLAGTITSGWTFGAGAALQIPFAMQMAYRFNGIGVTQNVLYENQKLIANQFNSAIGKIQDSLSSTASALGKLQDVVNQNAQALNTLVKQLSSNFGAISSVLNDILSRLDPPEAEVQIDRLITGRLQSLQTYVTQQLIRAAEIRASANLAATKMSECVLGQSKRVDFCGKGYHLMSFPQSAPHGVVFLHVTYVPAQEKNFTTAPAICHDGKAHFPREGVFVSNGTHWFVTQRNFYEPQIITTDNTFVSGNCDVVIGIVNNTVYDPLQPELDSFKEELDKYFKNHTSPDVDLGDISGINASVVNIQKEIDRLNEVAKNLNESLIDLQELGKYEQYIK

SEQ ID NO: 1715 - protein, 1211 aa, Artificial Sequence
  SARS-CoV-2/USA/WA-UW31/2020__EPI_ISL_414618 spike protein (1-1211)(K986P_V987P)
MFVFLVLLPLVSSQCVNLTTRTQLPPAYTNSFTRGVYYPDKVFRSSVLHSTQDLFLPFFSNVTWFHAIHVSGTNGTKRFDNPVLPFNDGVYFASTEKSNIIRGWIFGTTLDSKTQSLLIVNNATNVVIKVCEFQFCNDPFLGVYYHKNNKSWMESEFRVYSSANNCTFEYVSQPFLMDLEGKQGNFKNLREFVFKNIDGYFKIYSKHTPINLVRDLPQGFSALEPLVDLPIGINITRFQTLLALHRSYLTPGDSSSGWTAGAAAYYVGYLQPRTFLLKYNENGTITDAVDCALDPLSETKCTLKSFTVEKGIYQTSNFRVQPTESIVRFPNITNLCPFGEVFNATRFASVYAWNRKRISNCVADYSVLYNSASFSTFKCYGVSPTKLNDLCFTNVYADSFVIRGDEVRQIAPGQTGKIADYNYKLPDDFTGCVIAWNSNNLDSKVGGNYNYLYRLFRKSNLKPFERDISTEIYQAGSTPCNGAEGFNCYFPLQSYGFQPTNGVGYQPYRVVVLSFELLHAPATVCGPKKSTNLVKNKCVNFNFNGLTGTGVLTESNKKFLPFQQFGRDIADTTDAVRDPQTLEILDITPCSFGGVSVITPGTNTSNQVAVLYQDVNCTEVPVAIHADQLTPTWRVYSTGSNVFQTRAGCLIGAEHVNNSYECDIPIGAGICASYQTQTNSPRRARSVASQSIIAYTMSLGAENSVAYSNNSIAIPTNFTISVTTEILPVSMTKTSVDCTMYICGDSTECSNLLLQYGSFCTQLNRALTGIAVEQDKNTQEVFAQVKQIYKTPPIKDFGGFNFSQILPDPSKPSKRSFIEDLLFNKVTLADAGFIKQYGDCLGDIAARDLICAQKFNGLTVLPPLLTDEMIAQYTSALLAGTITSGWTFGAGAALQIPFAMQMAYRFNGIGVTQNVLYENQKLIANQFNSAIGKIQDSLSSTASALGKLQDVVNQNAQALNTLVKQLSSNFGAISSVLNDILSRLDPPEAEVQIDRLITGRLQSLQTYVTQQLIRAAEIRASANLAATKMSECVLGQSKRVDFCGKGYHLMSFPQSAPHGVVFLHVTYVPAQEKNFTTAPAICHDGKAHFPREGVFVSNGTHWFVTQRNFYEPQIITTDNTFVSGNCDVVIGIVNNTVYDPLQPELDSFKEELDKYFKNHTSPDVDLGDISGINASVVNIQKEIDRLNEVAKNLNESLIDLQELGKYEQYIK

SEQ ID NO: 1716 - protein, 1211 aa, Artificial Sequence
  SARS-CoV-2/South Korea/SNU01/2020__EPI_ISL_411929 spike protein (1-1211)(K986P_V987P)
MFVFLVLLPLVSSQCVNLTTRTQLPPAYTNSFTRGVYYPDKVFRSSVLHSTQDLFLPFFSNVTWFHAIHVSGTNGTKRFDNPVLPFNDGVYFASTEKSNIIRGWIFGTTLDSKTQSLLIVNNATNVVIKVCEFQFCNDPFLGVYYHKNNKSWMESEFRVYSSANNCTFEYVSQPFLMDLEGKQGNFKNLREFVFKNIDGYFKIYSKHTPINLVRDLPQGFWALEPLVDLPIGINITRFQTLLALHRSYLTPGDSSSGWTAGAAAYYVGYLQPRTFLLKYNENGTITDAVDCALDPLSETKCTLKSFTVEKGIYQTSNFRVQPTESIVRFPNITNLCPFGEVFNATRFASVYAWNRKRISNCVADYSVLYNSASFSTFKCYGVSPTKLNDLCFTNVYADSFVIRGDEVRQIAPGQTGKIADYNYKLPDDFTGCVIAWNSNNLDSKVGGNYNYLYRLFRKSNLKPFERDISTEIYQAGSTPCNGVEGFNCYFPLQSYGFQPTNGVGYQPYRVVVLSFELLHAPATVCGPKKSTNLVKNKCVNFNFNGLTGTGVLTESNKKFLPFQQFGRDIADTTDAVRDPQTLEILDITPCSFGGVSVITPGTNTSNQVAVLYQDVNCTEVPVAIHADQLTPTWRVYSTGSNVFQTRAGCLIGAEHVNNSYECDIPIGAGICASYQTQTNSPRRARSVASQSIIAYTMSLGAENSVAYSNNSIAIPTNFTISVTTEILPVSMTKTSVDCTMYICGDSTECSNLLLQYGSFCTQLNRALTGIAVEQDKNTQEVFAQVKQIYKTPPIKDFGGFNFSQILPDPSKPSKRSFIEDLLFNKVTLADAGFIKQYGDCLGDIAARDLICAQKFNGLTVLPPLLTDEMIAQYTSALLAGTITSGWTFGAGAALQIPFAMQMAYRFNGIGVTQNVLYENQKLIANQFNSAIGKIQDSLSSTASALGKLQDVVNQNAQALNTLVKQLSSNFGAISSVLNDILSRLDPPEAEVQIDRLITGRLQSLQTYVTQQLIRAAEIRASANLAATKMSECVLGQSKRVDFCGKGYHLMSFPQSAPHGVVFLHVTYVPAQEKNFTTAPAICHDGKAHFPREGVFVSNGTHWFVTQRNFYEPQIITTDNTFVSGNCDVVIGIVNNTVYDPLQPELDSFKEELDKYFKNHTSPDVDLGDISGINASVVNIQKEIDRLNEVAKNLNESLIDLQELGKYEQYIK

SEQ ID NO: 1717 - protein, 1211 aa, Artificial Sequence
  SARS-CoV-2/China/WF0004/2020__EPI_ISL_413694 spike protein (1-1211)(K986P_V987P)
MFVFLVLLPLVSSQCVNLTTRTQLPPAYTNSFTRGVYYPDKVFRSSVLHSTQDLFLPFFSNVTWFHAIHVSGTNGTKRFDNPVLPFNDGVYFASTEKSNIIRGWIFGTTLDSKTQSLLIVNNATNVVIKVCEFQFCNDPFLGVYYHKNNKSWTESEFRVYSSANNCTFEYVSQPFLMDLEGKQGNFKNLREFVFKNIDGYFKIYSKHTPINLVRDLPQGFSALEPLVDLPIGINITRFQTLLALHRSYLTPGDSSSGWTAGAAAYYVGYLQPRTFLLKYNENGTITDAVDCALDPLSETKCTLKSFTVEKGIYQTSNFRVQPTESIVRFPNITNLCPFGEVFNATRFASVYAWNRKRISNCVADYSVLYNSASFSTFKCYGVSPTKLNDLCFTNVYADSFVIRGDEVRQIAPGQTGKIADYNYKLPDDFTGCVIAWNSNNLDSKVGGNYNYLYRLFRKSNLKPFERDISTEIYQAGSTPCNGVEGFNCYFPLQSYGFQPTNGVGYQPYRVVVLSFELLHAPATVCGPKKSTNLVKNKCVNFNFNGLTGTGVLTESNKKFLPFQQFGRDIADTTDAVRDPQTLEILDITPCSFGGVSVITPGTNTSNQVAVLYQDVNCTEVPVAIHADQLTPTWRVYSTGSNVFQTRAGCLIGAEHVNNSYECDIPIGAGICASYQTQTNSPRRARSVASQSIIAYTMSLGAENSVAYSNNSIAIPTNFTISVTTEILPVSMTKTSVDCTMYICGDSTECSNLLLQYGSFCTQLNRALTGIAVEQDKNTQEVFAQVKQIYKTPPIKDFGGFNFSQILPDPSKPSKRSFIEDLLFNKVTLADAGFIKQYGDCLGDIAARDLICAQKFNGLTVLPPLLTDEMIAQYTSALLAGTITSGWTFGAGAALQIPFAMQMAYRFNGIGVTQNVLYENQKLIANQFNSAIGKIQDSLSSTASALGKLQDVVNQNAQALNTLVKQLSSNFGAISSVLNDILSRLDPPEAEVQIDRLITGRLQSLQTYVTQQLIRAAEIRASANLAATKMSECVLGQSKRFDFCGKGYHLMSFPQSAPHGVVFLHVTYVPAQEKNFTTAPAICHDGKAHFPREGVFVSNGTHWFVTQRNFYEPQIITTDNTFVSGNCDVVIGIVNNTVYDPLQPELDSFKEELDKYFKNHTSPDVDLGDISGINASVVNIQKEIDRLNEVAKNLNESLIDLQELGKYEQYIK

SEQ ID NO: 1718 - protein, 1211 aa, Artificial Sequence
  SARS-CoV-2/China/WF0028/2020__EPI_ISL_413791 spike protein (1-1211)(K986P_V987P)
MFVFLVLLPLVSSQCVNLTTRTQLPPAYTNSFTRGVYYPDKVFRSSVLHSTQDLFLPFFSNVTWFHAIHVSGTNGTKRFDNPVLPFNDGVYFASTEKSNIIRGWIFGTTLDSKTQSLLIVNNATNVVIKVCEFQFCNDPFLGVYYHKNNKSWMESEFRVYSSANNCTFEYVSQPFLMDLEGKQGNFKNLREFVFKNIDGYFKIYSKHTPINLVRDLPQGFSALEPLVDLPIGINITRFQTLLALHRSYLTPGDSSSGWTAGAAAYYVGYLQPRTFLLKYNENGTITDAVDCALDPLSETKCTLKSFTVEKGIYQTSNFRVQPTESIVRFPNITNLCPFGEVFNATRFASVYAWNRKRISNCVADYSVLYNSASFSTFKCYGVSPTKLNDLCFTNVYADSFVIRGDEVRQIAPGQTGKIADYNYKLPDDFTGCVIAWNSNNLDSKVGGNYNYLYRLFRKSNLKPFERDISTEIYQAGSTPCNGVEGFNCYFPLQSYGFQPTNGVGYQPYRVVVLSFELLHAPATVCGPKKSTNLVKNKCVNFNFNGLTGTGVLTESNKKFLPFQQFGRDIADTTDAVRDPQTLEILDITPCSFGGVSVITPGTNTSNQVAVLYQDVNCTEVPVAIHADQLTPTWRVYSTGSNVFQTRAGCLIGAEHVNNSYECDIPIGAGICASYQTQTNSPRRARSVASQSIIAYTMSLGAENSVAYSNNSIAIPTNFTISVTTEILPVSMTKTSVDCTMYICGDSTECSNLLLQYGSFCTQLNRALTGIAVEQDKNTQEVFAQVKQIYKTPPIKDFGGFNFSQILPDPSKPSKRSFIEDLLFNKVTLADAGFIKQYGDCLGDIAARDLICAQKFNGLTVLPPLLTDEMIAQYTSALLAGTITSGWTFGAGAALQIPFAMQMAYRFNGIGVTQNVLYENQKLIANQFNSAIGKIQDSLSSTASALGKLQDVVNQNAQALNTLVKQLSSNFGAISSVLNDILSRLDPPEAEVQIDRLITGRLQSLQTYVTQQLIRAAEIRASANLAATKMSECVLGQSKRVDFCGKGYHLMSFPQSAPHGVVFLHVTYVPAQEKNFTTAPAICHDGKAHFPREGVFVSNGTHWFVTQRNFYEPQIITTDNTFVSGNCDVVIGIVNNTVYDPLQPELESFKEELDKYFKNHTSPDVDLGDISGINASVVNIQKEIDRLNEVAKNLNESLIDLQELGKYEQYIK

SEQ ID NO: 1719 - protein, 1211 aa, Artificial Sequence
  SARS-CoV-2/2019-nCoV/USA-CruiseA-18/2020__MT159716.1 spike protein (1-1211)(K986P_V987P)
MFVFLVLLPLVSSQCVNLTTRTQLPPAYTNSFTRGVYYPDKVFRSSVLHSTQDLFLPFFSNVTWFHAIHVSGTNGTKRFDNPVLPFNDGVYFASTEKSNIIRGWIFGTTLDSKTQSLLIVNNATNVVIKVCEFQFCNDPFLGVYYHKNNKSWMESELRVYSSANNCTFEYVSQPFLMDLEGKQGNFKNLREFVFKNIDGYFKIYSKHTPINLVRDLPQGFSALEPLVDLPIGINITRFQTLLALHRSYLTPGDSSSGWTAGAAAYYVGYLQPRTFLLKYNENGTITDAVDCALDPLSETKCTLKSFTVEKGIYQTSNFRVQPTESIVRFPNITNLCPFGEVFNATRFASVYAWNRKRISNCVADYSVLYNSASFSTFKCYGVSPTKLNDLCFTNVYADSFVIRGDEVRQIAPGQTGKIADYNYKLPDDFTGCVIAWNSNNLDSKVGGNYNYLYRLFRKSNLKPFERDISTEIYQAGSTPCNGVEGFNCYFPLQSYGFQPTNGVGYQPYRVVVLSFELLHAPATVCGPKKSTNLVKNKCVNFNFNGLTGTGVLTESNKKFLPFQQFGRDIADTTDAVRDPQTLEILDITPCSFGGVSVITPGTNTSNQVAVLYQDVNCTEVPVAIHADQLTPTWRVYSTGSNVFQTRAGCLIGAEHVNNSYECDIPIGAGICASYQTQTNSPRRARSVASQSIIAYTMSLGAENSVAYSNNSIAIPTNFTISVTTEILPVSMTKTSVDCTMYICGDSTECSNLLLQYGSFCTQLNRALTGIAVEQDKNTQEVFAQVKQIYKTPPIKDFGGFNFSQILPDPSKPSKRSFIEDLLFNKVTLADAGFIKQYGDCLGDIAARDLICAQKFNGLTVLPPLLTDEMIAQYTSALLAGTITSGWTFGAGAALQIPFAMQMAYRFNGIGVTQNVLYENQKLIANQFNSAIGKIQDSLSSTASALGKLQDVVNQNAQALNTLVKQLSSNFGAISSVLNDILSRLDPPEAEVQIDRLITGRLQSLQTYVTQQLIRAAEIRASANLAATKMSECVLGQSKRVDFCGKGYHLMSFPQSAPHGVVFLHVTYVPAQEKNFTTAPAICHDGKAHFPREGVFVSNGTHWFVTQRNFYEPQIITTDNTFVSGNCDVVIGIVNNTVYDPLQPELDSFKEELDKYFKNHTSPDVDLGDISGINASVVNIQKEIDRLNEVAKNLNESLIDLQELGKYEQYIK

SEQ ID NO: 1720 - protein, 1211 aa, Artificial Sequence
  SARS-CoV-2/SARS-CoV-2/Yunnan-01/human/2020/CHN__MT049951.1 spike protein (1-1211)(K986P_V987P)
MFVFLVLLPLVSSQCVNLTTRTQLPPANTNSFTRGVYYPDKVFRSSVLHSTQDLFLPFFSNVTWFHAIHVSGTNGTKRFDNPVLPFNDGVYFASTEKSNIIRGWIFGTTLDSKTQSLLIVNNATNVVIKVCEFQFCNDPFLGVYYHKNNKSWMESEFRVYSSANNCTFEYVSQPFLMDLEGKQGNFKNLREFVFKNIDGYFKIYSKHTPINLVRDLPQGFSALEPLVDLPIGINITRFQTLLALHRSYLTPGDSSSGWTAGAAAYYVGYLQPRTFLLKYNENGTITDAVDCALDPLSETKCTLKSFTVEKGIYQTSNFRVQPTESIVRFPNITNLCPFGEVFNATRFASVYAWNRKRISNCVADYSVLYNSASFSTFKCYGVSPTKLNDLCFTNVYADSFVIRGDEVRQIAPGQTGKIADYNYKLPDDFTGCVIAWNSNNLDSKVGGNYNYLYRLFRKSNLKPFERDISTEIYQAGSTPCNGVEGFNCYFPLQSYGFQPTNGVGYQPYRVVVLSFELLHAPATVCGPKKSTNLVKNKCVNFNFNGLTGTGVLTESNKKFLPFQQFGRDIADTTDAVRDPQTLEILDITPCSFGGVSVITPGTNTSNQVAVLYQDVNCTEVPVAIHADQLTPTWRVYSTGSNVFQTRAGCLIGAEHVNNSYECDIPIGAGICASYQTQTNSPRRARSVASQSIIAYTMSLGAENSVAYSNNSIAIPTNFTISVTTEILPVSMTKTSVDCTMYICGDSTECSNLLLQYGSFCTQLNRALTGIAVEQDKNTQEVFAQVKQIYKTPPIKDFGGFNFSQILPDPSKPSKRSFIEDLLFNKVTLADAGFIKQYGDCLGDIAARDLICAQKFNGLTVLPPLLTDEMIAQYTSALLAGTITSGWTFGAGAALQIPFAMQMAYRFNGIGVTQNVLYENQKLIANQFNSAIGKIQDSLSSTASALGKLQDVVNQNAQALNTLVKQLSSNFGAISSVLNDILSRLDPPEAEVQIDRLITGRLQSLQTYVTQQLIRAAEIRASANLAATKMSECVLGQSKRVDFCGKGYHLMSFPQSAPHGVVFLHVTYVPAQEKNFTTAPAICHDGKAHFPREGVFVSNGTHWFVTQRNFYEPQIITTDNTFVSGNCDVVIGIVNNTVYDPLQPELDSFKEELDKYFKNHTSPDVDLGDISGINASVVNIQKEIDRLNEVAKNLNESLIDLQELGKYEQYIK

SEQ ID NO: 1721 - protein, 1211 aa, Artificial Sequence
  SARS-CoV-2/USA/WA-UW292/2020__EPI_ISL_418077 spike protein (1-1211)(K986P_V987P)
MFVFLVLLPLVSSQCVNLTTRTQLPPAYTNSFTRGVYYPDKVFRSSVLHSTQDLFLPFFSNVTWFHAIHVSGTNGTKRFDNPVLPFNDGVYFASTEKSNIIRGWIFGTTLDSKTQSLLIVNNATNVVIKVCEFQFCNDPFLGVYYHKNNKSWMESEFRVYSSANNCTFEYVSQPFLMDLEGKQGNFKNLREFVFKNIDGYFKIYSKHTPINLVRDLPQGFSALEPLVDLPIGINITRFQTLLALHRSYLTPGDSSSGWTAGAAAYYVGYLQPRTFLLKYNENGTITDAVDCALDPLSETKCTLKSFTVEKGIYQTSNFRVQPTESIVRFPNITNLCPFGEVFNATRFASVYAWNRKRISNCVADYSVLYNSASFSTFKCYGVSPTKLNDLCFTNVYADSFVIRGDEVRQIAPGQTGKIADYNYKLPDDFTGCVIAWNSNNLDSKVGGNYNYLYRLFRKSNLKPFERDISTEIYQASSTPCNGVEGFNCYFPLQSYGFQPTNGVGYQPYRVVVLSFELLHAPATVCGPKKSTNLVKNKCVNFNFNGLTGTGVLTESNKKFLPFQQFGRDIADTTDAVRDPQTLEILDITPCSFGGVSVITPGTNTSNQVAVLYQDVNCTEVPVAIHADQLTPTWRVYSTGSNVFQTRAGCLIGAEHVNNSYECDIPIGAGICASYQTQTNSPRRARSVASQSIIAYTMSLGAENSVAYSNNSIAIPTNFTISVTTEILPVSMTKTSVDCTMYICGDSTECSNLLLQYGSFCTQLNRALTGIAVEQDKNTQEVFAQVKQIYKTPPIKDFGGFNFSQILPDPSKPSKRSFIEDLLFNKVTLADAGFIKQYGDCLGDIAARDLICAQKFNGLTVLPPLLTDEMIAQYTSALLAGTITSGWTFGAGAALQIPFAMQMAYRFNGIGVTQNVLYENQKLIANQFNSAIGKIQDSLSSTASALGKLQDVVNQNAQALNTLVKQLSSNFGAISSVLNDILSRLDPPEAEVQIDRLITGRLQSLQTYVTQQLIRAAEIRASANLAATKMSECVLGQSKRVDFCGKGYHLMSFPQSAPHGVVFLHVTYVPAQEKNFTTAPAICHDGKAHFPREGVFVSNGTHWFVTQRNFYEPQIITTDNTFVSGNCDVVIGIVNNTVYDPLQPELDSFKEELDKYFKNHTSPDVDLGDISGINASVVNIQKEIDRLNEVAKNLNESLIDLQELGKYEQYIK

SEQ ID NO: 1722 - protein, 1211 aa, Artificial Sequence
  SARS-CoV-2/Iceland/192/2020__EPI_ISL_417819 spike protein (1-1211)(K986P_V987P)
MFVFFVLLPLVSSQCVNLTTRTQLPPAYTNSFTRGVYYPDKVFRSSVLHSTQDLFLPFFSNVTWFHAIHVSGTNGTKRFDNPVLPFNDGVYFASTEKSNIIRGWIFGTTLDSKTQSLLIVNNATNVVIKVCEFQFCNDPFLGVYYHKNNKSWMESEFRVYSSANNCTFEYVSQPFLMDLEGKQGNFKNLREFVFKNIDGYFKIYSKHTPINLVRDLPQGFSALEPLVDLPIGINITRFQTLLALHRSYLTPGDSSSGWTAGAAAYYVGYLQPRTFLLKYNENGTITDAVDCALDPLSETKCTLKSFTVEKGIYQTSNFRVQPTESIVRFPNITNLCPFGEVFNATRFASVYAWNRKRISNCVADYSVLYNSASFSTFKCYGVSPTKLNDLCFTNVYADSFVIRGDEVRQIAPGQTGKIADYNYKLPDDFTGCVIAWNSNNLDSKVGGNYNYLYRLFRKSNLKPFERDISTEIYQAGSTPCNGVEGFNCYFPLQSYGFQPTNGVGYQPYRVVVLSFELLHAPATVCGPKKSTNLVKNKCVNFNFNGLTGTGVLTESNKKFLPFQQFGRDIADTTDAVRDPQTLEILDITPCSFGGVSVITPGTNTSNQVAVLYQGVNCTEVPVAIHADQLTPTWRVYSTGSNVFQTRAGCLIGAEHVNNSYECDIPIGAGICASYQTQTNSPRRARSVASQSIIAYTMSLGAENSVAYSNNSIAIPTNFTISVTTEILPVSMTKTSVDCTMYICGDSTECSNLLLQYGSFCTQLNRALTGIAVEQDKNTQEVFAQVKQIYKTPPIKDFGGFNFSQILPDPSKPSKRSFIEDLLFNKVTLADAGFIKQYGDCLGDIAARDLICAQKFNGLTVLPPLLTDEMIAQYTSALLAGTITSGWTFGAGAALQIPFAMQMAYRFNGIGVTQNVLYENQKLIANQFNSAIGKIQDSLSSTASALGKLQDVVNQNAQALNTLVKQLSSNFGAISSVLNDILSRLDPPEAEVQIDRLITGRLQSLQTYVTQQLIRAAEIRASANLAATKMSECVLGQSKRVDFCGKGYHLMSFPQSAPHGVVFLHVTYVPAQEKNFTTAPAICHDGKAHFPREGVFVSNGTHWFVTQRNFYEPQIITTDNTFVSGNCDVVIGIVNNTVYDPLQPELDSFKEELDKYFKNHTSPDVDLGDISGINASVVNIQKEIDRLNEVAKNLNESLIDLQELGKYEQYIK

SEQ ID NO: 1723 - protein, 1211 aa, Artificial Sequence
  SARS-CoV-2/Belgium/ULG-6939/2020__EPI_ISL_417020 spike protein (1-1211)(K986P_V987P)
MFVFLVLLPLVSSQCVNLTTRTQLPPAYTNSFTRGVYYPDKVFRSSVLHSTQDLFLPFFSNVTWFHAIHVSGTNGTKRFDNPVLPFNDGVYFASTEKSNIIRGWIFGTTLDSKTQSLLIVNNATNVVIKVCEFQFCNDPFLGVYYHKNNKSWMESEFRVYSSANNCTFEYVSQPFLMDLEGKQGNFKNLREFVFKNIDGYFKIYSKHTPINLVRDLPQGFSALEPLVDLPIGINITRFQTLLALHRSYLTPGDSSSGWTAGAAAYYVGYLQPRTFLLKYNENGTITDAVDCALDPLSETKCTLKSFTVEKGIYQTSNFRVQPTESIVRFPNITNLCPFGEVFNATRFASVYAWNRKRISNCVADYSVLYNSASFSTFKCYGVSPTKLNDLCFTNVYADSFVIRGDEVRQIAPGQTGKIADYNYKLPDDFTGCVIAWNSNNLDSKVGGNYNYLYRLFRKSNLKPFERDISTEIYQAGSTPCNGVEGFNCYFPLQSYGFQPTNGVGYQPYRVVVLSFELLHAPATVCGPKKSTNLVKNKCVNFNFNGLTGTGVLTESNKKFLPFQQFGRDIADTTDAVRDPQTLEILDITPCSFGGVSVITPGTNTSNQVAVLYQGVNCTEVPVAIHADQLTPTWRVYSTGSNVFQTRAGCLIGAEHVNNSYECDIPIGAGICASYQTQTNSPRRARSVASQSIIAYTMSLGAENSVVYSNNSIAIPTNFTISVTTEILPVSMTKTSVDCTMYICGDSTECSNLLLQYGSFCTQLNRALTGIAVEQDKNTQEVFAQVKQIYKTPPIKDFGGFNFSQILPDPSKPSKRSFIEDLLFNKVTLADAGFIKQYGDCLGDIAARDLICAQKFNGLTVLPPLLTDEMIAQYTSALLAGTITSGWTFGAGAALQIPFAMQMAYRFNGIGVTQNVLYENQKLIANQFNSAIGKIQDSLSSTASALGKLQDVVNQNAQALNTLVKQLSSNFGAISSVLNDILSRLDPPEAEVQIDRLITGRLQSLQTYVTQQLIRAAEIRASANLAATKMSECVLGQSKRVDFCGKGYHLMSFPQSAPHGVVFLHVTYVPAQEKNFTTAPAICHDGKAHFPREGVFVSNGTHWFVTQRNFYEPQIITTDNTFVSGNCDVVIGIVNNTVYDPLQPELDSFKEELDKYFKNHTSPDVDLGDISGINASVVNIQKEIDRLNEVAKNLNESLIDLQELGKYEQYIK

SEQ ID NO: 1724 - protein, 1211 aa, Artificial Sequence
  SARS-CoV-2/France/HF2496/2020__EPI_ISL_418231 spike protein (1-1211)(K986P_V987P)
MFVFLVLLPLVSSQCVNLTTRTQLPPAYTNSFTRGVYYPDKVFRSSVLHSTQDLFLPFFSNVTWFHAIHVSGTNGTKRFDNPVLPFNDGVYFASTEKSNIIRGWIFGTTLDSKTQSLLIVNNATNVVIKVCEFQFCNDPFLGVYYHKNNKSWMESEFRVYSSANNCTFEYVSQPFLMDLEGKQGNFKNLREFVFKNIDGYFKIYSKHTPINLVRDLPQGFSALEPLVDLPIGINITRFQTLLALHRSYLTPGDSSSGWTAGAAAYYVGYLQPRTFLLKYNENGTITDAVDCALDPLSETKCTLKSFTVEKGIYQTSNFRVQPTESIVRFPNITNLCPFGEVFNATRFASVYAWNRKRISNCVADYSVLYNSASFSTFKCYGVSPTKLNDLCFTNVYADSFVIRGDEVRQIAPGQTGKIADYNYKLPDDFTGCVIAWNSNNLDSKVGGNYNYLYRLFRKSNLKPFERDISTEIYQAGSTPCNGVEGFNCYFPLQSYGFQPTNGVGYQPYRVVVLSFELLHAPATVCGPKKSTNLVKNKCVNFNFNGLTGTGVLTESNKKFLPFQQFGRDIADTTDAVRDPQTLEILDITPCSFGGVSVITPGTNTSNQVAVLYQGVNCTEVPVAIHADQLTPTWRVYSTGSNVFQTRAGCLIGAEHVNNSYECDIPIGAGICASYQTQTNSPRRARSVASQSIIAYTMSLGAENSVAYSNNSIAIPTNFTISVTTEILPVSMTKTSVDCTMYICGDSTECSNLLLQYGSFCTQLNRALTGIAVEQDKNTQEVFAQVKQIYKTPPIKDFGGFNFSQILPDPSKPSKRSFIEDLLFNKVTLADAGFIKQYGDCLGDIVARDLICAQKFNGLTVLPPLLTDEMIAQYTSALLAGTITSGWTFGAGAALQIPFAMQMAYRFNGIGVTQNVLYENQKLIANQFNSAIGKIQDSLSSTASALGKLQDVVNQNAQALNTLVKQLSSNFGAISSVLNDILSRLDPPEAEVQIDRLITGRLQSLQTYVTQQLIRAAEIRASANLAATKMSECVLGQSKRVDFCGKGYHLMSFPQSAPHGVVFLHVTYVPAQEKNFTTAPAICHDGKAHFPREGVFVSNGTHWFVTQRNFYEPQIITTDNTFVSGNCDVVIGIVNNTVYDPLQPELDSFKEELDKYFKNHTSPDVDLGDISGINASVVNIQKEIDRLNEVAKNLNESLIDLQELGKYEQYIK

SEQ ID NO: 1725 - protein, 1211 aa, Artificial Sequence
  SARS-CoV-2/USA/WA-UW291/2020__EPI_ISL_418076 spike protein (1-1211)(K986P_V987P)
MFVFLVLLPLVSSQCVNLTTRTQLPPAYTNSFTRGVYYPDKVFRSSVLHSTQDLFLPFFSNVTWFHAIHVSGTNGTKRFDNPVLPFNDGVYFASTEKSNIIRGWIFGTTLDSKTQSLLIVNNATNVVIKVCEFQFCNDPFLGVYYHKNNKSWMESEFRVYSSANNCTFEYVSQPFLMDLEGKQGNFKNLREFVFKNIDGYFKIYSKHTPINLVRDLPQGFSALEPLVDLPIGINITRFQTLLALHRSYLTPGDSSSGWTAGAAAYYVGYLQPRTFLLKYNENGTITDAVDCALDPLSETKCTLKSFTVEKGIYQTSNFRVQPTESIVRFPNITNLCPFGEVFNATRFASVYAWNRKRISNCVADYSVLYNSASFSTFKCYGVSPTKLNDLCFTNVYADSFVIRGDEVRQIAPGQTGKIADYNYKLPDDFTGCVIAWNSNNLDSKVGGNYNYLYRLFRKSNLKPFERDISTEIYQAGSTPCNGVEGFNCYFPLQSYGFQPTNGVGYQPYRVVVLSFELLHAPATVCGPKKSTNLVKNKCVNFNFNGLTGTGVLTESNKKFLPFQQFGRDIADTTDAVRDPQTLEILDITPCSFGGVSVITPGTNTSNQVAVLYQGVNCTEVPVAIHADQLTPTWRVYSTGSNVFQTRAGCLIGAEHVNNSYECDIPIGAGICASYQTQTNSPRRARSVASQSIIAYTMSLGAENSVAYSNNSIAIPTNFTISVTTEILPVSMTKTSVDCTMYICGDSTECSNLLLQYGSFCTQLNRALTGIAVEQDKNTQEVFAQVKQIYKTPPIKDFGGFNFSQILPDPSKPSKRSFIEDLLFNKVTLADAGFIKQYGDCLGDIAARDLICAQKFNGLTVLPPLLTDEMIAQYTSALLAGTITSGWTFGAGAALQIPFAMQMAYRFNGIGVTQNVLYENQKLIANQFNSAIGKIQYSLSSTASALGKLQDVVNQNAQALNTLVKQLSSNFGAISSVLNDILSRLDPPEAEVQIDRLITGRLQSLQTYVTQQLIRAAEIRASANLAATKMSECVLGQSKRVDFCGKGYHLMSFPQSAPHGVVFLHVTYVPAQEKNFTTAPAICHDGKAHFPREGVFVSNGTHWFVTQRNFYEPQIITTDNTFVSGNCDVVIGIVNNTVYDPLQPELDSFKEELDKYFKNHTSPDVDLGDISGINASVVNIQKEIDRLNEVAKNLNESLIDLQELGKYEQYIK

SEQ ID NO: 1726 - protein, 1211 aa, Artificial Sequence; identical to SEQ ID NO: 48
  SARS-CoV-2/Portugal/PT0034/2020__EPI_ISL_418019 spike protein (1-1211)(K986P_V987P)

SEQ ID NO: 1727 - protein, 1211 aa, Artificial Sequence
  SARS-CoV-2/Iceland/202/2020__EPI_ISL_417750 spike protein (1-1211)(K986P_V987P)
MFVFLVLLPLVSSQCVNLTTRTQLPPAYTNSFTRGVYYPDKVFRSSVLHSTQDLFLPFFSNVTWFHAIHVSGTNGTKRFDNPVLPFNDGVYFASTEKSNIIRGWIFGTTLDSKTQSLLIVNNATNVVIKVCEFQFCNDPFLGVYYHKNNKSWMESEFRVYSSANNCTFEYVSQPFLMDLEGKQGNFKNLREFVFKNIDGYFKIYSKHTPINLVRDLPQGFSALEPLVDLPIGINITRFQTLLALHRSYLTPGDSSSGWTAGAAAYYVGYLQPRTFLLKYNENGTITDAVDCALDPLSETKCTLKSFTVEKGIYQTSNFRVQPTESIVRFPNITNLCPFGEVFNATRFASVYAWNRKRISNCVADYSVLYNSASFSTFKCYGVSPTKLNDLCFTNVYADSFVIRGDEVRQIAPGQTGKIADYNYKLPDDFTGCVIAWNSNNLDSKVGGNYNYLYRLFRKSNLKPFERDISTEIYQAGSTPCNGVEGFNCYFPLQSYGFQPTNGVGYQPYRVVVLSFELLHAPATVCGPKKSTNLVKNKCVNFNFNGLTGTGVLTESNKKFLPFQQFGRDIADTTDAVRDPQTLEILDITPCSFGGVSVITPGTNTSNQVAVLYQDVNCTEVPVAIHADQLTPTWRVYSTGSNVFQTRAGCLIGAEHVNNSYECDIPIGAGICASYQTQTNSPRRARSVASQSIIAYTMSLGAENSVAYSNNSIAIPTNFTISVTTEILPVSMTKTSVDCTMYICGDSTECSNLLLQYGSFCTQLNRALTGIAVEQDKNTQEVFAQVKQIYKTPPIKDFGGFNFSQILPDPSKPSKRSFIEDLLFNKVTLADAGFIKQYGDCLGDIAARDLICAQKFNGLTVLPPLLTDEMIAQYTSALLAGTITSGWTFGAGAALQIPFAMQMAYRFNGIGVTQNVLYENQKLIANQFNSAIGKIQDSLSSTASALGKLQDVVNQNAQALNTLVKQLSSNFGAISSVLNDILSRLDPPEAEVQIDRLITGRLQSLQTYVTQQLIRAAEIRASANLAATKMSECVLGQSKRVDFCGKGYHLMSFPQSAPHGVVFLHVTYVPAQEKNFTTAPAICHDGKAHFPREGVFVSNGTHWFVTQRNFYEPQIITTDNTFVSGNCDVVIGIVNNTVYDPLQPELDSFKEELDKYFKNHTSPDVDLGDIPGINASVVNIQKEIDRLNEVAKNLNESLIDLQELGKYEQYIK

SEQ ID NO: 1728 - protein, 1211 aa, Artificial Sequence
  SARS-CoV-2/USA/WA-UW261/2020__EPI_ISL_418046 spike protein (1-1211)(K986P_V987P)
MFVFLVLLPLVSSQCVNLTTRTQLPPAYTNSFTRGVYYPDKVFRSSVLHSTQDLFLPFFSNVTWFHAIHVSGTNGTKRFDNPVLPFNDGVYFASTEKSNIIRGWIFGTTLDSKTQSLLIVNNATNVVIKVCEFQFCNDPFLGVYYHKNNKSWMESEFRVYSSANNCTFEYVSQPFLMDLEGKQGNFKNLREFVFKNIDGYFKIYSKHTPINLVRDLPQGFSALEPLVDLPIGINITRFQTLLALHRSYLTPGDSSSGWTAGAAAYYVGYLQPRTFLLKYNENGTITDAVDCALDPLSETKCTLKSFTVEKGIYQTSNFRVQPTESIVRFPNITNLCPFGEVFNATRFTSVYAWNRKRISNCVADYSVLYNSASFSTFKCYGVSPTKLNDLCFTNVYADSFVIRGDEVRQIAPGQTGKIADYNYKLPDDFTGCVIAWNSNNLDSKVGGNYNYLYRLFRKSNLKPFERDISTEIYQAGSTPCNGVEGFNCYFPLQSYGFQPTNGVGYQPYRVVVLSFELLHAPATVCGPKKSTNLVKNKCVNFNFNGLTGTGVLTESNKKFLPFQQFGRDIADTTDAVRDPQTLEILDITPCSFGGVSVITPGTNTSNQVAVLYQDVNCTEVPVAIHADQLTPTWRVYSTGSNVFQTRAGCLIGAEHVNNSYECDIPIGAGICASYQTQTNSPRRARSVASQSIIAYTMSLGAENSVAYSNNSIAIPTNFTISVTTEILPVSMTKTSVDCTMYICGDSTECSNLLLQYGSFCTQLNRALTGIAVEQDKNTQEVFAQVKQIYKTPPIKDFGGFNFSQILPDPSKPSKRSFIEDLLFNKVTLADAGFIKQYGDCLGDIAARDLICAQKFNGLTVLPPLLTDEMIAQYTSALLAGTITSGWTFGAGAALQIPFAMQMAYRFNGIGVTQNVLYENQKLIANQFNSAIGKIQDSLSSTASALGKLQDVVNQNAQALNTLVKQLSSNFGAISSVLNDILSRLDPPEAEVQIDRLITGRLQSLQTYVTQQLIRAAEIRASANLAATKMSECVLGQSKRVDFCGKGYHLMSFPQSAPHGVVFLHVTYVPAQEKNFTTAPAICHDGKAHFPREGVFVSNGTHWFVTQRNFYEPQIITTDNTFVSGNCDVVIGIVNNTVYDPLQPELDSFKEELDKYFKNHTSPDVDLGDISGINASVVNIQKEIDRLNEVAKNLNESLIDLQELGKYEQYIK

SEQ ID NO: 1729 - protein, 1211 aa, Artificial Sequence
  SARS-CoV-2/Portugal/PT0035/2020__EPI_ISL_418020 spike protein (1-1211)(K986P_V987P)
MFVFLVLLPLVSSQCVNLTTRTQLPPAYTNSFTRGVYYPDKVFRSSVLHSTQDLFLPFFSNVTWFHAIHVSGTNGTKRFDNPVLPFNDGVYFASTEKSNIIRGWIFGTTLDSKTQSLLIVNNATNVVIKVCEFQFCNDPFLGVYYHKNNKSWMESEFRVYSSANNCTFEYVSQPFLMDLEGKQGNFKNLREFVFKNIDGYFKIYSKHTPINLVRDLPQGFSALEPLVDLPIGINITRFQTLLALHRSYLTPGDSSSGWTAGAAAYYVGYLQPRTFLLKYNENGTITDAVDCALDPLSETKCTLKSFTVEKGIYQTSNFRVQPTESIVRFPNITNLCPFGEVFNATRFASVYAWNRKRISNCVADYSVLYNSASFSTFKCYGVSPTKLNDLCFTNVYADSFVIRGDEVRQIAPGQTGKIADYNYKLPDDFTGCVIAWNSNNLDSKVGGNYNYLYRLFRKSNLKPFERDISTEIYQAGSTPCNGVEGFNCYFPLQSYGFQPTNGVGYQPYRVVVLSFELLHAPATVCGPKKSTNLVKNKCVNFNFNGLTGTGVLTESNKKFLPFQQFGRDIADTTDAVRDPQTLEILDITPCSFGGVSVITPGTNTSNQVAVLYQDVNCTEVPVAIHADQLTPTWRVYSTGSNVFQTRAGCLIGAEHVNNSYECDIPIGAGICASYQTQTNSPRRARSVASQSIIAYTMSLGAENSVAYSNNSIAIPTNFTISVTTEILPVSMTKTSVDCTMYICGDSTECSNLLLQYGSFCTQLNRALTGIAVEQDKNTQEVFAQVKQIYKTPPIKDFGGFNFSQILPDPSKPSKRSFIEDLLFNKVTLADAGFIKQYGDCLGDISARDLICAQKFNGLTVLPPLLTDEMIAQYTSALLAGTITSGWTFGAGAALQIPFAMQMAYRFNGIGVTQNVLYENQKLIANQFNSAIGKIQDSLSSTASALGKLQDVVNQNAQALNTLVKQLSSNFGAISSVLNDILSRLDPPEAEVQIDRLITGRLQSLQTYVTQQLIRAAEIRASANLAATKMSECVLGQSKRVDFCGKGYHLMSFPQSAPHGVVFLHVTYVPAQEKNFTTAPAICHDGKAHFPREGVFVSNGTHWFVTQRNFYEPQIITTDNTFVSGNCDVVIGIVNNTVYDPLQPELDSFKEELDKYFKNHTSPDVDLGDISGINASVVNIQKEIDRLNEVAKNLNESLIDLQELGKYEQYIK

SEQ ID NO: 1730 - protein, 1211 aa, Artificial Sequence
  SARS-CoV-2/USA/NY-NYUMC7/2020__EPI_ISL_418192 spike protein (1-1211)(K986P_V987P)
MFVFLVLLPLVSSQCVNLTTRTQLPPAYTNSFTRGVYYPDKVFRSSVLHSTQDLFLPFFSNVTWFHAIHVSGTNGTKRFDNPVLPFNDGVYFASTEKSNIIRGWIFGTTLDSKTQSLLIVNNATNVVIKVCEFQFCNDPFLGVYHHKNNKSWMESEFRVYSSANNCTFEYVSQPFLMDLEGKQGNFKNLREFVFKNIDGYFKIYSKHTPINLVRDLPQGFSALEPLVDLPIGINITRFQTLLALHRSYLTPGDSSSGWTAGAAAYYVGYLQPRTFLLKYNENGTITDAVDCALDPLSETKCTLKSFTVEKGIYQTSNFRVQPTESIVRFPNITNLCPFGEVFNATRFASVYAWNRKRISNCVADYSVLYNSASFSTFKCYGVSPTKLNDLCFTNVYADSFVIRGDEVRQIAPGQTGKIADYNYKLPDDFTGCVIAWNSNNLDSKVGGNYNYLYRLFRKSNLKPFERDISTEIYQAGSTPCNGVEGFNCYFPLQSYGFQPTNGVGYQPYRVVVLSFELLHAPATVCGPKKSTNLVKNKCVNFNFNGLTGTGVLTESNKKFLPFQQFGRDIADTTDAVRDPQTLEILDITPCSFGGVSVITPGTNTSNQVAVLYQGVNCTEVPVAIHADQLTPTWRVYSTGSNVFQTRAGCLIGAEHVNNSYECDIPIGAGICASYQTQTNSPRRARSVASQSIIAYTMSLGAENSVAYSNNSIAIPTNFTISVTTEILPVSMTKTSVDCTMYICGDSTECSNLLLQYGSFCTQLNRALTGIAVEQDKNTQEVFAQVKQIYKTPPIKDFGGFNFSQILPDPSKPSKRSFIEDLLFNKVTLADAGFIKQYGDCLGDIAARDLICAQKFNGLTVLPPLLTDEMIAQYTSALLAGTITSGWTFGAGAALQIPFAMQMAYRFNGIGVTQNVLYENQKLIANQFNSAIGKIQDSLSSTASALGKLQDVVNQNAQALNTLVKQLSSNFGAISSVLNDILSRLDPPEAEVQIDRLITGRLQSLQTYVTQQLIRAAEIRASANLAATKMSECVLGQSKRVDFCGKGYHLMSFPQSAPHGVVFLHVTYVPAQEKNFTTAPAICHDGKAHFPREGVFVSNGTHWFVTQRNFYEPQIITTDNTFVSGNCDVVIGIVNNTVYDPLQPELDSFKEELDKYFKNHTSPDVDLGDISGINASVVNIQKEIDRLNEVAKNLNESLIDLQELGKYEQYIK

SEQ ID NO: 1731 - protein, 1211 aa, Artificial Sequence
  SARS-CoV-2/Iceland/189/2020__EPI_ISL_417709 spike protein (1-1211)(K986P_V987P)
MFVFLVLLPLVSSQCVNLTTRTQLPPAYTNSFTRGVYYPDKVFRSSVLHSTQDLFLPFFSNVTWFHAIHVSGTNGTKRFDNPVLPFNDGVYFASTEKSNIIRGWIFGTTLDSKTQSLLIVNNATNVVIKVCEFQFCNDPFLGVYYHKNNKSWMESEFRVYSSANNCTFEYVSQPFLMDLEGKQGNFKNLREFVFKNIDGYFKIYSKHTPINLVRDLPQGFSALEPLVDLPIGINITRFQTLLALHRSYLTPGDSSSGWTAGAAAYYVGYLQPRTFLLKYNENGTITDAVDCALDPLSETKCTLKSFTVEKGIYQTSNFRVQPTESIVRFPNITNLCPFGEVFNATRFASVYAWNRKRISNCVADYSVLYNSASFSTFKCYGVSPTKLNDLCFTNVYADSFVIRGDEVRQIAPGQTGKIADYNYKLPDDFTGCVIAWNSNNLDSKVGGNYNYLYRLFRKSNLKPFERDISTEIYQAGSTPCNGVEGFNCYFPLQSYGFQPTNGVGYQPYRVVVLSFELLHAPATVCGPKKSTNLVKNKCVNFNFNGLTGTGVLTESNKKFLPFQQFGRDIADTTDAVRDPQTLEILDITPCSFGGVSVITPGTNTSNQVAVLYQGVNCTEVPVAIHADQLTPTWRVYSTGSNVFQTRAGCLIGAEHVNNSYECDIPIGAGICASYQTQTNSPRRARSVASQSIIAYTMSLGAENSVAYSNNSIAIPTNFTISVTTEILPVSMTKTSVDCTMYICGDSTECSNLLLQYGSFCTQLNRALTGIAVEQDKNTQEVFAQVKQIYKTPPIKDFGGFNFSQILPDPSKPSKRSFIEDLLFNKVTLADAGFTKQYGDCLGDIAARDLICAQKFNGLTVLPPLLTDEMIAQYTSALLAGTITSGWTFGAGAALQIPFAMQMAYRFNGIGVTQNVLYENQKLIANQFNSAIGKIQDSLSSTASALGKLQDVVNQNAQALNTLVKQLSSNFGAISSVLNDILSRLDPPEAEVQIDRLITGRLQSLQTYVTQQLIRAAEIRASANLAATKMSECVLGQSKRVDFCGKGYHLMSFPQSAPHGVVFLHVTYVPAQEKNFTTAPAICHDGKAHFPREGVFVSNGTHWFVTQRNFYEPQIITTDNTFVSGNCDVVIGIVNNTVYDPLQPELDSFKEELDKYFKNHTSPDVDLGDISGINASVVNIQKEIDRLNEVAKNLNESLIDLQELGKYEQYIK

SEQ ID NO: 1732 - protein, 1211 aa, Artificial Sequence
  SARS-CoV-2/Australia/NSW56/2020__EPI_ISL_417408 spike protein (1-1211)(K986P_V987P)
MFVFLVLLPLVSSQCVNLTTRTQLPPAYTNSFTRGVYYPDKVFRSSVLHSTQDLFLPFFSNVTWFHAIHVSGTNGTKRFDNPVLPFNDGVYFASTEKSNIIRGWIFGTTLDSKTQSLLIVNNATNVVIKVCEFQFCNDPFLGVYYHKNNKSWMESEFRVYSSANNCTFEYVSQPFLMDLEGKQGNFKNLREFVFKNIDGYFKIYSKHTPINLVRDLPQGFSALEPLVDLPIGINITRFQTLLALHRSYLTPGDSSSGWTAGAAAYYVGYLQPRTFLLKYNENGTITDAVDCALDPLSETKCTLKSFTVEKGIYQTSNFRVQPTESIVRFPNITNLCPFGEVFNATRFASVYAWNRKRISNCVADYSVLYNSASFSTFKCYGVSPTKLNDLCFTNVYADSFVIRGDEVRQIAPGQTGKIADYNYKLPDDFTGCVIAWNSNNLDSKVGGNYNYLYRLFRKSNLKPFERDISTEIYQAGSTPCNGVEGFNCYFPLQSYGFQPTNGVGYQPYRVVVLSFELLHAPATVCGPKKSTNLVKNKCVNFNFNGLTGTGVLTESNKKFLPFQQFGRDIADTTDAVRDPQTLEILDITPCSFGGVSVITPGTNTSNQVAVLYQDVNCTEVPVAIHADQLTPTWRVYSTGSNVFQTRAGCLIGAEHVNNSYECDIPIGAGICASYQTQTNSPRRARSVASQSIIAYTMSLGAENSVAYSNNSIAIPTNFTISVTTEILPVSMTKTSVDCTMYICGDSTECSNLLLQYGSFCTQLNRALTGIAVEQDKNTQEVFAQVKQIYKTPPIKDFGGFNFSQILPDSSKPSKRSFIEDLLFNKVTLADAGFIKQYGDCLGDIAARDLICAQKFNGLTVLPPLLTDEMIAQYTSALLAGTITSGWTFGAGAALQIPFAMQMAYRFNGIGVTQNVLYENQKLIANQFNSAIGKIQDSLSSTASALGKLQDVVNQNAQALNTLVKQLSSNFGAISSVLNDILSRLDPPEAEVQIDRLITGRLQSLQTYVTQQLIRAAEIRASANLAATKMSECVLGQSKRVDFCGKGYHLMSFPQSAPHGVVFLHVTYVPAQEKNFTTAPAICHDGKAHFPREGVFVSNGTHWFVTQRNFYEPQIITTDNTFVSGNCDVVIGIVNNTVYDPLQPELDSFKEELDKYFKNHTSPDVDLGDISGINASVVNIQKEIDRLNEVAKNLNESLIDLQELGKYEQYIK

SEQ ID NO: 1733 - protein, 1211 aa, Artificial Sequence
  SARS-CoV-2/Iceland/280/2020__EPI_ISL_417608 spike protein (1-1211)(K986P_V987P)
MFVFLVLLPLVSSQCVNLTTRTQLPPAYTNSFTRGVYYPDKVFRSSVLHSTQDLFLPFFSNVTWFHAIHVSGTNGTKRFDNPVLPFNDGVYFASTEKSNIIRGWIFGTTLDSKTQSLLIVNNATNVVIKVCEFQFCNDPFLGVYYHKNNKSWMESEFRVYSSANNCTFEYVSQPFLMDLEGKQGNFKNLREFVFKNIDGYFKIYSKHTPINLVRDLPQGFSALEPLVDLPIGINITRFQTLLALHRSYLTPGDSSSGWTAGAAAYYVGYLQPRTFLLKYNENGTITDAVDCALDPLSETKCTLKSFTVEKGIYQTSNFRVQPTESIVRFPNITNLCPFGEVFNATRFASVYAWNRKRISNCVADYSVLYNSASFSTFKCYGVSPTKLNDLCFTNVYADSFVIRGDEVRQIAPGQTGKIADYNYKLPDDFTGCVIAWNSNNLDSKVGGNYNYLYRLFRKSNLKPFERDISTEIYQAGSTPCNGVEGFNCYFPLQSYGFQPTNGVGYQPYRVVVLSFELLHAPATVCGPKKSTNLVKNKCVNFNFNGLTGTGVLTESNKKFLPFQQFGRDIADTTDAVRDPQTLEILDITPCSFGGVSVITPGTNTSNQVAVLYQGVNCTEVPVAIHADQLTPTWRVYSTGSNVFQTRAGCLIGAEHVNNSYECDIPIGAGICASYHTQTNSPRRARSVASQSIIAYTMSLGAENSVAYSNNSIAIPTNFTISVTTEILPVSMTKTSVDCTMYICGDSTECSNLLLQYGSFCTQLNRALTGIAVEQDKNTQEVFAQVKQIYKTPPIKDFGGFNFSQILPDPSKPSKRSFIEDLLFNKVTLADAGFIKQYGDCLGDIAARDLICAQKFNGLTVLPPLLTDEMIAQYTSALLAGTITSGWTFGAGAALQIPFAMQMAYRFNGIGVTQNVLYENQKLIANQFNSAIGKIQDSLSSTASALGKLQDVVNQNAQALNTLVKQLSSNFGAISSVLNDILSRLDPPEAEVQIDRLITGRLQSLQTYVTQQLIRAAEIRASANLAATKMSECVLGQSKRVDFCGKGYHLMSFPQSAPHGVVFLHVTYVPAQEKNFTTAPAICHDGKAHFPREGVFVSNGTHWFVTQRNFYEPQIITTDNTFVSGNCDVVIGIVNNTVYDPLQPELDSFKEELDKYFKNHTSPDVDLGDISGINASVVNIQKEIDRLNEVAKNLNESLIDLQELGKYEQYIK

SEQ ID NO: 1734 - protein, 1211 aa, Artificial Sequence; identical to SEQ ID NO: 48
  SARS-CoV-2/Iceland/247/2020__EPI_ISL_417575 spike protein (1-1211)(K986P_V987P)

SEQ ID NO: 1735 - protein, 1211 aa, Artificial Sequence
  SARS-CoV-2/Iceland/238/2020__EPI_ISL_417566 spike protein (1-1211)(K986P_V987P)
MFVFLVLLPLVSSQCVNLTTRTQLPPAYTNSFTRGVYYPDKVFRSSVLHSTQDLFLPFFSNVTWFHAIHVSGTNGTKRFDNPVLPFNDGVYFASTEKSNIIRGWIFGTTLDSKTQSLLIVNNATNVVIKVCEFQFCNDPFLGVYYHKNNKSWMESEFRVYSSANNCTFEYVSQPFLMDLEGKQGNFKNLREFVFKNIDGYFKIYSKHTPINLVRDLPQGFSALEPLVDLPIGINITRFQTLLALHRSYLTPGDSSSGWTAGAAAYYVGYLQPRTFLLKYNENGTITDAVDCALDPLSETKCTLKSFTVEKGIYQTSNFRVQPTESIVRFPNITNLCPFGEVFNATRFASVYAWNRKRISNCVADYSVLYNSASFSTFKCYGVSPTKLNDLCFTNVYADSFVIRGDEVRQIAPGQTGKIADYNYKLPDDFTGCVIAWNSNNLDSKVGGNYNYLYRLFRKSNLKPFERDISTEIYQAGSTPCNGVEGFNCYFPLQSYGFQPTNGVGYQPYRVVVLSFELLHAPATVCGPKKSTNLVKNKCVNFNFNGLTGTGVLTESNKKFLPFQQFGRDIADTTDAVRDPQTLEILDITPCSFGGVSVITPGTNTSNQVAVLYQGVNCTEVPVAIHADQLTPTWRVYSTGSNVFQTRAGCLIGAEHVNNSYECDIPIGAGICASYQTQTNSPRRARSVASQSIIAYTMSLGAENSVAYSNNSIAIPTNFTISVTTEILPVSMTKTSVDCTMYICGDSTECSNLLLQYGSFCTQLNRALTGIAVEQDKNTQEVFAQVKQIYKTPPIKDFGGFNFSQILPDPSKPSKRSFIEDLLFNKVTLADVGFIKQYGDCLGDIAARDLICAQKFNGLTVLPPLLTDEMIAQYTSALLAGTITSGWTFGAGAALQIPFAMQMAYRFNGIGVTQNVLYENQKLIANQFNSAIGKIQDSLSSTASALGKLQDVVNQNAQALNTLVKQLSSNFGAISSVLNDILSRLDPPEAEVQIDRLITGRLQSLQTYVTQQLIRAAEIRASANLAATKMSECVLGQSKRVDFCGKGYHLMSFPQSAPHGVVFLHVTYVPAQEKNFTTAPAICHDGKAHFPREGVFVSNGTHWFVTQRNFYEPQIITTDNTFVSGNCDVVIGIVNNTVYDPLQPELDSFKEELDKYFKNHTSPDVDLGDISGINASVVNIQKEIDRLNEVAKNLNESLIDLQELGKYEQYIK

SEQ ID NO: 1736 - protein, 1211 aa, Artificial Sequence
  SARS-CoV-2/Greece/16/2020__EPI_ISL_418265 spike protein (1-1211)(K986P_V987P)
MFVFLVLLPLVSSQCVNLTTRTQLPPAYTNSFTRGVYYPDKVFRSSVLHSTQDLFLPFFSNVTWFHAIHVSGTNGTKRFDNPVLPFNDGVYFASTEKSNIIRGWIFGTTLDSKTQSLLIVNNATNVVIKVCEFQFCNDPFLGVYYHKNNKSWMESEFRVYSSANNCTFEYVSQPFLMDLEGKQGNFKNLREFVFKNVDGYFKIYSKHTPINLVRDLPQGFSALEPLVDLPIGINITRFQTLLALHRSYLTPGDSSSGWTAGAAAYYVGYLQPRTFLLKYNENGTITDAVDCALDPLSETKCTLKSFTVEKGIYQTSNFRVQPTESIVRFPNITNLCPFGEVFNATRFASVYAWNRKRISNCVADYSVLYNSASFSTFKCYGVSPTKLNDLCFTNVYADSFVIRGDEVRQIAPGQTGKIADYNYKLPDDFTGCVIAWNSNNLDSKVGGNYNYLYRLFRKSNLKPFERDISTEIYQAGSTPCNGVEGFNCYFPLQSYGFQPTNGVGYQPYRVVVLSFELLHAPATVCGPKKSTNLVKNKCVNFNFNGLTGTGVLTESNKKFLPFQQFGRDIADTTDAVRDPQTLEILDITPCSFGGVSVITPGTNTSNQVAVLYQDVNCTEVPVAIHADQLTPTWRVYSTGSNVFQTRAGCLIGAEHVNNSYECDIPIGAGICASYQTQTNSPRRARSVASQSIIAYTMSLGAENSVAYSNNSIAIPTNFTISVTTEILPVSMTKTSVDCTMYICGDSTECSNLLLQYGSFCTQLNRALTGIAVEQDKNTQEVFAQVKQIYKTPPIKDFGGFNFSQILPDPSKPSKRSFIEDLLFNKVTLADAGFIKQYGDCLGDIAARDLICAQKFNGLTVLPPLLTDEMIAQYTSALLAGTITSGWTFGAGAALQIPFAMQMAYRFNGIGVTQNVLYENQKLIANQFNSAIGKIQDSLSSTASALGKLQDVVNQNAQALNTLVKQLSSNFGAISSVLNDILSRLDPPEAEVQIDRLITGRLQSLQTYVTQQLIRAAEIRASANLAATKMSECVLGQSKRVDFCGKGYHLMSFPQSAPHGVVFLHVTYVPAQEKNFTTAPAICHDGKAHFPREGVFVSNGTHWFVTQRNFYEPQIITTDNTFVSGNCDVVIGIVNNTVYDPLQPELDSFKEELDKYFKNHTSPDVDLGDISGINASVVNIQKEIDRLNEVAKNLNESLIDLQELGKYEQYIK

SEQ ID NO: 1737 - protein, 1211 aa, Artificial Sequence
  SARS-CoV-2/Iceland/319/2020__EPI_ISL_417648 spike protein (1-1211)(K986P_V987P)
MFVFLVLLPLVSSQCVNLTTRTQLPPAYTNSFTRGVYYPDKVFRSSVLHSTQDLFLPFFSNVTWFHAIHVSGTNGTKRFDNPVLPFNDGVYFASTEKSNIIRGWIFGTTLDSKTQSLLIVNNATNVVIKVCEFQFCNDPFLGVYYHKNNKSWMESEFRVYSSANNCTFEYVSQPFLIDLEGKQGNFKNLREFVFKNIDGYFKIYSKHTPINLVRDLPQGFSALEPLVDLPIGINITRFQTLLALHRSYLTPGDSSSGWTAGAAAYYVGYLQPRTFLLKYNENGTITDAVDCALDPLSETKCTLKSFTVEKGIYQTSNFRVQPTESIVRFPNITNLCPFGEVFNATRFASVYAWNRKRISNCVADYSVLYNSASFSTFKCYGVSPTKLNDLCFTNVYADSFVIRGDEVRQIAPGQTGKIADYNYKLPDDFTGCVIAWNSNNLDSKVGGNYNYLYRLFRKSNLKPFERDISTEIYQAGSTPCNGVEGFNCYFPLQSYGFQPTNGVGYQPYRVVVLSFELLHAPATVCGPKKSTNLVKNKCVNFNFNGLTGTGVLTESNKKFLPFQQFGRDIADTTDAVRDPQTLEILDITPCSFGGVSVITPGTNTSNQVAVLYQGVNCTEVPVAIHADQLTPTWRVYSTGSNVFQTRAGCLIGAEHVNNSYECDIPIGAGICASYQTQTNSPRRARSVASQSIIAYTMSLGAENSVAYSNNSIAIPTNFTISVTTEILPVSMTKTSVDCTMYICGDSTECSNLLLQYGSFCTQLNRALTGIAVEQDKNTQEVFAQVKQIYKTPPIKDFGGFNFSQILPDPSKPSKRSFIEDLLFNKVTLADAGFIKQYGDCLGDIAARDLICAQKFNGLTVLPPLLTDEMIAQYTSALLAGTITSGWTFGAGAALQIPFAMQMAYRFNGIGVTQNVLYENQKLIANQFNSAIGKIQDSLSSTASALGKLQDVVNQNAQALNTLVKQLSSNFGAISSVLNDILSRLDPPEAEVQIDRLITGRLQSLQTYVTQQLIRAAEIRASANLAATKMSECVLGQSKRVDFCGKGYHLMSFPQSAPHGVVFLHVTYVPAQEKNFTTAPAICHDGKAHFPREGVFVSNGTHWFVTQRNFYEPQIITTDNTFVSGNCDVVIGIVNNTVYDPLQPELDSFKEELDKYFKNHTSPDVDLGDISGINASVVNIQKEIDRLNEVAKNLNESLIDLQELGKYEQYIK

SEQ ID NO: 1738 - protein, 1211 aa, Artificial Sequence
  SARS-CoV-2/Congo/94/2020__EPI_ISL_417947 spike protein (1-1211)(K986P_V987P)
MFVFLVLLPLVSSQCVNLTTRTQLPPAYTNSFTRGVYYPDKVFRSSVLHSTQDLFLPFFSNVTWFHAIHVSGTNGTKRFDNPVLPFNDGVYFASTEKSNIIRGWIFGTTLDSKTQSLLIVNNATNVVIKVCEFQFCNDPFLGVYYHKNNKSWMESEFRVYSSANNCTFEYVSQPFLMDLEGKQGNFKNLREFVFKNIDGYFKIYSKHTPINLVRDLPQGFSALEPLVDLPIGINITRFQTLLALHRSYLTPGDSSSGWTAGAAAYYVGYLQPRTFLLKYNENGTITDAVDCALDPLSETKCTLKSFTVEKGIYQTSNFRVQPTESIVRFPNITNLCPFGEVFNATRFASVYAWNRKRISNCVADYSVLYNSASFSTFKCYGVSPTKLNDLCFTNVYADSFVIRGDEVRQIAPGQTGKIADYNYKLPDDFTGCVIAWNSNNLDSKVGGNYNYLYRLFRKSNLKPFERDISTEIYQAGSTPCNGVEGFNCYFPLQSYGFQPTNGVGYQPYRVVVLSFELLHAPATVCGPKKSTNLVKNKCVNFNFNGLTGTGVLTESNKKFLPFQQFGRDIADTTDAVRDPQTLEILDITPCSFGGVSVITPGTNTSNQVAVLYQGVNCTEVPVAIHADQLTPTWRVYSTGSNVFQTRAGCLIGAEHVNNSYECDIPIGAGICASYQTQTNSPRRARSVASQSIIAYTMSLGAENSVAYSNNSIAIPTNFTISVTTEILPVSMTKTSVDCTMYICGDSTECSNLLLQYGSFCTQLNRALTGIAVEQDKNTQEVFAQVKQIYKTPPIKDFGGFNFSQILPDPSKPSKRSFIEDILFNKVTLADAGFIKQYGDCLGDIAARDLICAQKFNGLTVLPPLLTDEMIAQYTSALLAGTITSGWTFGAGAALQIPFAMQMAYRFNGIGVTQNVLYENQKLIANQFNSAIGKIQDSLSSTASALGKLQDVVNQNAQALNTLVKQLSSNFGAISSVLNDILSRLDPPEAEVQIDRLITGRLQSLQTYVTQQLIRAAEIRASANLAATKMSECVLGQSKRVDFCGKGYHLMSFPQSAPHGVVFLHVTYVPAQEKNFTTAPAICHDGKAHFPREGVFVSNGTHWFVTQRNFYEPQIITTDNTFVSGNCDVVIGIVNNTVYDPLQPELDSFKEELDKYFKNHTSPDVDLGDISGINASVVNIQKEIDRLNEVAKNLNESLIDLQELGKYEQYIK

SEQ ID NO: 1739 - protein, 1211 aa, Artificial Sequence
  SARS-CoV-2/Congo/158/2020__EPI_ISL_417950 spike protein (1-1211)(K986P_V987P)
MFVFLVLLPLVSSQCVNLTTRTQLPPAYTNSFTRGVYYPDKVFRSSVLHSTQDLFLPFFSNVTWFHAIHVSGTNGTKRFDNPVLPFNDGVYFASTEKSNIIRGWIFGTTLDSKTQSLLIVNNATNVVIKVCEFQFCNDPFLGVYYHKNNKSWMESEFRVYSSANNCTFEYVSQPFLMDLEGKQGNFKNLREFVFKNIDGYFKIYSKHTPINLVRDLPQGFSALEPLVDLPIGINITRFQTLLALHRSYLTPGDSSSGWTAGAAAYYVGYLQPRTFLLKYNENGTITDAVDCALDPLSETKCTLKSFTVEKGIYQTSNFRVQPTESIVRFPNITNLCPFGEVFNATRFASVYAWNRKRISNCVADYSVLYNSASFSTFKCYGVSPTKLNDLCFTNVYADSFVIRGDEVRQIAPGQTGKIADYNYKLPDDFTGCVIAWNSNNLDSKVGGNYNYLYRLFRKSNLKPFERDISTEIYQAGSTPCNGVEGFNCYFPLQSYGFQPTNGVGYQPYRVVVLSFELLHAPATVCGPKKSTNLVKNKCVNFNFNGLTGTGVLTESNKKFLPFQQFGRDIADTTDAVRDPQTLEILDITPCSFGGVSVITPGTNTSNQVAVLYQDVNCTEVPVAIHADQLTPTWRVYSTGSNVFQTRAGCLIGAEHVNNSYECDIPIGAGICASYQTQTNSPRRARSVASQSIIAYTMSLGAENSVAYSNNSIAIPTNFTISVTTEILPVSMTKTSVDCTMYICGDSTECSNLLLQYGSFCTQLNRALTGIAVEQDKNTQEVFAQVKQIYKTPPIKDFGGFNFSQILPDPSKPSKRSFIEDLLFNKVTLADAGFIKQYGDCLGDIAARDLICAQKFNGLTVLPPLLTDEMIAQYTSALLAGTITSGWTFGAGAALQIPFAMQMAYRFNGIGVTQNVLYENQKLIANQFNSAIGKIQDSLSSTASALGKLQDVVNQNAQALNTLVKQLSSNFGAISSVLNDILSRLDPPEAEVQIDRLITGRLQSLQTYVTQQLIRAAEIRASANLAATKMSECVLGQSKRVDFCGKGYHLMSFPQSAPHGVVFLHVTYVPAQEKNFTTAPAICHDGKAHFPREGVFVSNGTHWFVTQRNFYEPQIITTDNTFLSGNCDVVIGIVNNTVYDPLQPELDSFKEELDKYFKNHTSPDVDLGDISGINASVVNIQKEIDRLNEVAKNLNESLIDLQELGKYEQYIK

SEQ ID NO: 1740 - protein, 1211 aa, Artificial Sequence
  SARS-CoV-2/USA/UT-00034/2020__EPI_ISL_417977 spike protein (1-1211)(K986P_V987P)
MFVFLVLLPLVSSQCVNLTTRTQLPPAYTNSFTRGVYYPDKVFRSSVLHSTQDLFLPFFSNVTWFHAIHVSGTNGTKRFDNPVLPFNDGVYFASTEKSNIIRGWIFGTTLDSKTQSLLIVNNATNVVIKVCEFQFCNDPFLGVYYYKNNKSWMESEFRVYSSANNCTFEYVSQPFLMDLEGKQGNFKNLREFVFKNIDGYFKIYSKHTPINLVRDLPQGFSALEPLVDLPIGINITRFQTLLALHRSYLTPGDSSSGWTAGAAAYYVGYLQPRTFLLKYNENGTITDAVDCALDPLSETKCTLKSFTVEKGIYQTSNFRVQPTESIVRFPNITNLCPFGEVFNATRFASVYAWNRKRISNCVADYSVLYNSASFSTFKCYGVSPTKLNDLCFTNVYADSFVIRGDEVRQIAPGQTGKIADYNYKLPDDFTGCVIAWNSNNLDSKVGGNYNYLYRLFRKSNLKPFERDISTEIYQAGSTPCNGVEGFNCYFPLQSYGFQPTNGVGYQPYRVVVLSFELLHAPATVCGPKKSTNLVKNKCVNFNFNGLTGTGVLTESNKKFLPFQQFGRDIADTTDAVRDPQTLEILDITPCSFGGVSVITPGTNTSNQVAVLYQGVNCTEVPVAIHADQLTPTWRVYSTGSNVFQTRAGCLIGAEHVNNSYECDIPIGAGICASYQTQTNSPRRARSVASQSIIAYTMSLGAENSVAYSNNSIAIPTNFTISVTTEILPVSMTKTSVDCTMYICGDSTECSNLLLQYGSFCTQLNRALTGIAVEQDKNTQEVFAQVKQIYKTPPIKDFGGFNFSQILPDPSKPSKRSFIEDLLFNKVTLADAGFIKQYGDCLGDIAARDLICAQKFNGLTVLPPLLTDEMIAQYTSALLAGTITSGWTFGAGAALQIPFAMQMAYRFNGIGVTQNVLYENQKLIANQFNSAIGKIQDSLSSTASALGKLQDVVNQNAQALNTLVKQLSSNFGAISSVLNDILSRLDPPEAEVQIDRLITGRLQSLQTYVTQQLIRAAEIRASANLAATKMSECVLGQSKRVDFCGKGYHLMSFPQSAPHGVVFLHVTYVPAQEKNFTTAPAICHDGKAHFPREGVFVSNGTHWFVTQRNFYEPQIITTDNTFVSGNCDVVIGIVNNTVYDPLQPELDSFKEELDKYFKNHTSPDVDLGDISGINASVVNIQKEIDRLNEVAKNLNESLIDLQELGKYEQYIK

SEQ ID NO: 1741 - protein, 1211 aa, Artificial Sequence
  SARS-CoV-2/USA/UT-00033/2020__EPI_ISL_417976 spike protein (1-1211)(K986P_V987P)
MFVFLVLLPLVSSQCVNLTTRTQLPPAYTNSFTRGVYYPDKVFRSSVLHSTQDLFLPFFSNVTWFHAIHVSGTNGTKRFDNPVLPFNDGVYFASTEKSNIIRGWIFGTTLDSKTQSLLIVNNATNVVIKVCEFQFCNDPFLGVYYHKNNKSWMESEFRVYSSANNCTFEYVSQPFLMDLEGKQGNFKNLREFVFKNIDGYFKIYSKHTPINLVRDLPQGFSALEPLVDLPIGINITRFQTLLALHRSYLTPGDSSSGLTAGAAAYYVGYLQPRTFLLKYNENGTITDAVDCALDPLSETKCTLKSFTVEKGIYQTSNFRVQPTESIVRFPNITNLCPFGEVFNATRFASVYAWNRKRISNCVADYSVLYNSASFSTFKCYGVSPTKLNDLCFTNVYADSFVIRGDEVRQIAPGQTGKIADYNYKLPDDFTGCVIAWNSNNLDSKVGGNYNYLYRLFRKSNLKPFERDISTEIYQAGSTPCNGVEGFNCYFPLQSYGFQPTNGVGYQPYRVVVLSFELLHAPATVCGPKKSTNLVKNKCVNFNFNGLTGTGVLTESNKKFLPFQQFGRDIADTTDAVRDPQTLEILDITPCSFGGVSVITPGTNTSNQVAVLYQGVNCTEVPVAIHADQLTPTWRVYSTGSNVFQTRAGCLIGAEHVNNSYECDIPIGAGICASYQTQTNSPRRARSVASQSIIAYTMSLGAENSVAYSNNSIAIPTNFTISVTTEILPVSMTKTSVDCTMYICGDSTECSNLLLQYGSFCTQLNRALTGIAVEQDKNTQEVFAQVKQIYKTPPIKDFGGFNFSQILPDPSKPSKRSFIEDLLFNKVTLADAGFIKQYGDCLGDIAARDLICAQKFNGLTVLPPLLTDEMIAQYTSALLAGTITSGWTFGAGAALQIPFAMQMAYRFNGIGVTQNVLYENQKLIANQFNSAIGKIQDSLSSTASALGKLQDVVNQNAQALNTLVKQLSSNFGAISSVLNDILSRLDPPEAEVQIDRLITGRLQSLQTYVTQQLIRAAEIRASANLAATKMSECVLGQSKRVDFCGKGYHLMSFPQSAPHGVVFLHVTYVPAQEKNFTTAPAICHDGKAHFPREGVFVSNGTHWFVTQRNFYEPQIITTDNTFVSGNCDVVIGIVNNTVYDPLQPELDSFKEELDKYFKNHTSPDVDLGDISGINASVVNIQKEIDRLNEVAKNLNESLIDLQELGKYEQYIK

SEQ ID NO: 1742 - protein, 1211 aa, Artificial Sequence
  SARS-CoV-2/USA/WI-13/2020__EPI_ISL_417516 spike protein (1-1211)(K986P_V987P)
MFVFLVLLPLVSSQCVNLTTRTQLPPAYTNSFTRGVYYPDKVFRSSVLHSTQDLFLPFFSNVTWFHAIHVSGTNGTKRFDNPVLPFNDGVYFASTEKSNIIRGWIFGTTLDSKTQSLLIVNNATNVVIKVCEFQFCNDPFLGVYYHKNNKSWMESEFRVYSSANNCTFEYVSQPFLMDLEGKQGNFKNLREFVFKNIDGYFKIYSKHTPINLVRDLPQGFSALEPLVDLPIGINITRFQTLLALHRSYLTPGDSSSGWTAGAAAYYVGYLQPRTFLLKYNENGTITDAVDCALDPLSETKCTLKSFTVEKGIYQTSNFRVLPTESIVRFPNITNLCPFGEVFNATRFASVYAWNRKRISNCVADYSVLYNSASFSTFKCYGVSPTKLNDLCFTNVYADSFVIRGDEVRQIAPGQTGKIADYNYKLPDDFTGCVIAWNSNNLDSKVGGNYNYLYRLFRKSNLKPFERDISTEIYQAGSTPCNGVEGFNCYFPLQSYGFQPTNGVGYQPYRVVVLSFELLHAPATVCGPKKSTNLVKNKCVNFNFNGLTGTGVLTESNKKFLPFQQFGRDIADTTDAVRDPQTLEILDITPCSFGGVSVITPGTNTSNQVAVLYQGVNCTEVPVAIHADQLTPTWRVYSTGSNVFQTRAGCLIGAEHVNNSYECDIPIGAGICASYQTQTNSPRRARSVASQSIIAYTMSLGAENSVAYSNNSIAIPTNFTISVTTEILPVSMTKTSVDCTMYICGDSTECSNLLLQYGSFCTQLNRALTGIAVEQDKNTQEVFAQVKQIYKTPPIKDFGGFNFSQILPDPSKPSKRSFIEDLLFNKVTLADAGFIKQYGDCLGDIAARDLICAQKFNGLTVLPPLLTDEMIAQYTSALLAGTITSGWTFGAGAALQIPFAMQMAYRFNGIGVTQNVLYENQKLIANQFNSAIGKIQDSLSSTASALGKLQDVVNQNAQALNTLVKQLSSNFGAISSVLNDILSRLDPPEAEVQIDRLITGRLQSLQTYVTQQLIRAAEIRASANLAATKMSECVLGQSKRVDFCGKGYHLMSFPQSAPHGVVFLHVTYVPAQEKNFTTAPAICHDGKAHFPREGVFVSNGTHWFVTQRNFYEPQIITTDNTFVSGNCDVVIGIVNNTVYDPLQPELDSFKEELDKYFKNHTSPDVDLGDISGINASVVNIQKEIDRLNEVAKNLNESLIDLQELGKYEQYIK

SEQ ID NO: 1743 - protein, 1210 aa, Artificial Sequence
  SARS-CoV-2/India/1-27/2020__EPI_ISL_413522 spike protein (1-1210)(K985P_V986P)
MFVFLVLLPLVSSQCVNLTTRTQLPPAYTNSFTRGVYYPDKVFRSSVLHSTQDLFLPFFSNVTWFHAIHVSGTNGTKRFDNPVLPFNDGVYFASTEKSNIIRGWIFGTTLDSKTQSLLIVNNATNVVIKVCEFQFCNDPFLGVYHKNNKSWMESEFRVYSSANNCTFEYVSQPFLMDLEGKQGNFKNLREFVFKNIDGYFKIYSKHTPINLVRDLPQGFSALEPLVDLPIGINITRFQTLLALHRSYLTPGDSSSGWTAGAAAYYVGYLQPRTFLLKYNENGTITDAVDCALDPLSETKCTLKSFTVEKGIYQTSNFRVQPTESIVRFPNITNLCPFGEVFNATRFASVYAWNRKRISNCVADYSVLYNSASFSTFKCYGVSPTKLNDLCFTNVYADSFVIRGDEVIQIAPGQTGKIADYNYKLPDDFTGCVIAWNSNNLDSKVGGNYNYLYRLFRKSNLKPFERDISTEIYQAGSTPCNGVEGFNCYFPLQSYGFQPTNGVGYQPYRVVVLSFELLHAPATVCGPKKSTNLVKNKCVNFNFNGLTGTGVLTESNKKFLPFQQFGRDIADTTDAVRDPQTLEILDITPCSFGGVSVITPGTNTSNQVAVLYQDVNCTEVPVAIHADQLTPTWRVYSTGSNVFQTRAGCLIGAEHVNNSYECDIPIGAGICASYQTQTNSPRRARSVASQSIIAYTMSLGAENSVAYSNNSIAIPTNFTISVTTEILPVSMTKTSVDCTMYICGDSTECSNLLLQYGSFCTQLNRALTGIAVEQDKNTQEVFAQVKQIYKTPPIKDFGGFNFSQILPDPSKPSKRSFIEDLLFNKVTLADAGFIKQYGDCLGDIAARDLICAQKFNGLTVLPPLLTDEMIAQYTSALLAGTITSGWTFGAGAALQIPFAMQMAYRFNGIGVTQNVLYENQKLIANQFNSAIGKIQDSLSSTASALGKLQDVVNQNAQALNTLVKQLSSNFGAISSVLNDILSRLDPPEAEVQIDRLITGRLQSLQTYVTQQLIRAAEIRASANLAATKMSECVLGQSKRVDFCGKGYHLMSFPQSAPHGVVFLHVTYVPAQEKNFTTAPAICHDGKAHFPREGVFVSNGTHWFVTQRNFYEPQIITTDNTFVSGNCDVVIGIVNNTVYDPLQPELDSFKEELDKYFKNHTSPDVDLGDISGINASVVNIQKEIDRLNEVAKNLNESLIDLQELGKYEQYIK

SEQ ID NO: 1744 - protein, 1205 aa, Artificial Sequence
  SARS-CoV-2/pangolin/Guangxi/P4L/2017__EPI_ISL_410538 spike protein (1-1205)(K980P_V981P)
MFVFLFVLPLVSSQCVNLTTRTGIPPGYTNSSTRGVYYPDKVFRSSILHLTQDLFLPFFSNVTWFNTINYQGGFKKFDNPVLPFNDGVYFASTEKSNIIRGWIFGTTLDARTQSLLIVNNATNVVIKVCEFQFCTDPFLGVYYHNNNKTWVENEFRVYSSANNCTFEYISQPFLMDLEGKQGNFKNLREFVFKNVDGYFKIYSKHTPIDLVRDLPRGFAALEPLVDLPIGINITRFQTLLALHRSYLTPGNLESGWTTGAAAYYVGYLQQRTFLLSYNQNGTITDAVDCSLDPLSETKCTLKSLTVEKGIYQTSNFRVQPTISIVRFPNITNLCPFGEVFNASKFASVYAWNRKRISNCVADYSVLYNSTSFSTFKCYGVSPTKLNDLCFTNVYADSFVVKGDEVRQIAPGQTGVIADYNYKLPDDFTGCVIAWNSVKQDALTGGNYGYLYRLFRKSKLKPFERDISTEIYQAGSTPCNGQVGLNCYYPLERYGFHPTTGVNYQPFRVVVLSFELLNGPATVCGPKLSTTLVKDKCVNFNFNGLTGTGVLTTSKKQFLPFQQFGRDISDTTDAVRDPQTLEILDITPCSFGGVSVITPGTNTSNQVAVLYQDVNCTEVPMAIHAEQLTPAWRVYSAGANVFQTRAGCLVGAEHVNNSYECDIPVGAGICASYHSMSSLRSVNQRSIIAYTMSLGAENSVAYSNNSIAIPTNFTISVTTEILPVSMTKTSVDCTMYICGDSIECSNLLLQYGSFCTQLNRALTGIAVEQDKNTQEVFAQVKQIYKTPPIKDFGGFNFSQILPDPSKPSKRSFIEDLLFNKVTLADAGFIKQYGDCLGDIAARDLICAQKFNGLTVLPPLLTDEMIAQYTSALLAGTITSGWTFGAGAALQIPFAMQMAYRFNGIGVTQNVLYENQKLIANQFNSAIGKIQDSLSSTASALGKLQDVVNQNAQALNTLVKQLSSNFGAISSVLNDILSRLDPPEAEVQIDRLITGRLQSLQTYVTQQLIRAAEIRASANLAATKMSECVLGQSKRVDFCGKGYHLMSFPQSAPHGVVFLHVTYVPAQEKNFTTAPAICHEGKAHFPREGVFVSNGTHWFITQRNFYEPQIITTDNTFVSGSCDVVIGIVNNTVYDPLQPELDSFKEELDKYFKNHTSPDVDLGDISGINASVVNIQKEIDRLNEVAKNLNESPIDLQELGKYEQYIK

SEQ ID NO: 1745 - protein, 1205 aa, Artificial Sequence
  SARS-CoV-2/pangolin/Guangxi/P5L/2017__EPI_ISL_410540 spike protein (1-1205)(K980P_V981P)
MFVFLFVLPLVSSQCVNLTTRTGIPPGYTNSSTRGVYYPDKVFRSSILHLTQDLFLPFFSNVTWFNTINYQGGFKKFDNPVLPFNDGVYFASTEKSNIIRGWIFGTTLDARTQSLLIVNNATNVVIKVCEFQFCTDPFLGVYYHNNNKTWVENEFRVYSSANNCTFEYISQPFLMDLEGKQGNFKNLREFVFKNVDGYFKIYSKHTPIDLVRDLPRGFAALEPLVDLPIGINITRFQTLLALHRSYLTPGKLESGWTTGAAAYYVGYLQQRTFLLSYNQNGTITDAVDCSLDPLSETKCTLKSLTVEKGIYQTSNFRVQPTISIVRFPNITNLCPFGEVFNASKFASVYAWNRKRISNCVADYSVLYNSTSFSTFKCYGVSPTKLNDLCFTNVYADSFVVKGDEVRQIAPGQTGVIADYNYKLPDDFTGCVIAWNSVKQDALTGGNYGYLYRLFRKSKLKPFERDISTEIYQAGSTPCNGQVGLNCYYPLERYGFHPTTGVNYQPFRVVVLSFELLNGPATVCGPKLSTTLVKDKCVNFNFNGLTGTGVLTTSKKQFLPFQQFGRDISDTTDAVRDPQTLEILDITPCSFGGVSVITPGTNTSNQVAVLYQDVNCTEVPMAIHAEQLTPAWRVYSAGANVFQTRAGCLVGAEHVNNSYECDIPVGAGICASYHSMSSFRSVNQRSIIAYTMSLGAENSVAYSNNSIAIPTNFTISVTTEILPVSMTKTSVDCTMYICGDSIECSNLLLQYGSFCTQLNRALTGIAVEQDKNTQEVFAQVKQIYKTPPIKDFGGFNFSQILPDPSKPSKRSFIEDLLFNKVTLADAGFIKQYGDCLGDIAARDLICAQKFNGLTVLPPLLTDEMIAQYTSALLAGTITSGWTFGAGAALQIPFAMQMAYRFNGIGVTQNVLYENQKLIANQFNSAIGKIQDSLSSTASALGKLQDVVNQNAQALNTLVKQLSSNFGAISSVLNDILSRLDPPEAEVQIDRLITGRLQSLQTYVTQQLIRAAEIRASANLAATKMSECVLGQSKRVDFCGKGYHLMSFPQSAPHGVVFLHVTYVPAQEKNFTTAPAICHEGKAHFPREGVFVSNGTHWFITQRNFYEPQIITTDNTFVSGSCDVVIGIVNNTVYDPLQPELDSFKEELDKYFKNHTSPDVDLGDISGINASVVNIQKEIDRLNEVAKNLNESLIDLQELGKYEQYIK

SEQ ID NO: 1746 - protein, 1205 aa, Artificial Sequence
  SARS-CoV-2/pangolin/Guangxi/P5E/2017__EPI_ISL_410541 spike protein (1-1205)(K980P_V981P)
MFVFLFVLPLVSSQCVNLTTRTGIPPGYTNSSTRGVYYPDKVFRSSILHLTQDLFLPFFSNVTWFNTITYQGGSKKFDNPVLPFNDGVYFASTEKSNIIRGWIFGTTLDARTQSLLIVNNATNVVIKVCEFQFCTDPFLGVYYHNNNKTWVENEFRVYSSANNCTFEYISQPFLMDLEGKQGNFKNLREFVFKNVDGYFKIYSKHTPIDLVRDLPRGFAALEPLVDLPIGINITRFQTLLALHRSYLTPGKLESGWTTGAAAYYVGYLQQRTFLLSYNQNGTITDAVDCSLDPLSETKCTLKSLTVEKGIYQTSNFRVQPTISIVRFPNITNLCPFGEVFNASKFASVYAWNRKRISNCVADYSVLYNSTSFSTFKCYGVSPTKLNDLCFTNVYADSFVVKGDEVRQIAPGQTGVIADYNYKLPDDFTGCVIAWNSVKQDALTGDNYGYLYRLFRKSKLKPFERDISTEIYQAGSTPCNGQVGLNCYYPLERYGFHPTTGVNYQPFRVVVLSFELLNGPATVCGPKLSTTLVKDKCVNFNFNGLTGTGVLTTSKKQFLPFQQFGRDISDTTDAVRDPQTLEILDITPCSFGGVSVITPGTNTSNQVAVLYQDVNCTEVPMAIHAEQLTPAWRVYSAGANVFQTRAGCLVGAEHVNNSYECDIPVGAGICASYHSMSSFRSVNQRSIIAYTMSLGAENSVAYSNNSIAIPTNFTISVTTEILPVSMTKTSVDCTMYICGDSIECSNLLLQYGSFCTQLNRALTGIAVEQDKNTQEVFAQVKQIYKTPPIKDFGGFNFSQILPDPSKPSKRSFIEDLLFNKVTLADAGFIKQYGDCLGDIAARDLICAQKFNGLTVLPPLLTDEMIAQYTSALLAGTITSGWTFGAGAALQIPFAMQMAYRFNGIGVTQNVLYENQKLIANQFNSAIGKIQDSLSSTASALGKLQDVVNQNAQALNTLVKQLSSNFGAISSVLNDILSRLDPPEAEVQIDRLITGRLQSLQTYVTQQLIRAAEIRASANLAATKMSECVLGQSKRVDFCGKGYHLMSFPQSAPHGVVFLHVTYVPAQEKNFTTAPAICHEGKAHFPREGVFVSNGTHWFITQRNFYEPQIITTDNTFVSGSCDVVIGIVNNTVYDPLQPELDSFKEELDKYFKNHTSPDVDLGDISGINASVVNIQKEIDRLNEVAKNLNESLIDLQELGKYEQYIK

SEQ ID NO: 1747 - protein, 1203 aa, Artificial Sequence
  SARS-CoV-2/pangolin/Guangxi/P1E/2017__EPI_ISL_410539 spike protein (1-1203)(K978P_V979P)
MFVFLFVLPLVSSQCVNLTTRTGIQPGYTNSSTRGVYYPDKVFRSSILHLTQDLFLPFFSNVTWFNTINYQGGFKKFDNPVLPFNDGVYFASTEKSNIIRGWIFGTTLDARTQSLLIVNNATNVVIKVCEFQFCTDPFLGVYYHNNNKTWVENEFRVYSSANNCTFEYISQPFLMDLEGKQGNFKNLREFVFKNVDGYFKIYSKHTPIDLVRDLPRGFAALEPLVDLPIGINITRFQTLLALHRSYLTPGKLESGWTTGAAAYYVGYLQQRTFLLSYNQNGTITDAVDCSLDPLSETKCTLKSLTVEKGIYQTSNFRVQPTISIVRFPNITNLCPFGEVFNASKFASVYAWNRKRISNCVADYSVLYNSTSFSTFKCYGVSPTKLNDLCFTNVYADSFVVKGDEVRQIAPGQTGVIADYNYKLPDDFTGCVIAWNSVKQDALTGGNYLYRLFRKSKLKPFERDISTEIYQAGSTPCNGQVGLNCYYPLERYGFHPTTGVNYQPFRVVVLSFELLNGPATVCGPKLSTTLVKDKCVNFNFNGLTGTGVLTTSKKQFLPFQQFGRDISDTTDAVRDPQTLEILDITPCSFGGVSVITPGTNTSNQVAVLYQDVNCTEVPMAIHAEQLTPAWRVYSAGANVFQTRAGCLVGAEHVNNSYECDIPVGAGICASYHSMSSLRSVNQRSIIAYTMSLGAENSVAYSNNSIAIPTNFTISVTTEILPVSMTKTSVDCTMYICGDSIECSNLLLQYGSFCTQLNRALTGIAVEQDKNTQEVFAQVKQIYKTPPIKDFGGFNFSQILPDPSKPSKRSFIEDLLFNKVTLADAGFIKQYGDCLGDIAARDLICAQKFNGLTVLPPLLTDEMIAQYTSALLAGTITSGWTFGAGAALQIPFAMQMAYRFNGIGVTQNVLYENQKLIANQFNSAIGKIQDSLSSTASALGKLQDVVNQNAQALNTLVKQLSSNFGAISSVLNDILSRLDPPEAEVQIDRLITGRLQSLQTYVTQQLIRAAEIRASANLAATKMSECVLGQSKRVDFCGKGYHLMSFPQSAPHGVVFLHVTYVPAQEKNFTTAPAICHEGKAHFPREGVFVSNGTHWFITQRNFYEPQIITTDNTFVSGSCDVVIGIVNNTVYDPLQPELDSFKEELDKYFKNHTSPDVDLGDISGINASVVNIQKEIDRLNEVAKNLNESLIDLQELGKYEQYIK

SEQ ID NO: 1748 - protein, 1211 aa, Artificial Sequence
  SARS-CoV-2/Wuhan/WIV05/2019__EPI_ISL_402128 spike protein (1-1211)(K986P_V987P_T887W_A1020W)
MFVFLVLLPLVSSQCVNLTTRTQLPPAYTNSFTRGVYYPDKVFRSSVLHSTQDLFLPFFSNVTWFHAIHVSGTNGTKRFDNPVLPFNDGVYFASTEKSNIIRGWIFGTTLDSKTQSLLIVNNATNVVIKVCEFQFCNDPFLGVYYHKNNKSWMESEFRVYSSANNCTFEYVSQPFLMDLEGKQGNFKNLREFVFKNIDGYFKIYSKHTPINLVRDLPQGFSALEPLVDLPIGINITRFQTLLALHRSYLTPGDSSSGWTAGAAAYYVGYLQPRTFLLKYNENGTITDAVDCALDPLSETKCTLKSFTVEKGIYQTSNFRVQPTESIVRFPNITNLCPFGEVFNATRFASVYAWNRKRISNCVADYSVLYNSASFSTFKCYGVSPTKLNDLCFTNVYADSFVIRGDEVRQIAPGQTGKIADYNYKLPDDFTGCVIAWNSNNLDSKVGGNYNYLYRLFRKSNLKPFERDISTEIYQAGSTPCNGVEGFNCYFPLQSYGFQPTNGVGYQPYRVVVLSFELLHAPATVCGPKKSTNLVKNKCVNFNFNGLTGTGVLTESNKKFLPFQQFGRDIADTTDAVRDPQTLEILDITPCSFGGVSVITPGTNTSNQVAVLYQDVNCTEVPVAIHADQLTPTWRVYSTGSNVFQTRAGCLIGAEHVNNSYECDIPIGAGICASYQTQTNSPRRARSVASQSIIAYTMSLGAENSVAYSNNSIAIPTNFTISVTTEILPVSMTKTSVDCTMYICGDSTECSNLLLQYGSFCTQLNRALTGIAVEQDKNTQEVFAQVKQIYKTPPIKDFGGFNFSQILPDPSKPSKRSFIEDLLFNKVTLADAGFIKQYGDCLGDIAARDLICAQKFNGLTVLPPLLTDEMIAQYTSALLAGTITSGWWFGAGAALQIPFAMQMAYRFNGIGVTQNVLYENQKLIANQFNSAIGKIQDSLSSTASALGKLQDVVNQNAQALNTLVKQLSSNFGAISSVLNDILSRLDPPEAEVQIDRLITGRLQSLQTYVTQQLIRAAEIRWSANLAATKMSECVLGQSKRVDFCGKGYHLMSFPQSAPHGVVFLHVTYVPAQEKNFTTAPAICHDGKAHFPREGVFVSNGTHWFVTQRNFYEPQIITTDNTFVSGNCDVVIGIVNNTVYDPLQPELDSFKEELDKYFKNHTSPDVDLGDISGINASVVNIQKEIDRLNEVAKNLNESLIDLQELGKYEQYIK

SEQ ID NO: 1749 - protein, 1207 aa, Artificial Sequence
  SARS-CoV-2/bat/Yunnan/RaTG13/2013__EPI_ISL_402131 spike protein (1-1207)(K982P_V983P_T883W_A1016W)
MFVFLVLLPLVSSQCVNLTTRTQLPPAYTNSSTRGVYYPDKVFRSSVLHLTQDLFLPFFSNVTWFHAIHVSGTNGIKRFDNPVLPFNDGVYFASTEKSNIIRGWIFGTTLDSKTQSLLIVNNATNVVIKVCEFQFCNDPFLGVYYHKNNKSWMESEFRVYSSANNCTFEYVSQPFLMDLEGKQGNFKNLREFVFKNIDGYFKIYSKHTPINLVRDLPPGFSALEPLVDLPIGINITRFQTLLALHRSYLTPGDSSSGWTAGAAAYYVGYLQPRTFLLKYNENGTITDAVDCALDPLSETKCTLKSFTVEKGIYQTSNFRVQPTDSIVRFPNITNLCPFGEVFNATTFASVYAWNRKRISNCVADYSVLYNSTSFSTFKCYGVSPTKLNDLCFTNVYADSFVITGDEVRQIAPGQTGKIADYNYKLPDDFTGCVIAWNSKHIDAKEGGNFNYLYRLFRKANLKPFERDISTEIYQAGSKPCNGQTGLNCYYPLYRYGFYPTDGVGHQPYRVVVLSFELLNAPATVCGPKKSTNLVKNKCVNFNFNGLTGTGVLTESNKKFLPFQQFGRDIADTTDAVRDPQTLEILDITPCSFGGVSVITPGTNASNQVAVLYQDVNCTEVPVAIHADQLTPTWRVYSTGSNVFQTRAGCLIGAEHVNNSYECDIPIGAGICASYQTQTNSRSVASQSIIAYTMSLGAENSVAYSNNSIAIPTNFTISVTTEILPVSMTKTSVDCTMYICGDSTECSNLLLQYGSFCTQLNRALTGIAVEQDKNTQEVFAQVKQIYKTPPIKDFGGFNFSQILPDPSKPSKRSFIEDLLFNKVTLADAGFIKQYGDCLGDIAARDLICAQKFNGLTVLPPLLTDEMIAQYTSALLAGTITSGWWFGAGAALQIPFAMQMAYRFNGIGVTQNVLYENQKLIANQFNSAIGKIQDSLSSTASALGKLQDVVNQNAQALNTLVKQLSSNFGAISSVLNDILSRLDPPEAEVQIDRLITGRLQSLQTYVTQQLIRAAEIRWSANLAATKMSECVLGQSKRVDFCGKGYHLMSFPQSAPHGVVFLHVTYVPAQEKNFTTAPAICHDGKAHFPREGVFVSNGTHWFVTQRNFYEPQIITTDNTFVSGSCDVVIGIVNNTVYDPLQPELDSFKEELDKYFKNHTSPDVDLGDISGINASVVNIQKEIDRLNEVAKNLNESLIDLQELGKYEQYIK

SEQ ID NO: 1750 - protein, 1211 aa, Artificial Sequence
  SARS-CoV-2/Wuhan/HBCDC-HB-01/2019__EPI_ISL_402132 spike protein (1-1211)(K986P_V987P_T887W_A1020W)
MFVFLVLLPLVSSQCVNLTTRTQLPPAYTNSITRGVYYPDKVFRSSVLHSTQDLFLPFFSNVTWFHAIHVSGTNGTKRFDNPVLPFNDGVYFASTEKSNIIRGWIFGTTLDSKTQSLLIVNNATNVVIKVCEFQFCNDPFLGVYYHKNNKSWMESEFRVYSSANNCTFEYVSQPFLMDLEGKQGNFKNLREFVFKNIDGYFKIYSKHTPINLVRDLPQGFSALEPLVDLPIGINITRFQTLLALHRSYLTPGDSSSGWTAGAAAYYVGYLQPRTFLLKYNENGTITDAVDCALDPLSETKCTLKSFTVEKGIYQTSNFRVQPTESIVRFPNITNLCPFGEVFNATRFASVYAWNRKRISNCVADYSVLYNSASFSTFKCYGVSPTKLNDLCFTNVYADSFVIRGDEVRQIAPGQTGKIADYNYKLPDDFTGCVIAWNSNNLDSKVGGNYNYLYRLFRKSNLKPFERDISTEIYQAGSTPCNGVEGFNCYFPLQSYGFQPTNGVGYQPYRVVVLSFELLHAPATVCGPKKSTNLVKNKCVNFNFNGLTGTGVLTESNKKFLPFQQFGRDIADTTDAVRDPQTLEILDITPCSFGGVSVITPGTNTSNQVAVLYQDVNCTEVPVAIHADQLTPTWRVYSTGSNVFQTRAGCLIGAEHVNNSYECDIPIGAGICASYQTQTNSPRRARSVASQSIIAYTMSLGAENSVAYSNNSIAIPTNFTISVTTEILPVSMTKTSVDCTMYICGDSTECSNLLLQYGSFCTQLNRALTGIAVEQDKNTQEVFAQVKQIYKTPPIKDFGGFNFSQILPDPSKPSKRSFIEDLLFNKVTLADAGFIKQYGDCLGDIAARDLICAQKFNGLTVLPPLLTDEMIAQYTSALLAGTITSGWWFGAGAALQIPFAMQMAYRFNGIGVTQNVLYENQKLIANQFNSAIGKIQDSLSSTASALGKLQDVVNQNAQALNTLVKQLSSNFGAISSVLNDILSRLDPPEAEVQIDRLITGRLQSLQTYVTQQLIRAAEIRWSANLAATKMSECVLGQSKRVDFCGKGYHLMSFPQSAPHGVVFLHVTYVPAQEKNFTTAPAICHDGKAHFPREGVFVSNGTHWFVTQRNFYEPQIITTDNTFVSGNCDVVIGIVNNTVYDPLQPELDSFKEELDKYFKNHTSPDVDLGDISGINASVVNIQKEIDRLNEVAKNLNESLIDLQELGKYEQYIK

SEQ ID NO: 1751 - protein, 1211 aa, Artificial Sequence
  SARS-CoV-2/Guangdong/20SF028/2020__EPI_ISL_403936 spike protein (1-1211)(K986P_V987P_T887W_A1020W)
MFVFLVLLPLVSSQCVNLTTRTQLPPAYTNSFTRGVYYPDKVFRSSVLYSTQDLFLPFFSNVTWFHAIHVSGTNGTKRFDNPVLPFNDGVYFASTEKSNIIRGWIFGTTLDSKTQSLLIVNNATNVVIKVCEFQFCNDPFLGVYYHKNNKSWMESEFRVYSSANNCTFEYVSQPFLMDLEGKQGNFKNLREFVFKNIDGYFKIYSKHTPINLVRDLPQGFSALEPLVDLPIGINITRFQTLLALHRSYLTPGDSSSGWTAGAAAYYVGYLQPRTFLLKYNENGTITDAVDCALDPLSETKCTLKSFTVEKGIYQTSNFRVQPTESIVRFPNITNLCPFGEVFNATRFASVYAWNRKRISNCVADYSVLYNSASFSTFKCYGVSPTKLNDLCFTNVYADSFVIRGDEVRQIAPGQTGKIADYNYKLPDDFTGCVIAWNSNNLDSKVGGNYNYLYRLFRKSNLKPFERDISTEIYQAGSTPCNGVEGFNCYFPLQSYGFQPTNGVGYQPYRVVVLSFELLHAPATVCGPKKSTNLVKNKCVNFNFNGLTGTGVLTESNKKFLPFQQFGRDIADTTDAVRDPQTLEILDITPCSFGGVSVITPGTNTSNQVAVLYQDVNCTEVPVAIHADQLTPTWRVYSTGSNVFQTRAGCLIGAEHVNNSYECDIPIGAGICASYQTQTNSPRRARSVASQSIIAYTMSLGAENSVAYSNNSIAIPTNFTISVTTEILPVSMTKTSVDCTMYICGDSTECSNLLLQYGSFCTQLNRALTGIAVEQDKNTQEVFAQVKQIYKTPPIKDFGGFNFSQILPDPSKPSKRSFIEDLLFNKVTLADAGFIKQYGDCLGDIAARDLICAQKFNGLTVLPPLLTDEMIAQYTSALLAGTITSGWWFGAGAALQIPFAMQMAYRFNGIGVTQNVLYENQKLIANQFNSAIGKIQDSLSSTASALGKLQDVVNQNAQALNTLVKQLSSNFGAISSVLNDILSRLDPPEAEVQIDRLITGRLQSLQTYVTQQLIRAAEIRWSANLAATKMSECVLGQSKRVDFCGKGYHLMSFPQSAPHGVVFLHVTYVPAQEKNFTTAPAICHDGKAHFPREGVFVSNGTHWFVTQRNFYEPQIITTDNTFVSGNCDVVIGIVNNTVYDPLQPELDSFKEELDKYFKNHTSPDVDLGDISGINASVVNIQKEIDRLNEVAKNLNESLIDLQELGKYEQYIK

SEQ ID NO: 1752 - protein, 1211 aa, Artificial Sequence
  SARS-CoV-2/Shenzhen/SZTH-001/2020__EPI_ISL_406592 spike protein (1-1211)(K986P_V987P_T887W_A1020W)
MFVFLVLLPLVSSQCVNLTTRTQLPPAYTNSFTRGVYYPDKVFRSSVLHSTQDLFLPFFSNVTWFHAIHVSGTNGTKRFDNPVLPFNDGVYFASTEKSNIIRGWIFGTTLDSKTQSLLIVNNATNVVIKVCEFQFCNDPFLGVYYHKNNKSWMESEFRVYSSANNCTFEYVSQPFLMDLEGKQGNFKNLREFVFKNIDGYFKIYSKHTPINLVRDLPQGFSALEPLVDLPIGINITRFQTLLALHRSYLTPGDSSSGWTAGAAAYYVGYLQPRTFLLKYNENGTITDAVDCALDPLSETKCTLKSFTVEKGIYQTSNFRVQPTESIVRFPNITNLCPFGEVFNATRFASVYAWNRKRISNCVADYSVLYNSASFSTFKCYGVSPTKLNDLCFTNVYADSFVIRGDEVRQIAPGQTGKIADYNYKLPDDFTGCVIAWNSNNLDSKVGGNYNYLYRLFRKSNLKPFERDISTEIYQAGSTPCNGVEGFNCYFPLQSYGFQPTNGVGYQPYRVVVLSFELLHAPATVCGPKKSTNLVKNKCVNFNFNGLTGTGVLTESNKKFLPFQQFGRDIADTTDAVRDPQTLEILDITPCSFGGVSVITPGTNTSNQVAVLYQDVNCTEVPVAIHADQLTPTWRVYSTGSNVFQTRAGCLIGAEHVNNSYECDIPIGAGICASYQTQTNSPRRARSVASQSIIAYTMSLGAENSVAYSNNSIAIPTNFTISVTTEILPVSMTKTSVDCTMYICGDSTECSNLLLQYGSFCTQLNRALTGIAVEQDKNTQEVFAQVKQIYKTPPIKDFGGFNFSQILPDPSKPSKRSFIEDLLFNKVTLADAGFIKQYGDCLGDIAARDLICAQKFNGLTVLPPLLTDEMIAQYTSALLAGTITSGWWFGAGAALQIPFAMQMAYRFNGIGVTQNVLYENQKLIANQFNSAIGKIQDSLSSTASALGKLQDVVNQNAQALNTLVKQLSSNFGAISSVLNDILSRLDPPEAEVQIDRLITGRLQSLQTYVTQQLIRAAEIRWSANLAATKMSECVLGQSKRVDFCGKGYHLMSFPQSAPHGVVFLHVTYVPAQEKNFTTAPAICHDGKAHFPREGVFVSNGTHWFVTQRNFYEPQIITTDNTFVSGNCDVLIGIVNNTVYDPLQPELDSFKEELDKYFKNHTSPDVDLGDISGINASVVNIQKEIDRLNEVAKNLNESLIDLQELGKYEQYIK

SEQ ID NO: 1753 - protein, 1211 aa, Artificial Sequence
  SARS-CoV-2/Shenzhen/SZTH-004/2020__EPI_ISL_406595 spike protein (1-1211)(K986P_V987P_T887W_A1020W)
MFVFLVLLPLVSSQCVNLTTRTQLPPAYTNSFTRGVYYPDKVFRSSVLHSTQDLFLPFFSNVTWFHAIHVSGTNGTKRFDNPVLPFNDGVYFASTEKSNIIRGWIFGTTLDSKTQSLLIVNNATNVVIKVCEFQFCNDPFLGVYYHKNNKSWMESEFRVYSSANNCTFEYVSQPFLMDLEGKQGNFKNLREFVFKNIDGYFKIYSKHTPINLVRDLPQGFSALEPLVDLPIGINITRFQTLLALHRSYLTPGDSSSGWTAGAAAYYVGYLQPRTFLLKYNENGTITDAVDCALDPLSETKCTLKSFTVEKGIYQTSNFRVQPTESIVRFPNITNLCPFGEVFNATRFASVYAWDRKRISNCVAYYSVLYNSASFSTFKCYGVSPTKLNDLCFTNVYADSFVIRGDEVRQIAPGQTGKIADYNYKLPDDFTGCVIAWNSNNLDSKVGGNYNYLYRLFRKSNLKPFERDISTEIYQAGSTPCNGVEGFNCYFPLQSYGFQPTNGVGYQPYRVVVLSFELLHAPATVCGPKKSTNLVKNKCVNFNFNGLTGTGVLTESNKKFLPFQQFGRDIADTTDAVRDPQTLEILDITPCSFGGVSVITPGTNTSNQVAVLYQDVNCTEVPVAIHADQLTPTWRVYSTGSNVFQTRAGCLIGAEHVNNSYECDIPIGAGICASYQTQTNSPRRARSVASQSIIAYTMSLGAENSVAYSNNSIAIPTNFTISVTTEILPVSMTKTSVDCTMYICGDSTECSNLLLQYGSFCTQLNRALTGIAVEQDKNTQEVFAQVKQIYKTPPIKDFGGFNFSQILPDPSKPSKRSFIEDLLFNKVTLADAGFIKQYGDCLGDIAARDLICAQKFNGLTVLPPLLTDEMIAQYTSALLAGTITSGWWFGAGAALQIPFAMQMAYRFNGIGVTQNVLYENQKLIANQFNSAIGKIQDSLSSTASALGKLQDVVNQNAQALNTLVKQLSSNFGAISSVLNDILSRLDPPEAEVQIDRLITGRLQSLQTYVTQQLIRAAEIRWSANLAATKMSECVLGQSKRVDFCGKGYHLMSFPQSAPHGVVFLHVTYVPAQEKNFTTAPAICHDGKAHFPREGVFVSNGTHWFVTQRNFYEPQIITTDNTFVSGNCDVVIGIVNNTVYDPLQPELDSFKEELDKYFKNHTSPDVDLGDISGINASVVNIQKEIDRLNEVAKNLNESLIDLQELGKYEQYIK

SEQ ID NO: 1754 - protein, 1211 aa, Artificial Sequence
  SARS-CoV-2/France/IDF0372/2020__EPI_ISL_406596 spike protein (1-1211)(K986P_V987P_T887W_A1020W)
MFVFLVLLPLVSSQCVNLTTRTQLPPAYTNSFTRGVYYPDKVFRSSVLHSTQDLFLPFFSNVTWFHAIHVSGTNGTKRFDNPVLPFNDGVYFASTEKSNIIRGWIFGTTLDSKTQSLLIVNNATNVVIKVCEFQFCNDPFLGVYYHKNNKSWMESEFRVYSSANNCTFEYVSQPFLMDLEGKQGNFKNLREFVFKNIDGYFKIYSKHTPINLVRDLPQGFSALEPLVDLPIGINITRFQTLLALHRSYLTPGDSSSGWTAGAAAYYVGYLQPRTFLLKYNENGTITDAVDCALDPLSETKCTLKSFTVEKGIYQTSNFRVQPTESIVRFPNITNLCPFGEVFNATRFASVYAWNRKRISNCVADYSFLYNSASFSTFKCYGVSPTKLNDLCFTNVYADSFVIRGDEVRQIAPGQTGKIADYNYKLPDDFTGCVIAWNSNNLDSKVGGNYNYLYRLFRKSNLKPFERDISTEIYQAGSTPCNGVEGFNCYFPLQSYGFQPTNGVGYQPYRVVVLSFELLHAPATVCGPKKSTNLVKNKCVNFNFNGLTGTGVLTESNKKFLPFQQFGRDIADTTDAVRDPQTLEILDITPCSFGGVSVITPGTNTSNQVAVLYQDVNCTEVPVAIHADQLTPTWRVYSTGSNVFQTRAGCLIGAEHVNNSYECDIPIGAGICASYQTQTNSPRRARSVASQSIIAYTMSLGAENSVAYSNNSIAIPTNFTISVTTEILPVSMTKTSVDCTMYICGDSTECSNLLLQYGSFCTQLNRALTGIAVEQDKNTQEVFAQVKQIYKTPPIKDFGGFNFSQILPDPSKPSKRSFIEDLLFNKVTLADAGFIKQYGDCLGDIAARDLICAQKFNGLTVLPPLLTDEMIAQYTSALLAGTITSGWWFGAGAALQIPFAMQMAYRFNGIGVTQNVLYENQKLIANQFNSAIGKIQDSLSSTASALGKLQDVVNQNAQALNTLVKQLSSNFGAISSVLNDILSRLDPPEAEVQIDRLITGRLQSLQTYVTQQLIRAAEIRWSANLAATKMSECVLGQSKRVDFCGKGYHLMSFPQSAPHGVVFLHVTYVPAQEKNFTTAPAICHDGKAHFPREGVFVSNGTHWFVTQRNFYEPQIITTDNTFVSGNCDVVIGIVNNTVYDPLQPELDSFKEELDKYFKNHTSPDVDLGDISGINASVVNIQKEIDRLNEVAKNLNESLIDLQELGKYEQYIK

SEQ ID NO: 1755 - protein, 1211 aa, Artificial Sequence
  SARS-CoV-2/Australia/VIC01/2020__EPI_ISL_406844 spike protein (1-1211)(K986P_V987P_T887W_A1020W)
MFVFLVLLPLVSSQCVNLTTRTQLPPAYTNSFTRGVYYPDKVFRSSVLHSTQDLFLPFFSNVTWFHAIHVSGTNGTKRFDNPVLPFNDGVYFASTEKSNIIRGWIFGTTLDSKTQSLLIVNNATNVVIKVCEFQFCNDPFLGVYYHKNNKSWMESEFRVYSSANNCTFEYVSQPFLMDLEGKQGNFKNLREFVFKNIDGYFKIYSKHTPINLVRDLPQGFSALEPLVDLPIGINITRFQTLLALHRRYLTPGDSSSGWTAGAAAYYVGYLQPRTFLLKYNENGTITDAVDCALDPLSETKCTLKSFTVEKGIYQTSNFRVQPTESIVRFPNITNLCPFGEVFNATRFASVYAWNRKRISNCVADYSVLYNSASFSTFKCYGVSPTKLNDLCFTNVYADSFVIRGDEVRQIAPGQTGKIADYNYKLPDDFTGCVIAWNSNNLDSKVGGNYNYLYRLFRKSNLKPFERDISTEIYQAGSTPCNGVEGFNCYFPLQSYGFQPTNGVGYQPYRVVVLSFELLHAPATVCGPKKSTNLVKNKCVNFNFNGLTGTGVLTESNKKFLPFQQFGRDIADTTDAVRDPQTLEILDITPCSFGGVSVITPGTNTSNQVAVLYQDVNCTEVPVAIHADQLTPTWRVYSTGSNVFQTRAGCLIGAEHVNNSYECDIPIGAGICASYQTQTNSPRRARSVASQSIIAYTMSLGAENSVAYSNNSIAIPTNFTISVTTEILPVSMTKTSVDCTMYICGDSTECSNLLLQYGSFCTQLNRALTGIAVEQDKNTQEVFAQVKQIYKTPPIKDFGGFNFSQILPDPSKPSKRSFIEDLLFNKVTLADAGFIKQYGDCLGDIAARDLICAQKFNGLTVLPPLLTDEMIAQYTSALLAGTITSGWWFGAGAALQIPFAMQMAYRFNGIGVTQNVLYENQKLIANQFNSAIGKIQDSLSSTASALGKLQDVVNQNAQALNTLVKQLSSNFGAISSVLNDILSRLDPPEAEVQIDRLITGRLQSLQTYVTQQLIRAAEIRWSANLAATKMSECVLGQSKRVDFCGKGYHLMSFPQSAPHGVVFLHVTYVPAQEKNFTTAPAICHDGKAHFPREGVFVSNGTHWFVTQRNFYEPQIITTDNTFVSGNCDVVIGIVNNTVYDPLQPELDSFKEELDKYFKNHTSPDVDLGDISGINASVVNIQKEIDRLNEVAKNLNESLIDLQELGKYEQYIK

SEQ ID NO: 1756 - protein, 1211 aa, Artificial Sequence
  SARS-CoV-2/Germany/BavPat1/2020__EPI_ISL_406862 spike protein (1-1211)(K986P_V987P_T887W_A1020W)
MFVFLVLLPLVSSQCVNLTTRTQLPPAYTNSFTRGVYYPDKVFRSSVLHSTQDLFLPFFSNVTWFHAIHVSGTNGTKRFDNPVLPFNDGVYFASTEKSNIIRGWIFGTTLDSKTQSLLIVNNATNVVIKVCEFQFCNDPFLGVYYHKNNKSWMESEFRVYSSANNCTFEYVSQPFLMDLEGKQGNFKNLREFVFKNIDGYFKIYSKHTPINLVRDLPQGFSALEPLVDLPIGINITRFQTLLALHRSYLTPGDSSSGWTAGAAAYYVGYLQPRTFLLKYNENGTITDAVDCALDPLSETKCTLKSFTVEKGIYQTSNFRVQPTESIVRFPNITNLCPFGEVFNATRFASVYAWNRKRISNCVADYSVLYNSASFSTFKCYGVSPTKLNDLCFTNVYADSFVIRGDEVRQIAPGQTGKIADYNYKLPDDFTGCVIAWNSNNLDSKVGGNYNYLYRLFRKSNLKPFERDISTEIYQAGSTPCNGVEGFNCYFPLQSYGFQPTNGVGYQPYRVVVLSFELLHAPATVCGPKKSTNLVKNKCVNFNFNGLTGTGVLTESNKKFLPFQQFGRDIADTTDAVRDPQTLEILDITPCSFGGVSVITPGTNTSNQVAVLYQGVNCTEVPVAIHADQLTPTWRVYSTGSNVFQTRAGCLIGAEHVNNSYECDIPIGAGICASYQTQTNSPRRARSVASQSIIAYTMSLGAENSVAYSNNSIAIPTNFTISVTTEILPVSMTKTSVDCTMYICGDSTECSNLLLQYGSFCTQLNRALTGIAVEQDKNTQEVFAQVKQIYKTPPIKDFGGFNFSQILPDPSKPSKRSFIEDLLFNKVTLADAGFIKQYGDCLGDIAARDLICAQKFNGLTVLPPLLTDEMIAQYTSALLAGTITSGWWFGAGAALQIPFAMQMAYRFNGIGVTQNVLYENQKLIANQFNSAIGKIQDSLSSTASALGKLQDVVNQNAQALNTLVKQLSSNFGAISSVLNDILSRLDPPEAEVQIDRLITGRLQSLQTYVTQQLIRAAEIRWSANLAATKMSECVLGQSKRVDFCGKGYHLMSFPQSAPHGVVFLHVTYVPAQEKNFTTAPAICHDGKAHFPREGVFVSNGTHWFVTQRNFYEPQIITTDNTFVSGNCDVVIGIVNNTVYDPLQPELDSFKEELDKYFKNHTSPDVDLGDISGINASVVNIQKEIDRLNEVAKNLNESLIDLQELGKYEQYIK

SEQ ID NO: 1757 - protein, 1211 aa, Artificial Sequence
  SARS-CoV-2/Wuhan/HBCDC-HB-02/2020__EPI_ISL_412978 spike protein (1-1211)(K986P_V987P_T887W_A1020W)
MFVFLVLLPLVSSQCVNLTTRTQLPPAYTNSFTRGVYYPDKVFRSSVLHSTQDLFLPFFSNVTWFHAIHVSGTNGTKRFDNPVLPFNDGVYFASTEKSNIIRGWIFGTTLDSKTQSLLIVNNATNVVIKVCEFQFCNDPFLGVYYHKNNKSWMESEFRVYSSANNCTFEYVSQPFLMDLEGKQGNFKNLREFVFKNIDGYFKIYSKHTPINLVRDLPQGFSALEPLVDLPIGINITRFQTLLALHRSYLTPGDSSSGWTAGAAAYYVGYLQPRTFLLKYNENGTITDAVDCALDPLSETKCTLKSFTVEKGIYQTSNFRVQPTESIVRFPNITNLCPFGEVFNATRFASVYAWNRKRISNCVADYSVLYNSASFSTFKCYGVSPTKLNDLCFTNVYADSFVIRGDEVRQIAPGQTGKIADYNYKLPDDFTGCVIAWNSNNLDSKVGGNYNYLYRLFRKSNLKPFERDISTEIYQAGSTPCNGVEGFNCYFPLQSYGFQPTNGVGYQPYRVVVLSFELLHAPATVCGPKKSTNLVKNKCVNFNFNGLTGTGVLTESNKKFLPFQQFGRDIADTTDAVRDPQTLEILDITPCSFGGVSVITPGTNTSNQVAVLYQDVNCTEVPVAIHADQLTPTWRVYSTGSNVFQTRAGCLIGAEHVNNSYECDIPIGAGICASYQTQTNSPRRARSVASQSIIAYTMSLGAENSVAYSNNSIAIPTNFTISVTTEILPVSMTKTSVDCTMYICGDSTECSNFLLQYGSFCTQLNRALTGIAVEQDKNTQEVFAQVKQIYKTPPIKDFGGFNFSQILPDPSKPSKRSFIEDLLFNKVTLADAGFIKQYGDCLGDIAARDLICAQKFNGLTVLPPLLTDEMIAQYTSALLAGTITSGWWFGAGAALQIPFAMQMAYRFNGIGVTQNVLYENQKLIANQFNSAIGKIQDSLSSTASALGKLQDVVNQNAQALNTLVKQLSSNFGAISSVLNDILSRLDPPEAEVQIDRLITGRLQSLQTYVTQQLIRAAEIRWSANLAATKMSECVLGQSKRVDFCGKGYHLMSFPQSAPHGVVFLHVTYVPAQEKNFTTAPAICHDGKAHFPREGVFVSNGTHWFVTQRNFYEPQIITTDNTFVSGNCDVVIGIVNNTVYDPLQPELDSFKEELDKYFKNHTSPDVDLGDISGINASVVNIQKEIDRLNEVAKNLNESLIDLQELGKYEQYIK

SEQ ID NO: 1758 - protein, 1211 aa, Artificial Sequence
  SARS-CoV-2/Australia/QLD02/2020__EPI_ISL_407896 spike protein (1-1211)(K986P_V987P_T887W_A1020W)
MFVFLVLLPLVSSQCVNLTTRTQLPPAYTNSFTRGVYYPDKVFRSSVLHSTQDLFLPFFSNVTWFHAIHVSGTNGTKRFDNPVLPFNDGVYFASTEKSNIIRGWIFGTTLDSKTQSLLIVNNATNVVIKVCEFQFCNDPFLGVYYHKNNKSWMESEFRVYSSANNCTFEYVSQPFLMDLEGKQGNFKNLREFVFKNIDGYFKIYSKHTPINLVRDLPQGFSALEPLVDLPIGINITRFQTLLALHRSYLTPGDSSSGWTAGAAAYYVGYLQPRTFLLKYNENGTITDAVDCALDPLSETKCTLKSFTVEKGIYQTSNFRVQPTESIVRFPNITNLCPFGEVFNATRFASVYAWNRKRISNCVADYSVLYNSASFSTFKCYGVSPTKLNDLCFTNVYADSFVIRGDEVRQIAPGQTGKIADYNYKLPDDFTGCVIAWNSNNLDSKVGGNYNYLYRLFRKSNLKPFERDISTEIYQAGSTPCNGVEGFNCYFPLQSYGFQPTNGVGYQPYRVVVLSFELLHAPATVCGPKKSTNLVKNKCVNFNFNGLTGTGVLTESNKKFLPFQQFGRDIADTTDAVRDPQTLEILDITPCSFGGVSVITPGTNTSNQVAVLYQDVNCTEVPVAIHADQLTPTWRVYSTGSNVFQTRAGCLIGAEHVNNSYECDIPIGAGICASYQTQTNSPRRARSVASQSIIAYTMSLGAENSVAYSNNSIAIPTNFTISVTTEILPVSMTKTSVDCTMYICGDSTECSNLLLQYGSFCTQLNRALTGIAVEQDKNTQEVFAQVKQIYKTPPIKDFGGFNFSQILPDPSKPSKRSFIEDLLFNKVTLADAGFIKQYGDCLGDIAARDLICAQKFNGLTVLPPLLTDEMIAQYTSALLAGTITSGWWFGAGAALQIPFAMQMAYRFNGIGVTQNVLYENQKLIANQFNSAIGKIQDSLSSTASALGKLQDVVNQNAQALNTLVKQLSSNFGAISSVLNDILSRLDPPEAEVQIDRLITGRLQSLQTYVTQQLIRAAEIRWSANLAATKMSECVLGQSKRVDFCGKGYHLMSFPQSAPHGVVFLHVTYVPAQEKNFTTAPAICHDGKAHFPREGVFVSNGTHWFVTQRNFYEPQIITTDNTFVSGNCDVVIGIVNNTVYDPLQLELDSFKEELDKYFKNHTSPDVDLGDISGINASVVNIQKEIDRLNEVAKNLNESLIDLQELGKYEQYIK

SEQ ID NO: 1759 - protein, 1211 aa, Artificial Sequence
  SARS-CoV-2/India/1-31/2020__EPI_ISL_413523 spike protein (1-1211)(K986P_V987P_T887W_A1020W)
MFVFLVLLPLVSSQCVNLTTRTQLPPAYTNSFTRGVYYPDKVFRSSVLHSTQDLFLPFFSNVTWFHAIHVSGTNGTKRFDNPVLPFNDGVYFASTEKSNIIRGWIFGTTLDSKTQSLLIVNNATNVVIKVCEFQFCNDPFLGVYYHKNNKSWMESEFRVYSSANNCTFEYVSQPFLMDLEGKQGNFKNLREFVFKNIDGYFKIYSKHTPINLVRDLPQGFSALEPLVDLPIGINITRFQTLLALHRSYLTPGDSSSGWTAGAAAYYVGYLQPRTFLLKYNENGTITDAVDCALDPLSETKCTLKSFTVEKGIYQTSNFRVQPTESIVRFPNITNLCPFGEVFNATRFASVYAWNRKRISNCVADYSVLYNSASFSTFKCYGVSPTKLNDLCFTNVYADSFVIRGDEVRQIAPGQTGKIADYNYKLPDDFTGCVIAWNSNNLDSKVGGNYNYLYRLFRKSNLKPFERDISTEIYQAGSTPCNGVEGFNCYFPLQSYGFQPTNGVGYQPYRVVVLSFELLHAPATVCGPKKSTNLVKNKCVNFNFNGLTGTGVLTESNKKFLPFQQFGRDIADTTDAVRDPQTLEILDITPCSFGGVSVITPGTNTSNQVAVLYQDVNCTEVPVAIHADQLTPTWRVYSTGSNVFQTRAGCLIGAEHVNNSYECDIPIGAGICASYQTQTNSPRRARSVASQSIIAYTMSLGAENSVAYSNNSIAIPTNFTISVTTEILPVSMTKTSVDCTMYICGDSTECSNLLLQYGSFCTQLNRALTGIAVEQDKNTQEVFAQVKQIYKTPPIKDFGGFNFSQILPDPSKPSKRSFIEDLLFNKVTLADAGFIKQYGDCLGDIAARDLICAQKFNGLTVLPPLLTDEMIAQYTSALLAGTITSGWWFGAGAALQIPFAMQMAYRFNGIGVTQNVLYENQKLIANQFNSVIGKIQDSLSSTASALGKLQDVVNQNAQALNTLVKQLSSNFGAISSVLNDILSRLDPPEAEVQIDRLITGRLQSLQTYVTQQLIRAAEIRWSANLAATKMSECVLGQSKRVDFCGKGYHLMSFPQSAPHGVVFLHVTYVPAQEKNFTTAPAICHDGKAHFPREGVFVSNGTHWFVTQRNFYEPQIITTDNTFVSGNCDVVIGIVNNTVYDPLQPELDSFKEELDKYFKNHTSPDVDLGDISGINASVVNIQKEIDRLNEVAKNLNESLIDLQELGKYEQYIK

SEQ ID NO: 1760 - protein, 1211 aa, Artificial Sequence
  SARS-CoV-2/Guangdong/GD2020087-P0008/2020__EPI_ISL_413863 spike protein (1-1211)(K986P_V987P_T887W_A1020W)
MFVFLVLLPLVSSQCVNLTTRTQLPPAYTNSFTRGVYYPDKVFRSSVLHSTQDLFLPFFSNVTWFHAIHVSGTNGTKRFDNPVLPFNDGVYFASTEKSNIIRGWIFGTTLDSKTQSLLIVNNATNVVIKVCEFQFCNDPFLGVYYHKNNKSWMESEFRVYSSANNCTFEYVSQPFLMDLEGKQGNFKNLREFVFKNIDGYFKIYSKHTPINLVRDLPQGFSALEPLVDLPIGINITRFQTLLALHRSYLTPGDSSSGWTAGAAAYYVGYLQPRTFLLKYNENGTITDAVDCALDPLSETKCTLKSFTVEKGIYQTSNFRVQPTESIVRFPNITNLCPFGEVFNATRFASVYAWNRKRISNCVADYSVLYNSASFSTFKCYGVSPTKLNDLCFTNVYADSFVIRGDEVREIAPGQTGKIADYNYKLPDDFTGCVIAWNSNNLDSKVGGNYNYLYRLFRKSNLKPFERDISTEIYQAGSTPCNGVEGFNCYFPLQSYGFQPTNGVGYQPYRVVVLSFELLHAPATVCGPKKSTNLVKNKCVNFNFNGLTGTGVLTESNKKFLPFQQFGRDIADTTDAVRDPQTLEILDITPCSFGGVSVITPGTNTSNQVAVLYQDVNCTEVPVAIHADQLTPTWRVYSTGSNVFQTRAGCLIGAEHVNNSYECDIPIGAGICASYQTQTNSPRRARSVASQSIIAYTMSLGAENSVAYSNNSIAIPTNFTISVTTEILPVSMTKTSVDCTMYICGDSTECSNLLLQYGSFCTQLNRALTGIAVEQDKNTQEVFAQVKQIYKTPPIKDFGGFNFSQILPDPSKPSKRSFIEDLLFNKVTLADAGFIKQYGDCLGDIAARDLICAQKFNGLTVLPPLLTDEMIAQYTSALLAGTITSGWWFGAGAALQIPFAMQMAYRFNGIGVTQNVLYENQKLIANQFNSAIGKIQDSLSSTASALGKLQDVVNQNAQALNTLVKQLSSNFGAISSVLNDILSRLDPPEAEVQIDRLITGRLQSLQTYVTQQLIRAAEIRWSANLAATKMSECVLGQSKRVDFCGKGYHLMSFPQSAPHGVVFLHVTYVPAQEKNFTTAPAICHDGKAHFPREGVFVSNGTHWFVTQRNFYEPQIITTDNTFVSGNCDVVIGIVNNTVYDPLQPELDSFKEELDKYFKNHTSPDVDLGDISGINASVVNIQKEIDRLNEVAKNLNESLIDLQELGKYEQYIK

SEQ ID NO: 1761 - protein, 1211 aa, Artificial Sequence
  SARS-CoV-2/Sweden/01/2020__EPI_ISL_411951 spike protein (1-1211)(K986P_V987P_T887W_A1020W)
MFVFLVLLPLVSSQCVNLTTRTQLPPAYTNSFTRGVYYPDKVFRSSVLHSTQDLFLPFFSNVTWFHAIHVSGTNGTKRFDNPVLPFNDGVYFASTEKSNIIRGWIFGTTLDSKTQSLLIVNNATNVVIKVCEFQFCNDPFLGVYYHKNNKSWMESEFRVYSSANNCTFEYVSQPFLMDLEGKQGNFKNLREFVFKNIDGYFKIYSKHTPINLVRDLPQGFSALEPLVDLPIGINITRFQTLLALHRSYLTPGDSSSGWTAGAAAYYVGYLQPRTFLLKYNENGTITDAVDCALDPLSETKCTLKSFTVEKGIYQTSNFRVQPTESIVRFPNITNLCPFGEVFNATRFASVYAWNRKRISNCVADYSVLYNSASFSTFKCYGVSPTKLNDLCFTNVYADSFVIRGDEVRQIAPGQTGKIADYNYKLPDDFTGCVIAWNSNNLDSKVGGNYNYLYRLFRKSNLKPFERDISTEIYQAGSTPCNGVEGFNCYFPLQSYGFQPTNGVGYQPYRVVVLSFELLHAPATVCGPKKSTNLVKNKCVNFNFNGLTGTGVLTESNKKFLPFQQFGRDIADTTDAVRDPQTLEILDITPCSFGGVSVITPGTNTSNQVAVLYQDVNCTEVPVAIHADQLTPTWRVYSTGSNVFQTRAGCLIGAEHVNNSYECDIPIGAGICASYQTQTNSPRRARSVASQSIIAYTMSLGAENSVAYSNNSIAIPTNFTISVTTEILPVSMTKTSVDCTMYICGDSTECSNLLLQYGSFCTQLNRALTGIAVEQDKNTQEVFAQVKQIYKTPPIKDCGGFNFSQILPDPSKPSKRSFIEDLLFNKVTLADAGFIKQYGDCLGDIAARDLICAQKFNGLTVLPPLLTDEMIAQYTSALLAGTITSGWWFGAGAALQIPFAMQMAYRFNGIGVTQNVLYENQKLIANQFNSAIGKIQDSLSSTASALGKLQDVVNQNAQALNTLVKQLSSNFGAISSVLNDILSRLDPPEAEVQIDRLITGRLQSLQTYVTQQLIRAAEIRWSANLAATKMSECVLGQSKRVDFCGKGYHLMSFPQSAPHGVVFLHVTYVPAQEKNFTTAPAICHDGKAHFPREGVFVSNGTHWFVTQRNFYEPQIITTDNTFVSGNCDVVIGIVNNTVYDPLQPELDSFKEELDKYFKNHTSPDVDLGDISGINASVVNIQKEIDRLNEVAKNLNESLIDLQELGKYEQYIK

SEQ ID NO: 1762 - protein, 1211 aa, Artificial Sequence
  SARS-CoV-2/Tianmen/HBCDC-HB-07/2020__EPI_ISL_412983 spike protein (1-1211)(K986P_V987P_T887W_A1020W)
MFVFLVLLPLVSSQCVNLTTRTQLPPAYTNSFTRGVYYPDKVFRSSVLHSTQDLFLPFFSNVTWFHAIHVSGTNGTKRFDNPVLPFNDGVYFASTEKSNIIRGWIFGTTLDSKTQSLLIVNNATNVVIKVCEFQFCNDPFLGVYYHKNNKSWMESEFRVYSSANNCTFEYVSQPFLMDLEGKQGNFKNLREFVFKNIDGYFKIYSKHTPINLVRDLPQGFSALEPLVDLPIGINITRFQTLLALHRSYLTPGDSSSGWTAGAAAYYVGYLQPRTFLLKYNENGTITDAVDCALDPLSETKCTLKSFTVEKGIYQTSNFRVQPTESIVRFPNITNLCPFGEVFNATRFASVYAWNRKRISNCVADYSVLYNSASFSTFKCYGVSPTKLNDLCFTNVYADSFVIRGDEVRQIAPGQTGKIADYNYKLPDDFTGCVIAWNSNNLDSKVGGNYNYLYRLFRKSNLKPFERDISTEIYQAGSTPCNGVEGFNCYFPLQSYGFQPTNGVGYQPYRVVVLSFELLHAPATVCGPKKSTNLVKNKCVNFNFNGLTGTGVLTESNKKFLPFQQFGRDIADTTDAVRDPQTLEILDITPCSFGGVSVITPGTNTSNQVAVLYQDLNCTEVPVAIHADQLTPTWRVYSTGSNVFQTRAGCLIGAEHVNNSYECDIPIGAGICASYQTQTNSPRRARSVASQSIIAYTMSLGAENSVAYSNNSIAIPTNFTISVTTEILPVSMTKTSVDCTMYICGDSTECSNLLLQYGSFCTQLNRALTGIAVEQDKNTQEVFAQVKQIYKTPPIKDFGGFNFSQILPDPSKPSKRSFIEDLLFNKVTLADAGFIKQYGDCLGDIAARDLICAQKFNGLTVLPPLLTDEMIAQYTSALLAGTITSGWWFGAGAALQIPFAMQMAYRFNGIGVTQNVLYENQKLIANQFNSAIGKIQDSLSSTASALGKLQDVVNQNAQALNTLVKQLSSNFGAISSVLNDILSRLDPPEAEVQIDRLITGRLQSLQTYVTQQLIRAAEIRWSANLAATKMSECVLGQSKRVDFCGKGYHLMSFPQSAPHGVVFLHVTYVPAQEKNFTTAPAICHDGKAHFPREGVFVSNGTHWFVTQRNFYEPQIITTDNTFVSGNCDVVIGIVNNTVYDPLQPELDSFKEELDKYFKNHTSPDVDLGDISGINASVVNIQKEIDRLNEVAKNLNESLIDLQELGKYEQYIK

SEQ ID NO: 1763 - protein, 1211 aa, Artificial Sequence
  SARS-CoV-2/Hong Kong/case42_VM20002493/2020__EPI_ISL_414527 spike protein (1-1211)(K986P_V987P_T887W_A1020W)
MFVFLVLLPLVSSQCVNLTTRTQLPPAYTNSFTRGVYYPDKVFRSSVLHSTQDLFLPFFSNVTWFHAIHVSGTNGTKRFDNPVLPFNDGVYFASTEKSNIIRGWIFGTTLDSKTQSLLIVNNATNVVIKVCEFQFCNDPFLGVYYHKNNKSWMESEFRVYSSANNCTFEYVSQPFLMDLEGKQGNFKNLREFVFKNIDGYFKIYSKHTPINLVRDLPQGFSALEPLVDLPIGINITRFQTLLALHRSYLTPGDSSSGWTAGAAAYYVGYLQPRTFLLKYNENGTITDAVDCALDPLSETKCTLKSFTVEKGIYQTSNFRVQPTESIVRFPNITNLCPFGEVFNATRFASVYAWNRKRISNCVADYSVLYNSASFSTFKCYGVSPTKLNDLCFTNVYADSFVIRGDEVRQIAPGQTGKIADYNYKLPDDFTGCVIAWNSNNLDSKVGGNYNYLYRLFRKSNLKPFERDISTEIYQAGSTPCNGVEGFNCYFPLQSYGFQPTNGVGYQPYRVVVLSFELLHAPATVCGPKKSTNLVKNKCVNFNFNGLTGTGVLTESNKKFLPFQQFGRDIADTTDAVRDPQTLEILDITPCSFGGVSVITPGTNTSNQVAVLYQDVNCTEVPVAIHADQLTPTWRVYSTGSNVFQTRAGCLIGAEHVNNSYECDIPIGAGICASYQTQTNSPRRARSVASQSIIAYTMSLGAENSVAYSNNSIAIPTNFAISVTTEILPVSMTKTSVDCTMYICGDSTECSNLLLQYGSFCTQLNRALTGIAVEQDKNTQEVFAQVKQIYKTPPIKDFGGFNFSQILPDPSKPSKRSFIEDLLFNKVTLADAGFIKQYGDCLGDIAARDLICAQKFNGLTVLPPLLTDEMIAQYTSALLAGTITSGWWFGAGAALQIPFAMQMAYRFNGIGVTQNVLYENQKLIANQFNSAIGKIQDSLSSTASALGKLQDVVNQNAQALNTLVKQLSSNFGAISSVLNDILSRLDPPEAEVQIDRLITGRLQSLQTYVTQQLIRAAEIRWSANLAATKMSECVLGQSKRVDFCGKGYHLMSFPQSAPHGVVFLHVTYVPAQEKNFTTAPAICHDGKAHFPREGVFVSNGTHWFVTQRNFYEPQIITTDNTFVSGNCDVVIGIVNNTVYDPLQPELDSFKEELDKYFKNHTSPDVDLGDISGINASVVNIQKEIDRLNEVAKNLNESLIDLQELGKYEQYIK

SEQ ID NO: 1764 - protein, 1211 aa, Artificial Sequence
  SARS-CoV-2/USA/CruiseA-23/2020__EPI_ISL_414482 spike protein (1-1211)(K986P_V987P_T887W_A1020W)
MFVFLVLLPLVSSQCVNLTTRTQLPPAYTNSFTRGVYYPDKVFRSSVLHSTQDLFLPFFSNVTWFHAIHVSGTNGTKRFDNPVLPFNDGVYFASTEKSNIIRGWIFGTTLDSKTQSLLIVNNATNVVIKVCEFQFCNDPFLGVYYHKNNKSWMESEFRVYSSANNCTFEYVSQPFLMDLEVKQGNFKNLREFVFKNIDGYFKIYSKHTPINLVRDLPQGFSALEPLVDLPIGINITRFQTLLALHRSYLTPGDSSSGWTAGAAAYYVGYLQPRTFLLKYNENGTITDAVDCALDPLSETKCTLKSFTVEKGIYQTSNFRVQPTESIVRFPNITNLCPFGEVFNATRFASVYAWNRKRISNCVADYSVLYNSASFSTFKCYGVSPTKLNDLCFTNVYADSFVIRGDEVRQIAPGQTGKIADYNYKLPDDFTGCVIAWNSNNLDSKVGGNYNYLYRLFRKSNLKPFERDISTEIYQAGSTPCNGVEGFNCYFPLQSYGFQPTNGVGYQPYRVVVLSFELLHAPATVCGPKKSTNLVKNKCVNFNFNGLTGTGVLTESNKKFLPFQQFGRDIADTTDAVRDPQTLEILDITPCSFGGVSVITPGTNTSNQVAVLYQDVNCTEVPVAIHADQLTPTWRVYSTGSNVFQTRAGCLIGAEHVNNSYECDIPIGAGICASYQTQTNSPRRARSVASQSIIAYTMSLGAENSVAYSNNSIAIPTNFTISVTTEILPVSMTKTSVDCTMYICGDSTECSNLLLQYGSFCTQLNRALTGIAVEQDKNTQEVFAQVKQIYKTPPIKDFGGFNFSQILPDPSKPSKRSFIEDLLFNKVTLADAGFIKQYGDCLGDIAARDLICAQKFNGLTVLPPLLTDEMIAQYTSALLAGTITSGWWFGAGAALQIPFAMQMAYRFNGIGVTQNVLYENQKLIANQFNSAIGKIQDSLSSTASALGKLQDVVNQNAQALNTLVKQLSSNFGAISSVLNDILSRLDPPEAEVQIDRLITGRLQSLQTYVTQQLIRAAEIRWSANLAATKMSECVLGQSKRVDFCGKGYHLMSFPQSAPHGVVFLHVTYVPAQEKNFTTAPAICHDGKAHFPREGVFVSNGTHWFVTQRNFYEPQIITTDNTFVSGNCDVVIGIVNNTVYDPLQPELDSFKEELDKYFKNHTSPDVDLGDISGINASVVNIQKEIDRLNEVAKNLNESLIDLQELGKYEQYIK

SEQ ID NO: 1765 - protein, 1211 aa, Artificial Sequence
  SARS-CoV-2/Hong Kong/case85_VM20002868/2020__EPI_ISL_414519 spike protein (1-1211)(K986P_V987P_T887W_A1020W)
MFVFLVLVPLVSSQCVNLTTRTQLPPAYTNSFTRGVYYPDKVFRSSVLHSTQDLFLPFFSNVTWFHAIHVSGTNGTKRFDNPVLPFNDGVYFASTEKSNIIRGWIFGTTLDSKTQSLLIVNNATNVVIKVCEFQFCNDPFLGVYYHKNNKSWMESEFRVYSSANNCTFEYVSQPFLMDLEGKQGNFKNLREFVFKNIDGYFKIYSKHTPINLVRDLPQGFSALEPLVDLPIGINITRFQTLLALHRSYLTPGDSSSGWTAGAAAYYVGYLQPRTFLLKYNENGTITDAVDCALDPLSETKCTLKSFTVEKGIYQTSNFRVQPTESIVRFPNITNLCPFGEVFNATRFASVYAWNRKRISNCVADYSVLYNSASFSTFKCYGVSPTKLNDLCFTNVYADSFVIRGDEVRQIAPGQTGKIADYNYKLPDDFTGCVIAWNSNNLDSKVGGNYNYLYRLFRKSNLKPFERDISTEIYQAGSTPCNGVEGFNCYFPLQSYGFQPTNGVGYQPYRVVVLSFELLHAPATVCGPKKSTNLVKNKCVNFNFNGLTGTGVLTESNKKFLPFQQFGRDIADTTDAVRDPQTLEILDITPCSFGGVSVITPGTNTSNQVAVLYQDVNCTEVPVAIHADQLTPTWRVYSTGSNVFQTRAGCLIGAEHVNNSYECDIPIGAGICASYQTQTNSPRRARSVASQSIIAYTMSLGAENSVAYSNNSIAIPTNFTISVTTEILPVSMTKTSVDCTMYICGDSTECSNLLLQYGSFCTQLNRALTGIAVEQDKNTQEVFAQVKQIYKTPPIKDFGGFNFSQILPDPSKPSKRSFIEDLLFNKVTLADAGFIKQYGDCLGDIAARDLICAQKFNGLTVLPPLLTDEMIAQYTSALLAGTITSGWWFGAGAALQIPFAMQMAYRFNGIGVTQNVLYENQKLIANQFNSAIGKIQDSLSSTASALGKLQDVVNQNAQALNTLVKQLSSNFGAISSVLNDILSRLDPPEAEVQIDRLITGRLQSLQTYVTQQLIRAAEIRWSANLAATKMSECVLGQSKRVDFCGKGYHLMSFPQSAPHGVVFLHVTYVPAQEKNFTTAPAICHDGKAHFPREGVFVSNGTHWFVTQRNFYEPQIITTDNTFVSGNCDVVIGIVNNTVYDPLQPELDSFKEELDKYFKNHTSPDVDLGDISGINASVVNIQKEIDRLNEVAKNLNESLIDLQELGKYEQYIK

SEQ ID NO: 1766 - protein, 1211 aa, Artificial Sequence; identical to SEQ ID NO: 1756
  SARS-CoV-2/England/200990660/2020__EPI_ISL_414523 spike protein (1-1211)(K986P_V987P_T887W_A1020W)

SEQ ID NO: 1767 - protein, 1211 aa, Artificial Sequence
  SARS-CoV-2/Australia/NSW09/2020__EPI_ISL_413595 spike protein (1-1211)(K986P_V987P_T887W_A1020W)
MFVFLVLLPLVSSQCVNLTTRTQLPPAYTNSFTRGVYYPDKVFRSSVLHSTQDLFLPFFSNVTWFHAIHVSGTNGTKRFDNPVLPFNDGVYFASTEKSNIIRGWIFGTTLDSKTQSLLIVNNATNVVIKVCEFQFCNDPFLGVYYHKNNKSWMESEFRVYSSANNCTFEYVSQPFLMDLEGKQGNFKNLREFVFKNIDGYFKIYSKHTPINLVRDLPQGFSALEPLVDLPIGINITRFQTLLALHRSYLTPGDSSSGWTAGAAAYYVGYLQPRTFLLKYNENGTITDAVDCALDPLSETKCTLKSFTVEKGIYQTSNFRVQPTESIVRFPNITNLCPFGEVFNATRFASVYAWNRKRISNCVADYSVLYNSASFSTFKCYGVSPTKLNDLCFTNVYADSFVIRGDEVRQIAPGQTGKIADYNYKLPDDFTGCVIAWNSNNLDSKVGGNYNYLYRLFRKSNLKPFERDISTEIYQAGSTPCNGVEGFNCYFPLQSYGFQPTNGVGYQPYRVVVLSFELLHAPATVCGPKKSTNLVKNKCVNFNFNGLTGTGVLTESNKKFLPFQQFGRDIADTTDAVRDPQTLEILDITPCSFGGVSVITPGTNTSNQVAVLYQDVNCTEVPVAIHADQLTPTWRVYSTGSNVFQTRAGCLIGAEHVNNSYECDIPIGAGICASYQTQTNSPRRARSVASQSIIAYTMSLGAENSVAYSNNSIAIPTNFTISVTTEILPVSMTKTSVDCTMYICGDSTECSNLLLQYGSFCTQLNRALTGIAVEQDKNTQEVFAQVKQIYKTPPIKDFGGFNFSQILPDPSKPSKRSFIEDLLFNKVTLADAGFIKQYGDCLGDIAARDLICAQKFNGLTVLPPLLTDEMIAQYTSALLAGTITSGWWFGAGAALQIPFAMQMAYRFNGIGVTQNVLYENQKLIANQFNSAIGKIQDSLSFTASALGKLQDVVNQNAQALNTLVKQLSSNFGAISSVLNDILSRLDPPEAEVQIDRLITGRLQSLQTYVTQQLIRAAEIRWSANLAATKMSECVLGQSKRVDFCGKGYHLMSFPQSAPHGVVFLHVTYVPAQEKNFTTAPAICHDGKAHFPREGVFVSNGTHWFVTQRNFYEPQIITTDNTFVSGNCDVVIGIVNNTVYDPLQPELDSFKEELDKYFKNHTSPDVDLGDISGINASVVNIQKEIDRLNEVAKNLNESLIDLQELGKYEQYIK

SEQ ID NO: 1768 - protein, 1211 aa, Artificial Sequence; identical to SEQ ID NO: 1748
  SARS-CoV-2/Australia/NSW10/2020__EPI_ISL_413596 spike protein (1-1211)(K986P_V987P_T887W_A1020W)

SEQ ID NO: 1769 - protein, 1211 aa, Artificial Sequence
  SARS-CoV-2/Switzerland/1000477797/2020__EPI_ISL_413023 spike protein (1-1211)(K986P_V987P_T887W_A1020W)
MFVFLVLLPLVSSQCVNLTTRTQLPPAYTNSFTRGVYYPDKVFRSSVLHSTQDLFLPFFSNVTWFHAIHVSGTNGTKRFDNPVLPFNDGVYFASTEKSNIIRGWIFGTTLDSKTQSLLIVNNATNVVIKVCEFQFCNDPFLGVYYHKNNKSWMESEFRVYSSANNCTFEYVSQPFLMDLEGKQGNFKNLREFVFKNIDGYFNIYSKHTPINLVRDLPQGFSALEPLVDLPIGINITRFQTLLALHRSYLTPGDSSSGWTAGAAAYYVGYLQPRTFLLKYNENGTITDAVDCALDPLSETKCTLKSFTVEKGIYQTSNFRVQPTESIVRFPNITNLCPFGEVFNATRFASVYAWNRKRISNCVADYSVLYNSASFSTFKCYGVSPTKLNDLCFTNVYADSFVIRGDEVRQIAPGQTGKIADYNYKLPDDFTGCVIAWNSNNLDSKVGGNYNYLYRLFRKSNLKPFERDISTEIYQAGSTPCNGVEGFNCYFPLQSYGFQPTNGVGYQPYRVVVLSFELLHAPATVCGPKKSTNLVKNKCVNFNFNGLTGTGVLTESNKKFLPFQQFGRDIADTTDAVRDPQTLEILDITPCSFGGVSVITPGTNTSNQVAVLYQGVNCTEVPVAIHADQLTPTWRVYSTGSNVFQTRAGCLIGAEHVNNSYECDIPIGAGICASYQTQTNSPRRARSVASQSIIAYTMSLGAENSVAYSNNSIAIPTNFTISVTTEILPVSMTKTSVDCTMYICGDSTECSNLLLQYGSFCTQLNRALTGIAVEQDKNTQEVFAQVKQIYKTPPIKDFGGFNFSQILPDPSKPSKRSFIEDLLFNKVTLADAGFIKQYGDCLGDIAARDLICAQKFNGLTVLPPLLTDEMIAQYTSALLAGTITSGWWFGAGAALQIPFAMQMAYRFNGIGVTQNVLYENQKLIANQFNSAIGKIQDSLSSTASALGKLQDVVNQNAQALNTLVKQLSSNFGAISSVLNDILSRLDPPEAEVQIDRLITGRLQSLQTYVTQQLIRAAEIRWSANLAATKMSECVLGQSKRVDFCGKGYHLMSFPQSAPHGVVFLHVTYVPAQEKNFTTAPAICHDGKAHFPREGVFVSNGTHWFVTQRNFYEPQIITTDNTFVSGNCDVVIGIVNNTVYDPLQPELDSFKEELDKYFKNHTSPDVDLGDISGINASVVNIQKEIDRLNEVAKNLNESLIDLQELGKYEQYIK

SEQ ID NO: 1770 - protein, 1211 aa, Artificial Sequence
  SARS-CoV-2/Belgium/BA-02291/2020__EPI_ISL_415159 spike protein (1-1211)(K986P_V987P_T887W_A1020W)
MFVFLVLLPLVSSQCVNLTTRTQLPPAYTNSFTRGVYYPDKVFRSSVLHSTQDLFLPFFSNVTWFHAIHVSGTNGTKRFDNPVLPFNDGVYFASTEKSNIIRGWIFGTTLDSKTQSLLIVNNATNVVIKVCEFQFCNDPFLGVYYHKNNKSWMESEFRVYSSANNCTFEYVSQPFLMDLEGKQGNFKNLREFVFKNIDGYFKIYSKHTPINLVRDLPQGFSALEPLVDLPIGINITRFQTLLALHRSYLTPGDSSSGWTAGAAAYYVGYLQPRTFLLKYNENGTITDAVDCALDPLSETKCTLKSFTVEKGIYQTSNFRVQPTESIVRFPNITNLCPFGEVFNATRFASVYAWNRKRISNCVADYSVLYNSASFSTFKCYGVSPTKLNDLCFTNVYADSFVIRGDEVRQIAPGQTGKIADYNYKLPDDFTGCVIAWNSNNLDSKVGGNYNYLYRLFRRSNLKPFERDISTEIYQAGSTPCNGVEGFNCYFPLQSYGFQPTNGVGYQPYRVVVLSFELLPAPATVCGPKKSTNLVKNKCVNFNFNGLTGTGVLTESNKKFLPFQQFGRDIADTTDAVRDPQTLEILDITPCSFGGVSVITPGTNTSNQVAVLYQGVNCTEVPVAIHADQLTPTWRVYSTGSNVFQTRAGCLIGAEHVNNSYECDIPIGAGICASYQTQTNSPRRARSVASQSIIAYTMSLGAENSVAYSNNSIAIPTNFTISVTTEILPVSMTKTSVDCTMYICGDSTECSNLLLQYGSFCTQLNRALTGIAVEQDKNTQEVFAQVKQIYKTPPIKDFGGFNFSQILPDPSKPSKRSFIEDLLFNKVTLADAGFIKQYGDCLGDIAARDLICAQKFNGLTVLPPLLTDEMIAQYTSALLAGTITSGWWFGAGAALQIPFAMQMAYRFNGIGVTQNVLYENQKLIANQFNSAIGKIQDSLSSAAPALGKLQDVVNQNAQALNTLVKQLSSNFGAISSVLNDILSRLDPPEAEVQIDRLITGRLQSLQTYVTQQLIRAAEIRWSANLAATKMSECVLGQSKRVDFCGKGYHLMSFPQSAPHGVVFLHVTYVPAQEKNFTTAPAICHDGKAHFPREGVFVSNGTHWFVTQRNFYEPQIITTDNTFVSGNCDVVIGIVNNTVYDPLQPELDSFKEELDKYFKNHTSPDVDLGDISGINASVVNIQKEIDRLNEVAKNLNESLIDLQELGKYEQYIK

SEQ ID NO: 1771 - protein, 1211 aa, Artificial Sequence
  SARS-CoV-2/USA/WA8-UW5/2020__EPI_ISL_413486 spike protein (1-1211)(K986P_V987P_T887W_A1020W)
MFVFLVLLPLVSSQCVNLTTRTQLPPAYTNSFTRGVYYPDKVFRSSVLHSTQDLFLPFFSNVTWFHAIHVSGTNGTKRFDNPVLPFNDGVYFASTEKSNIIRGWIFGTTLDSKTQSLLIVNNATNVVIKVCEFQFCNDPFLGVYYHKNNKSWMESEFRVYSSANNCTFEYVSQPFLMDLEGKQGNFKNLREFVFKNIDGYFKIYSKHTPINLVRDLPQGFSALEPLVDLPIGINITRFQTLLALHRSYLTPGDSSSGWTAGAAAYYVGYLQPRTFLLKYNENGTITDAVDCALDPLSETKCTLKSFTVEKGIYQTSNFRVQPTESIVRFPNITNLCPFGEVFNATRFASVYAWNRKRISNCVADYSVLYNSASFSTFKCYGVSPTKLNDLCFTNVYADSFVIRGDEVRQIAPGQTGKIADYNYKLPDDFTGCVIAWNSNNLDSKVGGNYNYLYRLFRKSNLKPFERDISTEIYQAGSTPCNGVEGFNCYFPLQSYGFQPTNGVGYQPYRVVVLSFELLHAPATVCGPKKSTNLVKNKCVNFNFNGLTGTGVLTESNKKFLPFQQFGRDIADTTDAVRDPQTLEILDITPCSFGGVSVITPGTNTSNQVAVLYQDVNCTEVPVAIHADQLTPTWRVYSTGSNVFQTRAGCLIGAEYVNNSYECDIPIGAGICASYQTQTNSPRRARSVASQSIIAYTMSLGAENSVAYSNNSIAIPTNFTISVTTEILPVSMTKTSVDCTMYICGDSTECSNLLLQYGSFCTQLNRALTGIAVEQDKNTQEVFAQVKQIYKTPPIKDFGGFNFSQILPDPSKPSKRSFIEDLLFNKVTLADAGFIKQYGDCLGDIAARDLICAQKFNGLTVLPPLLTDEMIAQYTSALLAGTITSGWWFGAGAALQIPFAMQMAYRFNGIGVTQNVLYENQKLIANQFNSAIGKIQDSLSSTASALGKLQDVVNQNAQALNTLVKQLSSNFGAISSVLNDILSRLDPPEAEVQIDRLITGRLQSLQTYVTQQLIRAAEIRWSANLAATKMSECVLGQSKRVDFCGKGYHLMSFPQSAPHGVVFLHVTYVPAQEKNFTTAPAICHDGKAHFPREGVFVSNGTHWFVTQRNFYEPQIITTDNTFVSGNCDVVIGIVNNTVYDPLQPELDSFKEELDKYFKNHTSPDVDLGDISGINASVVNIQKEIDRLNEVAKNLNESLIDLQELGKYEQYIK

SEQ ID NO: 1772 - protein, 1211 aa, Artificial Sequence
  SARS-CoV-2/England/20102000506/2020__EPI_ISL_415147 spike protein (1-1211)(K986P_V987P_T887W_A1020W)
MFVFLVLLPLVSSQCVNLTTRTQLPPAYTNSFTRGVYYPDKVFRSSVLHSTQDLFLPFFSNVTWFHAIHVSGTNGTKRFDNPVLPFNDGVYFASTEKSNIIRGWIFGTTLDSKTQSLLIVNNATNVVIKVCEFQFCNDPFLGVYYHKNNKSWMESEFRVYSSANNCTFEYVSQPFLMDLEGKQGNFKNLREFVFKNIDGYFKIYSKHTPINLVRDLPQGFSALEPLVDLPIGINITRFQTLLALHRSYLTPGDSSSGWTAGAAAYYVGYLQPRTFLLKYNENGTITDAVDCALDPLSETKCTLKSFTVEKGIYQTSNFRVQPTESIVRFPNITNLCPFGEVFNATRFASVYAWNRKRISNCVADYSVLYNSASFSTFKCYGVSPTKLNDLCFTNVYADSFVIRGDEVRQIAPGQTGKIADYNYKLPDDFTGCVIAWNSNNLDSKVGGNYNYLYRLFRKSNLKPFERDISTEIYQAGSTPCNGVEGFNCYFPLQSYGFQPTNGVGYQPYRVVVLSFELLHAPATVCGPKKSTNLVKNKCVNFNFNGLTGTGVLTESNKKFLPFQQFGRDIADTTDAVRDPQTLEILDITPCSFGGVSVITPGTNTSNQVAVLYQGVNCTEVPVAIHADQLTPTWRVYSTGSNVFQTRAGCLIGAEHVNNSYECDIPIGAGICASYQTQTNSPRRARSVASQSIIAYTMSLGAENSVAYSNNSIAIPTNFTISVTTEILPVSMTKTSVDCTMYICGDSTECSNLLLQYGSFCTQLNRALTGIAVEQDKNTQEVFAQVKQIYKTPPIKDFGGFNFSQILPDPSKPSKRSFIEDLLFNKVTLADAGFIKQYGYCLGDIAARDLICAQKFNGLTVLPPLLTDEMIAQYTSALLAGTITSGWWFGAGAALQIPFAMQMAYRFNGIGVTQNVLYENQKLIANQFNSAIGKIQDSLSSTASALGKLQDVVNQNAQALNTLVKQLSSNFGAISSVLNDILSRLDPPEAEVQIDRLITGRLQSLQTYVTQQLIRAAEIRWSANLAATKMSECVLGQSKRVDFCGKGYHLMSFPQSAPHGVVFLHVTYVPAQEKNFTTAPAICHDGKAHFPREGVFVSNGTHWFVTQRNFYEPQIITTDNTFVSGNCDVVIGIVNNTVYDPLQPELDSFKEELDKYFKNHTSPDVDLGDISGINASVVNIQKEIDRLNEVAKNLNESLIDLQELGKYEQYIK

SEQ ID NO: 1773 - protein, 1211 aa, Artificial Sequence
  SARS-CoV-2/Belgium/VAG-03013/2020__EPI_ISL_415155 spike protein (1-1211)(K986P_V987P_T887W_A1020W)
MFVFLVLLPLVSSQCVNLTTRTQLPPAYTNSFTRGVYYPDKVFRSSVLHSTQDLFLPFFSNVTWFHAIHVSGTNGTKRFDNPVLPFNDGVYFASTEKSNIIRGWIFGTTLDSKTQSLLIVNNATNVVIKVCEFQFCNDPFLGVYYHKNNKSWMESEFRVYSSANNCTFEYVSQPFLMDLEGKQGNFKNLREFVFKNIDGYFKIYSKHTPINLVRDLPQGFSALEPLVDLPIGINITRFQTLLALHRSYLTPGDSSSGWTAGAAAYYVGYLQPRTFLLKYNENGTITDAVDCALDPLSETKCTLKSFTVEKGIYQTSNFRVQPTESIVRFPNITNLCPFGEVFNATRFASVYAWNRKRISNCVADYSVLYNSASFSTFKCYGVSPTKLNDLCFTNVYADSFVIRGDEVRQIAPGQTGKIADYNYKLPDDFTGCVIAWNSNNLDSKVGGNYNYLYRLFRKSNLKPFERDISTEIYQAGSTPCNGVEGFNCYFPLQSYGFQPTNGVGYQPYRVVVLSFELLHAPATVCGPKKSTNLVKNKCVNFNFNGLTGTGVLTESNKKFLPFQQFGRDIADTTDAVRDPQTLEILDITPCSFGGVSVITPGTNTSNQVAVLYQGVNCTEVPVAIHADQLTPTWRVYSTGSNVFQTRAGCLIGAEHVNNSYECDIPIGAGICASYQTQTNSPRRARSVASQSIIAYTMSLGAENSVAYSNNSIAIPTNFTISVTTEILPVSMTKTSVDCTMYICGDSTECSNLLLQYGSFCTQLNRALTGIAVEQDKNTQEVFAQVKQIYKTPPIKDFGGFNFSQILPDPSKPSKRSFIEDLLFNKVTLADAGFIKQYGDCLGDIAARDLICAQKFNGLTVLPPLLTDEMIAQYTSALLAGTITSGWWFGAGAALQIPFAMQMAYRFNGIGVTQNVLYENQKLIANQFNSAIGKIQDSLSSTATALGKLQDVVNQNAQALNTLVKQLSSNFGAISSVLNDILSRLDPPEAEVQIDRLITGRLQSLQTYVTQQLIRAAEIRWSANLAATKMSECVLGQSKRVDFCGKGYHLMSFPQSAPHGVVFLHVTYVPAQEKNFTTAPAICHDGKAHFPREGVFVSNGTHWFVTQRNFYEPQIITTDNTFVSGNCDVVIGIVNNTVYDPLQPELDSFKEELDKYFKNHTSPDVDLGDISGINASVVNIQKEIDRLNEVAKNLNESLIDLQELGKYEQYIK

SEQ ID NO: 1774 - protein, 1211 aa, Artificial Sequence
  SARS-CoV-2/Belgium/BC-03016/2020__EPI_ISL_415157 spike protein (1-1211)(K986P_V987P_T887W_A1020W)
MFVFLVLLPLVSSQCVNLTTRTQLPPAYTNSFTRGVYYPDKVFRSSVLHSTQDLFLPFFSNVTWFHAIHVSGTNGTKRFDNPVLPFNDGVYFASTEKSNIIRGWIFGTTLDSKTQSLLIVNNATNVVIKVCEFQFCNDPFLGVYYHKNNKSWMESEFRVYSSANNCTFEYVSQPFLMDLEGKQGNFKNLREFVFKNIDGYFKIYSKHTPINLVRDLPQGFSALEPLVDLPIGINITRFQTLLALHRSYLTPGDSSSGWTAGAAAYYVGYLQPRTFLLKYNENGTITDAVDCALDPLSETKCTLKSFTVEKGIYQTSNFRVQPTESIVRFPNITNLCPFGEVFNATRFASVYAWNRKRISNCVADYSVLYNSASFSTFKCYGVSPTKLNDLCFTNVYADSFVIRGDEVRQIAPGQTGKIADYNYKLPDDFTGCVIAWNSNNLDSKVGGNYNYLYRLFRKSNLKPFERDISTEIYQAGSTPCNGVEGFNCYFPLQSYGFQPTNGVGYQPYRVVVLSFELLHAPATVCGPKKSTNLVKNKCVNFNFNGLTGTGVLTESNKKFLPFQQFGRDIADTTDAVRDPQTLEILDITPCSFGGVSVITPGTNTSNQVAVLYQGVNCTEVPVAIHADQLTPTWRVYSTGSNVFQTRAGCLIGAEHVNNSYECDIPIGAGICASYQTQTNSPRRARSVASQSIIAYTMSLGAENSVAYSNNSIAIPTNFTISVTTEILPVSMTKTSVDCTMYICGDSTECSNLLLQYGSFCTQLNRALTGIAVEQDKNTQEVFAQVKQIYKTPPIKDFGGFNFSQILPDPSKPSKRSFIEDLLFNKVTLADAGFIKQYGDCLGDIAARDLICAQKFNGLTVLPPLLTDEMIAQYTSALLAGTITSGWWFGAGAALQIPFAMQMAYRFNGIGVTQNVLYENQKLIANQFNSAIGKIQDSLSSTAPALGKLQDVVNQNAQALNTLVKQLSSNFGAISSVLNDILSRLDPPEAEVQIDRLITGRLQSLQTYVTQQLIRAAEIRWSANLAATKMSECVLGQSKRVDFCGKGYHLMSFPQSAPHGVVFLHVTYVPAQEKNFTTAPAICHDGKAHFPREGVFVSNGTHWFVTQRNFYEPQIITTDNTFVSGNCDVVIGIVNNTVYDPLQPELDSFKEELDKYFKNHTSPDVDLGDISGINASVVNIQKEIDRLNEVAKNLNESLIDLQELGKYEQYIK

SEQ ID NO: 1775 - protein, 1211 aa, Artificial Sequence
  SARS-CoV-2/Germany/BavPat3/2020__EPI_ISL_414521 spike protein (1-1211)(K986P_V987P_T887W_A1020W)
MFVFLVLLPLVSSQCVNLTTRTQLPPAYTNSFTRGVYYPDKVFRSSVLHSTQDLFLPFFSNVTWFHAIHVSGTNGTKRFDNPVLPFNDGVYFASTEKSNIIRGWIFGTTLDSKTQSLLIVNNATNVVIKVCEFQFCNDPFLGVYYHKNNKSWMESEFRVYSSANNCTFEYVSQPFLMDLEGKQGNFKNLREFVFKNIDGYFKIYSKHTPINLVRDLPQGFSALEPLVDLPIGINITRFQTLLALHRSYLTPGDSSSGWTAGAAAYYVGYLQPRTFLLKYNENGTITDAVDCALDPLSETKCTLKSFTVEKGIYQTSNFRVQPTESIVRFPNITNLCPFGEVFNATRFASVYAWNRKRISNCVADYSVLYNSASFSTFKCYGVSPTKLNDLCFTNVYADSFVIRGDEVRQIAPGQTGKIADYNYKLPDDFTGCVIAWNSNNLDSKVGGNYNYLYRLFRKSNLKPFERDISTEIYQAGSTPCNGVEGFNCYFPLQSYGFQPTNGVGYQPYRVVVLSFELLHAPATVCGPKKSTNLVKNKCVNFNFNGLTGTGVLTESNKKFLPFQQFGRDIADTTDAVRDPQTLEILDITPCSFGGVSVITPGTNTSNQVAVLYQDVNCTEVPVAIHADQLTPTWRVYSTGSNVFQTRAGCLIGAEHVNNSYECDIPIGAGICASYQTQTNSPRRARSVASQSIIAYTMSLGAENSVAYSNNSIAIPTNFTISVTTEILPVSMTKTSVDCTMYICGDSTECSNLLLQYGSFCTQLNRALTGIAVEQDKNTQQVFAQVKQIYKTPPIKDFGGFNFSQILPDPSKPSKRSFIEDLLFNKVTLADAGFIKQYGDCLGDIAARDLICAQKFNGLTVLPPLLTDEMIAQYTSALLAGTITSGWWFGAGAALQIPFAMQMAYRFNGIGVTQNVLYENQKLIANQFNSAIGKIQDSLSSTASALGKLQDVVNQNAQALNTLVKQLSSNFGAISSVLNDILSRLDPPEAEVQIDRLITGRLQSLQTYVTQQLIRAAEIRWSANLAATKMSECVLGQSKRVDFCGKGYHLMSFPQSAPHGVVFLHVTYVPAQEKNFTTAPAICHDGKAHFPREGVFVSNGTHWFVTQRNFYEPQIITTDNTFVSGNCDVVIGIVNNTVYDPLQPELDSFKEELDKYFKNHTSPDVDLGDISGINASVVNIQKEIDRLNEVAKNLNESLIDLQELGKYEQYIK

SEQ ID NO: 1776 - protein, 1211 aa, Artificial Sequence
  SARS-CoV-2/France/HF1805/2020__EPI_ISL_414628 spike protein (1-1211)(K986P_V987P_T887W_A1020W)
MFVFLVLLPLVSSQCVNLTTRTQLPPAYTNSFTRGVYYPDKVFRSSVLHSTQDLFLPFFSNVTWFHAIHVSGTNGTKRFDNPVLPFNDGVYFASTEKSNIIRGWIFGTTLDSKTQSLLIVNNATNVVIKVCEFQFCNDPFLGVYYHKNNKSWMESEFRVYSSANNCTFEYVSQPFLMDLEGKQGNFKNLREFVFKNIDGYFKIYSKHTPINLVRDLPQGFSALEPLVDLPIGINITRFQTLLALHRSYLTPGDSSSGWTAGAAAYYVGYLQPRTFLLKYNENGTITDAVDCALDPLSETKCTLKSFTVEKGIYQTSNFRVQPTESIVRFPNITNLCPFGEVFNATRFASVYAWNRKRISNCVADYSVLYNSASFSTFKCYGVSPTKLNDLCFTNVYADSFVIRGDEVRQIAPGQTGKIADYNYKLPDDFTGCVIAWNSNNLDSKVGGNYNYLYRLFRKSNLKPFERDISTEIYQAGSTPCNGVEGFNCYFPLQSYGFQPTNGVGYQPYRVVVLSFELLHAPATVCGPKKSTNLVKNKCVNFNFNGLTGTGVLTESNKKFLPFQQFGRDIADTTDAVRDPQTLEILDITPCSFGGVSVITPGTNTSNQVAVLYQGVNCTEVPVAIHADQLTPTWRVYSTGSNVFQTRAGCLIGAEHVNNSYECDIPIGAGICASYQTQTNSPRRARSVASQSIIAYTMSLGAENSVAYSNNSIAIPTNFTISVTTEILPVSMTKTSVDCTMYICGDSTECSNLLLQYGSFCTQLNRALTGIAVEQDKNTQEVFAQVKQIYKTPPIKDFGGFNFSQILPDPSKPSKRSFIEDLLFNKVTLADAGFIKQYGDCLGDIAARDLICAQKFNGLTVLPPLLTDEMIAQYTSALLAGTITSGWWFGAGAALQIPFAMQMAYRFNGIGVTQNVLYENQKLIANQFNSAIGKIQDSLSSTASALGKLQDVVNQNAQALNTLVKQLSSNFGAISSVLNDILSRLDPPEAEVQIDRLITGRLQSLQTYVTQQLIRAAEIRWSANLAATKMSECVLGQSKRVDFCGKGYHLMSFPQSAPHGVVFLHVTYVPAQEKNFTTAPAICHDGKAHFPREGVFVSNGTHWFVTQRNFYEPQIITTDNTFVSGNCDVVIGVVNNTVYDPLQPELDSFKEELDKYFKNHTSPDVDLGDISGINASVVNIQKEIDRLNEVAKNLNESLIDLQELGKYEQYIK

SEQ ID NO: 1777 - protein, 1211 aa, Artificial Sequence
  SARS-CoV-2/Netherlands/ZuidHolland_9/2020__EPI_ISL_414445 spike protein (1-1211)(K986P_V987P_T887W_A1020W)
MFVFLVLLPLVSSQCVNLTTRTQLPPAYTNSFTRGVYYPDKVFRSSVLHSTQDLFLPFFSNVTWFHAIHVSGTNGTKRFDNPVLPFNDGVYFASTEKSNIIRGWIFGTTLDSKTQSLLIVNNATNVVIKVCEFQFCNDPFLGVYYHKNNKSWMESEFRVYSSANNCTFEYVSQPFLMDLEGKQGNFKNLREFVFKNIDGYFKIYSKHTPINLVRDLPQGFSALEPLVDLPIGINITRFQTLLALHRSYLTPGDSSSGWTAGAAAYYVGYLQPRTFLLKYNENGTITDAVDCALDPLSETKCTLKSFTVEKGIYQTSNFRVQPTESIVRFPNITNLCPFGEVFNATRFASVYAWNRKRISNCVADYSVLYNSASFSTFKCYGVSPTKLNDLCFTNVYADSFVIRGDEVRQIAPGQTGKIADYNYKLPDDFTGCVIAWNSNNLDSKVGGNYNYLYRLFRKSNLKPFERDISTEIYQAGSTPCNGVEGFNCYFPLQSYGFQPTNGVGYQPYRVVVLSFELLHAPATVCGPKKSTNLVKNKCVNFNFNGLTGTGVLTESNKKFLPFQQFGRDIADTTDAVRDPQTLEILDITPCSFGGVSVITPGTNTSNQVAVLYQGVNCTEVPVAIHADQLTPTWRVYSTGSNVFQTRAGCLIGAEHVNNSYECDIPIGAGICASYQTQTNSPRRARSVASQSIIAYTMSLGAENSVAYSNNSIAIPTNFTISVTTEILPVSMTKTSVDCTMYICGDSTECSNLLLQYGSFCTQLNRALTGIAVEQDKNTQEVFAQVKQIYKTPPIKDFGGFNFSQILPDPSKPSKRSFIEDLLFNKVTLADAGFIKQYGDCLGDIAARDLICVQKFNGLTVLPPLLTDEMIAQYTSALLAGTITSGWWFGAGAALQIPFAMQMAYRFNGIGVTQNVLYENQKLIANQFNSAIGKIQDSLSSTASALGKLQDVVNQNAQALNTLVKQLSSNFGAISSVLNDILSRLDPPEAEVQIDRLITGRLQSLQTYVTQQLIRAAEIRWSANLAATKMSECVLGQSKRVDFCGKGYHLMSFPQSAPHGVVFLHVTYVPAQEKNFTTAPAICHDGKAHFPREGVFVSNGTHWFVTQRNFYEPQIITTDNTFVSGNCDVVIGIVNNTVYDPLQPELDSFKEELDKYFKNHTSPDVDLGDISGINASVVNIQKEIDRLNEVAKNLNESLIDLQELGKYEQYIK

SEQ ID NO: 1778 - protein, 1211 aa, Artificial Sequence
  SARS-CoV-2/Finland/FIN03032020A/2020__EPI_ISL_413602 spike protein (1-1211)(K986P_V987P_T887W_A1020W)
MFVFLVLLPLVSSQCVNLTTRTQLPPAYTNSFTRGVYYPDKVFRSSVLHSTQDLFLPFFSNVTWFHAIHVSGTNGTKRFDNPVLPFNDGVYFASTEKSNIIRGWIFGTTLDSKTQSLLIVNNATNVVIKVCEFQFCNDPFLGVYYHKNNKSWMESEFRVYSSANNCTFEYVSQPFLMDLEGKQGNFKNLREFVFKNIDGYFKIYSKHTPINLVRDLPQGFSALEPLVDLPIGINITRFQTLLALHRSYLTPGDSSSGWTAGAAAYYVGYLQPRTFLLKYNENGTITDAVDCALDPLSETKCTLKSFTVEKGIYQTSNFRVQPTESIVRFPNITNLCPFGEVFNATRFASVYAWNRKRISNCVADYSVLYNSASFSTFKCYGVSPTKLNDLCFTNVYADSFVIRGDEVRQIAPGQTGKIADYNYKLPDDFTGCVISWNSNNLDSKVGGNYNYLYRLFRKSNLKPFERDISTEIYQAGSTPCNGVEGFNCYFPLQSYGFQPTNGVGYQPYRVVVLSFELLHAPATVCGPKKSTNLVKNKCVNFNFNGLTGTGVLTESNKKFLPFQQFGRDIADTTDAVRDPQTLEILDITPCSFGGVSVITPGTNTSNQVAVLYQGVNCTEVPVAIHADQLTPTWRVYSTGSNVFQTRAGCLIGAEHVNNSYECDIPIGAGICASYQTQTNSPRRARSVASQSIIAYTMSLGAENSVAYSNNSIAIPTNFTISVTTEILPVSMTKTSVDCTMYICGDSTECSNLLLQYGSFCTQLNRALTGIAVEQDKNTQEVFAQVKQIYKTPPIKDFGGFNFSQILPDPSKPSKRSFIEDLLFNKVTLADAGFIKQYGDCLGDIAARDLICAQKFNGLTVLPPLLTDEMIAQYTSALLAGTITSGWWFGAGAALQIPFAMQMAYRFNGIGVTQNVLYENQKLIANQFNSAIGKIQDSLSSTASALGKLQDVVNQNAQALNTLVKQLSSNFGAISSVLNDILSRLDPPEAEVQIDRLITGRLQSLQTYVTQQLIRAAEIRWSANLAATKMSECVLGQSKRVDFCGKGYHLMSFPQSAPHGVVFLHVTYVPAQEKNFTTAPAICHDGKAHFPREGVFVSNGTHWFVTQRNFYEPQIITTDNTFVSGNCDVVIGIVNNTVYDPLQPELDSFKEELDKYFKNHTSPDVDLGDISGINASVVNIQKEIDRLNEVAKNLNESLIDLQELGKYEQYIK

SEQ ID NO: 1779 - protein, 1211 aa, Artificial Sequence
  SARS-CoV-2/France/GE1977/2020__EPI_ISL_414632 spike protein (1-1211)(K986P_V987P_T887W_A1020W)
MFVFLVLLPLVSSQCVNLTTRTQLPPAYTNSFTRGVYYPDKVFRSSVLHSTQDLFLPFFSNVTWFHAIHVSGTNGTKRFDNPVLPFNDGVYFASTEKSNIIRGWIFGTTLDSKTQSLLIVNNATNVVIKVCEFQFCNDPFLGVYYHKNNKSWMESEFRVYSSANNCTFEYVSQPFLMDLEGKQGNFKNLREFVFKNIDGYFKIYSKHTPINLVRDLPQGFSALEPLVDLPIGINITRFQTLLALHRSYLTPGDSSSGWTAGAAAYYVGYLQPRTFLLKYNENGTITDAVDCALDPLSETKCTLKSFTVEKGIYQTSNFRVQPTESIVRFPNITNLCPFGEVFNATRFASVYAWNRKRISNCVADYSVLYNSASFSTFKCYGVSPTKLNDLCFTNVYADSFVIRGDEVRQIAPGQTGKIADYNYKLPDDFTGCVIAWNSNNLDSKVGGNYNYLYRLFRKSNLKPFERDISTEIYQAGSTPCNGVEGFNCYFPLQSYGFQPTNGVGYQPYRVVVLSFELLHAPATVCGPKKSTNLVKNKCVNFNFNGLTGTGVLTESNKKFLPFQQFGRDIADTTDAVRDPQTLEILDITPCSFGGVSVITPGTNTSNQVAVLYQGVNCTEVPVAIHADQLTPTWRVYSTGSNVFQTRAGCLIGAEHVNNSYECDIPIGAGICASYQTQTNSPRRARSVASQSIIAYTMSLGAENSVAYSNNSIAIPTNFTISVTTEILPVSMTKTSVDCTMYICGDSTECSNLLLQYGSFCTQLNRALTGIAVEQDKNTQEVFAQVKQIYKTPPIKDFGGFNFSQILPDPSKPSKRSFIEDLLFNKVTLADAGFIKQYGDCLGDIAARDLICAQKFNGLTVLPPLLTDEMIAQYTSALLAGTITSGWWFGAGAALQIPFAMQMAYRFNGIGVTQNVLYENQKLIANQFNSAIGKIQDSLFSTASALGKLQDVVNQNAQALNTLVKQLSSNFGAISSVLNDILSRLDPPEAEVQIDRLITGRLQSLQTYVTQQLIRAAEIRWSANLAATKMSECVLGQSKRVDFCGKGYHLMSFPQSAPHGVVFLHVTYVPAQEKNFTTAPAICHDGKAHFPREGVFVSNGTHWFVTQRNFYEPQIITTDNTFVSGNCDVVIGIVNNTVYDPLQPELDSFKEELDKYFKNHTSPDVDLGDISGINASVVNIQKEIDRLNEVAKNLNESLIDLQELGKYEQYIK

SEQ ID NO: 1780 - protein, 1211 aa, Artificial Sequence
  SARS-CoV-2/Finland/FIN-313/2020__EPI_ISL_414641 spike protein (1-1211)(K986P_V987P_T887W_A1020W)
MFVFLVLLPLVSSQCVNLTTRTQLPPAYTNSFTRGVYYPDKVFRSSVLHSTQDLFLPFFSNVTWFHAIHVSGTNGTKRFDNPVLPFNDGVYFASTEKSNIIRGWIFGTTLDSKTQSLLIVNNATNVVIKVCEFQFCNDPFLGVYYHKNNKSWMESEFRVYSSANNCTFEYVSQPFLMDLEGKQGNFKNLREFVFKNIDGYFKIYSKHTPINLVRDLPQGFSALEPLVDLPIGINITRFKTLLALHRSYLTPGDSSSGWTAGAAAYYVGYLQPRTFLLKYNENGTITDAVDCALDPLSETKCTLKSFTVEKGIYQTSNFRVQPTESIVRFPNITNLCPFGEVFNATRFASVYAWNRKRISNCVADYSVLYNSASFSTFKCYGVSPTKLNDLCFTNVYADSFVIRGDEVRQIAPGQTGKIADYNYKLPDDFTGCVIAWNSNNLDSKVGGNYNYLYRLFRKSNLKPFERDISTEIYQAGSTPCNGVEGFNCYFPLQSYGFQPTNGVGYQPYRVVVLSFELLHAPATVCGPKKSTNLVKNKCVNFNFNGLTGTGVLTESNKKFLPFQQFGRDIADTTDAVRDPQTLEILDITPCSFGGVSVITPGTNTSNQVAVLYQGVNCTEVPVAIHADQLTPTWRVYSTGSNVFQTRAGCLIGAEHVNNSYECDIPIGAGICASYQTQTNSPRRARSVASQSIIAYTMSLGAENSVAYSNNSIAIPTNFTISVTTEILPVSMTKTSVDCTMYICGDSTECSNLLLQYGSFCTQLNRALTGIAVEQDKNTQEVFAQVKQIYKTPPIKDFGGFNFSQILPDPSKPSKRSFIEDLLFNKVTLADAGFIKQYGDCLGDIAARDLICAQKFNGLTVLPPLLTDEMIAQYTSALLAGTITSGWWFGAGAALQIPFAMQMAYRFNGIGVTQNVLYENQKLIANQFNSAIGKIQDSLSSTASALGKLQDVVNQNAQALNTLVKQLSSNFGAISSVLNDILSRLDPPEAEVQIDRLITGRLQSLQTYVTQQLIRAAEIRWSANLAATKMSECVLGQSKRVDFCGKGYHLMSFPQSAPHGVVFLHVTYVPAQEKNFTTAPAICHDGKAHFPREGVFVSNGTHWFVTQRNFYEPQIITTDNTFVSGNCDVVIGIVNNTVYDPLQPELDSFKEELDKYFKNHTSPDVDLGDISGINASVVNIQKEIDRLNEVAKNLNESLIDLQELGKYEQYIK

SEQ ID NO: 1781 - protein, 1211 aa, Artificial Sequence
  SARS-CoV-2/Netherlands/ZuidHolland_2/2020__EPI_ISL_414556 spike protein (1-1211)(K986P_V987P_T887W_A1020W)
MFVFLVLLPLVSSQCVNLTTRTQLPPAYTNSFTRGVYYPDKVFRSSVLHSTQDLFLPFFSNVTWFHAIHVSGTNGTKRFDNPVLPFNDGVYFASTEKSNIIRGWIFGTTLDSKTQSLLIVNNATNVVIKVCEFQFCNDPFLGVYYHKNNKSWMESEFRVYSSANNCTFEYVSQPFLMDLEGKQGNFKNLREFVFKNIDGYFKIYSKHTPINLVRDLPQGFSALEPLVDLPIGINITRFQTLLALHRSYLTPGDSSSGWTAGAAAYYVGYLQPRTFLLKYNENGTITDAVDCALDPLSETKCTLKSFTVEKGIYQTSNFRVQPTESIVRFPNITNLCPFGEVFNATRFASVYAWNRKRISNCVADYSVLYNSASFSTFKCYGVSPTKLNDLCFTNVYADSFVIRGDEVRQIAPGQTGKIADYNYKLPDDFTGCVIAWNSNNLDSKVGGNYNYLYRLFRKSNLKPFERDISTEIYQAGSTPCNGVEGFNCYFPLQSYGFQPTNGVGYQPYRVVVLSFELLHAPATVCGPKKSTNLVKNKCVNFNFNGLTGTGVLTESNKKFLPFQQFGRDIADTTDAVRDPQTLEILDITPCSFGGVSVITPGTNTSNQVAVLYQGVNCTEVPVAIHADQLTPTWRVYSTGSNVFQTRAGCLIGAEHVNNSYECDIPIGAGICASYQTQTNSPRRARSVASQSIIAYTMSLGAENSVAYSNNSIAIPTNFTISVTTEILPVSMTKTSVDCTMYICGDSTECSNLLLQYGSFCTQLNRALTGIALEQDKNTQEVFAQVKQIYKTPPIKDFGGFNFSQILPDPSKPSKRSFIEDLLFNKVTLADAGFIKQYGDCLGDIAARDLICAQKFNGLTVLPPLLTDEMIAQYTSALLAGTITSGWWFGAGAALQIPFAMQMAYRFNGIGVTQNVLYENQKLIANQFNSAIGKIQDSLSSTASALGKLQDVVNQNAQALNTLVKQLSSNFGAISSVLNDILSRLDPPEAEVQIDRLITGRLQSLQTYVTQQLIRAAEIRWSANLAATKMSECVLGQSKRVDFCGKGYHLMSFPQSAPHGVVFLHVTYVPAQEKNFTTAPAICHDGKAHFPREGVFVSNGTHWFVTQRNFYEPQIITTDNTFVSGNCDVVIGIVNNTVYDPLQPELDSFKEELDKYFKNHTSPDVDLGDISGINASVVNIQKEIDRLNEVAKNLNESLIDLQELGKYEQYIK

SEQ ID NO: 1782 - protein, 1211 aa, Artificial Sequence
  SARS-CoV-2/USA/WA-UW31/2020__EPI_ISL_414618 spike protein (1-1211)(K986P_V987P_T887W_A1020W)
MFVFLVLLPLVSSQCVNLTTRTQLPPAYTNSFTRGVYYPDKVFRSSVLHSTQDLFLPFFSNVTWFHAIHVSGTNGTKRFDNPVLPFNDGVYFASTEKSNIIRGWIFGTTLDSKTQSLLIVNNATNVVIKVCEFQFCNDPFLGVYYHKNNKSWMESEFRVYSSANNCTFEYVSQPFLMDLEGKQGNFKNLREFVFKNIDGYFKIYSKHTPINLVRDLPQGFSALEPLVDLPIGINITRFQTLLALHRSYLTPGDSSSGWTAGAAAYYVGYLQPRTFLLKYNENGTITDAVDCALDPLSETKCTLKSFTVEKGIYQTSNFRVQPTESIVRFPNITNLCPFGEVFNATRFASVYAWNRKRISNCVADYSVLYNSASFSTFKCYGVSPTKLNDLCFTNVYADSFVIRGDEVRQIAPGQTGKIADYNYKLPDDFTGCVIAWNSNNLDSKVGGNYNYLYRLFRKSNLKPFERDISTEIYQAGSTPCNGAEGFNCYFPLQSYGFQPTNGVGYQPYRVVVLSFELLHAPATVCGPKKSTNLVKNKCVNFNFNGLTGTGVLTESNKKFLPFQQFGRDIADTTDAVRDPQTLEILDITPCSFGGVSVITPGTNTSNQVAVLYQDVNCTEVPVAIHADQLTPTWRVYSTGSNVFQTRAGCLIGAEHVNNSYECDIPIGAGICASYQTQTNSPRRARSVASQSIIAYTMSLGAENSVAYSNNSIAIPTNFTISVTTEILPVSMTKTSVDCTMYICGDSTECSNLLLQYGSFCTQLNRALTGIAVEQDKNTQEVFAQVKQIYKTPPIKDFGGFNFSQILPDPSKPSKRSFIEDLLFNKVTLADAGFIKQYGDCLGDIAARDLICAQKFNGLTVLPPLLTDEMIAQYTSALLAGTITSGWWFGAGAALQIPFAMQMAYRFNGIGVTQNVLYENQKLIANQFNSAIGKIQDSLSSTASALGKLQDVVNQNAQALNTLVKQLSSNFGAISSVLNDILSRLDPPEAEVQIDRLITGRLQSLQTYVTQQLIRAAEIRWSANLAATKMSECVLGQSKRVDFCGKGYHLMSFPQSAPHGVVFLHVTYVPAQEKNFTTAPAICHDGKAHFPREGVFVSNGTHWFVTQRNFYEPQIITTDNTFVSGNCDVVIGIVNNTVYDPLQPELDSFKEELDKYFKNHTSPDVDLGDISGINASVVNIQKEIDRLNEVAKNLNESLIDLQELGKYEQYIK

SEQ ID NO: 1783 - protein, 1211 aa, Artificial Sequence
  SARS-CoV-2/South Korea/SNU01/2020__EPI_ISL_411929 spike protein (1-1211)(K986P_V987P_T887W_A1020W)
MFVFLVLLPLVSSQCVNLTTRTQLPPAYTNSFTRGVYYPDKVFRSSVLHSTQDLFLPFFSNVTWFHAIHVSGTNGTKRFDNPVLPFNDGVYFASTEKSNIIRGWIFGTTLDSKTQSLLIVNNATNVVIKVCEFQFCNDPFLGVYYHKNNKSWMESEFRVYSSANNCTFEYVSQPFLMDLEGKQGNFKNLREFVFKNIDGYFKIYSKHTPINLVRDLPQGFWALEPLVDLPIGINITRFQTLLALHRSYLTPGDSSSGWTAGAAAYYVGYLQPRTFLLKYNENGTITDAVDCALDPLSETKCTLKSFTVEKGIYQTSNFRVQPTESIVRFPNITNLCPFGEVFNATRFASVYAWNRKRISNCVADYSVLYNSASFSTFKCYGVSPTKLNDLCFTNVYADSFVIRGDEVRQIAPGQTGKIADYNYKLPDDFTGCVIAWNSNNLDSKVGGNYNYLYRLFRKSNLKPFERDISTEIYQAGSTPCNGVEGFNCYFPLQSYGFQPTNGVGYQPYRVVVLSFELLHAPATVCGPKKSTNLVKNKCVNFNFNGLTGTGVLTESNKKFLPFQQFGRDIADTTDAVRDPQTLEILDITPCSFGGVSVITPGTNTSNQVAVLYQDVNCTEVPVAIHADQLTPTWRVYSTGSNVFQTRAGCLIGAEHVNNSYECDIPIGAGICASYQTQTNSPRRARSVASQSIIAYTMSLGAENSVAYSNNSIAIPTNFTISVTTEILPVSMTKTSVDCTMYICGDSTECSNLLLQYGSFCTQLNRALTGIAVEQDKNTQEVFAQVKQIYKTPPIKDFGGFNFSQILPDPSKPSKRSFIEDLLFNKVTLADAGFIKQYGDCLGDIAARDLICAQKFNGLTVLPPLLTDEMIAQYTSALLAGTITSGWWFGAGAALQIPFAMQMAYRFNGIGVTQNVLYENQKLIANQFNSAIGKIQDSLSSTASALGKLQDVVNQNAQALNTLVKQLSSNFGAISSVLNDILSRLDPPEAEVQIDRLITGRLQSLQTYVTQQLIRAAEIRWSANLAATKMSECVLGQSKRVDFCGKGYHLMSFPQSAPHGVVFLHVTYVPAQEKNFTTAPAICHDGKAHFPREGVFVSNGTHWFVTQRNFYEPQIITTDNTFVSGNCDVVIGIVNNTVYDPLQPELDSFKEELDKYFKNHTSPDVDLGDISGINASVVNIQKEIDRLNEVAKNLNESLIDLQELGKYEQYIK

SEQ ID NO: 1784 - protein, 1211 aa, Artificial Sequence
  SARS-CoV-2/China/WF0004/2020__EPI_ISL_413694 spike protein (1-1211)(K986P_V987P_T887W_A1020W)
MFVFLVLLPLVSSQCVNLTTRTQLPPAYTNSFTRGVYYPDKVFRSSVLHSTQDLFLPFFSNVTWFHAIHVSGTNGTKRFDNPVLPFNDGVYFASTEKSNIIRGWIFGTTLDSKTQSLLIVNNATNVVIKVCEFQFCNDPFLGVYYHKNNKSWTESEFRVYSSANNCTFEYVSQPFLMDLEGKQGNFKNLREFVFKNIDGYFKIYSKHTPINLVRDLPQGFSALEPLVDLPIGINITRFQTLLALHRSYLTPGDSSSGWTAGAAAYYVGYLQPRTFLLKYNENGTITDAVDCALDPLSETKCTLKSFTVEKGIYQTSNFRVQPTESIVRFPNITNLCPFGEVFNATRFASVYAWNRKRISNCVADYSVLYNSASFSTFKCYGVSPTKLNDLCFTNVYADSFVIRGDEVRQIAPGQTGKIADYNYKLPDDFTGCVIAWNSNNLDSKVGGNYNYLYRLFRKSNLKPFERDISTEIYQAGSTPCNGVEGFNCYFPLQSYGFQPTNGVGYQPYRVVVLSFELLHAPATVCGPKKSTNLVKNKCVNFNFNGLTGTGVLTESNKKFLPFQQFGRDIADTTDAVRDPQTLEILDITPCSFGGVSVITPGTNTSNQVAVLYQDVNCTEVPVAIHADQLTPTWRVYSTGSNVFQTRAGCLIGAEHVNNSYECDIPIGAGICASYQTQTNSPRRARSVASQSIIAYTMSLGAENSVAYSNNSIAIPTNFTISVTTEILPVSMTKTSVDCTMYICGDSTECSNLLLQYGSFCTQLNRALTGIAVEQDKNTQEVFAQVKQIYKTPPIKDFGGFNFSQILPDPSKPSKRSFIEDLLFNKVTLADAGFIKQYGDCLGDIAARDLICAQKFNGLTVLPPLLTDEMIAQYTSALLAGTITSGWWFGAGAALQIPFAMQMAYRFNGIGVTQNVLYENQKLIANQFNSAIGKIQDSLSSTASALGKLQDVVNQNAQALNTLVKQLSSNFGAISSVLNDILSRLDPPEAEVQIDRLITGRLQSLQTYVTQQLIRAAEIRWSANLAATKMSECVLGQSKRFDFCGKGYHLMSFPQSAPHGVVFLHVTYVPAQEKNFTTAPAICHDGKAHFPREGVFVSNGTHWFVTQRNFYEPQIITTDNTFVSGNCDVVIGIVNNTVYDPLQPELDSFKEELDKYFKNHTSPDVDLGDISGINASVVNIQKEIDRLNEVAKNLNESLIDLQELGKYEQYIK

SEQ ID NO: 1785 - protein, 1211 aa, Artificial Sequence
  SARS-CoV-2/China/WF0028/2020__EPI_ISL_413791 spike protein (1-1211)(K986P_V987P_T887W_A1020W)
MFVFLVLLPLVSSQCVNLTTRTQLPPAYTNSFTRGVYYPDKVFRSSVLHSTQDLFLPFFSNVTWFHAIHVSGTNGTKRFDNPVLPFNDGVYFASTEKSNIIRGWIFGTTLDSKTQSLLIVNNATNVVIKVCEFQFCNDPFLGVYYHKNNKSWMESEFRVYSSANNCTFEYVSQPFLMDLEGKQGNFKNLREFVFKNIDGYFKIYSKHTPINLVRDLPQGFSALEPLVDLPIGINITRFQTLLALHRSYLTPGDSSSGWTAGAAAYYVGYLQPRTFLLKYNENGTITDAVDCALDPLSETKCTLKSFTVEKGIYQTSNFRVQPTESIVRFPNITNLCPFGEVFNATRFASVYAWNRKRISNCVADYSVLYNSASFSTFKCYGVSPTKLNDLCFTNVYADSFVIRGDEVRQIAPGQTGKIADYNYKLPDDFTGCVIAWNSNNLDSKVGGNYNYLYRLFRKSNLKPFERDISTEIYQAGSTPCNGVEGFNCYFPLQSYGFQPTNGVGYQPYRVVVLSFELLHAPATVCGPKKSTNLVKNKCVNFNFNGLTGTGVLTESNKKFLPFQQFGRDIADTTDAVRDPQTLEILDITPCSFGGVSVITPGTNTSNQVAVLYQDVNCTEVPVAIHADQLTPTWRVYSTGSNVFQTRAGCLIGAEHVNNSYECDIPIGAGICASYQTQTNSPRRARSVASQSIIAYTMSLGAENSVAYSNNSIAIPTNFTISVTTEILPVSMTKTSVDCTMYICGDSTECSNLLLQYGSFCTQLNRALTGIAVEQDKNTQEVFAQVKQIYKTPPIKDFGGFNFSQILPDPSKPSKRSFIEDLLFNKVTLADAGFIKQYGDCLGDIAARDLICAQKFNGLTVLPPLLTDEMIAQYTSALLAGTITSGWWFGAGAALQIPFAMQMAYRFNGIGVTQNVLYENQKLIANQFNSAIGKIQDSLSSTASALGKLQDVVNQNAQALNTLVKQLSSNFGAISSVLNDILSRLDPPEAEVQIDRLITGRLQSLQTYVTQQLIRAAEIRWSANLAATKMSECVLGQSKRVDFCGKGYHLMSFPQSAPHGVVFLHVTYVPAQEKNFTTAPAICHDGKAHFPREGVFVSNGTHWFVTQRNFYEPQIITTDNTFVSGNCDVVIGIVNNTVYDPLQPELESFKEELDKYFKNHTSPDVDLGDISGINASVVNIQKEIDRLNEVAKNLNESLIDLQELGKYEQYIK

SEQ ID NO: 1786 - protein, 1211 aa, Artificial Sequence
  SARS-CoV-2/2019-nCoV/USA-CruiseA-18/2020__MT159716.1 spike protein (1-1211)(K986P_V987P_T887W_A1020W)
MFVFLVLLPLVSSQCVNLTTRTQLPPAYTNSFTRGVYYPDKVFRSSVLHSTQDLFLPFFSNVTWFHAIHVSGTNGTKRFDNPVLPFNDGVYFASTEKSNIIRGWIFGTTLDSKTQSLLIVNNATNVVIKVCEFQFCNDPFLGVYYHKNNKSWMESELRVYSSANNCTFEYVSQPFLMDLEGKQGNFKNLREFVFKNIDGYFKIYSKHTPINLVRDLPQGFSALEPLVDLPIGINITRFQTLLALHRSYLTPGDSSSGWTAGAAAYYVGYLQPRTFLLKYNENGTITDAVDCALDPLSETKCTLKSFTVEKGIYQTSNFRVQPTESIVRFPNITNLCPFGEVFNATRFASVYAWNRKRISNCVADYSVLYNSASFSTFKCYGVSPTKLNDLCFTNVYADSFVIRGDEVRQIAPGQTGKIADYNYKLPDDFTGCVIAWNSNNLDSKVGGNYNYLYRLFRKSNLKPFERDISTEIYQAGSTPCNGVEGFNCYFPLQSYGFQPTNGVGYQPYRVVVLSFELLHAPATVCGPKKSTNLVKNKCVNFNFNGLTGTGVLTESNKKFLPFQQFGRDIADTTDAVRDPQTLEILDITPCSFGGVSVITPGTNTSNQVAVLYQDVNCTEVPVAIHADQLTPTWRVYSTGSNVFQTRAGCLIGAEHVNNSYECDIPIGAGICASYQTQTNSPRRARSVASQSIIAYTMSLGAENSVAYSNNSIAIPTNFTISVTTEILPVSMTKTSVDCTMYICGDSTECSNLLLQYGSFCTQLNRALTGIAVEQDKNTQEVFAQVKQIYKTPPIKDFGGFNFSQILPDPSKPSKRSFIEDLLFNKVTLADAGFIKQYGDCLGDIAARDLICAQKFNGLTVLPPLLTDEMIAQYTSALLAGTITSGWWFGAGAALQIPFAMQMAYRFNGIGVTQNVLYENQKLIANQFNSAIGKIQDSLSSTASALGKLQDVVNQNAQALNTLVKQLSSNFGAISSVLNDILSRLDPPEAEVQIDRLITGRLQSLQTYVTQQLIRAAEIRWSANLAATKMSECVLGQSKRVDFCGKGYHLMSFPQSAPHGVVFLHVTYVPAQEKNFTTAPAICHDGKAHFPREGVFVSNGTHWFVTQRNFYEPQIITTDNTFVSGNCDVVIGIVNNTVYDPLQPELDSFKEELDKYFKNHTSPDVDLGDISGINASVVNIQKEIDRLNEVAKNLNESLIDLQELGKYEQYIK

SEQ ID NO: 1787 - protein, 1211 aa, Artificial Sequence
  SARS-CoV-2/SARS-CoV-2/Yunnan-01/human/2020/CHN__MT049951.1 spike protein (1-1211)(K986P_V987P_T887W_A1020W)
MFVFLVLLPLVSSQCVNLTTRTQLPPANTNSFTRGVYYPDKVFRSSVLHSTQDLFLPFFSNVTWFHAIHVSGTNGTKRFDNPVLPFNDGVYFASTEKSNIIRGWIFGTTLDSKTQSLLIVNNATNVVIKVCEFQFCNDPFLGVYYHKNNKSWMESEFRVYSSANNCTFEYVSQPFLMDLEGKQGNFKNLREFVFKNIDGYFKIYSKHTPINLVRDLPQGFSALEPLVDLPIGINITRFQTLLALHRSYLTPGDSSSGWTAGAAAYYVGYLQPRTFLLKYNENGTITDAVDCALDPLSETKCTLKSFTVEKGIYQTSNFRVQPTESIVRFPNITNLCPFGEVFNATRFASVYAWNRKRISNCVADYSVLYNSASFSTFKCYGVSPTKLNDLCFTNVYADSFVIRGDEVRQIAPGQTGKIADYNYKLPDDFTGCVIAWNSNNLDSKVGGNYNYLYRLFRKSNLKPFERDISTEIYQAGSTPCNGVEGFNCYFPLQSYGFQPTNGVGYQPYRVVVLSFELLHAPATVCGPKKSTNLVKNKCVNFNFNGLTGTGVLTESNKKFLPFQQFGRDIADTTDAVRDPQTLEILDITPCSFGGVSVITPGTNTSNQVAVLYQDVNCTEVPVAIHADQLTPTWRVYSTGSNVFQTRAGCLIGAEHVNNSYECDIPIGAGICASYQTQTNSPRRARSVASQSIIAYTMSLGAENSVAYSNNSIAIPTNFTISVTTEILPVSMTKTSVDCTMYICGDSTECSNLLLQYGSFCTQLNRALTGIAVEQDKNTQEVFAQVKQIYKTPPIKDFGGFNFSQILPDPSKPSKRSFIEDLLFNKVTLADAGFIKQYGDCLGDIAARDLICAQKFNGLTVLPPLLTDEMIAQYTSALLAGTITSGWWFGAGAALQIPFAMQMAYRFNGIGVTQNVLYENQKLIANQFNSAIGKIQDSLSSTASALGKLQDVVNQNAQALNTLVKQLSSNFGAISSVLNDILSRLDPPEAEVQIDRLITGRLQSLQTYVTQQLIRAAEIRWSANLAATKMSECVLGQSKRVDFCGKGYHLMSFPQSAPHGVVFLHVTYVPAQEKNFTTAPAICHDGKAHFPREGVFVSNGTHWFVTQRNFYEPQIITTDNTFVSGNCDVVIGIVNNTVYDPLQPELDSFKEELDKYFKNHTSPDVDLGDISGINASVVNIQKEIDRLNEVAKNLNESLIDLQELGKYEQYIK

SEQ ID NO: 1788 - protein, 1211 aa, Artificial Sequence
  SARS-CoV-2/USA/WA-UW292/2020__EPI_ISL_418077 spike protein (1-1211)(K986P_V987P_T887W_A1020W)
MFVFLVLLPLVSSQCVNLTTRTQLPPAYTNSFTRGVYYPDKVFRSSVLHSTQDLFLPFFSNVTWFHAIHVSGTNGTKRFDNPVLPFNDGVYFASTEKSNIIRGWIFGTTLDSKTQSLLIVNNATNVVIKVCEFQFCNDPFLGVYYHKNNKSWMESEFRVYSSANNCTFEYVSQPFLMDLEGKQGNFKNLREFVFKNIDGYFKIYSKHTPINLVRDLPQGFSALEPLVDLPIGINITRFQTLLALHRSYLTPGDSSSGWTAGAAAYYVGYLQPRTFLLKYNENGTITDAVDCALDPLSETKCTLKSFTVEKGIYQTSNFRVQPTESIVRFPNITNLCPFGEVFNATRFASVYAWNRKRISNCVADYSVLYNSASFSTFKCYGVSPTKLNDLCFTNVYADSFVIRGDEVRQIAPGQTGKIADYNYKLPDDFTGCVIAWNSNNLDSKVGGNYNYLYRLFRKSNLKPFERDISTEIYQASSTPCNGVEGFNCYFPLQSYGFQPTNGVGYQPYRVVVLSFELLHAPATVCGPKKSTNLVKNKCVNFNFNGLTGTGVLTESNKKFLPFQQFGRDIADTTDAVRDPQTLEILDITPCSFGGVSVITPGTNTSNQVAVLYQDVNCTEVPVAIHADQLTPTWRVYSTGSNVFQTRAGCLIGAEHVNNSYECDIPIGAGICASYQTQTNSPRRARSVASQSIIAYTMSLGAENSVAYSNNSIAIPTNFTISVTTEILPVSMTKTSVDCTMYICGDSTECSNLLLQYGSFCTQLNRALTGIAVEQDKNTQEVFAQVKQIYKTPPIKDFGGFNFSQILPDPSKPSKRSFIEDLLFNKVTLADAGFIKQYGDCLGDIAARDLICAQKFNGLTVLPPLLTDEMIAQYTSALLAGTITSGWWFGAGAALQIPFAMQMAYRFNGIGVTQNVLYENQKLIANQFNSAIGKIQDSLSSTASALGKLQDVVNQNAQALNTLVKQLSSNFGAISSVLNDILSRLDPPEAEVQIDRLITGRLQSLQTYVTQQLIRAAEIRWSANLAATKMSECVLGQSKRVDFCGKGYHLMSFPQSAPHGVVFLHVTYVPAQEKNFTTAPAICHDGKAHFPREGVFVSNGTHWFVTQRNFYEPQIITTDNTFVSGNCDVVIGIVNNTVYDPLQPELDSFKEELDKYFKNHTSPDVDLGDISGINASVVNIQKEIDRLNEVAKNLNESLIDLQELGKYEQYIK

SEQ ID NO: 1789 - protein, 1211 aa, Artificial Sequence
  SARS-CoV-2/Iceland/192/2020__EPI_ISL_417819 spike protein (1-1211)(K986P_V987P_T887W_A1020W)
MFVFFVLLPLVSSQCVNLTTRTQLPPAYTNSFTRGVYYPDKVFRSSVLHSTQDLFLPFFSNVTWFHAIHVSGTNGTKRFDNPVLPFNDGVYFASTEKSNIIRGWIFGTTLDSKTQSLLIVNNATNVVIKVCEFQFCNDPFLGVYYHKNNKSWMESEFRVYSSANNCTFEYVSQPFLMDLEGKQGNFKNLREFVFKNIDGYFKIYSKHTPINLVRDLPQGFSALEPLVDLPIGINITRFQTLLALHRSYLTPGDSSSGWTAGAAAYYVGYLQPRTFLLKYNENGTITDAVDCALDPLSETKCTLKSFTVEKGIYQTSNFRVQPTESIVRFPNITNLCPFGEVFNATRFASVYAWNRKRISNCVADYSVLYNSASFSTFKCYGVSPTKLNDLCFTNVYADSFVIRGDEVRQIAPGQTGKIADYNYKLPDDFTGCVIAWNSNNLDSKVGGNYNYLYRLFRKSNLKPFERDISTEIYQAGSTPCNGVEGFNCYFPLQSYGFQPTNGVGYQPYRVVVLSFELLHAPATVCGPKKSTNLVKNKCVNFNFNGLTGTGVLTESNKKFLPFQQFGRDIADTTDAVRDPQTLEILDITPCSFGGVSVITPGTNTSNQVAVLYQGVNCTEVPVAIHADQLTPTWRVYSTGSNVFQTRAGCLIGAEHVNNSYECDIPIGAGICASYQTQTNSPRRARSVASQSIIAYTMSLGAENSVAYSNNSIAIPTNFTISVTTEILPVSMTKTSVDCTMYICGDSTECSNLLLQYGSFCTQLNRALTGIAVEQDKNTQEVFAQVKQIYKTPPIKDFGGFNFSQILPDPSKPSKRSFIEDLLFNKVTLADAGFIKQYGDCLGDIAARDLICAQKFNGLTVLPPLLTDEMIAQYTSALLAGTITSGWWFGAGAALQIPFAMQMAYRFNGIGVTQNVLYENQKLIANQFNSAIGKIQDSLSSTASALGKLQDVVNQNAQALNTLVKQLSSNFGAISSVLNDILSRLDPPEAEVQIDRLITGRLQSLQTYVTQQLIRAAEIRWSANLAATKMSECVLGQSKRVDFCGKGYHLMSFPQSAPHGVVFLHVTYVPAQEKNFTTAPAICHDGKAHFPREGVFVSNGTHWFVTQRNFYEPQIITTDNTFVSGNCDVVIGIVNNTVYDPLQPELDSFKEELDKYFKNHTSPDVDLGDISGINASVVNIQKEIDRLNEVAKNLNESLIDLQELGKYEQYIK

SEQ ID NO: 1790 - protein, 1211 aa, Artificial Sequence
  SARS-CoV-2/Belgium/ULG-6939/2020__EPI_ISL_417020 spike protein (1-1211)(K986P_V987P_T887W_A1020W)
MFVFLVLLPLVSSQCVNLTTRTQLPPAYTNSFTRGVYYPDKVFRSSVLHSTQDLFLPFFSNVTWFHAIHVSGTNGTKRFDNPVLPFNDGVYFASTEKSNIIRGWIFGTTLDSKTQSLLIVNNATNVVIKVCEFQFCNDPFLGVYYHKNNKSWMESEFRVYSSANNCTFEYVSQPFLMDLEGKQGNFKNLREFVFKNIDGYFKIYSKHTPINLVRDLPQGFSALEPLVDLPIGINITRFQTLLALHRSYLTPGDSSSGWTAGAAAYYVGYLQPRTFLLKYNENGTITDAVDCALDPLSETKCTLKSFTVEKGIYQTSNFRVQPTESIVRFPNITNLCPFGEVFNATRFASVYAWNRKRISNCVADYSVLYNSASFSTFKCYGVSPTKLNDLCFTNVYADSFVIRGDEVRQIAPGQTGKIADYNYKLPDDFTGCVIAWNSNNLDSKVGGNYNYLYRLFRKSNLKPFERDISTEIYQAGSTPCNGVEGFNCYFPLQSYGFQPTNGVGYQPYRVVVLSFELLHAPATVCGPKKSTNLVKNKCVNFNFNGLTGTGVLTESNKKFLPFQQFGRDIADTTDAVRDPQTLEILDITPCSFGGVSVITPGTNTSNQVAVLYQGVNCTEVPVAIHADQLTPTWRVYSTGSNVFQTRAGCLIGAEHVNNSYECDIPIGAGICASYQTQTNSPRRARSVASQSIIAYTMSLGAENSVVYSNNSIAIPTNFTISVTTEILPVSMTKTSVDCTMYICGDSTECSNLLLQYGSFCTQLNRALTGIAVEQDKNTQEVFAQVKQIYKTPPIKDFGGFNFSQILPDPSKPSKRSFIEDLLFNKVTLADAGFIKQYGDCLGDIAARDLICAQKFNGLTVLPPLLTDEMIAQYTSALLAGTITSGWWFGAGAALQIPFAMQMAYRFNGIGVTQNVLYENQKLIANQFNSAIGKIQDSLSSTASALGKLQDVVNQNAQALNTLVKQLSSNFGAISSVLNDILSRLDPPEAEVQIDRLITGRLQSLQTYVTQQLIRAAEIRWSANLAATKMSECVLGQSKRVDFCGKGYHLMSFPQSAPHGVVFLHVTYVPAQEKNFTTAPAICHDGKAHFPREGVFVSNGTHWFVTQRNFYEPQIITTDNTFVSGNCDVVIGIVNNTVYDPLQPELDSFKEELDKYFKNHTSPDVDLGDISGINASVVNIQKEIDRLNEVAKNLNESLIDLQELGKYEQYIK

SEQ ID NO: 1791 - protein, 1211 aa, Artificial Sequence
  SARS-CoV-2/France/HF2496/2020__EPI_ISL_418231 spike protein (1-1211)(K986P_V987P_T887W_A1020W)
MFVFLVLLPLVSSQCVNLTTRTQLPPAYTNSFTRGVYYPDKVFRSSVLHSTQDLFLPFFSNVTWFHAIHVSGTNGTKRFDNPVLPFNDGVYFASTEKSNIIRGWIFGTTLDSKTQSLLIVNNATNVVIKVCEFQFCNDPFLGVYYHKNNKSWMESEFRVYSSANNCTFEYVSQPFLMDLEGKQGNFKNLREFVFKNIDGYFKIYSKHTPINLVRDLPQGFSALEPLVDLPIGINITRFQTLLALHRSYLTPGDSSSGWTAGAAAYYVGYLQPRTFLLKYNENGTITDAVDCALDPLSETKCTLKSFTVEKGIYQTSNFRVQPTESIVRFPNITNLCPFGEVFNATRFASVYAWNRKRISNCVADYSVLYNSASFSTFKCYGVSPTKLNDLCFTNVYADSFVIRGDEVRQIAPGQTGKIADYNYKLPDDFTGCVIAWNSNNLDSKVGGNYNYLYRLFRKSNLKPFERDISTEIYQAGSTPCNGVEGFNCYFPLQSYGFQPTNGVGYQPYRVVVLSFELLHAPATVCGPKKSTNLVKNKCVNFNFNGLTGTGVLTESNKKFLPFQQFGRDIADTTDAVRDPQTLEILDITPCSFGGVSVITPGTNTSNQVAVLYQGVNCTEVPVAIHADQLTPTWRVYSTGSNVFQTRAGCLIGAEHVNNSYECDIPIGAGICASYQTQTNSPRRARSVASQSIIAYTMSLGAENSVAYSNNSIAIPTNFTISVTTEILPVSMTKTSVDCTMYICGDSTECSNLLLQYGSFCTQLNRALTGIAVEQDKNTQEVFAQVKQIYKTPPIKDFGGFNFSQILPDPSKPSKRSFIEDLLFNKVTLADAGFIKQYGDCLGDIVARDLICAQKFNGLTVLPPLLTDEMIAQYTSALLAGTITSGWWFGAGAALQIPFAMQMAYRFNGIGVTQNVLYENQKLIANQFNSAIGKIQDSLSSTASALGKLQDVVNQNAQALNTLVKQLSSNFGAISSVLNDILSRLDPPEAEVQIDRLITGRLQSLQTYVTQQLIRAAEIRWSANLAATKMSECVLGQSKRVDFCGKGYHLMSFPQSAPHGVVFLHVTYVPAQEKNFTTAPAICHDGKAHFPREGVFVSNGTHWFVTQRNFYEPQIITTDNTFVSGNCDVVIGIVNNTVYDPLQPELDSFKEELDKYFKNHTSPDVDLGDISGINASVVNIQKEIDRLNEVAKNLNESLIDLQELGKYEQYIK

SEQ ID NO: 1792 - protein, 1211 aa, Artificial Sequence
  SARS-CoV-2/USA/WA-UW291/2020__EPI_ISL_418076 spike protein (1-1211)(K986P_V987P_T887W_A1020W)
MFVFLVLLPLVSSQCVNLTTRTQLPPAYTNSFTRGVYYPDKVFRSSVLHSTQDLFLPFFSNVTWFHAIHVSGTNGTKRFDNPVLPFNDGVYFASTEKSNIIRGWIFGTTLDSKTQSLLIVNNATNVVIKVCEFQFCNDPFLGVYYHKNNKSWMESEFRVYSSANNCTFEYVSQPFLMDLEGKQGNFKNLREFVFKNIDGYFKIYSKHTPINLVRDLPQGFSALEPLVDLPIGINITRFQTLLALHRSYLTPGDSSSGWTAGAAAYYVGYLQPRTFLLKYNENGTITDAVDCALDPLSETKCTLKSFTVEKGIYQTSNFRVQPTESIVRFPNITNLCPFGEVFNATRFASVYAWNRKRISNCVADYSVLYNSASFSTFKCYGVSPTKLNDLCFTNVYADSFVIRGDEVRQIAPGQTGKIADYNYKLPDDFTGCVIAWNSNNLDSKVGGNYNYLYRLFRKSNLKPFERDISTEIYQAGSTPCNGVEGFNCYFPLQSYGFQPTNGVGYQPYRVVVLSFELLHAPATVCGPKKSTNLVKNKCVNFNFNGLTGTGVLTESNKKFLPFQQFGRDIADTTDAVRDPQTLEILDITPCSFGGVSVITPGTNTSNQVAVLYQGVNCTEVPVAIHADQLTPTWRVYSTGSNVFQTRAGCLIGAEHVNNSYECDIPIGAGICASYQTQTNSPRRARSVASQSIIAYTMSLGAENSVAYSNNSIAIPTNFTISVTTEILPVSMTKTSVDCTMYICGDSTECSNLLLQYGSFCTQLNRALTGIAVEQDKNTQEVFAQVKQIYKTPPIKDFGGFNFSQILPDPSKPSKRSFIEDLLFNKVTLADAGFIKQYGDCLGDIAARDLICAQKFNGLTVLPPLLTDEMIAQYTSALLAGTITSGWWFGAGAALQIPFAMQMAYRFNGIGVTQNVLYENQKLIANQFNSAIGKIQYSLSSTASALGKLQDVVNQNAQALNTLVKQLSSNFGAISSVLNDILSRLDPPEAEVQIDRLITGRLQSLQTYVTQQLIRAAEIRWSANLAATKMSECVLGQSKRVDFCGKGYHLMSFPQSAPHGVVFLHVTYVPAQEKNFTTAPAICHDGKAHFPREGVFVSNGTHWFVTQRNFYEPQIITTDNTFVSGNCDVVIGIVNNTVYDPLQPELDSFKEELDKYFKNHTSPDVDLGDISGINASVVNIQKEIDRLNEVAKNLNESLIDLQELGKYEQYIK

SEQ ID NO: 1793 - protein, 1211 aa, Artificial Sequence; identical to SEQ ID NO: 1756
  SARS-CoV-2/Portugal/PT0034/2020__EPI_ISL_418019 spike protein (1-1211)(K986P_V987P_T887W_A1020W)

SEQ ID NO: 1794 - protein, 1211 aa, Artificial Sequence
  SARS-CoV-2/Iceland/202/2020__EPI_ISL_417750 spike protein (1-1211)(K986P_V987P_T887W_A1020W)
MFVFLVLLPLVSSQCVNLTTRTQLPPAYTNSFTRGVYYPDKVFRSSVLHSTQDLFLPFFSNVTWFHAIHVSGTNGTKRFDNPVLPFNDGVYFASTEKSNIIRGWIFGTTLDSKTQSLLIVNNATNVVIKVCEFQFCNDPFLGVYYHKNNKSWMESEFRVYSSANNCTFEYVSQPFLMDLEGKQGNFKNLREFVFKNIDGYFKIYSKHTPINLVRDLPQGFSALEPLVDLPIGINITRFQTLLALHRSYLTPGDSSSGWTAGAAAYYVGYLQPRTFLLKYNENGTITDAVDCALDPLSETKCTLKSFTVEKGIYQTSNFRVQPTESIVRFPNITNLCPFGEVFNATRFASVYAWNRKRISNCVADYSVLYNSASFSTFKCYGVSPTKLNDLCFTNVYADSFVIRGDEVRQIAPGQTGKIADYNYKLPDDFTGCVIAWNSNNLDSKVGGNYNYLYRLFRKSNLKPFERDISTEIYQAGSTPCNGVEGFNCYFPLQSYGFQPTNGVGYQPYRVVVLSFELLHAPATVCGPKKSTNLVKNKCVNFNFNGLTGTGVLTESNKKFLPFQQFGRDIADTTDAVRDPQTLEILDITPCSFGGVSVITPGTNTSNQVAVLYQDVNCTEVPVAIHADQLTPTWRVYSTGSNVFQTRAGCLIGAEHVNNSYECDIPIGAGICASYQTQTNSPRRARSVASQSIIAYTMSLGAENSVAYSNNSIAIPTNFTISVTTEILPVSMTKTSVDCTMYICGDSTECSNLLLQYGSFCTQLNRALTGIAVEQDKNTQEVFAQVKQIYKTPPIKDFGGFNFSQILPDPSKPSKRSFIEDLLFNKVTLADAGFIKQYGDCLGDIAARDLICAQKFNGLTVLPPLLTDEMIAQYTSALLAGTITSGWWFGAGAALQIPFAMQMAYRFNGIGVTQNVLYENQKLIANQFNSAIGKIQDSLSSTASALGKLQDVVNQNAQALNTLVKQLSSNFGAISSVLNDILSRLDPPEAEVQIDRLITGRLQSLQTYVTQQLIRAAEIRWSANLAATKMSECVLGQSKRVDFCGKGYHLMSFPQSAPHGVVFLHVTYVPAQEKNFTTAPAICHDGKAHFPREGVFVSNGTHWFVTQRNFYEPQIITTDNTFVSGNCDVVIGIVNNTVYDPLQPELDSFKEELDKYFKNHTSPDVDLGDIPGINASVVNIQKEIDRLNEVAKNLNESLIDLQELGKYEQYIK

SEQ ID NO: 1795 - protein, 1211 aa, Artificial Sequence
  SARS-CoV-2/USA/WA-UW261/2020__EPI_ISL_418046 spike protein (1-1211)(K986P_V987P_T887W_A1020W)
MFVFLVLLPLVSSQCVNLTTRTQLPPAYTNSFTRGVYYPDKVFRSSVLHSTQDLFLPFFSNVTWFHAIHVSGTNGTKRFDNPVLPFNDGVYFASTEKSNIIRGWIFGTTLDSKTQSLLIVNNATNVVIKVCEFQFCNDPFLGVYYHKNNKSWMESEFRVYSSANNCTFEYVSQPFLMDLEGKQGNFKNLREFVFKNIDGYFKIYSKHTPINLVRDLPQGFSALEPLVDLPIGINITRFQTLLALHRSYLTPGDSSSGWTAGAAAYYVGYLQPRTFLLKYNENGTITDAVDCALDPLSETKCTLKSFTVEKGIYQTSNFRVQPTESIVRFPNITNLCPFGEVFNATRFTSVYAWNRKRISNCVADYSVLYNSASFSTFKCYGVSPTKLNDLCFTNVYADSFVIRGDEVRQIAPGQTGKIADYNYKLPDDFTGCVIAWNSNNLDSKVGGNYNYLYRLFRKSNLKPFERDISTEIYQAGSTPCNGVEGFNCYFPLQSYGFQPTNGVGYQPYRVVVLSFELLHAPATVCGPKKSTNLVKNKCVNFNFNGLTGTGVLTESNKKFLPFQQFGRDIADTTDAVRDPQTLEILDITPCSFGGVSVITPGTNTSNQVAVLYQDVNCTEVPVAIHADQLTPTWRVYSTGSNVFQTRAGCLIGAEHVNNSYECDIPIGAGICASYQTQTNSPRRARSVASQSIIAYTMSLGAENSVAYSNNSIAIPTNFTISVTTEILPVSMTKTSVDCTMYICGDSTECSNLLLQYGSFCTQLNRALTGIAVEQDKNTQEVFAQVKQIYKTPPIKDFGGFNFSQILPDPSKPSKRSFIEDLLFNKVTLADAGFIKQYGDCLGDIAARDLICAQKFNGLTVLPPLLTDEMIAQYTSALLAGTITSGWWFGAGAALQIPFAMQMAYRFNGIGVTQNVLYENQKLIANQFNSAIGKIQDSLSSTASALGKLQDVVNQNAQALNTLVKQLSSNFGAISSVLNDILSRLDPPEAEVQIDRLITGRLQSLQTYVTQQLIRAAEIRWSANLAATKMSECVLGQSKRVDFCGKGYHLMSFPQSAPHGVVFLHVTYVPAQEKNFTTAPAICHDGKAHFPREGVFVSNGTHWFVTQRNFYEPQIITTDNTFVSGNCDVVIGIVNNTVYDPLQPELDSFKEELDKYFKNHTSPDVDLGDISGINASVVNIQKEIDRLNEVAKNLNESLIDLQELGKYEQYIK

SEQ ID NO: 1796 - protein, 1211 aa, Artificial Sequence
  SARS-CoV-2/Portugal/PT0035/2020__EPI_ISL_418020 spike protein (1-1211)(K986P_V987P_T887W_A1020W)
MFVFLVLLPLVSSQCVNLTTRTQLPPAYTNSFTRGVYYPDKVFRSSVLHSTQDLFLPFFSNVTWFHAIHVSGTNGTKRFDNPVLPFNDGVYFASTEKSNIIRGWIFGTTLDSKTQSLLIVNNATNVVIKVCEFQFCNDPFLGVYYHKNNKSWMESEFRVYSSANNCTFEYVSQPFLMDLEGKQGNFKNLREFVFKNIDGYFKIYSKHTPINLVRDLPQGFSALEPLVDLPIGINITRFQTLLALHRSYLTPGDSSSGWTAGAAAYYVGYLQPRTFLLKYNENGTITDAVDCALDPLSETKCTLKSFTVEKGIYQTSNFRVQPTESIVRFPNITNLCPFGEVFNATRFASVYAWNRKRISNCVADYSVLYNSASFSTFKCYGVSPTKLNDLCFTNVYADSFVIRGDEVRQIAPGQTGKIADYNYKLPDDFTGCVIAWNSNNLDSKVGGNYNYLYRLFRKSNLKPFERDISTEIYQAGSTPCNGVEGFNCYFPLQSYGFQPTNGVGYQPYRVVVLSFELLHAPATVCGPKKSTNLVKNKCVNFNFNGLTGTGVLTESNKKFLPFQQFGRDIADTTDAVRDPQTLEILDITPCSFGGVSVITPGTNTSNQVAVLYQDVNCTEVPVAIHADQLTPTWRVYSTGSNVFQTRAGCLIGAEHVNNSYECDIPIGAGICASYQTQTNSPRRARSVASQSIIAYTMSLGAENSVAYSNNSIAIPTNFTISVTTEILPVSMTKTSVDCTMYICGDSTECSNLLLQYGSFCTQLNRALTGIAVEQDKNTQEVFAQVKQIYKTPPIKDFGGFNFSQILPDPSKPSKRSFIEDLLFNKVTLADAGFIKQYGDCLGDISARDLICAQKFNGLTVLPPLLTDEMIAQYTSALLAGTITSGWWFGAGAALQIPFAMQMAYRFNGIGVTQNVLYENQKLIANQFNSAIGKIQDSLSSTASALGKLQDVVNQNAQALNTLVKQLSSNFGAISSVLNDILSRLDPPEAEVQIDRLITGRLQSLQTYVTQQLIRAAEIRWSANLAATKMSECVLGQSKRVDFCGKGYHLMSFPQSAPHGVVFLHVTYVPAQEKNFTTAPAICHDGKAHFPREGVFVSNGTHWFVTQRNFYEPQIITTDNTFVSGNCDVVIGIVNNTVYDPLQPELDSFKEELDKYFKNHTSPDVDLGDISGINASVVNIQKEIDRLNEVAKNLNESLIDLQELGKYEQYIK

SEQ ID NO: 1797 - protein, 1211 aa, Artificial Sequence
  SARS-CoV-2/USA/NY-NYUMC7/2020__EPI_ISL_418192 spike protein (1-1211)(K986P_V987P_T887W_A1020W)
MFVFLVLLPLVSSQCVNLTTRTQLPPAYTNSFTRGVYYPDKVFRSSVLHSTQDLFLPFFSNVTWFHAIHVSGTNGTKRFDNPVLPFNDGVYFASTEKSNIIRGWIFGTTLDSKTQSLLIVNNATNVVIKVCEFQFCNDPFLGVYHHKNNKSWMESEFRVYSSANNCTFEYVSQPFLMDLEGKQGNFKNLREFVFKNIDGYFKIYSKHTPINLVRDLPQGFSALEPLVDLPIGINITRFQTLLALHRSYLTPGDSSSGWTAGAAAYYVGYLQPRTFLLKYNENGTITDAVDCALDPLSETKCTLKSFTVEKGIYQTSNFRVQPTESIVRFPNITNLCPFGEVFNATRFASVYAWNRKRISNCVADYSVLYNSASFSTFKCYGVSPTKLNDLCFTNVYADSFVIRGDEVRQIAPGQTGKIADYNYKLPDDFTGCVIAWNSNNLDSKVGGNYNYLYRLFRKSNLKPFERDISTEIYQAGSTPCNGVEGFNCYFPLQSYGFQPTNGVGYQPYRVVVLSFELLHAPATVCGPKKSTNLVKNKCVNFNFNGLTGTGVLTESNKKFLPFQQFGRDIADTTDAVRDPQTLEILDITPCSFGGVSVITPGTNTSNQVAVLYQGVNCTEVPVAIHADQLTPTWRVYSTGSNVFQTRAGCLIGAEHVNNSYECDIPIGAGICASYQTQTNSPRRARSVASQSIIAYTMSLGAENSVAYSNNSIAIPTNFTISVTTEILPVSMTKTSVDCTMYICGDSTECSNLLLQYGSFCTQLNRALTGIAVEQDKNTQEVFAQVKQIYKTPPIKDFGGFNFSQILPDPSKPSKRSFIEDLLFNKVTLADAGFIKQYGDCLGDIAARDLICAQKFNGLTVLPPLLTDEMIAQYTSALLAGTITSGWWFGAGAALQIPFAMQMAYRFNGIGVTQNVLYENQKLIANQFNSAIGKIQDSLSSTASALGKLQDVVNQNAQALNTLVKQLSSNFGAISSVLNDILSRLDPPEAEVQIDRLITGRLQSLQTYVTQQLIRAAEIRWSANLAATKMSECVLGQSKRVDFCGKGYHLMSFPQSAPHGVVFLHVTYVPAQEKNFTTAPAICHDGKAHFPREGVFVSNGTHWFVTQRNFYEPQIITTDNTFVSGNCDVVIGIVNNTVYDPLQPELDSFKEELDKYFKNHTSPDVDLGDISGINASVVNIQKEIDRLNEVAKNLNESLIDLQELGKYEQYIK

SEQ ID NO: 1798 - protein, 1211 aa, Artificial Sequence
  SARS-CoV-2/Iceland/189/2020__EPI_ISL_417709 spike protein (1-1211)(K986P_V987P_T887W_A1020W)
MFVFLVLLPLVSSQCVNLTTRTQLPPAYTNSFTRGVYYPDKVFRSSVLHSTQDLFLPFFSNVTWFHAIHVSGTNGTKRFDNPVLPFNDGVYFASTEKSNIIRGWIFGTTLDSKTQSLLIVNNATNVVIKVCEFQFCNDPFLGVYYHKNNKSWMESEFRVYSSANNCTFEYVSQPFLMDLEGKQGNFKNLREFVFKNIDGYFKIYSKHTPINLVRDLPQGFSALEPLVDLPIGINITRFQTLLALHRSYLTPGDSSSGWTAGAAAYYVGYLQPRTFLLKYNENGTITDAVDCALDPLSETKCTLKSFTVEKGIYQTSNFRVQPTESIVRFPNITNLCPFGEVFNATRFASVYAWNRKRISNCVADYSVLYNSASFSTFKCYGVSPTKLNDLCFTNVYADSFVIRGDEVRQIAPGQTGKIADYNYKLPDDFTGCVIAWNSNNLDSKVGGNYNYLYRLFRKSNLKPFERDISTEIYQAGSTPCNGVEGFNCYFPLQSYGFQPTNGVGYQPYRVVVLSFELLHAPATVCGPKKSTNLVKNKCVNFNFNGLTGTGVLTESNKKFLPFQQFGRDIADTTDAVRDPQTLEILDITPCSFGGVSVITPGTNTSNQVAVLYQGVNCTEVPVAIHADQLTPTWRVYSTGSNVFQTRAGCLIGAEHVNNSYECDIPIGAGICASYQTQTNSPRRARSVASQSIIAYTMSLGAENSVAYSNNSIAIPTNFTISVTTEILPVSMTKTSVDCTMYICGDSTECSNLLLQYGSFCTQLNRALTGIAVEQDKNTQEVFAQVKQIYKTPPIKDFGGFNFSQILPDPSKPSKRSFIEDLLFNKVTLADAGFTKQYGDCLGDIAARDLICAQKFNGLTVLPPLLTDEMIAQYTSALLAGTITSGWWFGAGAALQIPFAMQMAYRFNGIGVTQNVLYENQKLIANQFNSAIGKIQDSLSSTASALGKLQDVVNQNAQALNTLVKQLSSNFGAISSVLNDILSRLDPPEAEVQIDRLITGRLQSLQTYVTQQLIRAAEIRWSANLAATKMSECVLGQSKRVDFCGKGYHLMSFPQSAPHGVVFLHVTYVPAQEKNFTTAPAICHDGKAHFPREGVFVSNGTHWFVTQRNFYEPQIITTDNTFVSGNCDVVIGIVNNTVYDPLQPELDSFKEELDKYFKNHTSPDVDLGDISGINASVVNIQKEIDRLNEVAKNLNESLIDLQELGKYEQYIK

SEQ ID NO: 1799 - protein, 1211 aa, Artificial Sequence
  SARS-CoV-2/Australia/NSW56/2020__EPI_ISL_417408 spike protein (1-1211)(K986P_V987P_T887W_A1020W)
MFVFLVLLPLVSSQCVNLTTRTQLPPAYTNSFTRGVYYPDKVFRSSVLHSTQDLFLPFFSNVTWFHAIHVSGTNGTKRFDNPVLPFNDGVYFASTEKSNIIRGWIFGTTLDSKTQSLLIVNNATNVVIKVCEFQFCNDPFLGVYYHKNNKSWMESEFRVYSSANNCTFEYVSQPFLMDLEGKQGNFKNLREFVFKNIDGYFKIYSKHTPINLVRDLPQGFSALEPLVDLPIGINITRFQTLLALHRSYLTPGDSSSGWTAGAAAYYVGYLQPRTFLLKYNENGTITDAVDCALDPLSETKCTLKSFTVEKGIYQTSNFRVQPTESIVRFPNITNLCPFGEVFNATRFASVYAWNRKRISNCVADYSVLYNSASFSTFKCYGVSPTKLNDLCFTNVYADSFVIRGDEVRQIAPGQTGKIADYNYKLPDDFTGCVIAWNSNNLDSKVGGNYNYLYRLFRKSNLKPFERDISTEIYQAGSTPCNGVEGFNCYFPLQSYGFQPTNGVGYQPYRVVVLSFELLHAPATVCGPKKSTNLVKNKCVNFNFNGLTGTGVLTESNKKFLPFQQFGRDIADTTDAVRDPQTLEILDITPCSFGGVSVITPGTNTSNQVAVLYQDVNCTEVPVAIHADQLTPTWRVYSTGSNVFQTRAGCLIGAEHVNNSYECDIPIGAGICASYQTQTNSPRRARSVASQSIIAYTMSLGAENSVAYSNNSIAIPTNFTISVTTEILPVSMTKTSVDCTMYICGDSTECSNLLLQYGSFCTQLNRALTGIAVEQDKNTQEVFAQVKQIYKTPPIKDFGGFNFSQILPDSSKPSKRSFIEDLLFNKVTLADAGFIKQYGDCLGDIAARDLICAQKFNGLTVLPPLLTDEMIAQYTSALLAGTITSGWWFGAGAALQIPFAMQMAYRFNGIGVTQNVLYENQKLIANQFNSAIGKIQDSLSSTASALGKLQDVVNQNAQALNTLVKQLSSNFGAISSVLNDILSRLDPPEAEVQIDRLITGRLQSLQTYVTQQLIRAAEIRWSANLAATKMSECVLGQSKRVDFCGKGYHLMSFPQSAPHGVVFLHVTYVPAQEKNFTTAPAICHDGKAHFPREGVFVSNGTHWFVTQRNFYEPQIITTDNTFVSGNCDVVIGIVNNTVYDPLQPELDSFKEELDKYFKNHTSPDVDLGDISGINASVVNIQKEIDRLNEVAKNLNESLIDLQELGKYEQYIK

SEQ ID NO: 1800 - protein, 1211 aa, Artificial Sequence
  SARS-CoV-2/Iceland/280/2020__EPI_ISL_417608 spike protein (1-1211)(K986P_V987P_T887W_A1020W)
MFVFLVLLPLVSSQCVNLTTRTQLPPAYTNSFTRGVYYPDKVFRSSVLHSTQDLFLPFFSNVTWFHAIHVSGTNGTKRFDNPVLPFNDGVYFASTEKSNIIRGWIFGTTLDSKTQSLLIVNNATNVVIKVCEFQFCNDPFLGVYYHKNNKSWMESEFRVYSSANNCTFEYVSQPFLMDLEGKQGNFKNLREFVFKNIDGYFKIYSKHTPINLVRDLPQGFSALEPLVDLPIGINITRFQTLLALHRSYLTPGDSSSGWTAGAAAYYVGYLQPRTFLLKYNENGTITDAVDCALDPLSETKCTLKSFTVEKGIYQTSNFRVQPTESIVRFPNITNLCPFGEVFNATRFASVYAWNRKRISNCVADYSVLYNSASFSTFKCYGVSPTKLNDLCFTNVYADSFVIRGDEVRQIAPGQTGKIADYNYKLPDDFTGCVIAWNSNNLDSKVGGNYNYLYRLFRKSNLKPFERDISTEIYQAGSTPCNGVEGFNCYFPLQSYGFQPTNGVGYQPYRVVVLSFELLHAPATVCGPKKSTNLVKNKCVNFNFNGLTGTGVLTESNKKFLPFQQFGRDIADTTDAVRDPQTLEILDITPCSFGGVSVITPGTNTSNQVAVLYQGVNCTEVPVAIHADQLTPTWRVYSTGSNVFQTRAGCLIGAEHVNNSYECDIPIGAGICASYHTQTNSPRRARSVASQSIIAYTMSLGAENSVAYSNNSIAIPTNFTISVTTEILPVSMTKTSVDCTMYICGDSTECSNLLLQYGSFCTQLNRALTGIAVEQDKNTQEVFAQVKQIYKTPPIKDFGGFNFSQILPDPSKPSKRSFIEDLLFNKVTLADAGFIKQYGDCLGDIAARDLICAQKFNGLTVLPPLLTDEMIAQYTSALLAGTITSGWWFGAGAALQIPFAMQMAYRFNGIGVTQNVLYENQKLIANQFNSAIGKIQDSLSSTASALGKLQDVVNQNAQALNTLVKQLSSNFGAISSVLNDILSRLDPPEAEVQIDRLITGRLQSLQTYVTQQLIRAAEIRWSANLAATKMSECVLGQSKRVDFCGKGYHLMSFPQSAPHGVVFLHVTYVPAQEKNFTTAPAICHDGKAHFPREGVFVSNGTHWFVTQRNFYEPQIITTDNTFVSGNCDVVIGIVNNTVYDPLQPELDSFKEELDKYFKNHTSPDVDLGDISGINASVVNIQKEIDRLNEVAKNLNESLIDLQELGKYEQYIK

SEQ ID NO: 1801 - protein, 1211 aa, Artificial Sequence; identical to SEQ ID NO: 1756
  SARS-CoV-2/Iceland/247/2020__EPI_ISL_417575 spike protein (1-1211)(K986P_V987P_T887W_A1020W)

SEQ ID NO: 1802 - protein, 1211 aa, Artificial Sequence
  SARS-CoV-2/Iceland/238/2020__EPI_ISL_417566 spike protein (1-1211)(K986P_V987P_T887W_A1020W)
MFVFLVLLPLVSSQCVNLTTRTQLPPAYTNSFTRGVYYPDKVFRSSVLHSTQDLFLPFFSNVTWFHAIHVSGTNGTKRFDNPVLPFNDGVYFASTEKSNIIRGWIFGTTLDSKTQSLLIVNNATNVVIKVCEFQFCNDPFLGVYYHKNNKSWMESEFRVYSSANNCTFEYVSQPFLMDLEGKQGNFKNLREFVFKNIDGYFKIYSKHTPINLVRDLPQGFSALEPLVDLPIGINITRFQTLLALHRSYLTPGDSSSGWTAGAAAYYVGYLQPRTFLLKYNENGTITDAVDCALDPLSETKCTLKSFTVEKGIYQTSNFRVQPTESIVRFPNITNLCPFGEVFNATRFASVYAWNRKRISNCVADYSVLYNSASFSTFKCYGVSPTKLNDLCFTNVYADSFVIRGDEVRQIAPGQTGKIADYNYKLPDDFTGCVIAWNSNNLDSKVGGNYNYLYRLFRKSNLKPFERDISTEIYQAGSTPCNGVEGFNCYFPLQSYGFQPTNGVGYQPYRVVVLSFELLHAPATVCGPKKSTNLVKNKCVNFNFNGLTGTGVLTESNKKFLPFQQFGRDIADTTDAVRDPQTLEILDITPCSFGGVSVITPGTNTSNQVAVLYQGVNCTEVPVAIHADQLTPTWRVYSTGSNVFQTRAGCLIGAEHVNNSYECDIPIGAGICASYQTQTNSPRRARSVASQSIIAYTMSLGAENSVAYSNNSIAIPTNFTISVTTEILPVSMTKTSVDCTMYICGDSTECSNLLLQYGSFCTQLNRALTGIAVEQDKNTQEVFAQVKQIYKTPPIKDFGGFNFSQILPDPSKPSKRSFIEDLLFNKVTLADVGFIKQYGDCLGDIAARDLICAQKFNGLTVLPPLLTDEMIAQYTSALLAGTITSGWWFGAGAALQIPFAMQMAYRFNGIGVTQNVLYENQKLIANQFNSAIGKIQDSLSSTASALGKLQDVVNQNAQALNTLVKQLSSNFGAISSVLNDILSRLDPPEAEVQIDRLITGRLQSLQTYVTQQLIRAAEIRWSANLAATKMSECVLGQSKRVDFCGKGYHLMSFPQSAPHGVVFLHVTYVPAQEKNFTTAPAICHDGKAHFPREGVFVSNGTHWFVTQRNFYEPQIITTDNTFVSGNCDVVIGIVNNTVYDPLQPELDSFKEELDKYFKNHTSPDVDLGDISGINASVVNIQKEIDRLNEVAKNLNESLIDLQELGKYEQYIK

SEQ ID NO: 1803 - protein, 1211 aa, Artificial Sequence
  SARS-CoV-2/Greece/16/2020__EPI_ISL_418265 spike protein (1-1211)(K986P_V987P_T887W_A1020W)
MFVFLVLLPLVSSQCVNLTTRTQLPPAYTNSFTRGVYYPDKVFRSSVLHSTQDLFLPFFSNVTWFHAIHVSGTNGTKRFDNPVLPFNDGVYFASTEKSNIIRGWIFGTTLDSKTQSLLIVNNATNVVIKVCEFQFCNDPFLGVYYHKNNKSWMESEFRVYSSANNCTFEYVSQPFLMDLEGKQGNFKNLREFVFKNVDGYFKIYSKHTPINLVRDLPQGFSALEPLVDLPIGINITRFQTLLALHRSYLTPGDSSSGWTAGAAAYYVGYLQPRTFLLKYNENGTITDAVDCALDPLSETKCTLKSFTVEKGIYQTSNFRVQPTESIVRFPNITNLCPFGEVFNATRFASVYAWNRKRISNCVADYSVLYNSASFSTFKCYGVSPTKLNDLCFTNVYADSFVIRGDEVRQIAPGQTGKIADYNYKLPDDFTGCVIAWNSNNLDSKVGGNYNYLYRLFRKSNLKPFERDISTEIYQAGSTPCNGVEGFNCYFPLQSYGFQPTNGVGYQPYRVVVLSFELLHAPATVCGPKKSTNLVKNKCVNFNFNGLTGTGVLTESNKKFLPFQQFGRDIADTTDAVRDPQTLEILDITPCSFGGVSVITPGTNTSNQVAVLYQDVNCTEVPVAIHADQLTPTWRVYSTGSNVFQTRAGCLIGAEHVNNSYECDIPIGAGICASYQTQTNSPRRARSVASQSIIAYTMSLGAENSVAYSNNSIAIPTNFTISVTTEILPVSMTKTSVDCTMYICGDSTECSNLLLQYGSFCTQLNRALTGIAVEQDKNTQEVFAQVKQIYKTPPIKDFGGFNFSQILPDPSKPSKRSFIEDLLFNKVTLADAGFIKQYGDCLGDIAARDLICAQKFNGLTVLPPLLTDEMIAQYTSALLAGTITSGWWFGAGAALQIPFAMQMAYRFNGIGVTQNVLYENQKLIANQFNSAIGKIQDSLSSTASALGKLQDVVNQNAQALNTLVKQLSSNFGAISSVLNDILSRLDPPEAEVQIDRLITGRLQSLQTYVTQQLIRAAEIRWSANLAATKMSECVLGQSKRVDFCGKGYHLMSFPQSAPHGVVFLHVTYVPAQEKNFTTAPAICHDGKAHFPREGVFVSNGTHWFVTQRNFYEPQIITTDNTFVSGNCDVVIGIVNNTVYDPLQPELDSFKEELDKYFKNHTSPDVDLGDISGINASVVNIQKEIDRLNEVAKNLNESLIDLQELGKYEQYIK

SEQ ID NO: 1804 - protein, 1211 aa, Artificial Sequence
  SARS-CoV-2/Iceland/319/2020__EPI_ISL_417648 spike protein (1-1211)(K986P_V987P_T887W_A1020W)
MFVFLVLLPLVSSQCVNLTTRTQLPPAYTNSFTRGVYYPDKVFRSSVLHSTQDLFLPFFSNVTWFHAIHVSGTNGTKRFDNPVLPFNDGVYFASTEKSNIIRGWIFGTTLDSKTQSLLIVNNATNVVIKVCEFQFCNDPFLGVYYHKNNKSWMESEFRVYSSANNCTFEYVSQPFLIDLEGKQGNFKNLREFVFKNIDGYFKIYSKHTPINLVRDLPQGFSALEPLVDLPIGINITRFQTLLALHRSYLTPGDSSSGWTAGAAAYYVGYLQPRTFLLKYNENGTITDAVDCALDPLSETKCTLKSFTVEKGIYQTSNFRVQPTESIVRFPNITNLCPFGEVFNATRFASVYAWNRKRISNCVADYSVLYNSASFSTFKCYGVSPTKLNDLCFTNVYADSFVIRGDEVRQIAPGQTGKIADYNYKLPDDFTGCVIAWNSNNLDSKVGGNYNYLYRLFRKSNLKPFERDISTEIYQAGSTPCNGVEGFNCYFPLQSYGFQPTNGVGYQPYRVVVLSFELLHAPATVCGPKKSTNLVKNKCVNFNFNGLTGTGVLTESNKKFLPFQQFGRDIADTTDAVRDPQTLEILDITPCSFGGVSVITPGTNTSNQVAVLYQGVNCTEVPVAIHADQLTPTWRVYSTGSNVFQTRAGCLIGAEHVNNSYECDIPIGAGICASYQTQTNSPRRARSVASQSIIAYTMSLGAENSVAYSNNSIAIPTNFTISVTTEILPVSMTKTSVDCTMYICGDSTECSNLLLQYGSFCTQLNRALTGIAVEQDKNTQEVFAQVKQIYKTPPIKDFGGFNFSQILPDPSKPSKRSFIEDLLFNKVTLADAGFIKQYGDCLGDIAARDLICAQKFNGLTVLPPLLTDEMIAQYTSALLAGTITSGWWFGAGAALQIPFAMQMAYRFNGIGVTQNVLYENQKLIANQFNSAIGKIQDSLSSTASALGKLQDVVNQNAQALNTLVKQLSSNFGAISSVLNDILSRLDPPEAEVQIDRLITGRLQSLQTYVTQQLIRAAEIRWSANLAATKMSECVLGQSKRVDFCGKGYHLMSFPQSAPHGVVFLHVTYVPAQEKNFTTAPAICHDGKAHFPREGVFVSNGTHWFVTQRNFYEPQIITTDNTFVSGNCDVVIGIVNNTVYDPLQPELDSFKEELDKYFKNHTSPDVDLGDISGINASVVNIQKEIDRLNEVAKNLNESLIDLQELGKYEQYIK

SEQ ID NO: 1805 - protein, 1211 aa, Artificial Sequence
  SARS-CoV-2/Congo/94/2020__EPI_ISL_417947 spike protein (1-1211)(K986P_V987P_T887W_A1020W)
MFVFLVLLPLVSSQCVNLTTRTQLPPAYTNSFTRGVYYPDKVFRSSVLHSTQDLFLPFFSNVTWFHAIHVSGTNGTKRFDNPVLPFNDGVYFASTEKSNIIRGWIFGTTLDSKTQSLLIVNNATNVVIKVCEFQFCNDPFLGVYYHKNNKSWMESEFRVYSSANNCTFEYVSQPFLMDLEGKQGNFKNLREFVFKNIDGYFKIYSKHTPINLVRDLPQGFSALEPLVDLPIGINITRFQTLLALHRSYLTPGDSSSGWTAGAAAYYVGYLQPRTFLLKYNENGTITDAVDCALDPLSETKCTLKSFTVEKGIYQTSNFRVQPTESIVRFPNITNLCPFGEVFNATRFASVYAWNRKRISNCVADYSVLYNSASFSTFKCYGVSPTKLNDLCFTNVYADSFVIRGDEVRQIAPGQTGKIADYNYKLPDDFTGCVIAWNSNNLDSKVGGNYNYLYRLFRKSNLKPFERDISTEIYQAGSTPCNGVEGFNCYFPLQSYGFQPTNGVGYQPYRVVVLSFELLHAPATVCGPKKSTNLVKNKCVNFNFNGLTGTGVLTESNKKFLPFQQFGRDIADTTDAVRDPQTLEILDITPCSFGGVSVITPGTNTSNQVAVLYQGVNCTEVPVAIHADQLTPTWRVYSTGSNVFQTRAGCLIGAEHVNNSYECDIPIGAGICASYQTQTNSPRRARSVASQSIIAYTMSLGAENSVAYSNNSIAIPTNFTISVTTEILPVSMTKTSVDCTMYICGDSTECSNLLLQYGSFCTQLNRALTGIAVEQDKNTQEVFAQVKQIYKTPPIKDFGGFNFSQILPDPSKPSKRSFIEDILFNKVTLADAGFIKQYGDCLGDIAARDLICAQKFNGLTVLPPLLTDEMIAQYTSALLAGTITSGWWFGAGAALQIPFAMQMAYRFNGIGVTQNVLYENQKLIANQFNSAIGKIQDSLSSTASALGKLQDVVNQNAQALNTLVKQLSSNFGAISSVLNDILSRLDPPEAEVQIDRLITGRLQSLQTYVTQQLIRAAEIRWSANLAATKMSECVLGQSKRVDFCGKGYHLMSFPQSAPHGVVFLHVTYVPAQEKNFTTAPAICHDGKAHFPREGVFVSNGTHWFVTQRNFYEPQIITTDNTFVSGNCDVVIGIVNNTVYDPLQPELDSFKEELDKYFKNHTSPDVDLGDISGINASVVNIQKEIDRLNEVAKNLNESLIDLQELGKYEQYIK

SEQ ID NO: 1806 - protein, 1211 aa, Artificial Sequence
  SARS-CoV-2/Congo/158/2020__EPI_ISL_417950 spike protein (1-1211)(K986P_V987P_T887W_A1020W)
MFVFLVLLPLVSSQCVNLTTRTQLPPAYTNSFTRGVYYPDKVFRSSVLHSTQDLFLPFFSNVTWFHAIHVSGTNGTKRFDNPVLPFNDGVYFASTEKSNIIRGWIFGTTLDSKTQSLLIVNNATNVVIKVCEFQFCNDPFLGVYYHKNNKSWMESEFRVYSSANNCTFEYVSQPFLMDLEGKQGNFKNLREFVFKNIDGYFKIYSKHTPINLVRDLPQGFSALEPLVDLPIGINITRFQTLLALHRSYLTPGDSSSGWTAGAAAYYVGYLQPRTFLLKYNENGTITDAVDCALDPLSETKCTLKSFTVEKGIYQTSNFRVQPTESIVRFPNITNLCPFGEVFNATRFASVYAWNRKRISNCVADYSVLYNSASFSTFKCYGVSPTKLNDLCFTNVYADSFVIRGDEVRQIAPGQTGKIADYNYKLPDDFTGCVIAWNSNNLDSKVGGNYNYLYRLFRKSNLKPFERDISTEIYQAGSTPCNGVEGFNCYFPLQSYGFQPTNGVGYQPYRVVVLSFELLHAPATVCGPKKSTNLVKNKCVNFNFNGLTGTGVLTESNKKFLPFQQFGRDIADTTDAVRDPQTLEILDITPCSFGGVSVITPGTNTSNQVAVLYQDVNCTEVPVAIHADQLTPTWRVYSTGSNVFQTRAGCLIGAEHVNNSYECDIPIGAGICASYQTQTNSPRRARSVASQSIIAYTMSLGAENSVAYSNNSIAIPTNFTISVTTEILPVSMTKTSVDCTMYICGDSTECSNLLLQYGSFCTQLNRALTGIAVEQDKNTQEVFAQVKQIYKTPPIKDFGGFNFSQILPDPSKPSKRSFIEDLLFNKVTLADAGFIKQYGDCLGDIAARDLICAQKFNGLTVLPPLLTDEMIAQYTSALLAGTITSGWWFGAGAALQIPFAMQMAYRFNGIGVTQNVLYENQKLIANQFNSAIGKIQDSLSSTASALGKLQDVVNQNAQALNTLVKQLSSNFGAISSVLNDILSRLDPPEAEVQIDRLITGRLQSLQTYVTQQLIRAAEIRWSANLAATKMSECVLGQSKRVDFCGKGYHLMSFPQSAPHGVVFLHVTYVPAQEKNFTTAPAICHDGKAHFPREGVFVSNGTHWFVTQRNFYEPQIITTDNTFLSGNCDVVIGIVNNTVYDPLQPELDSFKEELDKYFKNHTSPDVDLGDISGINASVVNIQKEIDRLNEVAKNLNESLIDLQELGKYEQYIK

SEQ ID NO: 1807 - protein, 1211 aa, Artificial Sequence
  SARS-CoV-2/USA/UT-00034/2020__EPI_ISL_417977 spike protein (1-1211)(K986P_V987P_T887W_A1020W)
MFVFLVLLPLVSSQCVNLTTRTQLPPAYTNSFTRGVYYPDKVFRSSVLHSTQDLFLPFFSNVTWFHAIHVSGTNGTKRFDNPVLPFNDGVYFASTEKSNIIRGWIFGTTLDSKTQSLLIVNNATNVVIKVCEFQFCNDPFLGVYYYKNNKSWMESEFRVYSSANNCTFEYVSQPFLMDLEGKQGNFKNLREFVFKNIDGYFKIYSKHTPINLVRDLPQGFSALEPLVDLPIGINITRFQTLLALHRSYLTPGDSSSGWTAGAAAYYVGYLQPRTFLLKYNENGTITDAVDCALDPLSETKCTLKSFTVEKGIYQTSNFRVQPTESIVRFPNITNLCPFGEVFNATRFASVYAWNRKRISNCVADYSVLYNSASFSTFKCYGVSPTKLNDLCFTNVYADSFVIRGDEVRQIAPGQTGKIADYNYKLPDDFTGCVIAWNSNNLDSKVGGNYNYLYRLFRKSNLKPFERDISTEIYQAGSTPCNGVEGFNCYFPLQSYGFQPTNGVGYQPYRVVVLSFELLHAPATVCGPKKSTNLVKNKCVNFNFNGLTGTGVLTESNKKFLPFQQFGRDIADTTDAVRDPQTLEILDITPCSFGGVSVITPGTNTSNQVAVLYQGVNCTEVPVAIHADQLTPTWRVYSTGSNVFQTRAGCLIGAEHVNNSYECDIPIGAGICASYQTQTNSPRRARSVASQSIIAYTMSLGAENSVAYSNNSIAIPTNFTISVTTEILPVSMTKTSVDCTMYICGDSTECSNLLLQYGSFCTQLNRALTGIAVEQDKNTQEVFAQVKQIYKTPPIKDFGGFNFSQILPDPSKPSKRSFIEDLLFNKVTLADAGFIKQYGDCLGDIAARDLICAQKFNGLTVLPPLLTDEMIAQYTSALLAGTITSGWWFGAGAALQIPFAMQMAYRFNGIGVTQNVLYENQKLIANQFNSAIGKIQDSLSSTASALGKLQDVVNQNAQALNTLVKQLSSNFGAISSVLNDILSRLDPPEAEVQIDRLITGRLQSLQTYVTQQLIRAAEIRWSANLAATKMSECVLGQSKRVDFCGKGYHLMSFPQSAPHGVVFLHVTYVPAQEKNFTTAPAICHDGKAHFPREGVFVSNGTHWFVTQRNFYEPQIITTDNTFVSGNCDVVIGIVNNTVYDPLQPELDSFKEELDKYFKNHTSPDVDLGDISGINASVVNIQKEIDRLNEVAKNLNESLIDLQELGKYEQYIK

SEQ ID NO: 1808 - protein, 1211 aa, Artificial Sequence
  SARS-CoV-2/USA/UT-00033/2020__EPI_ISL_417976 spike protein (1-1211)(K986P_V987P_T887W_A1020W)
MFVFLVLLPLVSSQCVNLTTRTQLPPAYTNSFTRGVYYPDKVFRSSVLHSTQDLFLPFFSNVTWFHAIHVSGTNGTKRFDNPVLPFNDGVYFASTEKSNIIRGWIFGTTLDSKTQSLLIVNNATNVVIKVCEFQFCNDPFLGVYYHKNNKSWMESEFRVYSSANNCTFEYVSQPFLMDLEGKQGNFKNLREFVFKNIDGYFKIYSKHTPINLVRDLPQGFSALEPLVDLPIGINITRFQTLLALHRSYLTPGDSSSGLTAGAAAYYVGYLQPRTFLLKYNENGTITDAVDCALDPLSETKCTLKSFTVEKGIYQTSNFRVQPTESIVRFPNITNLCPFGEVFNATRFASVYAWNRKRISNCVADYSVLYNSASFSTFKCYGVSPTKLNDLCFTNVYADSFVIRGDEVRQIAPGQTGKIADYNYKLPDDFTGCVIAWNSNNLDSKVGGNYNYLYRLFRKSNLKPFERDISTEIYQAGSTPCNGVEGFNCYFPLQSYGFQPTNGVGYQPYRVVVLSFELLHAPATVCGPKKSTNLVKNKCVNFNFNGLTGTGVLTESNKKFLPFQQFGRDIADTTDAVRDPQTLEILDITPCSFGGVSVITPGTNTSNQVAVLYQGVNCTEVPVAIHADQLTPTWRVYSTGSNVFQTRAGCLIGAEHVNNSYECDIPIGAGICASYQTQTNSPRRARSVASQSIIAYTMSLGAENSVAYSNNSIAIPTNFTISVTTEILPVSMTKTSVDCTMYICGDSTECSNLLLQYGSFCTQLNRALTGIAVEQDKNTQEVFAQVKQIYKTPPIKDFGGFNFSQILPDPSKPSKRSFIEDLLFNKVTLADAGFIKQYGDCLGDIAARDLICAQKFNGLTVLPPLLTDEMIAQYTSALLAGTITSGWWFGAGAALQIPFAMQMAYRFNGIGVTQNVLYENQKLIANQFNSAIGKIQDSLSSTASALGKLQDVVNQNAQALNTLVKQLSSNFGAISSVLNDILSRLDPPEAEVQIDRLITGRLQSLQTYVTQQLIRAAEIRWSANLAATKMSECVLGQSKRVDFCGKGYHLMSFPQSAPHGVVFLHVTYVPAQEKNFTTAPAICHDGKAHFPREGVFVSNGTHWFVTQRNFYEPQIITTDNTFVSGNCDVVIGIVNNTVYDPLQPELDSFKEELDKYFKNHTSPDVDLGDISGINASVVNIQKEIDRLNEVAKNLNESLIDLQELGKYEQYIK

SEQ ID NO: 1809 - protein, 1211 aa, Artificial Sequence
  SARS-CoV-2/USA/WI-13/2020__EPI_ISL_417516 spike protein (1-1211)(K986P_V987P_T887W_A1020W)
MFVFLVLLPLVSSQCVNLTTRTQLPPAYTNSFTRGVYYPDKVFRSSVLHSTQDLFLPFFSNVTWFHAIHVSGTNGTKRFDNPVLPFNDGVYFASTEKSNIIRGWIFGTTLDSKTQSLLIVNNATNVVIKVCEFQFCNDPFLGVYYHKNNKSWMESEFRVYSSANNCTFEYVSQPFLMDLEGKQGNFKNLREFVFKNIDGYFKIYSKHTPINLVRDLPQGFSALEPLVDLPIGINITRFQTLLALHRSYLTPGDSSSGWTAGAAAYYVGYLQPRTFLLKYNENGTITDAVDCALDPLSETKCTLKSFTVEKGIYQTSNFRVLPTESIVRFPNITNLCPFGEVFNATRFASVYAWNRKRISNCVADYSVLYNSASFSTFKCYGVSPTKLNDLCFTNVYADSFVIRGDEVRQIAPGQTGKIADYNYKLPDDFTGCVIAWNSNNLDSKVGGNYNYLYRLFRKSNLKPFERDISTEIYQAGSTPCNGVEGFNCYFPLQSYGFQPTNGVGYQPYRVVVLSFELLHAPATVCGPKKSTNLVKNKCVNFNFNGLTGTGVLTESNKKFLPFQQFGRDIADTTDAVRDPQTLEILDITPCSFGGVSVITPGTNTSNQVAVLYQGVNCTEVPVAIHADQLTPTWRVYSTGSNVFQTRAGCLIGAEHVNNSYECDIPIGAGICASYQTQTNSPRRARSVASQSIIAYTMSLGAENSVAYSNNSIAIPTNFTISVTTEILPVSMTKTSVDCTMYICGDSTECSNLLLQYGSFCTQLNRALTGIAVEQDKNTQEVFAQVKQIYKTPPIKDFGGFNFSQILPDPSKPSKRSFIEDLLFNKVTLADAGFIKQYGDCLGDIAARDLICAQKFNGLTVLPPLLTDEMIAQYTSALLAGTITSGWWFGAGAALQIPFAMQMAYRFNGIGVTQNVLYENQKLIANQFNSAIGKIQDSLSSTASALGKLQDVVNQNAQALNTLVKQLSSNFGAISSVLNDILSRLDPPEAEVQIDRLITGRLQSLQTYVTQQLIRAAEIRWSANLAATKMSECVLGQSKRVDFCGKGYHLMSFPQSAPHGVVFLHVTYVPAQEKNFTTAPAICHDGKAHFPREGVFVSNGTHWFVTQRNFYEPQIITTDNTFVSGNCDVVIGIVNNTVYDPLQPELDSFKEELDKYFKNHTSPDVDLGDISGINASVVNIQKEIDRLNEVAKNLNESLIDLQELGKYEQYIK

SEQ ID NO: 1810 - protein, 1210 aa, Artificial Sequence
  SARS-CoV-2/India/1-27/2020__EPI_ISL_413522 spike protein (1-1210)(K985P_V986P_T886W_A1019W)
MFVFLVLLPLVSSQCVNLTTRTQLPPAYTNSFTRGVYYPDKVFRSSVLHSTQDLFLPFFSNVTWFHAIHVSGTNGTKRFDNPVLPFNDGVYFASTEKSNIIRGWIFGTTLDSKTQSLLIVNNATNVVIKVCEFQFCNDPFLGVYHKNNKSWMESEFRVYSSANNCTFEYVSQPFLMDLEGKQGNFKNLREFVFKNIDGYFKIYSKHTPINLVRDLPQGFSALEPLVDLPIGINITRFQTLLALHRSYLTPGDSSSGWTAGAAAYYVGYLQPRTFLLKYNENGTITDAVDCALDPLSETKCTLKSFTVEKGIYQTSNFRVQPTESIVRFPNITNLCPFGEVFNATRFASVYAWNRKRISNCVADYSVLYNSASFSTFKCYGVSPTKLNDLCFTNVYADSFVIRGDEVIQIAPGQTGKIADYNYKLPDDFTGCVIAWNSNNLDSKVGGNYNYLYRLFRKSNLKPFERDISTEIYQAGSTPCNGVEGFNCYFPLQSYGFQPTNGVGYQPYRVVVLSFELLHAPATVCGPKKSTNLVKNKCVNFNFNGLTGTGVLTESNKKFLPFQQFGRDIADTTDAVRDPQTLEILDITPCSFGGVSVITPGTNTSNQVAVLYQDVNCTEVPVAIHADQLTPTWRVYSTGSNVFQTRAGCLIGAEHVNNSYECDIPIGAGICASYQTQTNSPRRARSVASQSIIAYTMSLGAENSVAYSNNSIAIPTNFTISVTTEILPVSMTKTSVDCTMYICGDSTECSNLLLQYGSFCTQLNRALTGIAVEQDKNTQEVFAQVKQIYKTPPIKDFGGFNFSQILPDPSKPSKRSFIEDLLFNKVTLADAGFIKQYGDCLGDIAARDLICAQKFNGLTVLPPLLTDEMIAQYTSALLAGTITSGWWFGAGAALQIPFAMQMAYRFNGIGVTQNVLYENQKLIANQFNSAIGKIQDSLSSTASALGKLQDVVNQNAQALNTLVKQLSSNFGAISSVLNDILSRLDPPEAEVQIDRLITGRLQSLQTYVTQQLIRAAEIRWSANLAATKMSECVLGQSKRVDFCGKGYHLMSFPQSAPHGVVFLHVTYVPAQEKNFTTAPAICHDGKAHFPREGVFVSNGTHWFVTQRNFYEPQIITTDNTFVSGNCDVVIGIVNNTVYDPLQPELDSFKEELDKYFKNHTSPDVDLGDISGINASVVNIQKEIDRLNEVAKNLNESLIDLQELGKYEQYIK

SEQ ID NO: 1811 - protein, 1205 aa, Artificial Sequence
  SARS-CoV-2/pangolin/Guangxi/P4L/2017__EPI_ISL_410538 spike protein (1-1205)(K980P_V981P_T881W_A1014W)
MFVFLFVLPLVSSQCVNLTTRTGIPPGYTNSSTRGVYYPDKVFRSSILHLTQDLFLPFFSNVTWFNTINYQGGFKKFDNPVLPFNDGVYFASTEKSNIIRGWIFGTTLDARTQSLLIVNNATNVVIKVCEFQFCTDPFLGVYYHNNNKTWVENEFRVYSSANNCTFEYISQPFLMDLEGKQGNFKNLREFVFKNVDGYFKIYSKHTPIDLVRDLPRGFAALEPLVDLPIGINITRFQTLLALHRSYLTPGNLESGWTTGAAAYYVGYLQQRTFLLSYNQNGTITDAVDCSLDPLSETKCTLKSLTVEKGIYQTSNFRVQPTISIVRFPNITNLCPFGEVFNASKFASVYAWNRKRISNCVADYSVLYNSTSFSTFKCYGVSPTKLNDLCFTNVYADSFVVKGDEVRQIAPGQTGVIADYNYKLPDDFTGCVIAWNSVKQDALTGGNYGYLYRLFRKSKLKPFERDISTEIYQAGSTPCNGQVGLNCYYPLERYGFHPTTGVNYQPFRVVVLSFELLNGPATVCGPKLSTTLVKDKCVNFNFNGLTGTGVLTTSKKQFLPFQQFGRDISDTTDAVRDPQTLEILDITPCSFGGVSVITPGTNTSNQVAVLYQDVNCTEVPMAIHAEQLTPAWRVYSAGANVFQTRAGCLVGAEHVNNSYECDIPVGAGICASYHSMSSLRSVNQRSIIAYTMSLGAENSVAYSNNSIAIPTNFTISVTTEILPVSMTKTSVDCTMYICGDSIECSNLLLQYGSFCTQLNRALTGIAVEQDKNTQEVFAQVKQIYKTPPIKDFGGFNFSQILPDPSKPSKRSFIEDLLFNKVTLADAGFIKQYGDCLGDIAARDLICAQKFNGLTVLPPLLTDEMIAQYTSALLAGTITSGWWFGAGAALQIPFAMQMAYRFNGIGVTQNVLYENQKLIANQFNSAIGKIQDSLSSTASALGKLQDVVNQNAQALNTLVKQLSSNFGAISSVLNDILSRLDPPEAEVQIDRLITGRLQSLQTYVTQQLIRAAEIRWSANLAATKMSECVLGQSKRVDFCGKGYHLMSFPQSAPHGVVFLHVTYVPAQEKNFTTAPAICHEGKAHFPREGVFVSNGTHWFITQRNFYEPQIITTDNTFVSGSCDVVIGIVNNTVYDPLQPELDSFKEELDKYFKNHTSPDVDLGDISGINASVVNIQKEIDRLNEVAKNLNESPIDLQELGKYEQYIK

SEQ ID NO: 1812 - protein, 1205 aa, Artificial Sequence
  SARS-CoV-2/pangolin/Guangxi/P5L/2017__EPI_ISL_410540 spike protein (1-1205)(K980P_V981P_T881W_A1014W)
MFVFLFVLPLVSSQCVNLTTRTGIPPGYTNSSTRGVYYPDKVFRSSILHLTQDLFLPFFSNVTWFNTINYQGGFKKFDNPVLPFNDGVYFASTEKSNIIRGWIFGTTLDARTQSLLIVNNATNVVIKVCEFQFCTDPFLGVYYHNNNKTWVENEFRVYSSANNCTFEYISQPFLMDLEGKQGNFKNLREFVFKNVDGYFKIYSKHTPIDLVRDLPRGFAALEPLVDLPIGINITRFQTLLALHRSYLTPGKLESGWTTGAAAYYVGYLQQRTFLLSYNQNGTITDAVDCSLDPLSETKCTLKSLTVEKGIYQTSNFRVQPTISIVRFPNITNLCPFGEVFNASKFASVYAWNRKRISNCVADYSVLYNSTSFSTFKCYGVSPTKLNDLCFTNVYADSFVVKGDEVRQIAPGQTGVIADYNYKLPDDFTGCVIAWNSVKQDALTGGNYGYLYRLFRKSKLKPFERDISTEIYQAGSTPCNGQVGLNCYYPLERYGFHPTTGVNYQPFRVVVLSFELLNGPATVCGPKLSTTLVKDKCVNFNFNGLTGTGVLTTSKKQFLPFQQFGRDISDTTDAVRDPQTLEILDITPCSFGGVSVITPGTNTSNQVAVLYQDVNCTEVPMAIHAEQLTPAWRVYSAGANVFQTRAGCLVGAEHVNNSYECDIPVGAGICASYHSMSSFRSVNQRSIIAYTMSLGAENSVAYSNNSIAIPTNFTISVTTEILPVSMTKTSVDCTMYICGDSIECSNLLLQYGSFCTQLNRALTGIAVEQDKNTQEVFAQVKQIYKTPPIKDFGGFNFSQILPDPSKPSKRSFIEDLLFNKVTLADAGFIKQYGDCLGDIAARDLICAQKFNGLTVLPPLLTDEMIAQYTSALLAGTITSGWWFGAGAALQIPFAMQMAYRFNGIGVTQNVLYENQKLIANQFNSAIGKIQDSLSSTASALGKLQDVVNQNAQALNTLVKQLSSNFGAISSVLNDILSRLDPPEAEVQIDRLITGRLQSLQTYVTQQLIRAAEIRWSANLAATKMSECVLGQSKRVDFCGKGYHLMSFPQSAPHGVVFLHVTYVPAQEKNFTTAPAICHEGKAHFPREGVFVSNGTHWFITQRNFYEPQIITTDNTFVSGSCDVVIGIVNNTVYDPLQPELDSFKEELDKYFKNHTSPDVDLGDISGINASVVNIQKEIDRLNEVAKNLNESLIDLQELGKYEQYIK

SEQ ID NO: 1813 - protein, 1205 aa, Artificial Sequence
  SARS-CoV-2/pangolin/Guangxi/P5E/2017__EPI_ISL_410541 spike protein (1-1205)(K980P_V981P_T881W_A1014W)
MFVFLFVLPLVSSQCVNLTTRTGIPPGYTNSSTRGVYYPDKVFRSSILHLTQDLFLPFFSNVTWFNTITYQGGSKKFDNPVLPFNDGVYFASTEKSNIIRGWIFGTTLDARTQSLLIVNNATNVVIKVCEFQFCTDPFLGVYYHNNNKTWVENEFRVYSSANNCTFEYISQPFLMDLEGKQGNFKNLREFVFKNVDGYFKIYSKHTPIDLVRDLPRGFAALEPLVDLPIGINITRFQTLLALHRSYLTPGKLESGWTTGAAAYYVGYLQQRTFLLSYNQNGTITDAVDCSLDPLSETKCTLKSLTVEKGIYQTSNFRVQPTISIVRFPNITNLCPFGEVFNASKFASVYAWNRKRISNCVADYSVLYNSTSFSTFKCYGVSPTKLNDLCFTNVYADSFVVKGDEVRQIAPGQTGVIADYNYKLPDDFTGCVIAWNSVKQDALTGDNYGYLYRLFRKSKLKPFERDISTEIYQAGSTPCNGQVGLNCYYPLERYGFHPTTGVNYQPFRVVVLSFELLNGPATVCGPKLSTTLVKDKCVNFNFNGLTGTGVLTTSKKQFLPFQQFGRDISDTTDAVRDPQTLEILDITPCSFGGVSVITPGTNTSNQVAVLYQDVNCTEVPMAIHAEQLTPAWRVYSAGANVFQTRAGCLVGAEHVNNSYECDIPVGAGICASYHSMSSFRSVNQRSIIAYTMSLGAENSVAYSNNSIAIPTNFTISVTTEILPVSMTKTSVDCTMYICGDSIECSNLLLQYGSFCTQLNRALTGIAVEQDKNTQEVFAQVKQIYKTPPIKDFGGFNFSQILPDPSKPSKRSFIEDLLFNKVTLADAGFIKQYGDCLGDIAARDLICAQKFNGLTVLPPLLTDEMIAQYTSALLAGTITSGWWFGAGAALQIPFAMQMAYRFNGIGVTQNVLYENQKLIANQFNSAIGKIQDSLSSTASALGKLQDVVNQNAQALNTLVKQLSSNFGAISSVLNDILSRLDPPEAEVQIDRLITGRLQSLQTYVTQQLIRAAEIRWSANLAATKMSECVLGQSKRVDFCGKGYHLMSFPQSAPHGVVFLHVTYVPAQEKNFTTAPAICHEGKAHFPREGVFVSNGTHWFITQRNFYEPQIITTDNTFVSGSCDVVIGIVNNTVYDPLQPELDSFKEELDKYFKNHTSPDVDLGDISGINASVVNIQKEIDRLNEVAKNLNESLIDLQELGKYEQYIK

SEQ ID NO: 1814 - protein, 1203 aa, Artificial Sequence
  SARS-CoV-2/pangolin/Guangxi/P1E/2017__EPI_ISL_410539 spike protein (1-1203)(K978P_V979P_T879W_A1012W)
MFVFLFVLPLVSSQCVNLTTRTGIQPGYTNSSTRGVYYPDKVFRSSILHLTQDLFLPFFSNVTWFNTINYQGGFKKFDNPVLPFNDGVYFASTEKSNIIRGWIFGTTLDARTQSLLIVNNATNVVIKVCEFQFCTDPFLGVYYHNNNKTWVENEFRVYSSANNCTFEYISQPFLMDLEGKQGNFKNLREFVFKNVDGYFKIYSKHTPIDLVRDLPRGFAALEPLVDLPIGINITRFQTLLALHRSYLTPGKLESGWTTGAAAYYVGYLQQRTFLLSYNQNGTITDAVDCSLDPLSETKCTLKSLTVEKGIYQTSNFRVQPTISIVRFPNITNLCPFGEVFNASKFASVYAWNRKRISNCVADYSVLYNSTSFSTFKCYGVSPTKLNDLCFTNVYADSFVVKGDEVRQIAPGQTGVIADYNYKLPDDFTGCVIAWNSVKQDALTGGNYLYRLFRKSKLKPFERDISTEIYQAGSTPCNGQVGLNCYYPLERYGFHPTTGVNYQPFRVVVLSFELLNGPATVCGPKLSTTLVKDKCVNFNFNGLTGTGVLTTSKKQFLPFQQFGRDISDTTDAVRDPQTLEILDITPCSFGGVSVITPGTNTSNQVAVLYQDVNCTEVPMAIHAEQLTPAWRVYSAGANVFQTRAGCLVGAEHVNNSYECDIPVGAGICASYHSMSSLRSVNQRSIIAYTMSLGAENSVAYSNNSIAIPTNFTISVTTEILPVSMTKTSVDCTMYICGDSIECSNLLLQYGSFCTQLNRALTGIAVEQDKNTQEVFAQVKQIYKTPPIKDFGGFNFSQILPDPSKPSKRSFIEDLLFNKVTLADAGFIKQYGDCLGDIAARDLICAQKFNGLTVLPPLLTDEMIAQYTSALLAGTITSGWWFGAGAALQIPFAMQMAYRFNGIGVTQNVLYENQKLIANQFNSAIGKIQDSLSSTASALGKLQDVVNQNAQALNTLVKQLSSNFGAISSVLNDILSRLDPPEAEVQIDRLITGRLQSLQTYVTQQLIRAAEIRWSANLAATKMSECVLGQSKRVDFCGKGYHLMSFPQSAPHGVVFLHVTYVPAQEKNFTTAPAICHEGKAHFPREGVFVSNGTHWFITQRNFYEPQIITTDNTFVSGSCDVVIGIVNNTVYDPLQPELDSFKEELDKYFKNHTSPDVDLGDISGINASVVNIQKEIDRLNEVAKNLNESLIDLQELGKYEQYIK

SEQ ID NO: 1815 - protein, 1211 aa, Artificial Sequence
  SARS-CoV-2/Wuhan/WIV05/2019__EPI_ISL_402128 spike protein (1-1211)(K986P_V987P_P1069F)
MFVFLVLLPLVSSQCVNLTTRTQLPPAYTNSFTRGVYYPDKVFRSSVLHSTQDLFLPFFSNVTWFHAIHVSGTNGTKRFDNPVLPFNDGVYFASTEKSNIIRGWIFGTTLDSKTQSLLIVNNATNVVIKVCEFQFCNDPFLGVYYHKNNKSWMESEFRVYSSANNCTFEYVSQPFLMDLEGKQGNFKNLREFVFKNIDGYFKIYSKHTPINLVRDLPQGFSALEPLVDLPIGINITRFQTLLALHRSYLTPGDSSSGWTAGAAAYYVGYLQPRTFLLKYNENGTITDAVDCALDPLSETKCTLKSFTVEKGIYQTSNFRVQPTESIVRFPNITNLCPFGEVFNATRFASVYAWNRKRISNCVADYSVLYNSASFSTFKCYGVSPTKLNDLCFTNVYADSFVIRGDEVRQIAPGQTGKIADYNYKLPDDFTGCVIAWNSNNLDSKVGGNYNYLYRLFRKSNLKPFERDISTEIYQAGSTPCNGVEGFNCYFPLQSYGFQPTNGVGYQPYRVVVLSFELLHAPATVCGPKKSTNLVKNKCVNFNFNGLTGTGVLTESNKKFLPFQQFGRDIADTTDAVRDPQTLEILDITPCSFGGVSVITPGTNTSNQVAVLYQDVNCTEVPVAIHADQLTPTWRVYSTGSNVFQTRAGCLIGAEHVNNSYECDIPIGAGICASYQTQTNSPRRARSVASQSIIAYTMSLGAENSVAYSNNSIAIPTNFTISVTTEILPVSMTKTSVDCTMYICGDSTECSNLLLQYGSFCTQLNRALTGIAVEQDKNTQEVFAQVKQIYKTPPIKDFGGFNFSQILPDPSKPSKRSFIEDLLFNKVTLADAGFIKQYGDCLGDIAARDLICAQKFNGLTVLPPLLTDEMIAQYTSALLAGTITSGWTFGAGAALQIPFAMQMAYRFNGIGVTQNVLYENQKLIANQFNSAIGKIQDSLSSTASALGKLQDVVNQNAQALNTLVKQLSSNFGAISSVLNDILSRLDPPEAEVQIDRLITGRLQSLQTYVTQQLIRAAEIRASANLAATKMSECVLGQSKRVDFCGKGYHLMSFPQSAPHGVVFLHVTYVFAQEKNFTTAPAICHDGKAHFPREGVFVSNGTHWFVTQRNFYEPQIITTDNTFVSGNCDVVIGIVNNTVYDPLQPELDSFKEELDKYFKNHTSPDVDLGDISGINASVVNIQKEIDRLNEVAKNLNESLIDLQELGKYEQYIK

SEQ ID NO: 1816 - protein, 1207 aa, Artificial Sequence
  SARS-CoV-2/bat/Yunnan/RaTG13/2013__EPI_ISL_402131 spike protein (1-1207)(K982P_V983P_P1065F)
MFVFLVLLPLVSSQCVNLTTRTQLPPAYTNSSTRGVYYPDKVFRSSVLHLTQDLFLPFFSNVTWFHAIHVSGTNGIKRFDNPVLPFNDGVYFASTEKSNIIRGWIFGTTLDSKTQSLLIVNNATNVVIKVCEFQFCNDPFLGVYYHKNNKSWMESEFRVYSSANNCTFEYVSQPFLMDLEGKQGNFKNLREFVFKNIDGYFKIYSKHTPINLVRDLPPGFSALEPLVDLPIGINITRFQTLLALHRSYLTPGDSSSGWTAGAAAYYVGYLQPRTFLLKYNENGTITDAVDCALDPLSETKCTLKSFTVEKGIYQTSNFRVQPTDSIVRFPNITNLCPFGEVFNATTFASVYAWNRKRISNCVADYSVLYNSTSFSTFKCYGVSPTKLNDLCFTNVYADSFVITGDEVRQIAPGQTGKIADYNYKLPDDFTGCVIAWNSKHIDAKEGGNFNYLYRLFRKANLKPFERDISTEIYQAGSKPCNGQTGLNCYYPLYRYGFYPTDGVGHQPYRVVVLSFELLNAPATVCGPKKSTNLVKNKCVNFNFNGLTGTGVLTESNKKFLPFQQFGRDIADTTDAVRDPQTLEILDITPCSFGGVSVITPGTNASNQVAVLYQDVNCTEVPVAIHADQLTPTWRVYSTGSNVFQTRAGCLIGAEHVNNSYECDIPIGAGICASYQTQTNSRSVASQSIIAYTMSLGAENSVAYSNNSIAIPTNFTISVTTEILPVSMTKTSVDCTMYICGDSTECSNLLLQYGSFCTQLNRALTGIAVEQDKNTQEVFAQVKQIYKTPPIKDFGGFNFSQILPDPSKPSKRSFIEDLLFNKVTLADAGFIKQYGDCLGDIAARDLICAQKFNGLTVLPPLLTDEMIAQYTSALLAGTITSGWTFGAGAALQIPFAMQMAYRFNGIGVTQNVLYENQKLIANQFNSAIGKIQDSLSSTASALGKLQDVVNQNAQALNTLVKQLSSNFGAISSVLNDILSRLDPPEAEVQIDRLITGRLQSLQTYVTQQLIRAAEIRASANLAATKMSECVLGQSKRVDFCGKGYHLMSFPQSAPHGVVFLHVTYVFAQEKNFTTAPAICHDGKAHFPREGVFVSNGTHWFVTQRNFYEPQIITTDNTFVSGSCDVVIGIVNNTVYDPLQPELDSFKEELDKYFKNHTSPDVDLGDISGINASVVNIQKEIDRLNEVAKNLNESLIDLQELGKYEQYIK

SEQ ID NO: 1817 - protein, 1211 aa, Artificial Sequence
  SARS-CoV-2/Wuhan/HBCDC-HB-01/2019__EPI_ISL_402132 spike protein (1-1211)(K986P_V987P_P1069F)
MFVFLVLLPLVSSQCVNLTTRTQLPPAYTNSITRGVYYPDKVFRSSVLHSTQDLFLPFFSNVTWFHAIHVSGTNGTKRFDNPVLPFNDGVYFASTEKSNIIRGWIFGTTLDSKTQSLLIVNNATNVVIKVCEFQFCNDPFLGVYYHKNNKSWMESEFRVYSSANNCTFEYVSQPFLMDLEGKQGNFKNLREFVFKNIDGYFKIYSKHTPINLVRDLPQGFSALEPLVDLPIGINITRFQTLLALHRSYLTPGDSSSGWTAGAAAYYVGYLQPRTFLLKYNENGTITDAVDCALDPLSETKCTLKSFTVEKGIYQTSNFRVQPTESIVRFPNITNLCPFGEVFNATRFASVYAWNRKRISNCVADYSVLYNSASFSTFKCYGVSPTKLNDLCFTNVYADSFVIRGDEVRQIAPGQTGKIADYNYKLPDDFTGCVIAWNSNNLDSKVGGNYNYLYRLFRKSNLKPFERDISTEIYQAGSTPCNGVEGFNCYFPLQSYGFQPTNGVGYQPYRVVVLSFELLHAPATVCGPKKSTNLVKNKCVNFNFNGLTGTGVLTESNKKFLPFQQFGRDIADTTDAVRDPQTLEILDITPCSFGGVSVITPGTNTSNQVAVLYQDVNCTEVPVAIHADQLTPTWRVYSTGSNVFQTRAGCLIGAEHVNNSYECDIPIGAGICASYQTQTNSPRRARSVASQSIIAYTMSLGAENSVAYSNNSIAIPTNFTISVTTEILPVSMTKTSVDCTMYICGDSTECSNLLLQYGSFCTQLNRALTGIAVEQDKNTQEVFAQVKQIYKTPPIKDFGGFNFSQILPDPSKPSKRSFIEDLLFNKVTLADAGFIKQYGDCLGDIAARDLICAQKFNGLTVLPPLLTDEMIAQYTSALLAGTITSGWTFGAGAALQIPFAMQMAYRFNGIGVTQNVLYENQKLIANQFNSAIGKIQDSLSSTASALGKLQDVVNQNAQALNTLVKQLSSNFGAISSVLNDILSRLDPPEAEVQIDRLITGRLQSLQTYVTQQLIRAAEIRASANLAATKMSECVLGQSKRVDFCGKGYHLMSFPQSAPHGVVFLHVTYVFAQEKNFTTAPAICHDGKAHFPREGVFVSNGTHWFVTQRNFYEPQIITTDNTFVSGNCDVVIGIVNNTVYDPLQPELDSFKEELDKYFKNHTSPDVDLGDISGINASVVNIQKEIDRLNEVAKNLNESLIDLQELGKYEQYIK

SEQ ID NO: 1818 - protein, 1211 aa, Artificial Sequence
  SARS-CoV-2/Guangdong/20SF028/2020__EPI_ISL_403936 spike protein (1-1211)(K986P_V987P_P1069F)
MFVFLVLLPLVSSQCVNLTTRTQLPPAYTNSFTRGVYYPDKVFRSSVLYSTQDLFLPFFSNVTWFHAIHVSGTNGTKRFDNPVLPFNDGVYFASTEKSNIIRGWIFGTTLDSKTQSLLIVNNATNVVIKVCEFQFCNDPFLGVYYHKNNKSWMESEFRVYSSANNCTFEYVSQPFLMDLEGKQGNFKNLREFVFKNIDGYFKIYSKHTPINLVRDLPQGFSALEPLVDLPIGINITRFQTLLALHRSYLTPGDSSSGWTAGAAAYYVGYLQPRTFLLKYNENGTITDAVDCALDPLSETKCTLKSFTVEKGIYQTSNFRVQPTESIVRFPNITNLCPFGEVFNATRFASVYAWNRKRISNCVADYSVLYNSASFSTFKCYGVSPTKLNDLCFTNVYADSFVIRGDEVRQIAPGQTGKIADYNYKLPDDFTGCVIAWNSNNLDSKVGGNYNYLYRLFRKSNLKPFERDISTEIYQAGSTPCNGVEGFNCYFPLQSYGFQPTNGVGYQPYRVVVLSFELLHAPATVCGPKKSTNLVKNKCVNFNFNGLTGTGVLTESNKKFLPFQQFGRDIADTTDAVRDPQTLEILDITPCSFGGVSVITPGTNTSNQVAVLYQDVNCTEVPVAIHADQLTPTWRVYSTGSNVFQTRAGCLIGAEHVNNSYECDIPIGAGICASYQTQTNSPRRARSVASQSIIAYTMSLGAENSVAYSNNSIAIPTNFTISVTTEILPVSMTKTSVDCTMYICGDSTECSNLLLQYGSFCTQLNRALTGIAVEQDKNTQEVFAQVKQIYKTPPIKDFGGFNFSQILPDPSKPSKRSFIEDLLFNKVTLADAGFIKQYGDCLGDIAARDLICAQKFNGLTVLPPLLTDEMIAQYTSALLAGTITSGWTFGAGAALQIPFAMQMAYRFNGIGVTQNVLYENQKLIANQFNSAIGKIQDSLSSTASALGKLQDVVNQNAQALNTLVKQLSSNFGAISSVLNDILSRLDPPEAEVQIDRLITGRLQSLQTYVTQQLIRAAEIRASANLAATKMSECVLGQSKRVDFCGKGYHLMSFPQSAPHGVVFLHVTYVFAQEKNFTTAPAICHDGKAHFPREGVFVSNGTHWFVTQRNFYEPQIITTDNTFVSGNCDVVIGIVNNTVYDPLQPELDSFKEELDKYFKNHTSPDVDLGDISGINASVVNIQKEIDRLNEVAKNLNESLIDLQELGKYEQYIK

SEQ ID NO: 1819 - protein, 1211 aa, Artificial Sequence
  SARS-CoV-2/Shenzhen/SZTH-001/2020__EPI_ISL_406592 spike protein (1-1211)(K986P_V987P_P1069F)
MFVFLVLLPLVSSQCVNLTTRTQLPPAYTNSFTRGVYYPDKVFRSSVLHSTQDLFLPFFSNVTWFHAIHVSGTNGTKRFDNPVLPFNDGVYFASTEKSNIIRGWIFGTTLDSKTQSLLIVNNATNVVIKVCEFQFCNDPFLGVYYHKNNKSWMESEFRVYSSANNCTFEYVSQPFLMDLEGKQGNFKNLREFVFKNIDGYFKIYSKHTPINLVRDLPQGFSALEPLVDLPIGINITRFQTLLALHRSYLTPGDSSSGWTAGAAAYYVGYLQPRTFLLKYNENGTITDAVDCALDPLSETKCTLKSFTVEKGIYQTSNFRVQPTESIVRFPNITNLCPFGEVFNATRFASVYAWNRKRISNCVADYSVLYNSASFSTFKCYGVSPTKLNDLCFTNVYADSFVIRGDEVRQIAPGQTGKIADYNYKLPDDFTGCVIAWNSNNLDSKVGGNYNYLYRLFRKSNLKPFERDISTEIYQAGSTPCNGVEGFNCYFPLQSYGFQPTNGVGYQPYRVVVLSFELLHAPATVCGPKKSTNLVKNKCVNFNFNGLTGTGVLTESNKKFLPFQQFGRDIADTTDAVRDPQTLEILDITPCSFGGVSVITPGTNTSNQVAVLYQDVNCTEVPVAIHADQLTPTWRVYSTGSNVFQTRAGCLIGAEHVNNSYECDIPIGAGICASYQTQTNSPRRARSVASQSIIAYTMSLGAENSVAYSNNSIAIPTNFTISVTTEILPVSMTKTSVDCTMYICGDSTECSNLLLQYGSFCTQLNRALTGIAVEQDKNTQEVFAQVKQIYKTPPIKDFGGFNFSQILPDPSKPSKRSFIEDLLFNKVTLADAGFIKQYGDCLGDIAARDLICAQKFNGLTVLPPLLTDEMIAQYTSALLAGTITSGWTFGAGAALQIPFAMQMAYRFNGIGVTQNVLYENQKLIANQFNSAIGKIQDSLSSTASALGKLQDVVNQNAQALNTLVKQLSSNFGAISSVLNDILSRLDPPEAEVQIDRLITGRLQSLQTYVTQQLIRAAEIRASANLAATKMSECVLGQSKRVDFCGKGYHLMSFPQSAPHGVVFLHVTYVFAQEKNFTTAPAICHDGKAHFPREGVFVSNGTHWFVTQRNFYEPQIITTDNTFVSGNCDVLIGIVNNTVYDPLQPELDSFKEELDKYFKNHTSPDVDLGDISGINASVVNIQKEIDRLNEVAKNLNESLIDLQELGKYEQYIK

SEQ ID NO: 1820 - protein, 1211 aa, Artificial Sequence
  SARS-CoV-2/Shenzhen/SZTH-004/2020__EPI_ISL_406595 spike protein (1-1211)(K986P_V987P_P1069F)
MFVFLVLLPLVSSQCVNLTTRTQLPPAYTNSFTRGVYYPDKVFRSSVLHSTQDLFLPFFSNVTWFHAIHVSGTNGTKRFDNPVLPFNDGVYFASTEKSNIIRGWIFGTTLDSKTQSLLIVNNATNVVIKVCEFQFCNDPFLGVYYHKNNKSWMESEFRVYSSANNCTFEYVSQPFLMDLEGKQGNFKNLREFVFKNIDGYFKIYSKHTPINLVRDLPQGFSALEPLVDLPIGINITRFQTLLALHRSYLTPGDSSSGWTAGAAAYYVGYLQPRTFLLKYNENGTITDAVDCALDPLSETKCTLKSFTVEKGIYQTSNFRVQPTESIVRFPNITNLCPFGEVFNATRFASVYAWDRKRISNCVAYYSVLYNSASFSTFKCYGVSPTKLNDLCFTNVYADSFVIRGDEVRQIAPGQTGKIADYNYKLPDDFTGCVIAWNSNNLDSKVGGNYNYLYRLFRKSNLKPFERDISTEIYQAGSTPCNGVEGFNCYFPLQSYGFQPTNGVGYQPYRVVVLSFELLHAPATVCGPKKSTNLVKNKCVNFNFNGLTGTGVLTESNKKFLPFQQFGRDIADTTDAVRDPQTLEILDITPCSFGGVSVITPGTNTSNQVAVLYQDVNCTEVPVAIHADQLTPTWRVYSTGSNVFQTRAGCLIGAEHVNNSYECDIPIGAGICASYQTQTNSPRRARSVASQSIIAYTMSLGAENSVAYSNNSIAIPTNFTISVTTEILPVSMTKTSVDCTMYICGDSTECSNLLLQYGSFCTQLNRALTGIAVEQDKNTQEVFAQVKQIYKTPPIKDFGGFNFSQILPDPSKPSKRSFIEDLLFNKVTLADAGFIKQYGDCLGDIAARDLICAQKFNGLTVLPPLLTDEMIAQYTSALLAGTITSGWTFGAGAALQIPFAMQMAYRFNGIGVTQNVLYENQKLIANQFNSAIGKIQDSLSSTASALGKLQDVVNQNAQALNTLVKQLSSNFGAISSVLNDILSRLDPPEAEVQIDRLITGRLQSLQTYVTQQLIRAAEIRASANLAATKMSECVLGQSKRVDFCGKGYHLMSFPQSAPHGVVFLHVTYVFAQEKNFTTAPAICHDGKAHFPREGVFVSNGTHWFVTQRNFYEPQIITTDNTFVSGNCDVVIGIVNNTVYDPLQPELDSFKEELDKYFKNHTSPDVDLGDISGINASVVNIQKEIDRLNEVAKNLNESLIDLQELGKYEQYIK

SEQ ID NO: 1821 - protein, 1211 aa, Artificial Sequence
  SARS-CoV-2/France/IDF0372/2020__EPI_ISL_406596 spike protein (1-1211)(K986P_V987P_P1069F)
MFVFLVLLPLVSSQCVNLTTRTQLPPAYTNSFTRGVYYPDKVFRSSVLHSTQDLFLPFFSNVTWFHAIHVSGTNGTKRFDNPVLPFNDGVYFASTEKSNIIRGWIFGTTLDSKTQSLLIVNNATNVVIKVCEFQFCNDPFLGVYYHKNNKSWMESEFRVYSSANNCTFEYVSQPFLMDLEGKQGNFKNLREFVFKNIDGYFKIYSKHTPINLVRDLPQGFSALEPLVDLPIGINITRFQTLLALHRSYLTPGDSSSGWTAGAAAYYVGYLQPRTFLLKYNENGTITDAVDCALDPLSETKCTLKSFTVEKGIYQTSNFRVQPTESIVRFPNITNLCPFGEVFNATRFASVYAWNRKRISNCVADYSFLYNSASFSTFKCYGVSPTKLNDLCFTNVYADSFVIRGDEVRQIAPGQTGKIADYNYKLPDDFTGCVIAWNSNNLDSKVGGNYNYLYRLFRKSNLKPFERDISTEIYQAGSTPCNGVEGFNCYFPLQSYGFQPTNGVGYQPYRVVVLSFELLHAPATVCGPKKSTNLVKNKCVNFNFNGLTGTGVLTESNKKFLPFQQFGRDIADTTDAVRDPQTLEILDITPCSFGGVSVITPGTNTSNQVAVLYQDVNCTEVPVAIHADQLTPTWRVYSTGSNVFQTRAGCLIGAEHVNNSYECDIPIGAGICASYQTQTNSPRRARSVASQSIIAYTMSLGAENSVAYSNNSIAIPTNFTISVTTEILPVSMTKTSVDCTMYICGDSTECSNLLLQYGSFCTQLNRALTGIAVEQDKNTQEVFAQVKQIYKTPPIKDFGGFNFSQILPDPSKPSKRSFIEDLLFNKVTLADAGFIKQYGDCLGDIAARDLICAQKFNGLTVLPPLLTDEMIAQYTSALLAGTITSGWTFGAGAALQIPFAMQMAYRFNGIGVTQNVLYENQKLIANQFNSAIGKIQDSLSSTASALGKLQDVVNQNAQALNTLVKQLSSNFGAISSVLNDILSRLDPPEAEVQIDRLITGRLQSLQTYVTQQLIRAAEIRASANLAATKMSECVLGQSKRVDFCGKGYHLMSFPQSAPHGVVFLHVTYVFAQEKNFTTAPAICHDGKAHFPREGVFVSNGTHWFVTQRNFYEPQIITTDNTFVSGNCDVVIGIVNNTVYDPLQPELDSFKEELDKYFKNHTSPDVDLGDISGINASVVNIQKEIDRLNEVAKNLNESLIDLQELGKYEQYIK

SEQ ID NO: 1822 - protein, 1211 aa, Artificial Sequence
  SARS-CoV-2/Australia/VIC01/2020__EPI_ISL_406844 spike protein (1-1211)(K986P_V987P_P1069F)
MFVFLVLLPLVSSQCVNLTTRTQLPPAYTNSFTRGVYYPDKVFRSSVLHSTQDLFLPFFSNVTWFHAIHVSGTNGTKRFDNPVLPFNDGVYFASTEKSNIIRGWIFGTTLDSKTQSLLIVNNATNVVIKVCEFQFCNDPFLGVYYHKNNKSWMESEFRVYSSANNCTFEYVSQPFLMDLEGKQGNFKNLREFVFKNIDGYFKIYSKHTPINLVRDLPQGFSALEPLVDLPIGINITRFQTLLALHRRYLTPGDSSSGWTAGAAAYYVGYLQPRTFLLKYNENGTITDAVDCALDPLSETKCTLKSFTVEKGIYQTSNFRVQPTESIVRFPNITNLCPFGEVFNATRFASVYAWNRKRISNCVADYSVLYNSASFSTFKCYGVSPTKLNDLCFTNVYADSFVIRGDEVRQIAPGQTGKIADYNYKLPDDFTGCVIAWNSNNLDSKVGGNYNYLYRLFRKSNLKPFERDISTEIYQAGSTPCNGVEGFNCYFPLQSYGFQPTNGVGYQPYRVVVLSFELLHAPATVCGPKKSTNLVKNKCVNFNFNGLTGTGVLTESNKKFLPFQQFGRDIADTTDAVRDPQTLEILDITPCSFGGVSVITPGTNTSNQVAVLYQDVNCTEVPVAIHADQLTPTWRVYSTGSNVFQTRAGCLIGAEHVNNSYECDIPIGAGICASYQTQTNSPRRARSVASQSIIAYTMSLGAENSVAYSNNSIAIPTNFTISVTTEILPVSMTKTSVDCTMYICGDSTECSNLLLQYGSFCTQLNRALTGIAVEQDKNTQEVFAQVKQIYKTPPIKDFGGFNFSQILPDPSKPSKRSFIEDLLFNKVTLADAGFIKQYGDCLGDIAARDLICAQKFNGLTVLPPLLTDEMIAQYTSALLAGTITSGWTFGAGAALQIPFAMQMAYRFNGIGVTQNVLYENQKLIANQFNSAIGKIQDSLSSTASALGKLQDVVNQNAQALNTLVKQLSSNFGAISSVLNDILSRLDPPEAEVQIDRLITGRLQSLQTYVTQQLIRAAEIRASANLAATKMSECVLGQSKRVDFCGKGYHLMSFPQSAPHGVVFLHVTYVFAQEKNFTTAPAICHDGKAHFPREGVFVSNGTHWFVTQRNFYEPQIITTDNTFVSGNCDVVIGIVNNTVYDPLQPELDSFKEELDKYFKNHTSPDVDLGDISGINASVVNIQKEIDRLNEVAKNLNESLIDLQELGKYEQYIK

SEQ ID NO: 1823 - protein, 1211 aa, Artificial Sequence
  SARS-CoV-2/Germany/BavPat1/2020__EPI_ISL_406862 spike protein (1-1211)(K986P_V987P_P1069F)
MFVFLVLLPLVSSQCVNLTTRTQLPPAYTNSFTRGVYYPDKVFRSSVLHSTQDLFLPFFSNVTWFHAIHVSGTNGTKRFDNPVLPFNDGVYFASTEKSNIIRGWIFGTTLDSKTQSLLIVNNATNVVIKVCEFQFCNDPFLGVYYHKNNKSWMESEFRVYSSANNCTFEYVSQPFLMDLEGKQGNFKNLREFVFKNIDGYFKIYSKHTPINLVRDLPQGFSALEPLVDLPIGINITRFQTLLALHRSYLTPGDSSSGWTAGAAAYYVGYLQPRTFLLKYNENGTITDAVDCALDPLSETKCTLKSFTVEKGIYQTSNFRVQPTESIVRFPNITNLCPFGEVFNATRFASVYAWNRKRISNCVADYSVLYNSASFSTFKCYGVSPTKLNDLCFTNVYADSFVIRGDEVRQIAPGQTGKIADYNYKLPDDFTGCVIAWNSNNLDSKVGGNYNYLYRLFRKSNLKPFERDISTEIYQAGSTPCNGVEGFNCYFPLQSYGFQPTNGVGYQPYRVVVLSFELLHAPATVCGPKKSTNLVKNKCVNFNFNGLTGTGVLTESNKKFLPFQQFGRDIADTTDAVRDPQTLEILDITPCSFGGVSVITPGTNTSNQVAVLYQGVNCTEVPVAIHADQLTPTWRVYSTGSNVFQTRAGCLIGAEHVNNSYECDIPIGAGICASYQTQTNSPRRARSVASQSIIAYTMSLGAENSVAYSNNSIAIPTNFTISVTTEILPVSMTKTSVDCTMYICGDSTECSNLLLQYGSFCTQLNRALTGIAVEQDKNTQEVFAQVKQIYKTPPIKDFGGFNFSQILPDPSKPSKRSFIEDLLFNKVTLADAGFIKQYGDCLGDIAARDLICAQKFNGLTVLPPLLTDEMIAQYTSALLAGTITSGWTFGAGAALQIPFAMQMAYRFNGIGVTQNVLYENQKLIANQFNSAIGKIQDSLSSTASALGKLQDVVNQNAQALNTLVKQLSSNFGAISSVLNDILSRLDPPEAEVQIDRLITGRLQSLQTYVTQQLIRAAEIRASANLAATKMSECVLGQSKRVDFCGKGYHLMSFPQSAPHGVVFLHVTYVFAQEKNFTTAPAICHDGKAHFPREGVFVSNGTHWFVTQRNFYEPQIITTDNTFVSGNCDVVIGIVNNTVYDPLQPELDSFKEELDKYFKNHTSPDVDLGDISGINASVVNIQKEIDRLNEVAKNLNESLIDLQELGKYEQYIK

SEQ ID NO: 1824 - protein, 1211 aa, Artificial Sequence
  SARS-CoV-2/Wuhan/HBCDC-HB-02/2020__EPI_ISL_412978 spike protein (1-1211)(K986P_V987P_P1069F)
MFVFLVLLPLVSSQCVNLTTRTQLPPAYTNSFTRGVYYPDKVFRSSVLHSTQDLFLPFFSNVTWFHAIHVSGTNGTKRFDNPVLPFNDGVYFASTEKSNIIRGWIFGTTLDSKTQSLLIVNNATNVVIKVCEFQFCNDPFLGVYYHKNNKSWMESEFRVYSSANNCTFEYVSQPFLMDLEGKQGNFKNLREFVFKNIDGYFKIYSKHTPINLVRDLPQGFSALEPLVDLPIGINITRFQTLLALHRSYLTPGDSSSGWTAGAAAYYVGYLQPRTFLLKYNENGTITDAVDCALDPLSETKCTLKSFTVEKGIYQTSNFRVQPTESIVRFPNITNLCPFGEVFNATRFASVYAWNRKRISNCVADYSVLYNSASFSTFKCYGVSPTKLNDLCFTNVYADSFVIRGDEVRQIAPGQTGKIADYNYKLPDDFTGCVIAWNSNNLDSKVGGNYNYLYRLFRKSNLKPFERDISTEIYQAGSTPCNGVEGFNCYFPLQSYGFQPTNGVGYQPYRVVVLSFELLHAPATVCGPKKSTNLVKNKCVNFNFNGLTGTGVLTESNKKFLPFQQFGRDIADTTDAVRDPQTLEILDITPCSFGGVSVITPGTNTSNQVAVLYQDVNCTEVPVAIHADQLTPTWRVYSTGSNVFQTRAGCLIGAEHVNNSYECDIPIGAGICASYQTQTNSPRRARSVASQSIIAYTMSLGAENSVAYSNNSIAIPTNFTISVTTEILPVSMTKTSVDCTMYICGDSTECSNFLLQYGSFCTQLNRALTGIAVEQDKNTQEVFAQVKQIYKTPPIKDFGGFNFSQILPDPSKPSKRSFIEDLLFNKVTLADAGFIKQYGDCLGDIAARDLICAQKFNGLTVLPPLLTDEMIAQYTSALLAGTITSGWTFGAGAALQIPFAMQMAYRFNGIGVTQNVLYENQKLIANQFNSAIGKIQDSLSSTASALGKLQDVVNQNAQALNTLVKQLSSNFGAISSVLNDILSRLDPPEAEVQIDRLITGRLQSLQTYVTQQLIRAAEIRASANLAATKMSECVLGQSKRVDFCGKGYHLMSFPQSAPHGVVFLHVTYVFAQEKNFTTAPAICHDGKAHFPREGVFVSNGTHWFVTQRNFYEPQIITTDNTFVSGNCDVVIGIVNNTVYDPLQPELDSFKEELDKYFKNHTSPDVDLGDISGINASVVNIQKEIDRLNEVAKNLNESLIDLQELGKYEQYIK

SEQ ID NO: 1825 - protein, 1211 aa, Artificial Sequence
  SARS-CoV-2/Australia/QLD02/2020__EPI_ISL_407896 spike protein (1-1211)(K986P_V987P_P1069F)
MFVFLVLLPLVSSQCVNLTTRTQLPPAYTNSFTRGVYYPDKVFRSSVLHSTQDLFLPFFSNVTWFHAIHVSGTNGTKRFDNPVLPFNDGVYFASTEKSNIIRGWIFGTTLDSKTQSLLIVNNATNVVIKVCEFQFCNDPFLGVYYHKNNKSWMESEFRVYSSANNCTFEYVSQPFLMDLEGKQGNFKNLREFVFKNIDGYFKIYSKHTPINLVRDLPQGFSALEPLVDLPIGINITRFQTLLALHRSYLTPGDSSSGWTAGAAAYYVGYLQPRTFLLKYNENGTITDAVDCALDPLSETKCTLKSFTVEKGIYQTSNFRVQPTESIVRFPNITNLCPFGEVFNATRFASVYAWNRKRISNCVADYSVLYNSASFSTFKCYGVSPTKLNDLCFTNVYADSFVIRGDEVRQIAPGQTGKIADYNYKLPDDFTGCVIAWNSNNLDSKVGGNYNYLYRLFRKSNLKPFERDISTEIYQAGSTPCNGVEGFNCYFPLQSYGFQPTNGVGYQPYRVVVLSFELLHAPATVCGPKKSTNLVKNKCVNFNFNGLTGTGVLTESNKKFLPFQQFGRDIADTTDAVRDPQTLEILDITPCSFGGVSVITPGTNTSNQVAVLYQDVNCTEVPVAIHADQLTPTWRVYSTGSNVFQTRAGCLIGAEHVNNSYECDIPIGAGICASYQTQTNSPRRARSVASQSIIAYTMSLGAENSVAYSNNSIAIPTNFTISVTTEILPVSMTKTSVDCTMYICGDSTECSNLLLQYGSFCTQLNRALTGIAVEQDKNTQEVFAQVKQIYKTPPIKDFGGFNFSQILPDPSKPSKRSFIEDLLFNKVTLADAGFIKQYGDCLGDIAARDLICAQKFNGLTVLPPLLTDEMIAQYTSALLAGTITSGWTFGAGAALQIPFAMQMAYRFNGIGVTQNVLYENQKLIANQFNSAIGKIQDSLSSTASALGKLQDVVNQNAQALNTLVKQLSSNFGAISSVLNDILSRLDPPEAEVQIDRLITGRLQSLQTYVTQQLIRAAEIRASANLAATKMSECVLGQSKRVDFCGKGYHLMSFPQSAPHGVVFLHVTYVFAQEKNFTTAPAICHDGKAHFPREGVFVSNGTHWFVTQRNFYEPQIITTDNTFVSGNCDVVIGIVNNTVYDPLQLELDSFKEELDKYFKNHTSPDVDLGDISGINASVVNIQKEIDRLNEVAKNLNESLIDLQELGKYEQYIK

SEQ ID NO: 1826 - protein, 1211 aa, Artificial Sequence
  SARS-CoV-2/India/1-31/2020__EPI_ISL_413523 spike protein (1-1211)(K986P_V987P_P1069F)
MFVFLVLLPLVSSQCVNLTTRTQLPPAYTNSFTRGVYYPDKVFRSSVLHSTQDLFLPFFSNVTWFHAIHVSGTNGTKRFDNPVLPFNDGVYFASTEKSNIIRGWIFGTTLDSKTQSLLIVNNATNVVIKVCEFQFCNDPFLGVYYHKNNKSWMESEFRVYSSANNCTFEYVSQPFLMDLEGKQGNFKNLREFVFKNIDGYFKIYSKHTPINLVRDLPQGFSALEPLVDLPIGINITRFQTLLALHRSYLTPGDSSSGWTAGAAAYYVGYLQPRTFLLKYNENGTITDAVDCALDPLSETKCTLKSFTVEKGIYQTSNFRVQPTESIVRFPNITNLCPFGEVFNATRFASVYAWNRKRISNCVADYSVLYNSASFSTFKCYGVSPTKLNDLCFTNVYADSFVIRGDEVRQIAPGQTGKIADYNYKLPDDFTGCVIAWNSNNLDSKVGGNYNYLYRLFRKSNLKPFERDISTEIYQAGSTPCNGVEGFNCYFPLQSYGFQPTNGVGYQPYRVVVLSFELLHAPATVCGPKKSTNLVKNKCVNFNFNGLTGTGVLTESNKKFLPFQQFGRDIADTTDAVRDPQTLEILDITPCSFGGVSVITPGTNTSNQVAVLYQDVNCTEVPVAIHADQLTPTWRVYSTGSNVFQTRAGCLIGAEHVNNSYECDIPIGAGICASYQTQTNSPRRARSVASQSIIAYTMSLGAENSVAYSNNSIAIPTNFTISVTTEILPVSMTKTSVDCTMYICGDSTECSNLLLQYGSFCTQLNRALTGIAVEQDKNTQEVFAQVKQIYKTPPIKDFGGFNFSQILPDPSKPSKRSFIEDLLFNKVTLADAGFIKQYGDCLGDIAARDLICAQKFNGLTVLPPLLTDEMIAQYTSALLAGTITSGWTFGAGAALQIPFAMQMAYRFNGIGVTQNVLYENQKLIANQFNSVIGKIQDSLSSTASALGKLQDVVNQNAQALNTLVKQLSSNFGAISSVLNDILSRLDPPEAEVQIDRLITGRLQSLQTYVTQQLIRAAEIRASANLAATKMSECVLGQSKRVDFCGKGYHLMSFPQSAPHGVVFLHVTYVFAQEKNFTTAPAICHDGKAHFPREGVFVSNGTHWFVTQRNFYEPQIITTDNTFVSGNCDVVIGIVNNTVYDPLQPELDSFKEELDKYFKNHTSPDVDLGDISGINASVVNIQKEIDRLNEVAKNLNESLIDLQELGKYEQYIK

SEQ ID NO: 1827 - protein, 1211 aa, Artificial Sequence
  SARS-CoV-2/Guangdong/GD2020087-P0008/2020__EPI_ISL_413863 spike protein (1-1211)(K986P_V987P_P1069F)
MFVFLVLLPLVSSQCVNLTTRTQLPPAYTNSFTRGVYYPDKVFRSSVLHSTQDLFLPFFSNVTWFHAIHVSGTNGTKRFDNPVLPFNDGVYFASTEKSNIIRGWIFGTTLDSKTQSLLIVNNATNVVIKVCEFQFCNDPFLGVYYHKNNKSWMESEFRVYSSANNCTFEYVSQPFLMDLEGKQGNFKNLREFVFKNIDGYFKIYSKHTPINLVRDLPQGFSALEPLVDLPIGINITRFQTLLALHRSYLTPGDSSSGWTAGAAAYYVGYLQPRTFLLKYNENGTITDAVDCALDPLSETKCTLKSFTVEKGIYQTSNFRVQPTESIVRFPNITNLCPFGEVFNATRFASVYAWNRKRISNCVADYSVLYNSASFSTFKCYGVSPTKLNDLCFTNVYADSFVIRGDEVREIAPGQTGKIADYNYKLPDDFTGCVIAWNSNNLDSKVGGNYNYLYRLFRKSNLKPFERDISTEIYQAGSTPCNGVEGFNCYFPLQSYGFQPTNGVGYQPYRVVVLSFELLHAPATVCGPKKSTNLVKNKCVNFNFNGLTGTGVLTESNKKFLPFQQFGRDIADTTDAVRDPQTLEILDITPCSFGGVSVITPGTNTSNQVAVLYQDVNCTEVPVAIHADQLTPTWRVYSTGSNVFQTRAGCLIGAEHVNNSYECDIPIGAGICASYQTQTNSPRRARSVASQSIIAYTMSLGAENSVAYSNNSIAIPTNFTISVTTEILPVSMTKTSVDCTMYICGDSTECSNLLLQYGSFCTQLNRALTGIAVEQDKNTQEVFAQVKQIYKTPPIKDFGGFNFSQILPDPSKPSKRSFIEDLLFNKVTLADAGFIKQYGDCLGDIAARDLICAQKFNGLTVLPPLLTDEMIAQYTSALLAGTITSGWTFGAGAALQIPFAMQMAYRFNGIGVTQNVLYENQKLIANQFNSAIGKIQDSLSSTASALGKLQDVVNQNAQALNTLVKQLSSNFGAISSVLNDILSRLDPPEAEVQIDRLITGRLQSLQTYVTQQLIRAAEIRASANLAATKMSECVLGQSKRVDFCGKGYHLMSFPQSAPHGVVFLHVTYVFAQEKNFTTAPAICHDGKAHFPREGVFVSNGTHWFVTQRNFYEPQIITTDNTFVSGNCDVVIGIVNNTVYDPLQPELDSFKEELDKYFKNHTSPDVDLGDISGINASVVNIQKEIDRLNEVAKNLNESLIDLQELGKYEQYIK

SEQ ID NO: 1828 - protein, 1211 aa, Artificial Sequence
  SARS-CoV-2/Sweden/01/2020__EPI_ISL_411951 spike protein (1-1211)(K986P_V987P_P1069F)
MFVFLVLLPLVSSQCVNLTTRTQLPPAYTNSFTRGVYYPDKVFRSSVLHSTQDLFLPFFSNVTWFHAIHVSGTNGTKRFDNPVLPFNDGVYFASTEKSNIIRGWIFGTTLDSKTQSLLIVNNATNVVIKVCEFQFCNDPFLGVYYHKNNKSWMESEFRVYSSANNCTFEYVSQPFLMDLEGKQGNFKNLREFVFKNIDGYFKIYSKHTPINLVRDLPQGFSALEPLVDLPIGINITRFQTLLALHRSYLTPGDSSSGWTAGAAAYYVGYLQPRTFLLKYNENGTITDAVDCALDPLSETKCTLKSFTVEKGIYQTSNFRVQPTESIVRFPNITNLCPFGEVFNATRFASVYAWNRKRISNCVADYSVLYNSASFSTFKCYGVSPTKLNDLCFTNVYADSFVIRGDEVRQIAPGQTGKIADYNYKLPDDFTGCVIAWNSNNLDSKVGGNYNYLYRLFRKSNLKPFERDISTEIYQAGSTPCNGVEGFNCYFPLQSYGFQPTNGVGYQPYRVVVLSFELLHAPATVCGPKKSTNLVKNKCVNFNFNGLTGTGVLTESNKKFLPFQQFGRDIADTTDAVRDPQTLEILDITPCSFGGVSVITPGTNTSNQVAVLYQDVNCTEVPVAIHADQLTPTWRVYSTGSNVFQTRAGCLIGAEHVNNSYECDIPIGAGICASYQTQTNSPRRARSVASQSIIAYTMSLGAENSVAYSNNSIAIPTNFTISVTTEILPVSMTKTSVDCTMYICGDSTECSNLLLQYGSFCTQLNRALTGIAVEQDKNTQEVFAQVKQIYKTPPIKDCGGFNFSQILPDPSKPSKRSFIEDLLFNKVTLADAGFIKQYGDCLGDIAARDLICAQKFNGLTVLPPLLTDEMIAQYTSALLAGTITSGWTFGAGAALQIPFAMQMAYRFNGIGVTQNVLYENQKLIANQFNSAIGKIQDSLSSTASALGKLQDVVNQNAQALNTLVKQLSSNFGAISSVLNDILSRLDPPEAEVQIDRLITGRLQSLQTYVTQQLIRAAEIRASANLAATKMSECVLGQSKRVDFCGKGYHLMSFPQSAPHGVVFLHVTYVFAQEKNFTTAPAICHDGKAHFPREGVFVSNGTHWFVTQRNFYEPQIITTDNTFVSGNCDVVIGIVNNTVYDPLQPELDSFKEELDKYFKNHTSPDVDLGDISGINASVVNIQKEIDRLNEVAKNLNESLIDLQELGKYEQYIK

SEQ ID NO: 1829 - protein, 1211 aa, Artificial Sequence
  SARS-CoV-2/Tianmen/HBCDC-HB-07/2020__EPI_ISL_412983 spike protein (1-1211)(K986P_V987P_P1069F)
MFVFLVLLPLVSSQCVNLTTRTQLPPAYTNSFTRGVYYPDKVFRSSVLHSTQDLFLPFFSNVTWFHAIHVSGTNGTKRFDNPVLPFNDGVYFASTEKSNIIRGWIFGTTLDSKTQSLLIVNNATNVVIKVCEFQFCNDPFLGVYYHKNNKSWMESEFRVYSSANNCTFEYVSQPFLMDLEGKQGNFKNLREFVFKNIDGYFKIYSKHTPINLVRDLPQGFSALEPLVDLPIGINITRFQTLLALHRSYLTPGDSSSGWTAGAAAYYVGYLQPRTFLLKYNENGTITDAVDCALDPLSETKCTLKSFTVEKGIYQTSNFRVQPTESIVRFPNITNLCPFGEVFNATRFASVYAWNRKRISNCVADYSVLYNSASFSTFKCYGVSPTKLNDLCFTNVYADSFVIRGDEVRQIAPGQTGKIADYNYKLPDDFTGCVIAWNSNNLDSKVGGNYNYLYRLFRKSNLKPFERDISTEIYQAGSTPCNGVEGFNCYFPLQSYGFQPTNGVGYQPYRVVVLSFELLHAPATVCGPKKSTNLVKNKCVNFNFNGLTGTGVLTESNKKFLPFQQFGRDIADTTDAVRDPQTLEILDITPCSFGGVSVITPGTNTSNQVAVLYQDLNCTEVPVAIHADQLTPTWRVYSTGSNVFQTRAGCLIGAEHVNNSYECDIPIGAGICASYQTQTNSPRRARSVASQSIIAYTMSLGAENSVAYSNNSIAIPTNFTISVTTEILPVSMTKTSVDCTMYICGDSTECSNLLLQYGSFCTQLNRALTGIAVEQDKNTQEVFAQVKQIYKTPPIKDFGGFNFSQILPDPSKPSKRSFIEDLLFNKVTLADAGFIKQYGDCLGDIAARDLICAQKFNGLTVLPPLLTDEMIAQYTSALLAGTITSGWTFGAGAALQIPFAMQMAYRFNGIGVTQNVLYENQKLIANQFNSAIGKIQDSLSSTASALGKLQDVVNQNAQALNTLVKQLSSNFGAISSVLNDILSRLDPPEAEVQIDRLITGRLQSLQTYVTQQLIRAAEIRASANLAATKMSECVLGQSKRVDFCGKGYHLMSFPQSAPHGVVFLHVTYVFAQEKNFTTAPAICHDGKAHFPREGVFVSNGTHWFVTQRNFYEPQIITTDNTFVSGNCDVVIGIVNNTVYDPLQPELDSFKEELDKYFKNHTSPDVDLGDISGINASVVNIQKEIDRLNEVAKNLNESLIDLQELGKYEQYIK

SEQ ID NO: 1830 - protein, 1211 aa, Artificial Sequence
  SARS-CoV-2/Hong Kong/case42_VM20002493/2020__EPI_ISL_414527 spike protein (1-1211)(K986P_V987P_P1069F)
MFVFLVLLPLVSSQCVNLTTRTQLPPAYTNSFTRGVYYPDKVFRSSVLHSTQDLFLPFFSNVTWFHAIHVSGTNGTKRFDNPVLPFNDGVYFASTEKSNIIRGWIFGTTLDSKTQSLLIVNNATNVVIKVCEFQFCNDPFLGVYYHKNNKSWMESEFRVYSSANNCTFEYVSQPFLMDLEGKQGNFKNLREFVFKNIDGYFKIYSKHTPINLVRDLPQGFSALEPLVDLPIGINITRFQTLLALHRSYLTPGDSSSGWTAGAAAYYVGYLQPRTFLLKYNENGTITDAVDCALDPLSETKCTLKSFTVEKGIYQTSNFRVQPTESIVRFPNITNLCPFGEVFNATRFASVYAWNRKRISNCVADYSVLYNSASFSTFKCYGVSPTKLNDLCFTNVYADSFVIRGDEVRQIAPGQTGKIADYNYKLPDDFTGCVIAWNSNNLDSKVGGNYNYLYRLFRKSNLKPFERDISTEIYQAGSTPCNGVEGFNCYFPLQSYGFQPTNGVGYQPYRVVVLSFELLHAPATVCGPKKSTNLVKNKCVNFNFNGLTGTGVLTESNKKFLPFQQFGRDIADTTDAVRDPQTLEILDITPCSFGGVSVITPGTNTSNQVAVLYQDVNCTEVPVAIHADQLTPTWRVYSTGSNVFQTRAGCLIGAEHVNNSYECDIPIGAGICASYQTQTNSPRRARSVASQSIIAYTMSLGAENSVAYSNNSIAIPTNFAISVTTEILPVSMTKTSVDCTMYICGDSTECSNLLLQYGSFCTQLNRALTGIAVEQDKNTQEVFAQVKQIYKTPPIKDFGGFNFSQILPDPSKPSKRSFIEDLLFNKVTLADAGFIKQYGDCLGDIAARDLICAQKFNGLTVLPPLLTDEMIAQYTSALLAGTITSGWTFGAGAALQIPFAMQMAYRFNGIGVTQNVLYENQKLIANQFNSAIGKIQDSLSSTASALGKLQDVVNQNAQALNTLVKQLSSNFGAISSVLNDILSRLDPPEAEVQIDRLITGRLQSLQTYVTQQLIRAAEIRASANLAATKMSECVLGQSKRVDFCGKGYHLMSFPQSAPHGVVFLHVTYVFAQEKNFTTAPAICHDGKAHFPREGVFVSNGTHWFVTQRNFYEPQIITTDNTFVSGNCDVVIGIVNNTVYDPLQPELDSFKEELDKYFKNHTSPDVDLGDISGINASVVNIQKEIDRLNEVAKNLNESLIDLQELGKYEQYIK

SEQ ID NO: 1831 - protein, 1211 aa, Artificial Sequence
  SARS-CoV-2/USA/CruiseA-23/2020__EPI_ISL_414482 spike protein (1-1211)(K986P_V987P_P1069F)
MFVFLVLLPLVSSQCVNLTTRTQLPPAYTNSFTRGVYYPDKVFRSSVLHSTQDLFLPFFSNVTWFHAIHVSGTNGTKRFDNPVLPFNDGVYFASTEKSNIIRGWIFGTTLDSKTQSLLIVNNATNVVIKVCEFQFCNDPFLGVYYHKNNKSWMESEFRVYSSANNCTFEYVSQPFLMDLEVKQGNFKNLREFVFKNIDGYFKIYSKHTPINLVRDLPQGFSALEPLVDLPIGINITRFQTLLALHRSYLTPGDSSSGWTAGAAAYYVGYLQPRTFLLKYNENGTITDAVDCALDPLSETKCTLKSFTVEKGIYQTSNFRVQPTESIVRFPNITNLCPFGEVFNATRFASVYAWNRKRISNCVADYSVLYNSASFSTFKCYGVSPTKLNDLCFTNVYADSFVIRGDEVRQIAPGQTGKIADYNYKLPDDFTGCVIAWNSNNLDSKVGGNYNYLYRLFRKSNLKPFERDISTEIYQAGSTPCNGVEGFNCYFPLQSYGFQPTNGVGYQPYRVVVLSFELLHAPATVCGPKKSTNLVKNKCVNFNFNGLTGTGVLTESNKKFLPFQQFGRDIADTTDAVRDPQTLEILDITPCSFGGVSVITPGTNTSNQVAVLYQDVNCTEVPVAIHADQLTPTWRVYSTGSNVFQTRAGCLIGAEHVNNSYECDIPIGAGICASYQTQTNSPRRARSVASQSIIAYTMSLGAENSVAYSNNSIAIPTNFTISVTTEILPVSMTKTSVDCTMYICGDSTECSNLLLQYGSFCTQLNRALTGIAVEQDKNTQEVFAQVKQIYKTPPIKDFGGFNFSQILPDPSKPSKRSFIEDLLFNKVTLADAGFIKQYGDCLGDIAARDLICAQKFNGLTVLPPLLTDEMIAQYTSALLAGTITSGWTFGAGAALQIPFAMQMAYRFNGIGVTQNVLYENQKLIANQFNSAIGKIQDSLSSTASALGKLQDVVNQNAQALNTLVKQLSSNFGAISSVLNDILSRLDPPEAEVQIDRLITGRLQSLQTYVTQQLIRAAEIRASANLAATKMSECVLGQSKRVDFCGKGYHLMSFPQSAPHGVVFLHVTYVFAQEKNFTTAPAICHDGKAHFPREGVFVSNGTHWFVTQRNFYEPQIITTDNTFVSGNCDVVIGIVNNTVYDPLQPELDSFKEELDKYFKNHTSPDVDLGDISGINASVVNIQKEIDRLNEVAKNLNESLIDLQELGKYEQYIK

SEQ ID NO: 1832 - protein, 1211 aa, Artificial Sequence
  SARS-CoV-2/Hong Kong/case85_VM20002868/2020__EPI_ISL_414519 spike protein (1-1211)(K986P_V987P_P1069F)
MFVFLVLVPLVSSQCVNLTTRTQLPPAYTNSFTRGVYYPDKVFRSSVLHSTQDLFLPFFSNVTWFHAIHVSGTNGTKRFDNPVLPFNDGVYFASTEKSNIIRGWIFGTTLDSKTQSLLIVNNATNVVIKVCEFQFCNDPFLGVYYHKNNKSWMESEFRVYSSANNCTFEYVSQPFLMDLEGKQGNFKNLREFVFKNIDGYFKIYSKHTPINLVRDLPQGFSALEPLVDLPIGINITRFQTLLALHRSYLTPGDSSSGWTAGAAAYYVGYLQPRTFLLKYNENGTITDAVDCALDPLSETKCTLKSFTVEKGIYQTSNFRVQPTESIVRFPNITNLCPFGEVFNATRFASVYAWNRKRISNCVADYSVLYNSASFSTFKCYGVSPTKLNDLCFTNVYADSFVIRGDEVRQIAPGQTGKIADYNYKLPDDFTGCVIAWNSNNLDSKVGGNYNYLYRLFRKSNLKPFERDISTEIYQAGSTPCNGVEGFNCYFPLQSYGFQPTNGVGYQPYRVVVLSFELLHAPATVCGPKKSTNLVKNKCVNFNFNGLTGTGVLTESNKKFLPFQQFGRDIADTTDAVRDPQTLEILDITPCSFGGVSVITPGTNTSNQVAVLYQDVNCTEVPVAIHADQLTPTWRVYSTGSNVFQTRAGCLIGAEHVNNSYECDIPIGAGICASYQTQTNSPRRARSVASQSIIAYTMSLGAENSVAYSNNSIAIPTNFTISVTTEILPVSMTKTSVDCTMYICGDSTECSNLLLQYGSFCTQLNRALTGIAVEQDKNTQEVFAQVKQIYKTPPIKDFGGFNFSQILPDPSKPSKRSFIEDLLFNKVTLADAGFIKQYGDCLGDIAARDLICAQKFNGLTVLPPLLTDEMIAQYTSALLAGTITSGWTFGAGAALQIPFAMQMAYRFNGIGVTQNVLYENQKLIANQFNSAIGKIQDSLSSTASALGKLQDVVNQNAQALNTLVKQLSSNFGAISSVLNDILSRLDPPEAEVQIDRLITGRLQSLQTYVTQQLIRAAEIRASANLAATKMSECVLGQSKRVDFCGKGYHLMSFPQSAPHGVVFLHVTYVFAQEKNFTTAPAICHDGKAHFPREGVFVSNGTHWFVTQRNFYEPQIITTDNTFVSGNCDVVIGIVNNTVYDPLQPELDSFKEELDKYFKNHTSPDVDLGDISGINASVVNIQKEIDRLNEVAKNLNESLIDLQELGKYEQYIK

SEQ ID NO: 1833 - protein, 1211 aa, Artificial Sequence; identical to SEQ ID NO: 1823
  SARS-CoV-2/England/200990660/2020__EPI_ISL_414523 spike protein (1-1211)(K986P_V987P_P1069F)

SEQ ID NO: 1834 - protein, 1211 aa, Artificial Sequence
  SARS-CoV-2/Australia/NSW09/2020__EPI_ISL_413595 spike protein (1-1211)(K986P_V987P_P1069F)
MFVFLVLLPLVSSQCVNLTTRTQLPPAYTNSFTRGVYYPDKVFRSSVLHSTQDLFLPFFSNVTWFHAIHVSGTNGTKRFDNPVLPFNDGVYFASTEKSNIIRGWIFGTTLDSKTQSLLIVNNATNVVIKVCEFQFCNDPFLGVYYHKNNKSWMESEFRVYSSANNCTFEYVSQPFLMDLEGKQGNFKNLREFVFKNIDGYFKIYSKHTPINLVRDLPQGFSALEPLVDLPIGINITRFQTLLALHRSYLTPGDSSSGWTAGAAAYYVGYLQPRTFLLKYNENGTITDAVDCALDPLSETKCTLKSFTVEKGIYQTSNFRVQPTESIVRFPNITNLCPFGEVFNATRFASVYAWNRKRISNCVADYSVLYNSASFSTFKCYGVSPTKLNDLCFTNVYADSFVIRGDEVRQIAPGQTGKIADYNYKLPDDFTGCVIAWNSNNLDSKVGGNYNYLYRLFRKSNLKPFERDISTEIYQAGSTPCNGVEGFNCYFPLQSYGFQPTNGVGYQPYRVVVLSFELLHAPATVCGPKKSTNLVKNKCVNFNFNGLTGTGVLTESNKKFLPFQQFGRDIADTTDAVRDPQTLEILDITPCSFGGVSVITPGTNTSNQVAVLYQDVNCTEVPVAIHADQLTPTWRVYSTGSNVFQTRAGCLIGAEHVNNSYECDIPIGAGICASYQTQTNSPRRARSVASQSIIAYTMSLGAENSVAYSNNSIAIPTNFTISVTTEILPVSMTKTSVDCTMYICGDSTECSNLLLQYGSFCTQLNRALTGIAVEQDKNTQEVFAQVKQIYKTPPIKDFGGFNFSQILPDPSKPSKRSFIEDLLFNKVTLADAGFIKQYGDCLGDIAARDLICAQKFNGLTVLPPLLTDEMIAQYTSALLAGTITSGWTFGAGAALQIPFAMQMAYRFNGIGVTQNVLYENQKLIANQFNSAIGKIQDSLSFTASALGKLQDVVNQNAQALNTLVKQLSSNFGAISSVLNDILSRLDPPEAEVQIDRLITGRLQSLQTYVTQQLIRAAEIRASANLAATKMSECVLGQSKRVDFCGKGYHLMSFPQSAPHGVVFLHVTYVFAQEKNFTTAPAICHDGKAHFPREGVFVSNGTHWFVTQRNFYEPQIITTDNTFVSGNCDVVIGIVNNTVYDPLQPELDSFKEELDKYFKNHTSPDVDLGDISGINASVVNIQKEIDRLNEVAKNLNESLIDLQELGKYEQYIK

SEQ ID NO: 1835 - protein, 1211 aa, Artificial Sequence; identical to SEQ ID NO: 1815
  SARS-CoV-2/Australia/NSW10/2020__EPI_ISL_413596 spike protein (1-1211)(K986P_V987P_P1069F)

SEQ ID NO: 1836 - protein, 1211 aa, Artificial Sequence
  SARS-CoV-2/Switzerland/1000477797/2020__EPI_ISL_413023 spike protein (1-1211)(K986P_V987P_P1069F)
MFVFLVLLPLVSSQCVNLTTRTQLPPAYTNSFTRGVYYPDKVFRSSVLHSTQDLFLPFFSNVTWFHAIHVSGTNGTKRFDNPVLPFNDGVYFASTEKSNIIRGWIFGTTLDSKTQSLLIVNNATNVVIKVCEFQFCNDPFLGVYYHKNNKSWMESEFRVYSSANNCTFEYVSQPFLMDLEGKQGNFKNLREFVFKNIDGYFNIYSKHTPINLVRDLPQGFSALEPLVDLPIGINITRFQTLLALHRSYLTPGDSSSGWTAGAAAYYVGYLQPRTFLLKYNENGTITDAVDCALDPLSETKCTLKSFTVEKGIYQTSNFRVQPTESIVRFPNITNLCPFGEVFNATRFASVYAWNRKRISNCVADYSVLYNSASFSTFKCYGVSPTKLNDLCFTNVYADSFVIRGDEVRQIAPGQTGKIADYNYKLPDDFTGCVIAWNSNNLDSKVGGNYNYLYRLFRKSNLKPFERDISTEIYQAGSTPCNGVEGFNCYFPLQSYGFQPTNGVGYQPYRVVVLSFELLHAPATVCGPKKSTNLVKNKCVNFNFNGLTGTGVLTESNKKFLPFQQFGRDIADTTDAVRDPQTLEILDITPCSFGGVSVITPGTNTSNQVAVLYQGVNCTEVPVAIHADQLTPTWRVYSTGSNVFQTRAGCLIGAEHVNNSYECDIPIGAGICASYQTQTNSPRRARSVASQSIIAYTMSLGAENSVAYSNNSIAIPTNFTISVTTEILPVSMTKTSVDCTMYICGDSTECSNLLLQYGSFCTQLNRALTGIAVEQDKNTQEVFAQVKQIYKTPPIKDFGGFNFSQILPDPSKPSKRSFIEDLLFNKVTLADAGFIKQYGDCLGDIAARDLICAQKFNGLTVLPPLLTDEMIAQYTSALLAGTITSGWTFGAGAALQIPFAMQMAYRFNGIGVTQNVLYENQKLIANQFNSAIGKIQDSLSSTASALGKLQDVVNQNAQALNTLVKQLSSNFGAISSVLNDILSRLDPPEAEVQIDRLITGRLQSLQTYVTQQLIRAAEIRASANLAATKMSECVLGQSKRVDFCGKGYHLMSFPQSAPHGVVFLHVTYVFAQEKNFTTAPAICHDGKAHFPREGVFVSNGTHWFVTQRNFYEPQIITTDNTFVSGNCDVVIGIVNNTVYDPLQPELDSFKEELDKYFKNHTSPDVDLGDISGINASVVNIQKEIDRLNEVAKNLNESLIDLQELGKYEQYIK

SEQ ID NO: 1837 - protein, 1211 aa, Artificial Sequence
  SARS-CoV-2/Belgium/BA-02291/2020__EPI_ISL_415159 spike protein (1-1211)(K986P_V987P_P1069F)
MFVFLVLLPLVSSQCVNLTTRTQLPPAYTNSFTRGVYYPDKVFRSSVLHSTQDLFLPFFSNVTWFHAIHVSGTNGTKRFDNPVLPFNDGVYFASTEKSNIIRGWIFGTTLDSKTQSLLIVNNATNVVIKVCEFQFCNDPFLGVYYHKNNKSWMESEFRVYSSANNCTFEYVSQPFLMDLEGKQGNFKNLREFVFKNIDGYFKIYSKHTPINLVRDLPQGFSALEPLVDLPIGINITRFQTLLALHRSYLTPGDSSSGWTAGAAAYYVGYLQPRTFLLKYNENGTITDAVDCALDPLSETKCTLKSFTVEKGIYQTSNFRVQPTESIVRFPNITNLCPFGEVFNATRFASVYAWNRKRISNCVADYSVLYNSASFSTFKCYGVSPTKLNDLCFTNVYADSFVIRGDEVRQIAPGQTGKIADYNYKLPDDFTGCVIAWNSNNLDSKVGGNYNYLYRLFRRSNLKPFERDISTEIYQAGSTPCNGVEGFNCYFPLQSYGFQPTNGVGYQPYRVVVLSFELLPAPATVCGPKKSTNLVKNKCVNFNFNGLTGTGVLTESNKKFLPFQQFGRDIADTTDAVRDPQTLEILDITPCSFGGVSVITPGTNTSNQVAVLYQGVNCTEVPVAIHADQLTPTWRVYSTGSNVFQTRAGCLIGAEHVNNSYECDIPIGAGICASYQTQTNSPRRARSVASQSIIAYTMSLGAENSVAYSNNSIAIPTNFTISVTTEILPVSMTKTSVDCTMYICGDSTECSNLLLQYGSFCTQLNRALTGIAVEQDKNTQEVFAQVKQIYKTPPIKDFGGFNFSQILPDPSKPSKRSFIEDLLFNKVTLADAGFIKQYGDCLGDIAARDLICAQKFNGLTVLPPLLTDEMIAQYTSALLAGTITSGWTFGAGAALQIPFAMQMAYRFNGIGVTQNVLYENQKLIANQFNSAIGKIQDSLSSAAPALGKLQDVVNQNAQALNTLVKQLSSNFGAISSVLNDILSRLDPPEAEVQIDRLITGRLQSLQTYVTQQLIRAAEIRASANLAATKMSECVLGQSKRVDFCGKGYHLMSFPQSAPHGVVFLHVTYVFAQEKNFTTAPAICHDGKAHFPREGVFVSNGTHWFVTQRNFYEPQIITTDNTFVSGNCDVVIGIVNNTVYDPLQPELDSFKEELDKYFKNHTSPDVDLGDISGINASVVNIQKEIDRLNEVAKNLNESLIDLQELGKYEQYIK

SEQ ID NO: 1838 - protein, 1211 aa, Artificial Sequence
  SARS-CoV-2/USA/WA8-UW5/2020__EPI_ISL_413486 spike protein (1-1211)(K986P_V987P_P1069F)
MFVFLVLLPLVSSQCVNLTTRTQLPPAYTNSFTRGVYYPDKVFRSSVLHSTQDLFLPFFSNVTWFHAIHVSGTNGTKRFDNPVLPFNDGVYFASTEKSNIIRGWIFGTTLDSKTQSLLIVNNATNVVIKVCEFQFCNDPFLGVYYHKNNKSWMESEFRVYSSANNCTFEYVSQPFLMDLEGKQGNFKNLREFVFKNIDGYFKIYSKHTPINLVRDLPQGFSALEPLVDLPIGINITRFQTLLALHRSYLTPGDSSSGWTAGAAAYYVGYLQPRTFLLKYNENGTITDAVDCALDPLSETKCTLKSFTVEKGIYQTSNFRVQPTESIVRFPNITNLCPFGEVFNATRFASVYAWNRKRISNCVADYSVLYNSASFSTFKCYGVSPTKLNDLCFTNVYADSFVIRGDEVRQIAPGQTGKIADYNYKLPDDFTGCVIAWNSNNLDSKVGGNYNYLYRLFRKSNLKPFERDISTEIYQAGSTPCNGVEGFNCYFPLQSYGFQPTNGVGYQPYRVVVLSFELLHAPATVCGPKKSTNLVKNKCVNFNFNGLTGTGVLTESNKKFLPFQQFGRDIADTTDAVRDPQTLEILDITPCSFGGVSVITPGTNTSNQVAVLYQDVNCTEVPVAIHADQLTPTWRVYSTGSNVFQTRAGCLIGAEYVNNSYECDIPIGAGICASYQTQTNSPRRARSVASQSIIAYTMSLGAENSVAYSNNSIAIPTNFTISVTTEILPVSMTKTSVDCTMYICGDSTECSNLLLQYGSFCTQLNRALTGIAVEQDKNTQEVFAQVKQIYKTPPIKDFGGFNFSQILPDPSKPSKRSFIEDLLFNKVTLADAGFIKQYGDCLGDIAARDLICAQKFNGLTVLPPLLTDEMIAQYTSALLAGTITSGWTFGAGAALQIPFAMQMAYRFNGIGVTQNVLYENQKLIANQFNSAIGKIQDSLSSTASALGKLQDVVNQNAQALNTLVKQLSSNFGAISSVLNDILSRLDPPEAEVQIDRLITGRLQSLQTYVTQQLIRAAEIRASANLAATKMSECVLGQSKRVDFCGKGYHLMSFPQSAPHGVVFLHVTYVFAQEKNFTTAPAICHDGKAHFPREGVFVSNGTHWFVTQRNFYEPQIITTDNTFVSGNCDVVIGIVNNTVYDPLQPELDSFKEELDKYFKNHTSPDVDLGDISGINASVVNIQKEIDRLNEVAKNLNESLIDLQELGKYEQYIK

SEQ ID NO: 1839 - protein, 1211 aa, Artificial Sequence
  SARS-CoV-2/England/20102000506/2020__EPI_ISL_415147 spike protein (1-1211)(K986P_V987P_P1069F)
MFVFLVLLPLVSSQCVNLTTRTQLPPAYTNSFTRGVYYPDKVFRSSVLHSTQDLFLPFFSNVTWFHAIHVSGTNGTKRFDNPVLPFNDGVYFASTEKSNIIRGWIFGTTLDSKTQSLLIVNNATNVVIKVCEFQFCNDPFLGVYYHKNNKSWMESEFRVYSSANNCTFEYVSQPFLMDLEGKQGNFKNLREFVFKNIDGYFKIYSKHTPINLVRDLPQGFSALEPLVDLPIGINITRFQTLLALHRSYLTPGDSSSGWTAGAAAYYVGYLQPRTFLLKYNENGTITDAVDCALDPLSETKCTLKSFTVEKGIYQTSNFRVQPTESIVRFPNITNLCPFGEVFNATRFASVYAWNRKRISNCVADYSVLYNSASFSTFKCYGVSPTKLNDLCFTNVYADSFVIRGDEVRQIAPGQTGKIADYNYKLPDDFTGCVIAWNSNNLDSKVGGNYNYLYRLFRKSNLKPFERDISTEIYQAGSTPCNGVEGFNCYFPLQSYGFQPTNGVGYQPYRVVVLSFELLHAPATVCGPKKSTNLVKNKCVNFNFNGLTGTGVLTESNKKFLPFQQFGRDIADTTDAVRDPQTLEILDITPCSFGGVSVITPGTNTSNQVAVLYQGVNCTEVPVAIHADQLTPTWRVYSTGSNVFQTRAGCLIGAEHVNNSYECDIPIGAGICASYQTQTNSPRRARSVASQSIIAYTMSLGAENSVAYSNNSIAIPTNFTISVTTEILPVSMTKTSVDCTMYICGDSTECSNLLLQYGSFCTQLNRALTGIAVEQDKNTQEVFAQVKQIYKTPPIKDFGGFNFSQILPDPSKPSKRSFIEDLLFNKVTLADAGFIKQYGYCLGDIAARDLICAQKFNGLTVLPPLLTDEMIAQYTSALLAGTITSGWTFGAGAALQIPFAMQMAYRFNGIGVTQNVLYENQKLIANQFNSAIGKIQDSLSSTASALGKLQDVVNQNAQALNTLVKQLSSNFGAISSVLNDILSRLDPPEAEVQIDRLITGRLQSLQTYVTQQLIRAAEIRASANLAATKMSECVLGQSKRVDFCGKGYHLMSFPQSAPHGVVFLHVTYVFAQEKNFTTAPAICHDGKAHFPREGVFVSNGTHWFVTQRNFYEPQIITTDNTFVSGNCDVVIGIVNNTVYDPLQPELDSFKEELDKYFKNHTSPDVDLGDISGINASVVNIQKEIDRLNEVAKNLNESLIDLQELGKYEQYIK

SEQ ID NO: 1840 - protein, 1211 aa, Artificial Sequence
  SARS-CoV-2/Belgium/VAG-03013/2020__EPI_ISL_415155 spike protein (1-1211)(K986P_V987P_P1069F)
MFVFLVLLPLVSSQCVNLTTRTQLPPAYTNSFTRGVYYPDKVFRSSVLHSTQDLFLPFFSNVTWFHAIHVSGTNGTKRFDNPVLPFNDGVYFASTEKSNIIRGWIFGTTLDSKTQSLLIVNNATNVVIKVCEFQFCNDPFLGVYYHKNNKSWMESEFRVYSSANNCTFEYVSQPFLMDLEGKQGNFKNLREFVFKNIDGYFKIYSKHTPINLVRDLPQGFSALEPLVDLPIGINITRFQTLLALHRSYLTPGDSSSGWTAGAAAYYVGYLQPRTFLLKYNENGTITDAVDCALDPLSETKCTLKSFTVEKGIYQTSNFRVQPTESIVRFPNITNLCPFGEVFNATRFASVYAWNRKRISNCVADYSVLYNSASFSTFKCYGVSPTKLNDLCFTNVYADSFVIRGDEVRQIAPGQTGKIADYNYKLPDDFTGCVIAWNSNNLDSKVGGNYNYLYRLFRKSNLKPFERDISTEIYQAGSTPCNGVEGFNCYFPLQSYGFQPTNGVGYQPYRVVVLSFELLHAPATVCGPKKSTNLVKNKCVNFNFNGLTGTGVLTESNKKFLPFQQFGRDIADTTDAVRDPQTLEILDITPCSFGGVSVITPGTNTSNQVAVLYQGVNCTEVPVAIHADQLTPTWRVYSTGSNVFQTRAGCLIGAEHVNNSYECDIPIGAGICASYQTQTNSPRRARSVASQSIIAYTMSLGAENSVAYSNNSIAIPTNFTISVTTEILPVSMTKTSVDCTMYICGDSTECSNLLLQYGSFCTQLNRALTGIAVEQDKNTQEVFAQVKQIYKTPPIKDFGGFNFSQILPDPSKPSKRSFIEDLLFNKVTLADAGFIKQYGDCLGDIAARDLICAQKFNGLTVLPPLLTDEMIAQYTSALLAGTITSGWTFGAGAALQIPFAMQMAYRFNGIGVTQNVLYENQKLIANQFNSAIGKIQDSLSSTATALGKLQDVVNQNAQALNTLVKQLSSNFGAISSVLNDILSRLDPPEAEVQIDRLITGRLQSLQTYVTQQLIRAAEIRASANLAATKMSECVLGQSKRVDFCGKGYHLMSFPQSAPHGVVFLHVTYVFAQEKNFTTAPAICHDGKAHFPREGVFVSNGTHWFVTQRNFYEPQIITTDNTFVSGNCDVVIGIVNNTVYDPLQPELDSFKEELDKYFKNHTSPDVDLGDISGINASVVNIQKEIDRLNEVAKNLNESLIDLQELGKYEQYIK

SEQ ID NO: 1841 - protein, 1211 aa, Artificial Sequence
  SARS-CoV-2/Belgium/BC-03016/2020__EPI_ISL_415157 spike protein (1-1211)(K986P_V987P_P1069F)
MFVFLVLLPLVSSQCVNLTTRTQLPPAYTNSFTRGVYYPDKVFRSSVLHSTQDLFLPFFSNVTWFHAIHVSGTNGTKRFDNPVLPFNDGVYFASTEKSNIIRGWIFGTTLDSKTQSLLIVNNATNVVIKVCEFQFCNDPFLGVYYHKNNKSWMESEFRVYSSANNCTFEYVSQPFLMDLEGKQGNFKNLREFVFKNIDGYFKIYSKHTPINLVRDLPQGFSALEPLVDLPIGINITRFQTLLALHRSYLTPGDSSSGWTAGAAAYYVGYLQPRTFLLKYNENGTITDAVDCALDPLSETKCTLKSFTVEKGIYQTSNFRVQPTESIVRFPNITNLCPFGEVFNATRFASVYAWNRKRISNCVADYSVLYNSASFSTFKCYGVSPTKLNDLCFTNVYADSFVIRGDEVRQIAPGQTGKIADYNYKLPDDFTGCVIAWNSNNLDSKVGGNYNYLYRLFRKSNLKPFERDISTEIYQAGSTPCNGVEGFNCYFPLQSYGFQPTNGVGYQPYRVVVLSFELLHAPATVCGPKKSTNLVKNKCVNFNFNGLTGTGVLTESNKKFLPFQQFGRDIADTTDAVRDPQTLEILDITPCSFGGVSVITPGTNTSNQVAVLYQGVNCTEVPVAIHADQLTPTWRVYSTGSNVFQTRAGCLIGAEHVNNSYECDIPIGAGICASYQTQTNSPRRARSVASQSIIAYTMSLGAENSVAYSNNSIAIPTNFTISVTTEILPVSMTKTSVDCTMYICGDSTECSNLLLQYGSFCTQLNRALTGIAVEQDKNTQEVFAQVKQIYKTPPIKDFGGFNFSQILPDPSKPSKRSFIEDLLFNKVTLADAGFIKQYGDCLGDIAARDLICAQKFNGLTVLPPLLTDEMIAQYTSALLAGTITSGWTFGAGAALQIPFAMQMAYRFNGIGVTQNVLYENQKLIANQFNSAIGKIQDSLSSTAPALGKLQDVVNQNAQALNTLVKQLSSNFGAISSVLNDILSRLDPPEAEVQIDRLITGRLQSLQTYVTQQLIRAAEIRASANLAATKMSECVLGQSKRVDFCGKGYHLMSFPQSAPHGVVFLHVTYVFAQEKNFTTAPAICHDGKAHFPREGVFVSNGTHWFVTQRNFYEPQIITTDNTFVSGNCDVVIGIVNNTVYDPLQPELDSFKEELDKYFKNHTSPDVDLGDISGINASVVNIQKEIDRLNEVAKNLNESLIDLQELGKYEQYIK

SEQ ID NO: 1842 - protein, 1211 aa, Artificial Sequence
  SARS-CoV-2/Germany/BavPat3/2020__EPI_ISL_414521 spike protein (1-1211)(K986P_V987P_P1069F)
MFVFLVLLPLVSSQCVNLTTRTQLPPAYTNSFTRGVYYPDKVFRSSVLHSTQDLFLPFFSNVTWFHAIHVSGTNGTKRFDNPVLPFNDGVYFASTEKSNIIRGWIFGTTLDSKTQSLLIVNNATNVVIKVCEFQFCNDPFLGVYYHKNNKSWMESEFRVYSSANNCTFEYVSQPFLMDLEGKQGNFKNLREFVFKNIDGYFKIYSKHTPINLVRDLPQGFSALEPLVDLPIGINITRFQTLLALHRSYLTPGDSSSGWTAGAAAYYVGYLQPRTFLLKYNENGTITDAVDCALDPLSETKCTLKSFTVEKGIYQTSNFRVQPTESIVRFPNITNLCPFGEVFNATRFASVYAWNRKRISNCVADYSVLYNSASFSTFKCYGVSPTKLNDLCFTNVYADSFVIRGDEVRQIAPGQTGKIADYNYKLPDDFTGCVIAWNSNNLDSKVGGNYNYLYRLFRKSNLKPFERDISTEIYQAGSTPCNGVEGFNCYFPLQSYGFQPTNGVGYQPYRVVVLSFELLHAPATVCGPKKSTNLVKNKCVNFNFNGLTGTGVLTESNKKFLPFQQFGRDIADTTDAVRDPQTLEILDITPCSFGGVSVITPGTNTSNQVAVLYQDVNCTEVPVAIHADQLTPTWRVYSTGSNVFQTRAGCLIGAEHVNNSYECDIPIGAGICASYQTQTNSPRRARSVASQSIIAYTMSLGAENSVAYSNNSIAIPTNFTISVTTEILPVSMTKTSVDCTMYICGDSTECSNLLLQYGSFCTQLNRALTGIAVEQDKNTQQVFAQVKQIYKTPPIKDFGGFNFSQILPDPSKPSKRSFIEDLLFNKVTLADAGFIKQYGDCLGDIAARDLICAQKFNGLTVLPPLLTDEMIAQYTSALLAGTITSGWTFGAGAALQIPFAMQMAYRFNGIGVTQNVLYENQKLIANQFNSAIGKIQDSLSSTASALGKLQDVVNQNAQALNTLVKQLSSNFGAISSVLNDILSRLDPPEAEVQIDRLITGRLQSLQTYVTQQLIRAAEIRASANLAATKMSECVLGQSKRVDFCGKGYHLMSFPQSAPHGVVFLHVTYVFAQEKNFTTAPAICHDGKAHFPREGVFVSNGTHWFVTQRNFYEPQIITTDNTFVSGNCDVVIGIVNNTVYDPLQPELDSFKEELDKYFKNHTSPDVDLGDISGINASVVNIQKEIDRLNEVAKNLNESLIDLQELGKYEQYIK

SEQ ID NO: 1843 - protein, 1211 aa, Artificial Sequence
  SARS-CoV-2/France/HF1805/2020__EPI_ISL_414628 spike protein (1-1211)(K986P_V987P_P1069F)
MFVFLVLLPLVSSQCVNLTTRTQLPPAYTNSFTRGVYYPDKVFRSSVLHSTQDLFLPFFSNVTWFHAIHVSGTNGTKRFDNPVLPFNDGVYFASTEKSNIIRGWIFGTTLDSKTQSLLIVNNATNVVIKVCEFQFCNDPFLGVYYHKNNKSWMESEFRVYSSANNCTFEYVSQPFLMDLEGKQGNFKNLREFVFKNIDGYFKIYSKHTPINLVRDLPQGFSALEPLVDLPIGINITRFQTLLALHRSYLTPGDSSSGWTAGAAAYYVGYLQPRTFLLKYNENGTITDAVDCALDPLSETKCTLKSFTVEKGIYQTSNFRVQPTESIVRFPNITNLCPFGEVFNATRFASVYAWNRKRISNCVADYSVLYNSASFSTFKCYGVSPTKLNDLCFTNVYADSFVIRGDEVRQIAPGQTGKIADYNYKLPDDFTGCVIAWNSNNLDSKVGGNYNYLYRLFRKSNLKPFERDISTEIYQAGSTPCNGVEGFNCYFPLQSYGFQPTNGVGYQPYRVVVLSFELLHAPATVCGPKKSTNLVKNKCVNFNFNGLTGTGVLTESNKKFLPFQQFGRDIADTTDAVRDPQTLEILDITPCSFGGVSVITPGTNTSNQVAVLYQGVNCTEVPVAIHADQLTPTWRVYSTGSNVFQTRAGCLIGAEHVNNSYECDIPIGAGICASYQTQTNSPRRARSVASQSIIAYTMSLGAENSVAYSNNSIAIPTNFTISVTTEILPVSMTKTSVDCTMYICGDSTECSNLLLQYGSFCTQLNRALTGIAVEQDKNTQEVFAQVKQIYKTPPIKDFGGFNFSQILPDPSKPSKRSFIEDLLFNKVTLADAGFIKQYGDCLGDIAARDLICAQKFNGLTVLPPLLTDEMIAQYTSALLAGTITSGWTFGAGAALQIPFAMQMAYRFNGIGVTQNVLYENQKLIANQFNSAIGKIQDSLSSTASALGKLQDVVNQNAQALNTLVKQLSSNFGAISSVLNDILSRLDPPEAEVQIDRLITGRLQSLQTYVTQQLIRAAEIRASANLAATKMSECVLGQSKRVDFCGKGYHLMSFPQSAPHGVVFLHVTYVFAQEKNFTTAPAICHDGKAHFPREGVFVSNGTHWFVTQRNFYEPQIITTDNTFVSGNCDVVIGVVNNTVYDPLQPELDSFKEELDKYFKNHTSPDVDLGDISGINASVVNIQKEIDRLNEVAKNLNESLIDLQELGKYEQYIK

SEQ ID NO: 1844 - protein, 1211 aa, Artificial Sequence
  SARS-CoV-2/Netherlands/ZuidHolland_9/2020__EPI_ISL_414445 spike protein (1-1211)(K986P_V987P_P1069F)
MFVFLVLLPLVSSQCVNLTTRTQLPPAYTNSFTRGVYYPDKVFRSSVLHSTQDLFLPFFSNVTWFHAIHVSGTNGTKRFDNPVLPFNDGVYFASTEKSNIIRGWIFGTTLDSKTQSLLIVNNATNVVIKVCEFQFCNDPFLGVYYHKNNKSWMESEFRVYSSANNCTFEYVSQPFLMDLEGKQGNFKNLREFVFKNIDGYFKIYSKHTPINLVRDLPQGFSALEPLVDLPIGINITRFQTLLALHRSYLTPGDSSSGWTAGAAAYYVGYLQPRTFLLKYNENGTITDAVDCALDPLSETKCTLKSFTVEKGIYQTSNFRVQPTESIVRFPNITNLCPFGEVFNATRFASVYAWNRKRISNCVADYSVLYNSASFSTFKCYGVSPTKLNDLCFTNVYADSFVIRGDEVRQIAPGQTGKIADYNYKLPDDFTGCVIAWNSNNLDSKVGGNYNYLYRLFRKSNLKPFERDISTEIYQAGSTPCNGVEGFNCYFPLQSYGFQPTNGVGYQPYRVVVLSFELLHAPATVCGPKKSTNLVKNKCVNFNFNGLTGTGVLTESNKKFLPFQQFGRDIADTTDAVRDPQTLEILDITPCSFGGVSVITPGTNTSNQVAVLYQGVNCTEVPVAIHADQLTPTWRVYSTGSNVFQTRAGCLIGAEHVNNSYECDIPIGAGICASYQTQTNSPRRARSVASQSIIAYTMSLGAENSVAYSNNSIAIPTNFTISVTTEILPVSMTKTSVDCTMYICGDSTECSNLLLQYGSFCTQLNRALTGIAVEQDKNTQEVFAQVKQIYKTPPIKDFGGFNFSQILPDPSKPSKRSFIEDLLFNKVTLADAGFIKQYGDCLGDIAARDLICVQKFNGLTVLPPLLTDEMIAQYTSALLAGTITSGWTFGAGAALQIPFAMQMAYRFNGIGVTQNVLYENQKLIANQFNSAIGKIQDSLSSTASALGKLQDVVNQNAQALNTLVKQLSSNFGAISSVLNDILSRLDPPEAEVQIDRLITGRLQSLQTYVTQQLIRAAEIRASANLAATKMSECVLGQSKRVDFCGKGYHLMSFPQSAPHGVVFLHVTYVFAQEKNFTTAPAICHDGKAHFPREGVFVSNGTHWFVTQRNFYEPQIITTDNTFVSGNCDVVIGIVNNTVYDPLQPELDSFKEELDKYFKNHTSPDVDLGDISGINASVVNIQKEIDRLNEVAKNLNESLIDLQELGKYEQYIK

SEQ ID NO: 1845 - protein, 1211 aa, Artificial Sequence
  SARS-CoV-2/Finland/FIN03032020A/2020__EPI_ISL_413602 spike protein (1-1211)(K986P_V987P_P1069F)
MFVFLVLLPLVSSQCVNLTTRTQLPPAYTNSFTRGVYYPDKVFRSSVLHSTQDLFLPFFSNVTWFHAIHVSGTNGTKRFDNPVLPFNDGVYFASTEKSNIIRGWIFGTTLDSKTQSLLIVNNATNVVIKVCEFQFCNDPFLGVYYHKNNKSWMESEFRVYSSANNCTFEYVSQPFLMDLEGKQGNFKNLREFVFKNIDGYFKIYSKHTPINLVRDLPQGFSALEPLVDLPIGINITRFQTLLALHRSYLTPGDSSSGWTAGAAAYYVGYLQPRTFLLKYNENGTITDAVDCALDPLSETKCTLKSFTVEKGIYQTSNFRVQPTESIVRFPNITNLCPFGEVFNATRFASVYAWNRKRISNCVADYSVLYNSASFSTFKCYGVSPTKLNDLCFTNVYADSFVIRGDEVRQIAPGQTGKIADYNYKLPDDFTGCVISWNSNNLDSKVGGNYNYLYRLFRKSNLKPFERDISTEIYQAGSTPCNGVEGFNCYFPLQSYGFQPTNGVGYQPYRVVVLSFELLHAPATVCGPKKSTNLVKNKCVNFNFNGLTGTGVLTESNKKFLPFQQFGRDIADTTDAVRDPQTLEILDITPCSFGGVSVITPGTNTSNQVAVLYQGVNCTEVPVAIHADQLTPTWRVYSTGSNVFQTRAGCLIGAEHVNNSYECDIPIGAGICASYQTQTNSPRRARSVASQSIIAYTMSLGAENSVAYSNNSIAIPTNFTISVTTEILPVSMTKTSVDCTMYICGDSTECSNLLLQYGSFCTQLNRALTGIAVEQDKNTQEVFAQVKQIYKTPPIKDFGGFNFSQILPDPSKPSKRSFIEDLLFNKVTLADAGFIKQYGDCLGDIAARDLICAQKFNGLTVLPPLLTDEMIAQYTSALLAGTITSGWTFGAGAALQIPFAMQMAYRFNGIGVTQNVLYENQKLIANQFNSAIGKIQDSLSSTASALGKLQDVVNQNAQALNTLVKQLSSNFGAISSVLNDILSRLDPPEAEVQIDRLITGRLQSLQTYVTQQLIRAAEIRASANLAATKMSECVLGQSKRVDFCGKGYHLMSFPQSAPHGVVFLHVTYVFAQEKNFTTAPAICHDGKAHFPREGVFVSNGTHWFVTQRNFYEPQIITTDNTFVSGNCDVVIGIVNNTVYDPLQPELDSFKEELDKYFKNHTSPDVDLGDISGINASVVNIQKEIDRLNEVAKNLNESLIDLQELGKYEQYIK

SEQ ID NO: 1846 - protein, 1211 aa, Artificial Sequence
  SARS-CoV-2/France/GE1977/2020__EPI_ISL_414632 spike protein (1-1211)(K986P_V987P_P1069F)
MFVFLVLLPLVSSQCVNLTTRTQLPPAYTNSFTRGVYYPDKVFRSSVLHSTQDLFLPFFSNVTWFHAIHVSGTNGTKRFDNPVLPFNDGVYFASTEKSNIIRGWIFGTTLDSKTQSLLIVNNATNVVIKVCEFQFCNDPFLGVYYHKNNKSWMESEFRVYSSANNCTFEYVSQPFLMDLEGKQGNFKNLREFVFKNIDGYFKIYSKHTPINLVRDLPQGFSALEPLVDLPIGINITRFQTLLALHRSYLTPGDSSSGWTAGAAAYYVGYLQPRTFLLKYNENGTITDAVDCALDPLSETKCTLKSFTVEKGIYQTSNFRVQPTESIVRFPNITNLCPFGEVFNATRFASVYAWNRKRISNCVADYSVLYNSASFSTFKCYGVSPTKLNDLCFTNVYADSFVIRGDEVRQIAPGQTGKIADYNYKLPDDFTGCVIAWNSNNLDSKVGGNYNYLYRLFRKSNLKPFERDISTEIYQAGSTPCNGVEGFNCYFPLQSYGFQPTNGVGYQPYRVVVLSFELLHAPATVCGPKKSTNLVKNKCVNFNFNGLTGTGVLTESNKKFLPFQQFGRDIADTTDAVRDPQTLEILDITPCSFGGVSVITPGTNTSNQVAVLYQGVNCTEVPVAIHADQLTPTWRVYSTGSNVFQTRAGCLIGAEHVNNSYECDIPIGAGICASYQTQTNSPRRARSVASQSIIAYTMSLGAENSVAYSNNSIAIPTNFTISVTTEILPVSMTKTSVDCTMYICGDSTECSNLLLQYGSFCTQLNRALTGIAVEQDKNTQEVFAQVKQIYKTPPIKDFGGFNFSQILPDPSKPSKRSFIEDLLFNKVTLADAGFIKQYGDCLGDIAARDLICAQKFNGLTVLPPLLTDEMIAQYTSALLAGTITSGWTFGAGAALQIPFAMQMAYRFNGIGVTQNVLYENQKLIANQFNSAIGKIQDSLFSTASALGKLQDVVNQNAQALNTLVKQLSSNFGAISSVLNDILSRLDPPEAEVQIDRLITGRLQSLQTYVTQQLIRAAEIRASANLAATKMSECVLGQSKRVDFCGKGYHLMSFPQSAPHGVVFLHVTYVFAQEKNFTTAPAICHDGKAHFPREGVFVSNGTHWFVTQRNFYEPQIITTDNTFVSGNCDVVIGIVNNTVYDPLQPELDSFKEELDKYFKNHTSPDVDLGDISGINASVVNIQKEIDRLNEVAKNLNESLIDLQELGKYEQYIK

SEQ ID NO: 1847 - protein, 1211 aa, Artificial Sequence
  SARS-CoV-2/Finland/FIN-313/2020__EPI_ISL_414641 spike protein (1-1211)(K986P_V987P_P1069F)
MFVFLVLLPLVSSQCVNLTTRTQLPPAYTNSFTRGVYYPDKVFRSSVLHSTQDLFLPFFSNVTWFHAIHVSGTNGTKRFDNPVLPFNDGVYFASTEKSNIIRGWIFGTTLDSKTQSLLIVNNATNVVIKVCEFQFCNDPFLGVYYHKNNKSWMESEFRVYSSANNCTFEYVSQPFLMDLEGKQGNFKNLREFVFKNIDGYFKIYSKHTPINLVRDLPQGFSALEPLVDLPIGINITRFKTLLALHRSYLTPGDSSSGWTAGAAAYYVGYLQPRTFLLKYNENGTITDAVDCALDPLSETKCTLKSFTVEKGIYQTSNFRVQPTESIVRFPNITNLCPFGEVFNATRFASVYAWNRKRISNCVADYSVLYNSASFSTFKCYGVSPTKLNDLCFTNVYADSFVIRGDEVRQIAPGQTGKIADYNYKLPDDFTGCVIAWNSNNLDSKVGGNYNYLYRLFRKSNLKPFERDISTEIYQAGSTPCNGVEGFNCYFPLQSYGFQPTNGVGYQPYRVVVLSFELLHAPATVCGPKKSTNLVKNKCVNFNFNGLTGTGVLTESNKKFLPFQQFGRDIADTTDAVRDPQTLEILDITPCSFGGVSVITPGTNTSNQVAVLYQGVNCTEVPVAIHADQLTPTWRVYSTGSNVFQTRAGCLIGAEHVNNSYECDIPIGAGICASYQTQTNSPRRARSVASQSIIAYTMSLGAENSVAYSNNSIAIPTNFTISVTTEILPVSMTKTSVDCTMYICGDSTECSNLLLQYGSFCTQLNRALTGIAVEQDKNTQEVFAQVKQIYKTPPIKDFGGFNFSQILPDPSKPSKRSFIEDLLFNKVTLADAGFIKQYGDCLGDIAARDLICAQKFNGLTVLPPLLTDEMIAQYTSALLAGTITSGWTFGAGAALQIPFAMQMAYRFNGIGVTQNVLYENQKLIANQFNSAIGKIQDSLSSTASALGKLQDVVNQNAQALNTLVKQLSSNFGAISSVLNDILSRLDPPEAEVQIDRLITGRLQSLQTYVTQQLIRAAEIRASANLAATKMSECVLGQSKRVDFCGKGYHLMSFPQSAPHGVVFLHVTYVFAQEKNFTTAPAICHDGKAHFPREGVFVSNGTHWFVTQRNFYEPQIITTDNTFVSGNCDVVIGIVNNTVYDPLQPELDSFKEELDKYFKNHTSPDVDLGDISGINASVVNIQKEIDRLNEVAKNLNESLIDLQELGKYEQYIK

SEQ ID NO: 1848 - protein, 1211 aa, Artificial Sequence
  SARS-CoV-2/Netherlands/ZuidHolland_2/2020__EPI_ISL_414556 spike protein (1-1211)(K986P_V987P_P1069F)
MFVFLVLLPLVSSQCVNLTTRTQLPPAYTNSFTRGVYYPDKVFRSSVLHSTQDLFLPFFSNVTWFHAIHVSGTNGTKRFDNPVLPFNDGVYFASTEKSNIIRGWIFGTTLDSKTQSLLIVNNATNVVIKVCEFQFCNDPFLGVYYHKNNKSWMESEFRVYSSANNCTFEYVSQPFLMDLEGKQGNFKNLREFVFKNIDGYFKIYSKHTPINLVRDLPQGFSALEPLVDLPIGINITRFQTLLALHRSYLTPGDSSSGWTAGAAAYYVGYLQPRTFLLKYNENGTITDAVDCALDPLSETKCTLKSFTVEKGIYQTSNFRVQPTESIVRFPNITNLCPFGEVFNATRFASVYAWNRKRISNCVADYSVLYNSASFSTFKCYGVSPTKLNDLCFTNVYADSFVIRGDEVRQIAPGQTGKIADYNYKLPDDFTGCVIAWNSNNLDSKVGGNYNYLYRLFRKSNLKPFERDISTEIYQAGSTPCNGVEGFNCYFPLQSYGFQPTNGVGYQPYRVVVLSFELLHAPATVCGPKKSTNLVKNKCVNFNFNGLTGTGVLTESNKKFLPFQQFGRDIADTTDAVRDPQTLEILDITPCSFGGVSVITPGTNTSNQVAVLYQGVNCTEVPVAIHADQLTPTWRVYSTGSNVFQTRAGCLIGAEHVNNSYECDIPIGAGICASYQTQTNSPRRARSVASQSIIAYTMSLGAENSVAYSNNSIAIPTNFTISVTTEILPVSMTKTSVDCTMYICGDSTECSNLLLQYGSFCTQLNRALTGIALEQDKNTQEVFAQVKQIYKTPPIKDFGGFNFSQILPDPSKPSKRSFIEDLLFNKVTLADAGFIKQYGDCLGDIAARDLICAQKFNGLTVLPPLLTDEMIAQYTSALLAGTITSGWTFGAGAALQIPFAMQMAYRFNGIGVTQNVLYENQKLIANQFNSAIGKIQDSLSSTASALGKLQDVVNQNAQALNTLVKQLSSNFGAISSVLNDILSRLDPPEAEVQIDRLITGRLQSLQTYVTQQLIRAAEIRASANLAATKMSECVLGQSKRVDFCGKGYHLMSFPQSAPHGVVFLHVTYVFAQEKNFTTAPAICHDGKAHFPREGVFVSNGTHWFVTQRNFYEPQIITTDNTFVSGNCDVVIGIVNNTVYDPLQPELDSFKEELDKYFKNHTSPDVDLGDISGINASVVNIQKEIDRLNEVAKNLNESLIDLQELGKYEQYIK

SEQ ID NO: 1849 - protein, 1211 aa, Artificial Sequence
  SARS-CoV-2/USA/WA-UW31/2020__EPI_ISL_414618 spike protein (1-1211)(K986P_V987P_P1069F)
MFVFLVLLPLVSSQCVNLTTRTQLPPAYTNSFTRGVYYPDKVFRSSVLHSTQDLFLPFFSNVTWFHAIHVSGTNGTKRFDNPVLPFNDGVYFASTEKSNIIRGWIFGTTLDSKTQSLLIVNNATNVVIKVCEFQFCNDPFLGVYYHKNNKSWMESEFRVYSSANNCTFEYVSQPFLMDLEGKQGNFKNLREFVFKNIDGYFKIYSKHTPINLVRDLPQGFSALEPLVDLPIGINITRFQTLLALHRSYLTPGDSSSGWTAGAAAYYVGYLQPRTFLLKYNENGTITDAVDCALDPLSETKCTLKSFTVEKGIYQTSNFRVQPTESIVRFPNITNLCPFGEVFNATRFASVYAWNRKRISNCVADYSVLYNSASFSTFKCYGVSPTKLNDLCFTNVYADSFVIRGDEVRQIAPGQTGKIADYNYKLPDDFTGCVIAWNSNNLDSKVGGNYNYLYRLFRKSNLKPFERDISTEIYQAGSTPCNGAEGFNCYFPLQSYGFQPTNGVGYQPYRVVVLSFELLHAPATVCGPKKSTNLVKNKCVNFNFNGLTGTGVLTESNKKFLPFQQFGRDIADTTDAVRDPQTLEILDITPCSFGGVSVITPGTNTSNQVAVLYQDVNCTEVPVAIHADQLTPTWRVYSTGSNVFQTRAGCLIGAEHVNNSYECDIPIGAGICASYQTQTNSPRRARSVASQSIIAYTMSLGAENSVAYSNNSIAIPTNFTISVTTEILPVSMTKTSVDCTMYICGDSTECSNLLLQYGSFCTQLNRALTGIAVEQDKNTQEVFAQVKQIYKTPPIKDFGGFNFSQILPDPSKPSKRSFIEDLLFNKVTLADAGFIKQYGDCLGDIAARDLICAQKFNGLTVLPPLLTDEMIAQYTSALLAGTITSGWTFGAGAALQIPFAMQMAYRFNGIGVTQNVLYENQKLIANQFNSAIGKIQDSLSSTASALGKLQDVVNQNAQALNTLVKQLSSNFGAISSVLNDILSRLDPPEAEVQIDRLITGRLQSLQTYVTQQLIRAAEIRASANLAATKMSECVLGQSKRVDFCGKGYHLMSFPQSAPHGVVFLHVTYVFAQEKNFTTAPAICHDGKAHFPREGVFVSNGTHWFVTQRNFYEPQIITTDNTFVSGNCDVVIGIVNNTVYDPLQPELDSFKEELDKYFKNHTSPDVDLGDISGINASVVNIQKEIDRLNEVAKNLNESLIDLQELGKYEQYIK

SEQ ID NO: 1850 - protein, 1211 aa, Artificial Sequence
  SARS-CoV-2/South Korea/SNU01/2020__EPI_ISL_411929 spike protein (1-1211)(K986P_V987P_P1069F)
MFVFLVLLPLVSSQCVNLTTRTQLPPAYTNSFTRGVYYPDKVFRSSVLHSTQDLFLPFFSNVTWFHAIHVSGTNGTKRFDNPVLPFNDGVYFASTEKSNIIRGWIFGTTLDSKTQSLLIVNNATNVVIKVCEFQFCNDPFLGVYYHKNNKSWMESEFRVYSSANNCTFEYVSQPFLMDLEGKQGNFKNLREFVFKNIDGYFKIYSKHTPINLVRDLPQGFWALEPLVDLPIGINITRFQTLLALHRSYLTPGDSSSGWTAGAAAYYVGYLQPRTFLLKYNENGTITDAVDCALDPLSETKCTLKSFTVEKGIYQTSNFRVQPTESIVRFPNITNLCPFGEVFNATRFASVYAWNRKRISNCVADYSVLYNSASFSTFKCYGVSPTKLNDLCFTNVYADSFVIRGDEVRQIAPGQTGKIADYNYKLPDDFTGCVIAWNSNNLDSKVGGNYNYLYRLFRKSNLKPFERDISTEIYQAGSTPCNGVEGFNCYFPLQSYGFQPTNGVGYQPYRVVVLSFELLHAPATVCGPKKSTNLVKNKCVNFNFNGLTGTGVLTESNKKFLPFQQFGRDIADTTDAVRDPQTLEILDITPCSFGGVSVITPGTNTSNQVAVLYQDVNCTEVPVAIHADQLTPTWRVYSTGSNVFQTRAGCLIGAEHVNNSYECDIPIGAGICASYQTQTNSPRRARSVASQSIIAYTMSLGAENSVAYSNNSIAIPTNFTISVTTEILPVSMTKTSVDCTMYICGDSTECSNLLLQYGSFCTQLNRALTGIAVEQDKNTQEVFAQVKQIYKTPPIKDFGGFNFSQILPDPSKPSKRSFIEDLLFNKVTLADAGFIKQYGDCLGDIAARDLICAQKFNGLTVLPPLLTDEMIAQYTSALLAGTITSGWTFGAGAALQIPFAMQMAYRFNGIGVTQNVLYENQKLIANQFNSAIGKIQDSLSSTASALGKLQDVVNQNAQALNTLVKQLSSNFGAISSVLNDILSRLDPPEAEVQIDRLITGRLQSLQTYVTQQLIRAAEIRASANLAATKMSECVLGQSKRVDFCGKGYHLMSFPQSAPHGVVFLHVTYVFAQEKNFTTAPAICHDGKAHFPREGVFVSNGTHWFVTQRNFYEPQIITTDNTFVSGNCDVVIGIVNNTVYDPLQPELDSFKEELDKYFKNHTSPDVDLGDISGINASVVNIQKEIDRLNEVAKNLNESLIDLQELGKYEQYIK

SEQ ID NO: 1851 - protein, 1211 aa, Artificial Sequence
  SARS-CoV-2/China/WF0004/2020__EPI_ISL_413694 spike protein (1-1211)(K986P_V987P_P1069F)
MFVFLVLLPLVSSQCVNLTTRTQLPPAYTNSFTRGVYYPDKVFRSSVLHSTQDLFLPFFSNVTWFHAIHVSGTNGTKRFDNPVLPFNDGVYFASTEKSNIIRGWIFGTTLDSKTQSLLIVNNATNVVIKVCEFQFCNDPFLGVYYHKNNKSWTESEFRVYSSANNCTFEYVSQPFLMDLEGKQGNFKNLREFVFKNIDGYFKIYSKHTPINLVRDLPQGFSALEPLVDLPIGINITRFQTLLALHRSYLTPGDSSSGWTAGAAAYYVGYLQPRTFLLKYNENGTITDAVDCALDPLSETKCTLKSFTVEKGIYQTSNFRVQPTESIVRFPNITNLCPFGEVFNATRFASVYAWNRKRISNCVADYSVLYNSASFSTFKCYGVSPTKLNDLCFTNVYADSFVIRGDEVRQIAPGQTGKIADYNYKLPDDFTGCVIAWNSNNLDSKVGGNYNYLYRLFRKSNLKPFERDISTEIYQAGSTPCNGVEGFNCYFPLQSYGFQPTNGVGYQPYRVVVLSFELLHAPATVCGPKKSTNLVKNKCVNFNFNGLTGTGVLTESNKKFLPFQQFGRDIADTTDAVRDPQTLEILDITPCSFGGVSVITPGTNTSNQVAVLYQDVNCTEVPVAIHADQLTPTWRVYSTGSNVFQTRAGCLIGAEHVNNSYECDIPIGAGICASYQTQTNSPRRARSVASQSIIAYTMSLGAENSVAYSNNSIAIPTNFTISVTTEILPVSMTKTSVDCTMYICGDSTECSNLLLQYGSFCTQLNRALTGIAVEQDKNTQEVFAQVKQIYKTPPIKDFGGFNFSQILPDPSKPSKRSFIEDLLFNKVTLADAGFIKQYGDCLGDIAARDLICAQKFNGLTVLPPLLTDEMIAQYTSALLAGTITSGWTFGAGAALQIPFAMQMAYRFNGIGVTQNVLYENQKLIANQFNSAIGKIQDSLSSTASALGKLQDVVNQNAQALNTLVKQLSSNFGAISSVLNDILSRLDPPEAEVQIDRLITGRLQSLQTYVTQQLIRAAEIRASANLAATKMSECVLGQSKRFDFCGKGYHLMSFPQSAPHGVVFLHVTYVFAQEKNFTTAPAICHDGKAHFPREGVFVSNGTHWFVTQRNFYEPQIITTDNTFVSGNCDVVIGIVNNTVYDPLQPELDSFKEELDKYFKNHTSPDVDLGDISGINASVVNIQKEIDRLNEVAKNLNESLIDLQELGKYEQYIK

SEQ ID NO: 1852 - protein, 1211 aa, Artificial Sequence
  SARS-CoV-2/China/WF0028/2020__EPI_ISL_413791 spike protein (1-1211)(K986P_V987P_P1069F)
MFVFLVLLPLVSSQCVNLTTRTQLPPAYTNSFTRGVYYPDKVFRSSVLHSTQDLFLPFFSNVTWFHAIHVSGTNGTKRFDNPVLPFNDGVYFASTEKSNIIRGWIFGTTLDSKTQSLLIVNNATNVVIKVCEFQFCNDPFLGVYYHKNNKSWMESEFRVYSSANNCTFEYVSQPFLMDLEGKQGNFKNLREFVFKNIDGYFKIYSKHTPINLVRDLPQGFSALEPLVDLPIGINITRFQTLLALHRSYLTPGDSSSGWTAGAAAYYVGYLQPRTFLLKYNENGTITDAVDCALDPLSETKCTLKSFTVEKGIYQTSNFRVQPTESIVRFPNITNLCPFGEVFNATRFASVYAWNRKRISNCVADYSVLYNSASFSTFKCYGVSPTKLNDLCFTNVYADSFVIRGDEVRQIAPGQTGKIADYNYKLPDDFTGCVIAWNSNNLDSKVGGNYNYLYRLFRKSNLKPFERDISTEIYQAGSTPCNGVEGFNCYFPLQSYGFQPTNGVGYQPYRVVVLSFELLHAPATVCGPKKSTNLVKNKCVNFNFNGLTGTGVLTESNKKFLPFQQFGRDIADTTDAVRDPQTLEILDITPCSFGGVSVITPGTNTSNQVAVLYQDVNCTEVPVAIHADQLTPTWRVYSTGSNVFQTRAGCLIGAEHVNNSYECDIPIGAGICASYQTQTNSPRRARSVASQSIIAYTMSLGAENSVAYSNNSIAIPTNFTISVTTEILPVSMTKTSVDCTMYICGDSTECSNLLLQYGSFCTQLNRALTGIAVEQDKNTQEVFAQVKQIYKTPPIKDFGGFNFSQILPDPSKPSKRSFIEDLLFNKVTLADAGFIKQYGDCLGDIAARDLICAQKFNGLTVLPPLLTDEMIAQYTSALLAGTITSGWTFGAGAALQIPFAMQMAYRFNGIGVTQNVLYENQKLIANQFNSAIGKIQDSLSSTASALGKLQDVVNQNAQALNTLVKQLSSNFGAISSVLNDILSRLDPPEAEVQIDRLITGRLQSLQTYVTQQLIRAAEIRASANLAATKMSECVLGQSKRVDFCGKGYHLMSFPQSAPHGVVFLHVTYVFAQEKNFTTAPAICHDGKAHFPREGVFVSNGTHWFVTQRNFYEPQIITTDNTFVSGNCDVVIGIVNNTVYDPLQPELESFKEELDKYFKNHTSPDVDLGDISGINASVVNIQKEIDRLNEVAKNLNESLIDLQELGKYEQYIK

SEQ ID NO: 1853 - protein, 1211 aa, Artificial Sequence
  SARS-CoV-2/2019-nCoV/USA-CruiseA-18/2020__MT159716.1 spike protein (1-1211)(K986P_V987P_P1069F)
MFVFLVLLPLVSSQCVNLTTRTQLPPAYTNSFTRGVYYPDKVFRSSVLHSTQDLFLPFFSNVTWFHAIHVSGTNGTKRFDNPVLPFNDGVYFASTEKSNIIRGWIFGTTLDSKTQSLLIVNNATNVVIKVCEFQFCNDPFLGVYYHKNNKSWMESELRVYSSANNCTFEYVSQPFLMDLEGKQGNFKNLREFVFKNIDGYFKIYSKHTPINLVRDLPQGFSALEPLVDLPIGINITRFQTLLALHRSYLTPGDSSSGWTAGAAAYYVGYLQPRTFLLKYNENGTITDAVDCALDPLSETKCTLKSFTVEKGIYQTSNFRVQPTESIVRFPNITNLCPFGEVFNATRFASVYAWNRKRISNCVADYSVLYNSASFSTFKCYGVSPTKLNDLCFTNVYADSFVIRGDEVRQIAPGQTGKIADYNYKLPDDFTGCVIAWNSNNLDSKVGGNYNYLYRLFRKSNLKPFERDISTEIYQAGSTPCNGVEGFNCYFPLQSYGFQPTNGVGYQPYRVVVLSFELLHAPATVCGPKKSTNLVKNKCVNFNFNGLTGTGVLTESNKKFLPFQQFGRDIADTTDAVRDPQTLEILDITPCSFGGVSVITPGTNTSNQVAVLYQDVNCTEVPVAIHADQLTPTWRVYSTGSNVFQTRAGCLIGAEHVNNSYECDIPIGAGICASYQTQTNSPRRARSVASQSIIAYTMSLGAENSVAYSNNSIAIPTNFTISVTTEILPVSMTKTSVDCTMYICGDSTECSNLLLQYGSFCTQLNRALTGIAVEQDKNTQEVFAQVKQIYKTPPIKDFGGFNFSQILPDPSKPSKRSFIEDLLFNKVTLADAGFIKQYGDCLGDIAARDLICAQKFNGLTVLPPLLTDEMIAQYTSALLAGTITSGWTFGAGAALQIPFAMQMAYRFNGIGVTQNVLYENQKLIANQFNSAIGKIQDSLSSTASALGKLQDVVNQNAQALNTLVKQLSSNFGAISSVLNDILSRLDPPEAEVQIDRLITGRLQSLQTYVTQQLIRAAEIRASANLAATKMSECVLGQSKRVDFCGKGYHLMSFPQSAPHGVVFLHVTYVFAQEKNFTTAPAICHDGKAHFPREGVFVSNGTHWFVTQRNFYEPQIITTDNTFVSGNCDVVIGIVNNTVYDPLQPELDSFKEELDKYFKNHTSPDVDLGDISGINASVVNIQKEIDRLNEVAKNLNESLIDLQELGKYEQYIK

SEQ ID NO: 1854 - protein, 1211 aa, Artificial Sequence
  SARS-CoV-2/SARS-CoV-2/Yunnan-01/human/2020/CHN__MT049951.1 spike protein (1-1211)(K986P_V987P_P1069F)
MFVFLVLLPLVSSQCVNLTTRTQLPPANTNSFTRGVYYPDKVFRSSVLHSTQDLFLPFFSNVTWFHAIHVSGTNGTKRFDNPVLPFNDGVYFASTEKSNIIRGWIFGTTLDSKTQSLLIVNNATNVVIKVCEFQFCNDPFLGVYYHKNNKSWMESEFRVYSSANNCTFEYVSQPFLMDLEGKQGNFKNLREFVFKNIDGYFKIYSKHTPINLVRDLPQGFSALEPLVDLPIGINITRFQTLLALHRSYLTPGDSSSGWTAGAAAYYVGYLQPRTFLLKYNENGTITDAVDCALDPLSETKCTLKSFTVEKGIYQTSNFRVQPTESIVRFPNITNLCPFGEVFNATRFASVYAWNRKRISNCVADYSVLYNSASFSTFKCYGVSPTKLNDLCFTNVYADSFVIRGDEVRQIAPGQTGKIADYNYKLPDDFTGCVIAWNSNNLDSKVGGNYNYLYRLFRKSNLKPFERDISTEIYQAGSTPCNGVEGFNCYFPLQSYGFQPTNGVGYQPYRVVVLSFELLHAPATVCGPKKSTNLVKNKCVNFNFNGLTGTGVLTESNKKFLPFQQFGRDIADTTDAVRDPQTLEILDITPCSFGGVSVITPGTNTSNQVAVLYQDVNCTEVPVAIHADQLTPTWRVYSTGSNVFQTRAGCLIGAEHVNNSYECDIPIGAGICASYQTQTNSPRRARSVASQSIIAYTMSLGAENSVAYSNNSIAIPTNFTISVTTEILPVSMTKTSVDCTMYICGDSTECSNLLLQYGSFCTQLNRALTGIAVEQDKNTQEVFAQVKQIYKTPPIKDFGGFNFSQILPDPSKPSKRSFIEDLLFNKVTLADAGFIKQYGDCLGDIAARDLICAQKFNGLTVLPPLLTDEMIAQYTSALLAGTITSGWTFGAGAALQIPFAMQMAYRFNGIGVTQNVLYENQKLIANQFNSAIGKIQDSLSSTASALGKLQDVVNQNAQALNTLVKQLSSNFGAISSVLNDILSRLDPPEAEVQIDRLITGRLQSLQTYVTQQLIRAAEIRASANLAATKMSECVLGQSKRVDFCGKGYHLMSFPQSAPHGVVFLHVTYVFAQEKNFTTAPAICHDGKAHFPREGVFVSNGTHWFVTQRNFYEPQIITTDNTFVSGNCDVVIGIVNNTVYDPLQPELDSFKEELDKYFKNHTSPDVDLGDISGINASVVNIQKEIDRLNEVAKNLNESLIDLQELGKYEQYIK

SEQ ID NO: 1855 - protein, 1211 aa, Artificial Sequence
  SARS-CoV-2/USA/WA-UW292/2020__EPI_ISL_418077 spike protein (1-1211)(K986P_V987P_P1069F)
MFVFLVLLPLVSSQCVNLTTRTQLPPAYTNSFTRGVYYPDKVFRSSVLHSTQDLFLPFFSNVTWFHAIHVSGTNGTKRFDNPVLPFNDGVYFASTEKSNIIRGWIFGTTLDSKTQSLLIVNNATNVVIKVCEFQFCNDPFLGVYYHKNNKSWMESEFRVYSSANNCTFEYVSQPFLMDLEGKQGNFKNLREFVFKNIDGYFKIYSKHTPINLVRDLPQGFSALEPLVDLPIGINITRFQTLLALHRSYLTPGDSSSGWTAGAAAYYVGYLQPRTFLLKYNENGTITDAVDCALDPLSETKCTLKSFTVEKGIYQTSNFRVQPTESIVRFPNITNLCPFGEVFNATRFASVYAWNRKRISNCVADYSVLYNSASFSTFKCYGVSPTKLNDLCFTNVYADSFVIRGDEVRQIAPGQTGKIADYNYKLPDDFTGCVIAWNSNNLDSKVGGNYNYLYRLFRKSNLKPFERDISTEIYQASSTPCNGVEGFNCYFPLQSYGFQPTNGVGYQPYRVVVLSFELLHAPATVCGPKKSTNLVKNKCVNFNFNGLTGTGVLTESNKKFLPFQQFGRDIADTTDAVRDPQTLEILDITPCSFGGVSVITPGTNTSNQVAVLYQDVNCTEVPVAIHADQLTPTWRVYSTGSNVFQTRAGCLIGAEHVNNSYECDIPIGAGICASYQTQTNSPRRARSVASQSIIAYTMSLGAENSVAYSNNSIAIPTNFTISVTTEILPVSMTKTSVDCTMYICGDSTECSNLLLQYGSFCTQLNRALTGIAVEQDKNTQEVFAQVKQIYKTPPIKDFGGFNFSQILPDPSKPSKRSFIEDLLFNKVTLADAGFIKQYGDCLGDIAARDLICAQKFNGLTVLPPLLTDEMIAQYTSALLAGTITSGWTFGAGAALQIPFAMQMAYRFNGIGVTQNVLYENQKLIANQFNSAIGKIQDSLSSTASALGKLQDVVNQNAQALNTLVKQLSSNFGAISSVLNDILSRLDPPEAEVQIDRLITGRLQSLQTYVTQQLIRAAEIRASANLAATKMSECVLGQSKRVDFCGKGYHLMSFPQSAPHGVVFLHVTYVFAQEKNFTTAPAICHDGKAHFPREGVFVSNGTHWFVTQRNFYEPQIITTDNTFVSGNCDVVIGIVNNTVYDPLQPELDSFKEELDKYFKNHTSPDVDLGDISGINASVVNIQKEIDRLNEVAKNLNESLIDLQELGKYEQYIK

SEQ ID NO: 1856 - protein, 1211 aa, Artificial Sequence
  SARS-CoV-2/Iceland/192/2020__EPI_ISL_417819 spike protein (1-1211)(K986P_V987P_P1069F)
MFVFFVLLPLVSSQCVNLTTRTQLPPAYTNSFTRGVYYPDKVFRSSVLHSTQDLFLPFFSNVTWFHAIHVSGTNGTKRFDNPVLPFNDGVYFASTEKSNIIRGWIFGTTLDSKTQSLLIVNNATNVVIKVCEFQFCNDPFLGVYYHKNNKSWMESEFRVYSSANNCTFEYVSQPFLMDLEGKQGNFKNLREFVFKNIDGYFKIYSKHTPINLVRDLPQGFSALEPLVDLPIGINITRFQTLLALHRSYLTPGDSSSGWTAGAAAYYVGYLQPRTFLLKYNENGTITDAVDCALDPLSETKCTLKSFTVEKGIYQTSNFRVQPTESIVRFPNITNLCPFGEVFNATRFASVYAWNRKRISNCVADYSVLYNSASFSTFKCYGVSPTKLNDLCFTNVYADSFVIRGDEVRQIAPGQTGKIADYNYKLPDDFTGCVIAWNSNNLDSKVGGNYNYLYRLFRKSNLKPFERDISTEIYQAGSTPCNGVEGFNCYFPLQSYGFQPTNGVGYQPYRVVVLSFELLHAPATVCGPKKSTNLVKNKCVNFNFNGLTGTGVLTESNKKFLPFQQFGRDIADTTDAVRDPQTLEILDITPCSFGGVSVITPGTNTSNQVAVLYQGVNCTEVPVAIHADQLTPTWRVYSTGSNVFQTRAGCLIGAEHVNNSYECDIPIGAGICASYQTQTNSPRRARSVASQSIIAYTMSLGAENSVAYSNNSIAIPTNFTISVTTEILPVSMTKTSVDCTMYICGDSTECSNLLLQYGSFCTQLNRALTGIAVEQDKNTQEVFAQVKQIYKTPPIKDFGGFNFSQILPDPSKPSKRSFIEDLLFNKVTLADAGFIKQYGDCLGDIAARDLICAQKFNGLTVLPPLLTDEMIAQYTSALLAGTITSGWTFGAGAALQIPFAMQMAYRFNGIGVTQNVLYENQKLIANQFNSAIGKIQDSLSSTASALGKLQDVVNQNAQALNTLVKQLSSNFGAISSVLNDILSRLDPPEAEVQIDRLITGRLQSLQTYVTQQLIRAAEIRASANLAATKMSECVLGQSKRVDFCGKGYHLMSFPQSAPHGVVFLHVTYVFAQEKNFTTAPAICHDGKAHFPREGVFVSNGTHWFVTQRNFYEPQIITTDNTFVSGNCDVVIGIVNNTVYDPLQPELDSFKEELDKYFKNHTSPDVDLGDISGINASVVNIQKEIDRLNEVAKNLNESLIDLQELGKYEQYIK

SEQ ID NO: 1857 - protein, 1211 aa, Artificial Sequence
  SARS-CoV-2/Belgium/ULG-6939/2020__EPI_ISL_417020 spike protein (1-1211)(K986P_V987P_P1069F)
MFVFLVLLPLVSSQCVNLTTRTQLPPAYTNSFTRGVYYPDKVFRSSVLHSTQDLFLPFFSNVTWFHAIHVSGTNGTKRFDNPVLPFNDGVYFASTEKSNIIRGWIFGTTLDSKTQSLLIVNNATNVVIKVCEFQFCNDPFLGVYYHKNNKSWMESEFRVYSSANNCTFEYVSQPFLMDLEGKQGNFKNLREFVFKNIDGYFKIYSKHTPINLVRDLPQGFSALEPLVDLPIGINITRFQTLLALHRSYLTPGDSSSGWTAGAAAYYVGYLQPRTFLLKYNENGTITDAVDCALDPLSETKCTLKSFTVEKGIYQTSNFRVQPTESIVRFPNITNLCPFGEVFNATRFASVYAWNRKRISNCVADYSVLYNSASFSTFKCYGVSPTKLNDLCFTNVYADSFVIRGDEVRQIAPGQTGKIADYNYKLPDDFTGCVIAWNSNNLDSKVGGNYNYLYRLFRKSNLKPFERDISTEIYQAGSTPCNGVEGFNCYFPLQSYGFQPTNGVGYQPYRVVVLSFELLHAPATVCGPKKSTNLVKNKCVNFNFNGLTGTGVLTESNKKFLPFQQFGRDIADTTDAVRDPQTLEILDITPCSFGGVSVITPGTNTSNQVAVLYQGVNCTEVPVAIHADQLTPTWRVYSTGSNVFQTRAGCLIGAEHVNNSYECDIPIGAGICASYQTQTNSPRRARSVASQSIIAYTMSLGAENSVVYSNNSIAIPTNFTISVTTEILPVSMTKTSVDCTMYICGDSTECSNLLLQYGSFCTQLNRALTGIAVEQDKNTQEVFAQVKQIYKTPPIKDFGGFNFSQILPDPSKPSKRSFIEDLLFNKVTLADAGFIKQYGDCLGDIAARDLICAQKFNGLTVLPPLLTDEMIAQYTSALLAGTITSGWTFGAGAALQIPFAMQMAYRFNGIGVTQNVLYENQKLIANQFNSAIGKIQDSLSSTASALGKLQDVVNQNAQALNTLVKQLSSNFGAISSVLNDILSRLDPPEAEVQIDRLITGRLQSLQTYVTQQLIRAAEIRASANLAATKMSECVLGQSKRVDFCGKGYHLMSFPQSAPHGVVFLHVTYVFAQEKNFTTAPAICHDGKAHFPREGVFVSNGTHWFVTQRNFYEPQIITTDNTFVSGNCDVVIGIVNNTVYDPLQPELDSFKEELDKYFKNHTSPDVDLGDISGINASVVNIQKEIDRLNEVAKNLNESLIDLQELGKYEQYIK

SEQ ID NO: 1858 - protein, 1211 aa, Artificial Sequence
  SARS-CoV-2/France/HF2496/2020__EPI_ISL_418231 spike protein (1-1211)(K986P_V987P_P1069F)
MFVFLVLLPLVSSQCVNLTTRTQLPPAYTNSFTRGVYYPDKVFRSSVLHSTQDLFLPFFSNVTWFHAIHVSGTNGTKRFDNPVLPFNDGVYFASTEKSNIIRGWIFGTTLDSKTQSLLIVNNATNVVIKVCEFQFCNDPFLGVYYHKNNKSWMESEFRVYSSANNCTFEYVSQPFLMDLEGKQGNFKNLREFVFKNIDGYFKIYSKHTPINLVRDLPQGFSALEPLVDLPIGINITRFQTLLALHRSYLTPGDSSSGWTAGAAAYYVGYLQPRTFLLKYNENGTITDAVDCALDPLSETKCTLKSFTVEKGIYQTSNFRVQPTESIVRFPNITNLCPFGEVFNATRFASVYAWNRKRISNCVADYSVLYNSASFSTFKCYGVSPTKLNDLCFTNVYADSFVIRGDEVRQIAPGQTGKIADYNYKLPDDFTGCVIAWNSNNLDSKVGGNYNYLYRLFRKSNLKPFERDISTEIYQAGSTPCNGVEGFNCYFPLQSYGFQPTNGVGYQPYRVVVLSFELLHAPATVCGPKKSTNLVKNKCVNFNFNGLTGTGVLTESNKKFLPFQQFGRDIADTTDAVRDPQTLEILDITPCSFGGVSVITPGTNTSNQVAVLYQGVNCTEVPVAIHADQLTPTWRVYSTGSNVFQTRAGCLIGAEHVNNSYECDIPIGAGICASYQTQTNSPRRARSVASQSIIAYTMSLGAENSVAYSNNSIAIPTNFTISVTTEILPVSMTKTSVDCTMYICGDSTECSNLLLQYGSFCTQLNRALTGIAVEQDKNTQEVFAQVKQIYKTPPIKDFGGFNFSQILPDPSKPSKRSFIEDLLFNKVTLADAGFIKQYGDCLGDIVARDLICAQKFNGLTVLPPLLTDEMIAQYTSALLAGTITSGWTFGAGAALQIPFAMQMAYRFNGIGVTQNVLYENQKLIANQFNSAIGKIQDSLSSTASALGKLQDVVNQNAQALNTLVKQLSSNFGAISSVLNDILSRLDPPEAEVQIDRLITGRLQSLQTYVTQQLIRAAEIRASANLAATKMSECVLGQSKRVDFCGKGYHLMSFPQSAPHGVVFLHVTYVFAQEKNFTTAPAICHDGKAHFPREGVFVSNGTHWFVTQRNFYEPQIITTDNTFVSGNCDVVIGIVNNTVYDPLQPELDSFKEELDKYFKNHTSPDVDLGDISGINASVVNIQKEIDRLNEVAKNLNESLIDLQELGKYEQYIK

SEQ ID NO: 1859 - protein, 1211 aa, Artificial Sequence
  SARS-CoV-2/USA/WA-UW291/2020__EPI_ISL_418076 spike protein (1-1211)(K986P_V987P_P1069F)
MFVFLVLLPLVSSQCVNLTTRTQLPPAYTNSFTRGVYYPDKVFRSSVLHSTQDLFLPFFSNVTWFHAIHVSGTNGTKRFDNPVLPFNDGVYFASTEKSNIIRGWIFGTTLDSKTQSLLIVNNATNVVIKVCEFQFCNDPFLGVYYHKNNKSWMESEFRVYSSANNCTFEYVSQPFLMDLEGKQGNFKNLREFVFKNIDGYFKIYSKHTPINLVRDLPQGFSALEPLVDLPIGINITRFQTLLALHRSYLTPGDSSSGWTAGAAAYYVGYLQPRTFLLKYNENGTITDAVDCALDPLSETKCTLKSFTVEKGIYQTSNFRVQPTESIVRFPNITNLCPFGEVFNATRFASVYAWNRKRISNCVADYSVLYNSASFSTFKCYGVSPTKLNDLCFTNVYADSFVIRGDEVRQIAPGQTGKIADYNYKLPDDFTGCVIAWNSNNLDSKVGGNYNYLYRLFRKSNLKPFERDISTEIYQAGSTPCNGVEGFNCYFPLQSYGFQPTNGVGYQPYRVVVLSFELLHAPATVCGPKKSTNLVKNKCVNFNFNGLTGTGVLTESNKKFLPFQQFGRDIADTTDAVRDPQTLEILDITPCSFGGVSVITPGTNTSNQVAVLYQGVNCTEVPVAIHADQLTPTWRVYSTGSNVFQTRAGCLIGAEHVNNSYECDIPIGAGICASYQTQTNSPRRARSVASQSIIAYTMSLGAENSVAYSNNSIAIPTNFTISVTTEILPVSMTKTSVDCTMYICGDSTECSNLLLQYGSFCTQLNRALTGIAVEQDKNTQEVFAQVKQIYKTPPIKDFGGFNFSQILPDPSKPSKRSFIEDLLFNKVTLADAGFIKQYGDCLGDIAARDLICAQKFNGLTVLPPLLTDEMIAQYTSALLAGTITSGWTFGAGAALQIPFAMQMAYRFNGIGVTQNVLYENQKLIANQFNSAIGKIQYSLSSTASALGKLQDVVNQNAQALNTLVKQLSSNFGAISSVLNDILSRLDPPEAEVQIDRLITGRLQSLQTYVTQQLIRAAEIRASANLAATKMSECVLGQSKRVDFCGKGYHLMSFPQSAPHGVVFLHVTYVFAQEKNFTTAPAICHDGKAHFPREGVFVSNGTHWFVTQRNFYEPQIITTDNTFVSGNCDVVIGIVNNTVYDPLQPELDSFKEELDKYFKNHTSPDVDLGDISGINASVVNIQKEIDRLNEVAKNLNESLIDLQELGKYEQYIK

SEQ ID NO: 1860 - protein, 1211 aa, Artificial Sequence; identical to SEQ ID NO: 1823
  SARS-CoV-2/Portugal/PT0034/2020__EPI_ISL_418019 spike protein (1-1211)(K986P_V987P_P1069F)

SEQ ID NO: 1861 - protein, 1211 aa, Artificial Sequence
  SARS-CoV-2/Iceland/202/2020__EPI_ISL_417750 spike protein (1-1211)(K986P_V987P_P1069F)
MFVFLVLLPLVSSQCVNLTTRTQLPPAYTNSFTRGVYYPDKVFRSSVLHSTQDLFLPFFSNVTWFHAIHVSGTNGTKRFDNPVLPFNDGVYFASTEKSNIIRGWIFGTTLDSKTQSLLIVNNATNVVIKVCEFQFCNDPFLGVYYHKNNKSWMESEFRVYSSANNCTFEYVSQPFLMDLEGKQGNFKNLREFVFKNIDGYFKIYSKHTPINLVRDLPQGFSALEPLVDLPIGINITRFQTLLALHRSYLTPGDSSSGWTAGAAAYYVGYLQPRTFLLKYNENGTITDAVDCALDPLSETKCTLKSFTVEKGIYQTSNFRVQPTESIVRFPNITNLCPFGEVFNATRFASVYAWNRKRISNCVADYSVLYNSASFSTFKCYGVSPTKLNDLCFTNVYADSFVIRGDEVRQIAPGQTGKIADYNYKLPDDFTGCVIAWNSNNLDSKVGGNYNYLYRLFRKSNLKPFERDISTEIYQAGSTPCNGVEGFNCYFPLQSYGFQPTNGVGYQPYRVVVLSFELLHAPATVCGPKKSTNLVKNKCVNFNFNGLTGTGVLTESNKKFLPFQQFGRDIADTTDAVRDPQTLEILDITPCSFGGVSVITPGTNTSNQVAVLYQDVNCTEVPVAIHADQLTPTWRVYSTGSNVFQTRAGCLIGAEHVNNSYECDIPIGAGICASYQTQTNSPRRARSVASQSIIAYTMSLGAENSVAYSNNSIAIPTNFTISVTTEILPVSMTKTSVDCTMYICGDSTECSNLLLQYGSFCTQLNRALTGIAVEQDKNTQEVFAQVKQIYKTPPIKDFGGFNFSQILPDPSKPSKRSFIEDLLFNKVTLADAGFIKQYGDCLGDIAARDLICAQKFNGLTVLPPLLTDEMIAQYTSALLAGTITSGWTFGAGAALQIPFAMQMAYRFNGIGVTQNVLYENQKLIANQFNSAIGKIQDSLSSTASALGKLQDVVNQNAQALNTLVKQLSSNFGAISSVLNDILSRLDPPEAEVQIDRLITGRLQSLQTYVTQQLIRAAEIRASANLAATKMSECVLGQSKRVDFCGKGYHLMSFPQSAPHGVVFLHVTYVFAQEKNFTTAPAICHDGKAHFPREGVFVSNGTHWFVTQRNFYEPQIITTDNTFVSGNCDVVIGIVNNTVYDPLQPELDSFKEELDKYFKNHTSPDVDLGDIPGINASVVNIQKEIDRLNEVAKNLNESLIDLQELGKYEQYIK

SEQ ID NO: 1862 - protein, 1211 aa, Artificial Sequence
  SARS-CoV-2/USA/WA-UW261/2020__EPI_ISL_418046 spike protein (1-1211)(K986P_V987P_P1069F)
MFVFLVLLPLVSSQCVNLTTRTQLPPAYTNSFTRGVYYPDKVFRSSVLHSTQDLFLPFFSNVTWFHAIHVSGTNGTKRFDNPVLPFNDGVYFASTEKSNIIRGWIFGTTLDSKTQSLLIVNNATNVVIKVCEFQFCNDPFLGVYYHKNNKSWMESEFRVYSSANNCTFEYVSQPFLMDLEGKQGNFKNLREFVFKNIDGYFKIYSKHTPINLVRDLPQGFSALEPLVDLPIGINITRFQTLLALHRSYLTPGDSSSGWTAGAAAYYVGYLQPRTFLLKYNENGTITDAVDCALDPLSETKCTLKSFTVEKGIYQTSNFRVQPTESIVRFPNITNLCPFGEVFNATRFTSVYAWNRKRISNCVADYSVLYNSASFSTFKCYGVSPTKLNDLCFTNVYADSFVIRGDEVRQIAPGQTGKIADYNYKLPDDFTGCVIAWNSNNLDSKVGGNYNYLYRLFRKSNLKPFERDISTEIYQAGSTPCNGVEGFNCYFPLQSYGFQPTNGVGYQPYRVVVLSFELLHAPATVCGPKKSTNLVKNKCVNFNFNGLTGTGVLTESNKKFLPFQQFGRDIADTTDAVRDPQTLEILDITPCSFGGVSVITPGTNTSNQVAVLYQDVNCTEVPVAIHADQLTPTWRVYSTGSNVFQTRAGCLIGAEHVNNSYECDIPIGAGICASYQTQTNSPRRARSVASQSIIAYTMSLGAENSVAYSNNSIAIPTNFTISVTTEILPVSMTKTSVDCTMYICGDSTECSNLLLQYGSFCTQLNRALTGIAVEQDKNTQEVFAQVKQIYKTPPIKDFGGFNFSQILPDPSKPSKRSFIEDLLFNKVTLADAGFIKQYGDCLGDIAARDLICAQKFNGLTVLPPLLTDEMIAQYTSALLAGTITSGWTFGAGAALQIPFAMQMAYRFNGIGVTQNVLYENQKLIANQFNSAIGKIQDSLSSTASALGKLQDVVNQNAQALNTLVKQLSSNFGAISSVLNDILSRLDPPEAEVQIDRLITGRLQSLQTYVTQQLIRAAEIRASANLAATKMSECVLGQSKRVDFCGKGYHLMSFPQSAPHGVVFLHVTYVFAQEKNFTTAPAICHDGKAHFPREGVFVSNGTHWFVTQRNFYEPQIITTDNTFVSGNCDVVIGIVNNTVYDPLQPELDSFKEELDKYFKNHTSPDVDLGDISGINASVVNIQKEIDRLNEVAKNLNESLIDLQELGKYEQYIK

SEQ ID NO: 1863 - protein, 1211 aa, Artificial Sequence
  SARS-CoV-2/Portugal/PT0035/2020__EPI_ISL_418020 spike protein (1-1211)(K986P_V987P_P1069F)
MFVFLVLLPLVSSQCVNLTTRTQLPPAYTNSFTRGVYYPDKVFRSSVLHSTQDLFLPFFSNVTWFHAIHVSGTNGTKRFDNPVLPFNDGVYFASTEKSNIIRGWIFGTTLDSKTQSLLIVNNATNVVIKVCEFQFCNDPFLGVYYHKNNKSWMESEFRVYSSANNCTFEYVSQPFLMDLEGKQGNFKNLREFVFKNIDGYFKIYSKHTPINLVRDLPQGFSALEPLVDLPIGINITRFQTLLALHRSYLTPGDSSSGWTAGAAAYYVGYLQPRTFLLKYNENGTITDAVDCALDPLSETKCTLKSFTVEKGIYQTSNFRVQPTESIVRFPNITNLCPFGEVFNATRFASVYAWNRKRISNCVADYSVLYNSASFSTFKCYGVSPTKLNDLCFTNVYADSFVIRGDEVRQIAPGQTGKIADYNYKLPDDFTGCVIAWNSNNLDSKVGGNYNYLYRLFRKSNLKPFERDISTEIYQAGSTPCNGVEGFNCYFPLQSYGFQPTNGVGYQPYRVVVLSFELLHAPATVCGPKKSTNLVKNKCVNFNFNGLTGTGVLTESNKKFLPFQQFGRDIADTTDAVRDPQTLEILDITPCSFGGVSVITPGTNTSNQVAVLYQDVNCTEVPVAIHADQLTPTWRVYSTGSNVFQTRAGCLIGAEHVNNSYECDIPIGAGICASYQTQTNSPRRARSVASQSIIAYTMSLGAENSVAYSNNSIAIPTNFTISVTTEILPVSMTKTSVDCTMYICGDSTECSNLLLQYGSFCTQLNRALTGIAVEQDKNTQEVFAQVKQIYKTPPIKDFGGFNFSQILPDPSKPSKRSFIEDLLFNKVTLADAGFIKQYGDCLGDISARDLICAQKFNGLTVLPPLLTDEMIAQYTSALLAGTITSGWTFGAGAALQIPFAMQMAYRFNGIGVTQNVLYENQKLIANQFNSAIGKIQDSLSSTASALGKLQDVVNQNAQALNTLVKQLSSNFGAISSVLNDILSRLDPPEAEVQIDRLITGRLQSLQTYVTQQLIRAAEIRASANLAATKMSECVLGQSKRVDFCGKGYHLMSFPQSAPHGVVFLHVTYVFAQEKNFTTAPAICHDGKAHFPREGVFVSNGTHWFVTQRNFYEPQIITTDNTFVSGNCDVVIGIVNNTVYDPLQPELDSFKEELDKYFKNHTSPDVDLGDISGINASVVNIQKEIDRLNEVAKNLNESLIDLQELGKYEQYIK

SEQ ID NO: 1864 - protein, 1211 aa, Artificial Sequence
  SARS-CoV-2/USA/NY-NYUMC7/2020__EPI_ISL_418192 spike protein (1-1211)(K986P_V987P_P1069F)
MFVFLVLLPLVSSQCVNLTTRTQLPPAYTNSFTRGVYYPDKVFRSSVLHSTQDLFLPFFSNVTWFHAIHVSGTNGTKRFDNPVLPFNDGVYFASTEKSNIIRGWIFGTTLDSKTQSLLIVNNATNVVIKVCEFQFCNDPFLGVYHHKNNKSWMESEFRVYSSANNCTFEYVSQPFLMDLEGKQGNFKNLREFVFKNIDGYFKIYSKHTPINLVRDLPQGFSALEPLVDLPIGINITRFQTLLALHRSYLTPGDSSSGWTAGAAAYYVGYLQPRTFLLKYNENGTITDAVDCALDPLSETKCTLKSFTVEKGIYQTSNFRVQPTESIVRFPNITNLCPFGEVFNATRFASVYAWNRKRISNCVADYSVLYNSASFSTFKCYGVSPTKLNDLCFTNVYADSFVIRGDEVRQIAPGQTGKIADYNYKLPDDFTGCVIAWNSNNLDSKVGGNYNYLYRLFRKSNLKPFERDISTEIYQAGSTPCNGVEGFNCYFPLQSYGFQPTNGVGYQPYRVVVLSFELLHAPATVCGPKKSTNLVKNKCVNFNFNGLTGTGVLTESNKKFLPFQQFGRDIADTTDAVRDPQTLEILDITPCSFGGVSVITPGTNTSNQVAVLYQGVNCTEVPVAIHADQLTPTWRVYSTGSNVFQTRAGCLIGAEHVNNSYECDIPIGAGICASYQTQTNSPRRARSVASQSIIAYTMSLGAENSVAYSNNSIAIPTNFTISVTTEILPVSMTKTSVDCTMYICGDSTECSNLLLQYGSFCTQLNRALTGIAVEQDKNTQEVFAQVKQIYKTPPIKDFGGFNFSQILPDPSKPSKRSFIEDLLFNKVTLADAGFIKQYGDCLGDIAARDLICAQKFNGLTVLPPLLTDEMIAQYTSALLAGTITSGWTFGAGAALQIPFAMQMAYRFNGIGVTQNVLYENQKLIANQFNSAIGKIQDSLSSTASALGKLQDVVNQNAQALNTLVKQLSSNFGAISSVLNDILSRLDPPEAEVQIDRLITGRLQSLQTYVTQQLIRAAEIRASANLAATKMSECVLGQSKRVDFCGKGYHLMSFPQSAPHGVVFLHVTYVFAQEKNFTTAPAICHDGKAHFPREGVFVSNGTHWFVTQRNFYEPQIITTDNTFVSGNCDVVIGIVNNTVYDPLQPELDSFKEELDKYFKNHTSPDVDLGDISGINASVVNIQKEIDRLNEVAKNLNESLIDLQELGKYEQYIK

SEQ ID NO: 1865 - protein, 1211 aa, Artificial Sequence
  SARS-CoV-2/Iceland/189/2020__EPI_ISL_417709 spike protein (1-1211)(K986P_V987P_P1069F)
MFVFLVLLPLVSSQCVNLTTRTQLPPAYTNSFTRGVYYPDKVFRSSVLHSTQDLFLPFFSNVTWFHAIHVSGTNGTKRFDNPVLPFNDGVYFASTEKSNIIRGWIFGTTLDSKTQSLLIVNNATNVVIKVCEFQFCNDPFLGVYYHKNNKSWMESEFRVYSSANNCTFEYVSQPFLMDLEGKQGNFKNLREFVFKNIDGYFKIYSKHTPINLVRDLPQGFSALEPLVDLPIGINITRFQTLLALHRSYLTPGDSSSGWTAGAAAYYVGYLQPRTFLLKYNENGTITDAVDCALDPLSETKCTLKSFTVEKGIYQTSNFRVQPTESIVRFPNITNLCPFGEVFNATRFASVYAWNRKRISNCVADYSVLYNSASFSTFKCYGVSPTKLNDLCFTNVYADSFVIRGDEVRQIAPGQTGKIADYNYKLPDDFTGCVIAWNSNNLDSKVGGNYNYLYRLFRKSNLKPFERDISTEIYQAGSTPCNGVEGFNCYFPLQSYGFQPTNGVGYQPYRVVVLSFELLHAPATVCGPKKSTNLVKNKCVNFNFNGLTGTGVLTESNKKFLPFQQFGRDIADTTDAVRDPQTLEILDITPCSFGGVSVITPGTNTSNQVAVLYQGVNCTEVPVAIHADQLTPTWRVYSTGSNVFQTRAGCLIGAEHVNNSYECDIPIGAGICASYQTQTNSPRRARSVASQSIIAYTMSLGAENSVAYSNNSIAIPTNFTISVTTEILPVSMTKTSVDCTMYICGDSTECSNLLLQYGSFCTQLNRALTGIAVEQDKNTQEVFAQVKQIYKTPPIKDFGGFNFSQILPDPSKPSKRSFIEDLLFNKVTLADAGFTKQYGDCLGDIAARDLICAQKFNGLTVLPPLLTDEMIAQYTSALLAGTITSGWTFGAGAALQIPFAMQMAYRFNGIGVTQNVLYENQKLIANQFNSAIGKIQDSLSSTASALGKLQDVVNQNAQALNTLVKQLSSNFGAISSVLNDILSRLDPPEAEVQIDRLITGRLQSLQTYVTQQLIRAAEIRASANLAATKMSECVLGQSKRVDFCGKGYHLMSFPQSAPHGVVFLHVTYVFAQEKNFTTAPAICHDGKAHFPREGVFVSNGTHWFVTQRNFYEPQIITTDNTFVSGNCDVVIGIVNNTVYDPLQPELDSFKEELDKYFKNHTSPDVDLGDISGINASVVNIQKEIDRLNEVAKNLNESLIDLQELGKYEQYIK

SEQ ID NO: 1866 - protein, 1211 aa, Artificial Sequence
  SARS-CoV-2/Australia/NSW56/2020__EPI_ISL_417408 spike protein (1-1211)(K986P_V987P_P1069F)
MFVFLVLLPLVSSQCVNLTTRTQLPPAYTNSFTRGVYYPDKVFRSSVLHSTQDLFLPFFSNVTWFHAIHVSGTNGTKRFDNPVLPFNDGVYFASTEKSNIIRGWIFGTTLDSKTQSLLIVNNATNVVIKVCEFQFCNDPFLGVYYHKNNKSWMESEFRVYSSANNCTFEYVSQPFLMDLEGKQGNFKNLREFVFKNIDGYFKIYSKHTPINLVRDLPQGFSALEPLVDLPIGINITRFQTLLALHRSYLTPGDSSSGWTAGAAAYYVGYLQPRTFLLKYNENGTITDAVDCALDPLSETKCTLKSFTVEKGIYQTSNFRVQPTESIVRFPNITNLCPFGEVFNATRFASVYAWNRKRISNCVADYSVLYNSASFSTFKCYGVSPTKLNDLCFTNVYADSFVIRGDEVRQIAPGQTGKIADYNYKLPDDFTGCVIAWNSNNLDSKVGGNYNYLYRLFRKSNLKPFERDISTEIYQAGSTPCNGVEGFNCYFPLQSYGFQPTNGVGYQPYRVVVLSFELLHAPATVCGPKKSTNLVKNKCVNFNFNGLTGTGVLTESNKKFLPFQQFGRDIADTTDAVRDPQTLEILDITPCSFGGVSVITPGTNTSNQVAVLYQDVNCTEVPVAIHADQLTPTWRVYSTGSNVFQTRAGCLIGAEHVNNSYECDIPIGAGICASYQTQTNSPRRARSVASQSIIAYTMSLGAENSVAYSNNSIAIPTNFTISVTTEILPVSMTKTSVDCTMYICGDSTECSNLLLQYGSFCTQLNRALTGIAVEQDKNTQEVFAQVKQIYKTPPIKDFGGFNFSQILPDSSKPSKRSFIEDLLFNKVTLADAGFIKQYGDCLGDIAARDLICAQKFNGLTVLPPLLTDEMIAQYTSALLAGTITSGWTFGAGAALQIPFAMQMAYRFNGIGVTQNVLYENQKLIANQFNSAIGKIQDSLSSTASALGKLQDVVNQNAQALNTLVKQLSSNFGAISSVLNDILSRLDPPEAEVQIDRLITGRLQSLQTYVTQQLIRAAEIRASANLAATKMSECVLGQSKRVDFCGKGYHLMSFPQSAPHGVVFLHVTYVFAQEKNFTTAPAICHDGKAHFPREGVFVSNGTHWFVTQRNFYEPQIITTDNTFVSGNCDVVIGIVNNTVYDPLQPELDSFKEELDKYFKNHTSPDVDLGDISGINASVVNIQKEIDRLNEVAKNLNESLIDLQELGKYEQYIK

SEQ ID NO: 1867 - protein, 1211 aa, Artificial Sequence
  SARS-CoV-2/Iceland/280/2020__EPI_ISL_417608 spike protein (1-1211)(K986P_V987P_P1069F)
MFVFLVLLPLVSSQCVNLTTRTQLPPAYTNSFTRGVYYPDKVFRSSVLHSTQDLFLPFFSNVTWFHAIHVSGTNGTKRFDNPVLPFNDGVYFASTEKSNIIRGWIFGTTLDSKTQSLLIVNNATNVVIKVCEFQFCNDPFLGVYYHKNNKSWMESEFRVYSSANNCTFEYVSQPFLMDLEGKQGNFKNLREFVFKNIDGYFKIYSKHTPINLVRDLPQGFSALEPLVDLPIGINITRFQTLLALHRSYLTPGDSSSGWTAGAAAYYVGYLQPRTFLLKYNENGTITDAVDCALDPLSETKCTLKSFTVEKGIYQTSNFRVQPTESIVRFPNITNLCPFGEVFNATRFASVYAWNRKRISNCVADYSVLYNSASFSTFKCYGVSPTKLNDLCFTNVYADSFVIRGDEVRQIAPGQTGKIADYNYKLPDDFTGCVIAWNSNNLDSKVGGNYNYLYRLFRKSNLKPFERDISTEIYQAGSTPCNGVEGFNCYFPLQSYGFQPTNGVGYQPYRVVVLSFELLHAPATVCGPKKSTNLVKNKCVNFNFNGLTGTGVLTESNKKFLPFQQFGRDIADTTDAVRDPQTLEILDITPCSFGGVSVITPGTNTSNQVAVLYQGVNCTEVPVAIHADQLTPTWRVYSTGSNVFQTRAGCLIGAEHVNNSYECDIPIGAGICASYHTQTNSPRRARSVASQSIIAYTMSLGAENSVAYSNNSIAIPTNFTISVTTEILPVSMTKTSVDCTMYICGDSTECSNLLLQYGSFCTQLNRALTGIAVEQDKNTQEVFAQVKQIYKTPPIKDFGGFNFSQILPDPSKPSKRSFIEDLLFNKVTLADAGFIKQYGDCLGDIAARDLICAQKFNGLTVLPPLLTDEMIAQYTSALLAGTITSGWTFGAGAALQIPFAMQMAYRFNGIGVTQNVLYENQKLIANQFNSAIGKIQDSLSSTASALGKLQDVVNQNAQALNTLVKQLSSNFGAISSVLNDILSRLDPPEAEVQIDRLITGRLQSLQTYVTQQLIRAAEIRASANLAATKMSECVLGQSKRVDFCGKGYHLMSFPQSAPHGVVFLHVTYVFAQEKNFTTAPAICHDGKAHFPREGVFVSNGTHWFVTQRNFYEPQIITTDNTFVSGNCDVVIGIVNNTVYDPLQPELDSFKEELDKYFKNHTSPDVDLGDISGINASVVNIQKEIDRLNEVAKNLNESLIDLQELGKYEQYIK

SEQ ID NO: 1868 - protein, 1211 aa, Artificial Sequence; identical to SEQ ID NO: 1823
  SARS-CoV-2/Iceland/247/2020__EPI_ISL_417575 spike protein (1-1211)(K986P_V987P_P1069F)

SEQ ID NO: 1869 - protein, 1211 aa, Artificial Sequence
  SARS-CoV-2/Iceland/238/2020__EPI_ISL_417566 spike protein (1-1211)(K986P_V987P_P1069F)
MFVFLVLLPLVSSQCVNLTTRTQLPPAYTNSFTRGVYYPDKVFRSSVLHSTQDLFLPFFSNVTWFHAIHVSGTNGTKRFDNPVLPFNDGVYFASTEKSNIIRGWIFGTTLDSKTQSLLIVNNATNVVIKVCEFQFCNDPFLGVYYHKNNKSWMESEFRVYSSANNCTFEYVSQPFLMDLEGKQGNFKNLREFVFKNIDGYFKIYSKHTPINLVRDLPQGFSALEPLVDLPIGINITRFQTLLALHRSYLTPGDSSSGWTAGAAAYYVGYLQPRTFLLKYNENGTITDAVDCALDPLSETKCTLKSFTVEKGIYQTSNFRVQPTESIVRFPNITNLCPFGEVFNATRFASVYAWNRKRISNCVADYSVLYNSASFSTFKCYGVSPTKLNDLCFTNVYADSFVIRGDEVRQIAPGQTGKIADYNYKLPDDFTGCVIAWNSNNLDSKVGGNYNYLYRLFRKSNLKPFERDISTEIYQAGSTPCNGVEGFNCYFPLQSYGFQPTNGVGYQPYRVVVLSFELLHAPATVCGPKKSTNLVKNKCVNFNFNGLTGTGVLTESNKKFLPFQQFGRDIADTTDAVRDPQTLEILDITPCSFGGVSVITPGTNTSNQVAVLYQGVNCTEVPVAIHADQLTPTWRVYSTGSNVFQTRAGCLIGAEHVNNSYECDIPIGAGICASYQTQTNSPRRARSVASQSIIAYTMSLGAENSVAYSNNSIAIPTNFTISVTTEILPVSMTKTSVDCTMYICGDSTECSNLLLQYGSFCTQLNRALTGIAVEQDKNTQEVFAQVKQIYKTPPIKDFGGFNFSQILPDPSKPSKRSFIEDLLFNKVTLADVGFIKQYGDCLGDIAARDLICAQKFNGLTVLPPLLTDEMIAQYTSALLAGTITSGWTFGAGAALQIPFAMQMAYRFNGIGVTQNVLYENQKLIANQFNSAIGKIQDSLSSTASALGKLQDVVNQNAQALNTLVKQLSSNFGAISSVLNDILSRLDPPEAEVQIDRLITGRLQSLQTYVTQQLIRAAEIRASANLAATKMSECVLGQSKRVDFCGKGYHLMSFPQSAPHGVVFLHVTYVFAQEKNFTTAPAICHDGKAHFPREGVFVSNGTHWFVTQRNFYEPQIITTDNTFVSGNCDVVIGIVNNTVYDPLQPELDSFKEELDKYFKNHTSPDVDLGDISGINASVVNIQKEIDRLNEVAKNLNESLIDLQELGKYEQYIK

SEQ ID NO: 1870 - protein, 1211 aa, Artificial Sequence
  SARS-CoV-2/Greece/16/2020__EPI_ISL_418265 spike protein (1-1211)(K986P_V987P_P1069F)
MFVFLVLLPLVSSQCVNLTTRTQLPPAYTNSFTRGVYYPDKVFRSSVLHSTQDLFLPFFSNVTWFHAIHVSGTNGTKRFDNPVLPFNDGVYFASTEKSNIIRGWIFGTTLDSKTQSLLIVNNATNVVIKVCEFQFCNDPFLGVYYHKNNKSWMESEFRVYSSANNCTFEYVSQPFLMDLEGKQGNFKNLREFVFKNVDGYFKIYSKHTPINLVRDLPQGFSALEPLVDLPIGINITRFQTLLALHRSYLTPGDSSSGWTAGAAAYYVGYLQPRTFLLKYNENGTITDAVDCALDPLSETKCTLKSFTVEKGIYQTSNFRVQPTESIVRFPNITNLCPFGEVFNATRFASVYAWNRKRISNCVADYSVLYNSASFSTFKCYGVSPTKLNDLCFTNVYADSFVIRGDEVRQIAPGQTGKIADYNYKLPDDFTGCVIAWNSNNLDSKVGGNYNYLYRLFRKSNLKPFERDISTEIYQAGSTPCNGVEGFNCYFPLQSYGFQPTNGVGYQPYRVVVLSFELLHAPATVCGPKKSTNLVKNKCVNFNFNGLTGTGVLTESNKKFLPFQQFGRDIADTTDAVRDPQTLEILDITPCSFGGVSVITPGTNTSNQVAVLYQDVNCTEVPVAIHADQLTPTWRVYSTGSNVFQTRAGCLIGAEHVNNSYECDIPIGAGICASYQTQTNSPRRARSVASQSIIAYTMSLGAENSVAYSNNSIAIPTNFTISVTTEILPVSMTKTSVDCTMYICGDSTECSNLLLQYGSFCTQLNRALTGIAVEQDKNTQEVFAQVKQIYKTPPIKDFGGFNFSQILPDPSKPSKRSFIEDLLFNKVTLADAGFIKQYGDCLGDIAARDLICAQKFNGLTVLPPLLTDEMIAQYTSALLAGTITSGWTFGAGAALQIPFAMQMAYRFNGIGVTQNVLYENQKLIANQFNSAIGKIQDSLSSTASALGKLQDVVNQNAQALNTLVKQLSSNFGAISSVLNDILSRLDPPEAEVQIDRLITGRLQSLQTYVTQQLIRAAEIRASANLAATKMSECVLGQSKRVDFCGKGYHLMSFPQSAPHGVVFLHVTYVFAQEKNFTTAPAICHDGKAHFPREGVFVSNGTHWFVTQRNFYEPQIITTDNTFVSGNCDVVIGIVNNTVYDPLQPELDSFKEELDKYFKNHTSPDVDLGDISGINASVVNIQKEIDRLNEVAKNLNESLIDLQELGKYEQYIK

SEQ ID NO: 1871 - protein, 1211 aa, Artificial Sequence
  SARS-CoV-2/Iceland/319/2020__EPI_ISL_417648 spike protein (1-1211)(K986P_V987P_P1069F)
MFVFLVLLPLVSSQCVNLTTRTQLPPAYTNSFTRGVYYPDKVFRSSVLHSTQDLFLPFFSNVTWFHAIHVSGTNGTKRFDNPVLPFNDGVYFASTEKSNIIRGWIFGTTLDSKTQSLLIVNNATNVVIKVCEFQFCNDPFLGVYYHKNNKSWMESEFRVYSSANNCTFEYVSQPFLIDLEGKQGNFKNLREFVFKNIDGYFKIYSKHTPINLVRDLPQGFSALEPLVDLPIGINITRFQTLLALHRSYLTPGDSSSGWTAGAAAYYVGYLQPRTFLLKYNENGTITDAVDCALDPLSETKCTLKSFTVEKGIYQTSNFRVQPTESIVRFPNITNLCPFGEVFNATRFASVYAWNRKRISNCVADYSVLYNSASFSTFKCYGVSPTKLNDLCFTNVYADSFVIRGDEVRQIAPGQTGKIADYNYKLPDDFTGCVIAWNSNNLDSKVGGNYNYLYRLFRKSNLKPFERDISTEIYQAGSTPCNGVEGFNCYFPLQSYGFQPTNGVGYQPYRVVVLSFELLHAPATVCGPKKSTNLVKNKCVNFNFNGLTGTGVLTESNKKFLPFQQFGRDIADTTDAVRDPQTLEILDITPCSFGGVSVITPGTNTSNQVAVLYQGVNCTEVPVAIHADQLTPTWRVYSTGSNVFQTRAGCLIGAEHVNNSYECDIPIGAGICASYQTQTNSPRRARSVASQSIIAYTMSLGAENSVAYSNNSIAIPTNFTISVTTEILPVSMTKTSVDCTMYICGDSTECSNLLLQYGSFCTQLNRALTGIAVEQDKNTQEVFAQVKQIYKTPPIKDFGGFNFSQILPDPSKPSKRSFIEDLLFNKVTLADAGFIKQYGDCLGDIAARDLICAQKFNGLTVLPPLLTDEMIAQYTSALLAGTITSGWTFGAGAALQIPFAMQMAYRFNGIGVTQNVLYENQKLIANQFNSAIGKIQDSLSSTASALGKLQDVVNQNAQALNTLVKQLSSNFGAISSVLNDILSRLDPPEAEVQIDRLITGRLQSLQTYVTQQLIRAAEIRASANLAATKMSECVLGQSKRVDFCGKGYHLMSFPQSAPHGVVFLHVTYVFAQEKNFTTAPAICHDGKAHFPREGVFVSNGTHWFVTQRNFYEPQIITTDNTFVSGNCDVVIGIVNNTVYDPLQPELDSFKEELDKYFKNHTSPDVDLGDISGINASVVNIQKEIDRLNEVAKNLNESLIDLQELGKYEQYIK

SEQ ID NO: 1872 - protein, 1211 aa, Artificial Sequence
  SARS-CoV-2/Congo/94/2020__EPI_ISL_417947 spike protein (1-1211)(K986P_V987P_P1069F)
MFVFLVLLPLVSSQCVNLTTRTQLPPAYTNSFTRGVYYPDKVFRSSVLHSTQDLFLPFFSNVTWFHAIHVSGTNGTKRFDNPVLPFNDGVYFASTEKSNIIRGWIFGTTLDSKTQSLLIVNNATNVVIKVCEFQFCNDPFLGVYYHKNNKSWMESEFRVYSSANNCTFEYVSQPFLMDLEGKQGNFKNLREFVFKNIDGYFKIYSKHTPINLVRDLPQGFSALEPLVDLPIGINITRFQTLLALHRSYLTPGDSSSGWTAGAAAYYVGYLQPRTFLLKYNENGTITDAVDCALDPLSETKCTLKSFTVEKGIYQTSNFRVQPTESIVRFPNITNLCPFGEVFNATRFASVYAWNRKRISNCVADYSVLYNSASFSTFKCYGVSPTKLNDLCFTNVYADSFVIRGDEVRQIAPGQTGKIADYNYKLPDDFTGCVIAWNSNNLDSKVGGNYNYLYRLFRKSNLKPFERDISTEIYQAGSTPCNGVEGFNCYFPLQSYGFQPTNGVGYQPYRVVVLSFELLHAPATVCGPKKSTNLVKNKCVNFNFNGLTGTGVLTESNKKFLPFQQFGRDIADTTDAVRDPQTLEILDITPCSFGGVSVITPGTNTSNQVAVLYQGVNCTEVPVAIHADQLTPTWRVYSTGSNVFQTRAGCLIGAEHVNNSYECDIPIGAGICASYQTQTNSPRRARSVASQSIIAYTMSLGAENSVAYSNNSIAIPTNFTISVTTEILPVSMTKTSVDCTMYICGDSTECSNLLLQYGSFCTQLNRALTGIAVEQDKNTQEVFAQVKQIYKTPPIKDFGGFNFSQILPDPSKPSKRSFIEDILFNKVTLADAGFIKQYGDCLGDIAARDLICAQKFNGLTVLPPLLTDEMIAQYTSALLAGTITSGWTFGAGAALQIPFAMQMAYRFNGIGVTQNVLYENQKLIANQFNSAIGKIQDSLSSTASALGKLQDVVNQNAQALNTLVKQLSSNFGAISSVLNDILSRLDPPEAEVQIDRLITGRLQSLQTYVTQQLIRAAEIRASANLAATKMSECVLGQSKRVDFCGKGYHLMSFPQSAPHGVVFLHVTYVFAQEKNFTTAPAICHDGKAHFPREGVFVSNGTHWFVTQRNFYEPQIITTDNTFVSGNCDVVIGIVNNTVYDPLQPELDSFKEELDKYFKNHTSPDVDLGDISGINASVVNIQKEIDRLNEVAKNLNESLIDLQELGKYEQYIK

SEQ ID NO: 1873 - protein, 1211 aa, Artificial Sequence
  SARS-CoV-2/Congo/158/2020__EPI_ISL_417950 spike protein (1-1211)(K986P_V987P_P1069F)
MFVFLVLLPLVSSQCVNLTTRTQLPPAYTNSFTRGVYYPDKVFRSSVLHSTQDLFLPFFSNVTWFHAIHVSGTNGTKRFDNPVLPFNDGVYFASTEKSNIIRGWIFGTTLDSKTQSLLIVNNATNVVIKVCEFQFCNDPFLGVYYHKNNKSWMESEFRVYSSANNCTFEYVSQPFLMDLEGKQGNFKNLREFVFKNIDGYFKIYSKHTPINLVRDLPQGFSALEPLVDLPIGINITRFQTLLALHRSYLTPGDSSSGWTAGAAAYYVGYLQPRTFLLKYNENGTITDAVDCALDPLSETKCTLKSFTVEKGIYQTSNFRVQPTESIVRFPNITNLCPFGEVFNATRFASVYAWNRKRISNCVADYSVLYNSASFSTFKCYGVSPTKLNDLCFTNVYADSFVIRGDEVRQIAPGQTGKIADYNYKLPDDFTGCVIAWNSNNLDSKVGGNYNYLYRLFRKSNLKPFERDISTEIYQAGSTPCNGVEGFNCYFPLQSYGFQPTNGVGYQPYRVVVLSFELLHAPATVCGPKKSTNLVKNKCVNFNFNGLTGTGVLTESNKKFLPFQQFGRDIADTTDAVRDPQTLEILDITPCSFGGVSVITPGTNTSNQVAVLYQDVNCTEVPVAIHADQLTPTWRVYSTGSNVFQTRAGCLIGAEHVNNSYECDIPIGAGICASYQTQTNSPRRARSVASQSIIAYTMSLGAENSVAYSNNSIAIPTNFTISVTTEILPVSMTKTSVDCTMYICGDSTECSNLLLQYGSFCTQLNRALTGIAVEQDKNTQEVFAQVKQIYKTPPIKDFGGFNFSQILPDPSKPSKRSFIEDLLFNKVTLADAGFIKQYGDCLGDIAARDLICAQKFNGLTVLPPLLTDEMIAQYTSALLAGTITSGWTFGAGAALQIPFAMQMAYRFNGIGVTQNVLYENQKLIANQFNSAIGKIQDSLSSTASALGKLQDVVNQNAQALNTLVKQLSSNFGAISSVLNDILSRLDPPEAEVQIDRLITGRLQSLQTYVTQQLIRAAEIRASANLAATKMSECVLGQSKRVDFCGKGYHLMSFPQSAPHGVVFLHVTYVFAQEKNFTTAPAICHDGKAHFPREGVFVSNGTHWFVTQRNFYEPQIITTDNTFLSGNCDVVIGIVNNTVYDPLQPELDSFKEELDKYFKNHTSPDVDLGDISGINASVVNIQKEIDRLNEVAKNLNESLIDLQELGKYEQYIK

SEQ ID NO: 1874 - protein, 1211 aa, Artificial Sequence
  SARS-CoV-2/USA/UT-00034/2020__EPI_ISL_417977 spike protein (1-1211)(K986P_V987P_P1069F)
MFVFLVLLPLVSSQCVNLTTRTQLPPAYTNSFTRGVYYPDKVFRSSVLHSTQDLFLPFFSNVTWFHAIHVSGTNGTKRFDNPVLPFNDGVYFASTEKSNIIRGWIFGTTLDSKTQSLLIVNNATNVVIKVCEFQFCNDPFLGVYYYKNNKSWMESEFRVYSSANNCTFEYVSQPFLMDLEGKQGNFKNLREFVFKNIDGYFKIYSKHTPINLVRDLPQGFSALEPLVDLPIGINITRFQTLLALHRSYLTPGDSSSGWTAGAAAYYVGYLQPRTFLLKYNENGTITDAVDCALDPLSETKCTLKSFTVEKGIYQTSNFRVQPTESIVRFPNITNLCPFGEVFNATRFASVYAWNRKRISNCVADYSVLYNSASFSTFKCYGVSPTKLNDLCFTNVYADSFVIRGDEVRQIAPGQTGKIADYNYKLPDDFTGCVIAWNSNNLDSKVGGNYNYLYRLFRKSNLKPFERDISTEIYQAGSTPCNGVEGFNCYFPLQSYGFQPTNGVGYQPYRVVVLSFELLHAPATVCGPKKSTNLVKNKCVNFNFNGLTGTGVLTESNKKFLPFQQFGRDIADTTDAVRDPQTLEILDITPCSFGGVSVITPGTNTSNQVAVLYQGVNCTEVPVAIHADQLTPTWRVYSTGSNVFQTRAGCLIGAEHVNNSYECDIPIGAGICASYQTQTNSPRRARSVASQSIIAYTMSLGAENSVAYSNNSIAIPTNFTISVTTEILPVSMTKTSVDCTMYICGDSTECSNLLLQYGSFCTQLNRALTGIAVEQDKNTQEVFAQVKQIYKTPPIKDFGGFNFSQILPDPSKPSKRSFIEDLLFNKVTLADAGFIKQYGDCLGDIAARDLICAQKFNGLTVLPPLLTDEMIAQYTSALLAGTITSGWTFGAGAALQIPFAMQMAYRFNGIGVTQNVLYENQKLIANQFNSAIGKIQDSLSSTASALGKLQDVVNQNAQALNTLVKQLSSNFGAISSVLNDILSRLDPPEAEVQIDRLITGRLQSLQTYVTQQLIRAAEIRASANLAATKMSECVLGQSKRVDFCGKGYHLMSFPQSAPHGVVFLHVTYVFAQEKNFTTAPAICHDGKAHFPREGVFVSNGTHWFVTQRNFYEPQIITTDNTFVSGNCDVVIGIVNNTVYDPLQPELDSFKEELDKYFKNHTSPDVDLGDISGINASVVNIQKEIDRLNEVAKNLNESLIDLQELGKYEQYIK

SEQ ID NO: 1875 - protein, 1211 aa, Artificial Sequence
  SARS-CoV-2/USA/UT-00033/2020__EPI_ISL_417976 spike protein (1-1211)(K986P_V987P_P1069F)
MFVFLVLLPLVSSQCVNLTTRTQLPPAYTNSFTRGVYYPDKVFRSSVLHSTQDLFLPFFSNVTWFHAIHVSGTNGTKRFDNPVLPFNDGVYFASTEKSNIIRGWIFGTTLDSKTQSLLIVNNATNVVIKVCEFQFCNDPFLGVYYHKNNKSWMESEFRVYSSANNCTFEYVSQPFLMDLEGKQGNFKNLREFVFKNIDGYFKIYSKHTPINLVRDLPQGFSALEPLVDLPIGINITRFQTLLALHRSYLTPGDSSSGLTAGAAAYYVGYLQPRTFLLKYNENGTITDAVDCALDPLSETKCTLKSFTVEKGIYQTSNFRVQPTESIVRFPNITNLCPFGEVFNATRFASVYAWNRKRISNCVADYSVLYNSASFSTFKCYGVSPTKLNDLCFTNVYADSFVIRGDEVRQIAPGQTGKIADYNYKLPDDFTGCVIAWNSNNLDSKVGGNYNYLYRLFRKSNLKPFERDISTEIYQAGSTPCNGVEGFNCYFPLQSYGFQPTNGVGYQPYRVVVLSFELLHAPATVCGPKKSTNLVKNKCVNFNFNGLTGTGVLTESNKKFLPFQQFGRDIADTTDAVRDPQTLEILDITPCSFGGVSVITPGTNTSNQVAVLYQGVNCTEVPVAIHADQLTPTWRVYSTGSNVFQTRAGCLIGAEHVNNSYECDIPIGAGICASYQTQTNSPRRARSVASQSIIAYTMSLGAENSVAYSNNSIAIPTNFTISVTTEILPVSMTKTSVDCTMYICGDSTECSNLLLQYGSFCTQLNRALTGIAVEQDKNTQEVFAQVKQIYKTPPIKDFGGFNFSQILPDPSKPSKRSFIEDLLFNKVTLADAGFIKQYGDCLGDIAARDLICAQKFNGLTVLPPLLTDEMIAQYTSALLAGTITSGWTFGAGAALQIPFAMQMAYRFNGIGVTQNVLYENQKLIANQFNSAIGKIQDSLSSTASALGKLQDVVNQNAQALNTLVKQLSSNFGAISSVLNDILSRLDPPEAEVQIDRLITGRLQSLQTYVTQQLIRAAEIRASANLAATKMSECVLGQSKRVDFCGKGYHLMSFPQSAPHGVVFLHVTYVFAQEKNFTTAPAICHDGKAHFPREGVFVSNGTHWFVTQRNFYEPQIITTDNTFVSGNCDVVIGIVNNTVYDPLQPELDSFKEELDKYFKNHTSPDVDLGDISGINASVVNIQKEIDRLNEVAKNLNESLIDLQELGKYEQYIK

SEQ ID NO: 1876 - protein, 1211 aa, Artificial Sequence
  SARS-CoV-2/USA/WI-13/2020__EPI_ISL_417516 spike protein (1-1211)(K986P_V987P_P1069F)
MFVFLVLLPLVSSQCVNLTTRTQLPPAYTNSFTRGVYYPDKVFRSSVLHSTQDLFLPFFSNVTWFHAIHVSGTNGTKRFDNPVLPFNDGVYFASTEKSNIIRGWIFGTTLDSKTQSLLIVNNATNVVIKVCEFQFCNDPFLGVYYHKNNKSWMESEFRVYSSANNCTFEYVSQPFLMDLEGKQGNFKNLREFVFKNIDGYFKIYSKHTPINLVRDLPQGFSALEPLVDLPIGINITRFQTLLALHRSYLTPGDSSSGWTAGAAAYYVGYLQPRTFLLKYNENGTITDAVDCALDPLSETKCTLKSFTVEKGIYQTSNFRVLPTESIVRFPNITNLCPFGEVFNATRFASVYAWNRKRISNCVADYSVLYNSASFSTFKCYGVSPTKLNDLCFTNVYADSFVIRGDEVRQIAPGQTGKIADYNYKLPDDFTGCVIAWNSNNLDSKVGGNYNYLYRLFRKSNLKPFERDISTEIYQAGSTPCNGVEGFNCYFPLQSYGFQPTNGVGYQPYRVVVLSFELLHAPATVCGPKKSTNLVKNKCVNFNFNGLTGTGVLTESNKKFLPFQQFGRDIADTTDAVRDPQTLEILDITPCSFGGVSVITPGTNTSNQVAVLYQGVNCTEVPVAIHADQLTPTWRVYSTGSNVFQTRAGCLIGAEHVNNSYECDIPIGAGICASYQTQTNSPRRARSVASQSIIAYTMSLGAENSVAYSNNSIAIPTNFTISVTTEILPVSMTKTSVDCTMYICGDSTECSNLLLQYGSFCTQLNRALTGIAVEQDKNTQEVFAQVKQIYKTPPIKDFGGFNFSQILPDPSKPSKRSFIEDLLFNKVTLADAGFIKQYGDCLGDIAARDLICAQKFNGLTVLPPLLTDEMIAQYTSALLAGTITSGWTFGAGAALQIPFAMQMAYRFNGIGVTQNVLYENQKLIANQFNSAIGKIQDSLSSTASALGKLQDVVNQNAQALNTLVKQLSSNFGAISSVLNDILSRLDPPEAEVQIDRLITGRLQSLQTYVTQQLIRAAEIRASANLAATKMSECVLGQSKRVDFCGKGYHLMSFPQSAPHGVVFLHVTYVFAQEKNFTTAPAICHDGKAHFPREGVFVSNGTHWFVTQRNFYEPQIITTDNTFVSGNCDVVIGIVNNTVYDPLQPELDSFKEELDKYFKNHTSPDVDLGDISGINASVVNIQKEIDRLNEVAKNLNESLIDLQELGKYEQYIK

SEQ ID NO: 1877 - protein, 1210 aa, Artificial Sequence
  SARS-CoV-2/India/1-27/2020__EPI_ISL_413522 spike protein (1-1210)(K985P_V986P_P1068F)
MFVFLVLLPLVSSQCVNLTTRTQLPPAYTNSFTRGVYYPDKVFRSSVLHSTQDLFLPFFSNVTWFHAIHVSGTNGTKRFDNPVLPFNDGVYFASTEKSNIIRGWIFGTTLDSKTQSLLIVNNATNVVIKVCEFQFCNDPFLGVYHKNNKSWMESEFRVYSSANNCTFEYVSQPFLMDLEGKQGNFKNLREFVFKNIDGYFKIYSKHTPINLVRDLPQGFSALEPLVDLPIGINITRFQTLLALHRSYLTPGDSSSGWTAGAAAYYVGYLQPRTFLLKYNENGTITDAVDCALDPLSETKCTLKSFTVEKGIYQTSNFRVQPTESIVRFPNITNLCPFGEVFNATRFASVYAWNRKRISNCVADYSVLYNSASFSTFKCYGVSPTKLNDLCFTNVYADSFVIRGDEVIQIAPGQTGKIADYNYKLPDDFTGCVIAWNSNNLDSKVGGNYNYLYRLFRKSNLKPFERDISTEIYQAGSTPCNGVEGFNCYFPLQSYGFQPTNGVGYQPYRVVVLSFELLHAPATVCGPKKSTNLVKNKCVNFNFNGLTGTGVLTESNKKFLPFQQFGRDIADTTDAVRDPQTLEILDITPCSFGGVSVITPGTNTSNQVAVLYQDVNCTEVPVAIHADQLTPTWRVYSTGSNVFQTRAGCLIGAEHVNNSYECDIPIGAGICASYQTQTNSPRRARSVASQSIIAYTMSLGAENSVAYSNNSIAIPTNFTISVTTEILPVSMTKTSVDCTMYICGDSTECSNLLLQYGSFCTQLNRALTGIAVEQDKNTQEVFAQVKQIYKTPPIKDFGGFNFSQILPDPSKPSKRSFIEDLLFNKVTLADAGFIKQYGDCLGDIAARDLICAQKFNGLTVLPPLLTDEMIAQYTSALLAGTITSGWTFGAGAALQIPFAMQMAYRFNGIGVTQNVLYENQKLIANQFNSAIGKIQDSLSSTASALGKLQDVVNQNAQALNTLVKQLSSNFGAISSVLNDILSRLDPPEAEVQIDRLITGRLQSLQTYVTQQLIRAAEIRASANLAATKMSECVLGQSKRVDFCGKGYHLMSFPQSAPHGVVFLHVTYVFAQEKNFTTAPAICHDGKAHFPREGVFVSNGTHWFVTQRNFYEPQIITTDNTFVSGNCDVVIGIVNNTVYDPLQPELDSFKEELDKYFKNHTSPDVDLGDISGINASVVNIQKEIDRLNEVAKNLNESLIDLQELGKYEQYIK

SEQ ID NO: 1878 - protein, 1205 aa, Artificial Sequence
  SARS-CoV-2/pangolin/Guangxi/P4L/2017__EPI_ISL_410538 spike protein (1-1205)(K980P_V981P_P1063F)
MFVFLFVLPLVSSQCVNLTTRTGIPPGYTNSSTRGVYYPDKVFRSSILHLTQDLFLPFFSNVTWFNTINYQGGFKKFDNPVLPFNDGVYFASTEKSNIIRGWIFGTTLDARTQSLLIVNNATNVVIKVCEFQFCTDPFLGVYYHNNNKTWVENEFRVYSSANNCTFEYISQPFLMDLEGKQGNFKNLREFVFKNVDGYFKIYSKHTPIDLVRDLPRGFAALEPLVDLPIGINITRFQTLLALHRSYLTPGNLESGWTTGAAAYYVGYLQQRTFLLSYNQNGTITDAVDCSLDPLSETKCTLKSLTVEKGIYQTSNFRVQPTISIVRFPNITNLCPFGEVFNASKFASVYAWNRKRISNCVADYSVLYNSTSFSTFKCYGVSPTKLNDLCFTNVYADSFVVKGDEVRQIAPGQTGVIADYNYKLPDDFTGCVIAWNSVKQDALTGGNYGYLYRLFRKSKLKPFERDISTEIYQAGSTPCNGQVGLNCYYPLERYGFHPTTGVNYQPFRVVVLSFELLNGPATVCGPKLSTTLVKDKCVNFNFNGLTGTGVLTTSKKQFLPFQQFGRDISDTTDAVRDPQTLEILDITPCSFGGVSVITPGTNTSNQVAVLYQDVNCTEVPMAIHAEQLTPAWRVYSAGANVFQTRAGCLVGAEHVNNSYECDIPVGAGICASYHSMSSLRSVNQRSIIAYTMSLGAENSVAYSNNSIAIPTNFTISVTTEILPVSMTKTSVDCTMYICGDSIECSNLLLQYGSFCTQLNRALTGIAVEQDKNTQEVFAQVKQIYKTPPIKDFGGFNFSQILPDPSKPSKRSFIEDLLFNKVTLADAGFIKQYGDCLGDIAARDLICAQKFNGLTVLPPLLTDEMIAQYTSALLAGTITSGWTFGAGAALQIPFAMQMAYRFNGIGVTQNVLYENQKLIANQFNSAIGKIQDSLSSTASALGKLQDVVNQNAQALNTLVKQLSSNFGAISSVLNDILSRLDPPEAEVQIDRLITGRLQSLQTYVTQQLIRAAEIRASANLAATKMSECVLGQSKRVDFCGKGYHLMSFPQSAPHGVVFLHVTYVFAQEKNFTTAPAICHEGKAHFPREGVFVSNGTHWFITQRNFYEPQIITTDNTFVSGSCDVVIGIVNNTVYDPLQPELDSFKEELDKYFKNHTSPDVDLGDISGINASVVNIQKEIDRLNEVAKNLNESPIDLQELGKYEQYIK

SEQ ID NO: 1879 - protein, 1205 aa, Artificial Sequence
  SARS-CoV-2/pangolin/Guangxi/P5L/2017__EPI_ISL_410540 spike protein (1-1205)(K980P_V981P_P1063F)
MFVFLFVLPLVSSQCVNLTTRTGIPPGYTNSSTRGVYYPDKVFRSSILHLTQDLFLPFFSNVTWFNTINYQGGFKKFDNPVLPFNDGVYFASTEKSNIIRGWIFGTTLDARTQSLLIVNNATNVVIKVCEFQFCTDPFLGVYYHNNNKTWVENEFRVYSSANNCTFEYISQPFLMDLEGKQGNFKNLREFVFKNVDGYFKIYSKHTPIDLVRDLPRGFAALEPLVDLPIGINITRFQTLLALHRSYLTPGKLESGWTTGAAAYYVGYLQQRTFLLSYNQNGTITDAVDCSLDPLSETKCTLKSLTVEKGIYQTSNFRVQPTISIVRFPNITNLCPFGEVFNASKFASVYAWNRKRISNCVADYSVLYNSTSFSTFKCYGVSPTKLNDLCFTNVYADSFVVKGDEVRQIAPGQTGVIADYNYKLPDDFTGCVIAWNSVKQDALTGGNYGYLYRLFRKSKLKPFERDISTEIYQAGSTPCNGQVGLNCYYPLERYGFHPTTGVNYQPFRVVVLSFELLNGPATVCGPKLSTTLVKDKCVNFNFNGLTGTGVLTTSKKQFLPFQQFGRDISDTTDAVRDPQTLEILDITPCSFGGVSVITPGTNTSNQVAVLYQDVNCTEVPMAIHAEQLTPAWRVYSAGANVFQTRAGCLVGAEHVNNSYECDIPVGAGICASYHSMSSFRSVNQRSIIAYTMSLGAENSVAYSNNSIAIPTNFTISVTTEILPVSMTKTSVDCTMYICGDSIECSNLLLQYGSFCTQLNRALTGIAVEQDKNTQEVFAQVKQIYKTPPIKDFGGFNFSQILPDPSKPSKRSFIEDLLFNKVTLADAGFIKQYGDCLGDIAARDLICAQKFNGLTVLPPLLTDEMIAQYTSALLAGTITSGWTFGAGAALQIPFAMQMAYRFNGIGVTQNVLYENQKLIANQFNSAIGKIQDSLSSTASALGKLQDVVNQNAQALNTLVKQLSSNFGAISSVLNDILSRLDPPEAEVQIDRLITGRLQSLQTYVTQQLIRAAEIRASANLAATKMSECVLGQSKRVDFCGKGYHLMSFPQSAPHGVVFLHVTYVFAQEKNFTTAPAICHEGKAHFPREGVFVSNGTHWFITQRNFYEPQIITTDNTFVSGSCDVVIGIVNNTVYDPLQPELDSFKEELDKYFKNHTSPDVDLGDISGINASVVNIQKEIDRLNEVAKNLNESLIDLQELGKYEQYIK

SEQ ID NO: 1880 - protein, 1205 aa, Artificial Sequence
  SARS-CoV-2/pangolin/Guangxi/P5E/2017__EPI_ISL_410541 spike protein (1-1205)(K980P_V981P_P1063F)
MFVFLFVLPLVSSQCVNLTTRTGIPPGYTNSSTRGVYYPDKVFRSSILHLTQDLFLPFFSNVTWFNTITYQGGSKKFDNPVLPFNDGVYFASTEKSNIIRGWIFGTTLDARTQSLLIVNNATNVVIKVCEFQFCTDPFLGVYYHNNNKTWVENEFRVYSSANNCTFEYISQPFLMDLEGKQGNFKNLREFVFKNVDGYFKIYSKHTPIDLVRDLPRGFAALEPLVDLPIGINITRFQTLLALHRSYLTPGKLESGWTTGAAAYYVGYLQQRTFLLSYNQNGTITDAVDCSLDPLSETKCTLKSLTVEKGIYQTSNFRVQPTISIVRFPNITNLCPFGEVFNASKFASVYAWNRKRISNCVADYSVLYNSTSFSTFKCYGVSPTKLNDLCFTNVYADSFVVKGDEVRQIAPGQTGVIADYNYKLPDDFTGCVIAWNSVKQDALTGDNYGYLYRLFRKSKLKPFERDISTEIYQAGSTPCNGQVGLNCYYPLERYGFHPTTGVNYQPFRVVVLSFELLNGPATVCGPKLSTTLVKDKCVNFNFNGLTGTGVLTTSKKQFLPFQQFGRDISDTTDAVRDPQTLEILDITPCSFGGVSVITPGTNTSNQVAVLYQDVNCTEVPMAIHAEQLTPAWRVYSAGANVFQTRAGCLVGAEHVNNSYECDIPVGAGICASYHSMSSFRSVNQRSIIAYTMSLGAENSVAYSNNSIAIPTNFTISVTTEILPVSMTKTSVDCTMYICGDSIECSNLLLQYGSFCTQLNRALTGIAVEQDKNTQEVFAQVKQIYKTPPIKDFGGFNFSQILPDPSKPSKRSFIEDLLFNKVTLADAGFIKQYGDCLGDIAARDLICAQKFNGLTVLPPLLTDEMIAQYTSALLAGTITSGWTFGAGAALQIPFAMQMAYRFNGIGVTQNVLYENQKLIANQFNSAIGKIQDSLSSTASALGKLQDVVNQNAQALNTLVKQLSSNFGAISSVLNDILSRLDPPEAEVQIDRLITGRLQSLQTYVTQQLIRAAEIRASANLAATKMSECVLGQSKRVDFCGKGYHLMSFPQSAPHGVVFLHVTYVFAQEKNFTTAPAICHEGKAHFPREGVFVSNGTHWFITQRNFYEPQIITTDNTFVSGSCDVVIGIVNNTVYDPLQPELDSFKEELDKYFKNHTSPDVDLGDISGINASVVNIQKEIDRLNEVAKNLNESLIDLQELGKYEQYIK

SEQ ID NO: 1881 - protein, 1203 aa, Artificial Sequence
  SARS-CoV-2/pangolin/Guangxi/P1E/2017__EPI_ISL_410539 spike protein (1-1203)(K978P_V979P_P1061F)
MFVFLFVLPLVSSQCVNLTTRTGIQPGYTNSSTRGVYYPDKVFRSSILHLTQDLFLPFFSNVTWFNTINYQGGFKKFDNPVLPFNDGVYFASTEKSNIIRGWIFGTTLDARTQSLLIVNNATNVVIKVCEFQFCTDPFLGVYYHNNNKTWVENEFRVYSSANNCTFEYISQPFLMDLEGKQGNFKNLREFVFKNVDGYFKIYSKHTPIDLVRDLPRGFAALEPLVDLPIGINITRFQTLLALHRSYLTPGKLESGWTTGAAAYYVGYLQQRTFLLSYNQNGTITDAVDCSLDPLSETKCTLKSLTVEKGIYQTSNFRVQPTISIVRFPNITNLCPFGEVFNASKFASVYAWNRKRISNCVADYSVLYNSTSFSTFKCYGVSPTKLNDLCFTNVYADSFVVKGDEVRQIAPGQTGVIADYNYKLPDDFTGCVIAWNSVKQDALTGGNYLYRLFRKSKLKPFERDISTEIYQAGSTPCNGQVGLNCYYPLERYGFHPTTGVNYQPFRVVVLSFELLNGPATVCGPKLSTTLVKDKCVNFNFNGLTGTGVLTTSKKQFLPFQQFGRDISDTTDAVRDPQTLEILDITPCSFGGVSVITPGTNTSNQVAVLYQDVNCTEVPMAIHAEQLTPAWRVYSAGANVFQTRAGCLVGAEHVNNSYECDIPVGAGICASYHSMSSLRSVNQRSIIAYTMSLGAENSVAYSNNSIAIPTNFTISVTTEILPVSMTKTSVDCTMYICGDSIECSNLLLQYGSFCTQLNRALTGIAVEQDKNTQEVFAQVKQIYKTPPIKDFGGFNFSQILPDPSKPSKRSFIEDLLFNKVTLADAGFIKQYGDCLGDIAARDLICAQKFNGLTVLPPLLTDEMIAQYTSALLAGTITSGWTFGAGAALQIPFAMQMAYRFNGIGVTQNVLYENQKLIANQFNSAIGKIQDSLSSTASALGKLQDVVNQNAQALNTLVKQLSSNFGAISSVLNDILSRLDPPEAEVQIDRLITGRLQSLQTYVTQQLIRAAEIRASANLAATKMSECVLGQSKRVDFCGKGYHLMSFPQSAPHGVVFLHVTYVFAQEKNFTTAPAICHEGKAHFPREGVFVSNGTHWFITQRNFYEPQIITTDNTFVSGSCDVVIGIVNNTVYDPLQPELDSFKEELDKYFKNHTSPDVDLGDISGINASVVNIQKEIDRLNEVAKNLNESLIDLQELGKYEQYIK

SEQ ID NO: 1882 - protein, 1211 aa, Artificial Sequence
  SARS-CoV-2/Wuhan/WIV05/2019__EPI_ISL_402128 spike protein (1-1211)(K986P_V987P_ H1048Q_H1064N_ H1083N_H1101N)
MFVFLVLLPLVSSQCVNLTTRTQLPPAYTNSFTRGVYYPDKVFRSSVLHSTQDLFLPFFSNVTWFHAIHVSGTNGTKRFDNPVLPFNDGVYFASTEKSNIIRGWIFGTTLDSKTQSLLIVNNATNVVIKVCEFQFCNDPFLGVYYHKNNKSWMESEFRVYSSANNCTFEYVSQPFLMDLEGKQGNFKNLREFVFKNIDGYFKIYSKHTPINLVRDLPQGFSALEPLVDLPIGINITRFQTLLALHRSYLTPGDSSSGWTAGAAAYYVGYLQPRTFLLKYNENGTITDAVDCALDPLSETKCTLKSFTVEKGIYQTSNFRVQPTESIVRFPNITNLCPFGEVFNATRFASVYAWNRKRISNCVADYSVLYNSASFSTFKCYGVSPTKLNDLCFTNVYADSFVIRGDEVRQIAPGQTGKIADYNYKLPDDFTGCVIAWNSNNLDSKVGGNYNYLYRLFRKSNLKPFERDISTEIYQAGSTPCNGVEGFNCYFPLQSYGFQPTNGVGYQPYRVVVLSFELLHAPATVCGPKKSTNLVKNKCVNFNFNGLTGTGVLTESNKKFLPFQQFGRDIADTTDAVRDPQTLEILDITPCSFGGVSVITPGTNTSNQVAVLYQDVNCTEVPVAIHADQLTPTWRVYSTGSNVFQTRAGCLIGAEHVNNSYECDIPIGAGICASYQTQTNSPRRARSVASQSIIAYTMSLGAENSVAYSNNSIAIPTNFTISVTTEILPVSMTKTSVDCTMYICGDSTECSNLLLQYGSFCTQLNRALTGIAVEQDKNTQEVFAQVKQIYKTPPIKDFGGFNFSQILPDPSKPSKRSFIEDLLFNKVTLADAGFIKQYGDCLGDIAARDLICAQKFNGLTVLPPLLTDEMIAQYTSALLAGTITSGWTFGAGAALQIPFAMQMAYRFNGIGVTQNVLYENQKLIANQFNSAIGKIQDSLSSTASALGKLQDVVNQNAQALNTLVKQLSSNFGAISSVLNDILSRLDPPEAEVQIDRLITGRLQSLQTYVTQQLIRAAEIRASANLAATKMSECVLGQSKRVDFCGKGYQLMSFPQSAPHGVVFLNVTYVPAQEKNFTTAPAICNDGKAHFPREGVFVSNGTNWFVTQRNFYEPQIITTDNTFVSGNCDVVIGIVNNTVYDPLQPELDSFKEELDKYFKNHTSPDVDLGDISGINASVVNIQKEIDRLNEVAKNLNESLIDLQELGKYEQYIK

SEQ ID NO: 1883 - protein, 1207 aa, Artificial Sequence
  SARS-CoV-2/bat/Yunnan/RaTG13/2013__EPI_ISL_402131 spike protein (1-1207)(K982P_V983P_ H1044Q_H1060N_ H1079N_H1097N)
MFVFLVLLPLVSSQCVNLTTRTQLPPAYTNSSTRGVYYPDKVFRSSVLHLTQDLFLPFFSNVTWFHAIHVSGTNGIKRFDNPVLPFNDGVYFASTEKSNIIRGWIFGTTLDSKTQSLLIVNNATNVVIKVCEFQFCNDPFLGVYYHKNNKSWMESEFRVYSSANNCTFEYVSQPFLMDLEGKQGNFKNLREFVFKNIDGYFKIYSKHTPINLVRDLPPGFSALEPLVDLPIGINITRFQTLLALHRSYLTPGDSSSGWTAGAAAYYVGYLQPRTFLLKYNENGTITDAVDCALDPLSETKCTLKSFTVEKGIYQTSNFRVQPTDSIVRFPNITNLCPFGEVFNATTFASVYAWNRKRISNCVADYSVLYNSTSFSTFKCYGVSPTKLNDLCFTNVYADSFVITGDEVRQIAPGQTGKIADYNYKLPDDFTGCVIAWNSKHIDAKEGGNFNYLYRLFRKANLKPFERDISTEIYQAGSKPCNGQTGLNCYYPLYRYGFYPTDGVGHQPYRVVVLSFELLNAPATVCGPKKSTNLVKNKCVNFNFNGLTGTGVLTESNKKFLPFQQFGRDIADTTDAVRDPQTLEILDITPCSFGGVSVITPGTNASNQVAVLYQDVNCTEVPVAIHADQLTPTWRVYSTGSNVFQTRAGCLIGAEHVNNSYECDIPIGAGICASYQTQTNSRSVASQSIIAYTMSLGAENSVAYSNNSIAIPTNFTISVTTEILPVSMTKTSVDCTMYICGDSTECSNLLLQYGSFCTQLNRALTGIAVEQDKNTQEVFAQVKQIYKTPPIKDFGGFNFSQILPDPSKPSKRSFIEDLLFNKVTLADAGFIKQYGDCLGDIAARDLICAQKFNGLTVLPPLLTDEMIAQYTSALLAGTITSGWTFGAGAALQIPFAMQMAYRFNGIGVTQNVLYENQKLIANQFNSAIGKIQDSLSSTASALGKLQDVVNQNAQALNTLVKQLSSNFGAISSVLNDILSRLDPPEAEVQIDRLITGRLQSLQTYVTQQLIRAAEIRASANLAATKMSECVLGQSKRVDFCGKGYQLMSFPQSAPHGVVFLNVTYVPAQEKNFTTAPAICNDGKAHFPREGVFVSNGTNWFVTQRNFYEPQIITTDNTFVSGSCDVVIGIVNNTVYDPLQPELDSFKEELDKYFKNHTSPDVDLGDISGINASVVNIQKEIDRLNEVAKNLNESLIDLQELGKYEQYIK

SEQ ID NO: 1884 - protein, 1211 aa, Artificial Sequence
  SARS-CoV-2/Wuhan/HBCDC-HB-01/2019__EPI_ISL_402132 spike protein (1-1211)(K986P_V987P_ H1048Q_H1064N_ H1083N_H1101N)
MFVFLVLLPLVSSQCVNLTTRTQLPPAYTNSITRGVYYPDKVFRSSVLHSTQDLFLPFFSNVTWFHAIHVSGTNGTKRFDNPVLPFNDGVYFASTEKSNIIRGWIFGTTLDSKTQSLLIVNNATNVVIKVCEFQFCNDPFLGVYYHKNNKSWMESEFRVYSSANNCTFEYVSQPFLMDLEGKQGNFKNLREFVFKNIDGYFKIYSKHTPINLVRDLPQGFSALEPLVDLPIGINITRFQTLLALHRSYLTPGDSSSGWTAGAAAYYVGYLQPRTFLLKYNENGTITDAVDCALDPLSETKCTLKSFTVEKGIYQTSNFRVQPTESIVRFPNITNLCPFGEVFNATRFASVYAWNRKRISNCVADYSVLYNSASFSTFKCYGVSPTKLNDLCFTNVYADSFVIRGDEVRQIAPGQTGKIADYNYKLPDDFTGCVIAWNSNNLDSKVGGNYNYLYRLFRKSNLKPFERDISTEIYQAGSTPCNGVEGFNCYFPLQSYGFQPTNGVGYQPYRVVVLSFELLHAPATVCGPKKSTNLVKNKCVNFNFNGLTGTGVLTESNKKFLPFQQFGRDIADTTDAVRDPQTLEILDITPCSFGGVSVITPGTNTSNQVAVLYQDVNCTEVPVAIHADQLTPTWRVYSTGSNVFQTRAGCLIGAEHVNNSYECDIPIGAGICASYQTQTNSPRRARSVASQSIIAYTMSLGAENSVAYSNNSIAIPTNFTISVTTEILPVSMTKTSVDCTMYICGDSTECSNLLLQYGSFCTQLNRALTGIAVEQDKNTQEVFAQVKQIYKTPPIKDFGGFNFSQILPDPSKPSKRSFIEDLLFNKVTLADAGFIKQYGDCLGDIAARDLICAQKFNGLTVLPPLLTDEMIAQYTSALLAGTITSGWTFGAGAALQIPFAMQMAYRFNGIGVTQNVLYENQKLIANQFNSAIGKIQDSLSSTASALGKLQDVVNQNAQALNTLVKQLSSNFGAISSVLNDILSRLDPPEAEVQIDRLITGRLQSLQTYVTQQLIRAAEIRASANLAATKMSECVLGQSKRVDFCGKGYQLMSFPQSAPHGVVFLNVTYVPAQEKNFTTAPAICNDGKAHFPREGVFVSNGTNWFVTQRNFYEPQIITTDNTFVSGNCDVVIGIVNNTVYDPLQPELDSFKEELDKYFKNHTSPDVDLGDISGINASVVNIQKEIDRLNEVAKNLNESLIDLQELGKYEQYIK

SEQ ID NO: 1885 - protein, 1211 aa, Artificial Sequence
  SARS-CoV-2/Guangdong/20SF028/2020__EPI_ISL_403936 spike protein (1-1211)(K986P_V987P_ H1048Q_H1064N_ H1083N_H1101N)
MFVFLVLLPLVSSQCVNLTTRTQLPPAYTNSFTRGVYYPDKVFRSSVLYSTQDLFLPFFSNVTWFHAIHVSGTNGTKRFDNPVLPFNDGVYFASTEKSNIIRGWIFGTTLDSKTQSLLIVNNATNVVIKVCEFQFCNDPFLGVYYHKNNKSWMESEFRVYSSANNCTFEYVSQPFLMDLEGKQGNFKNLREFVFKNIDGYFKIYSKHTPINLVRDLPQGFSALEPLVDLPIGINITRFQTLLALHRSYLTPGDSSSGWTAGAAAYYVGYLQPRTFLLKYNENGTITDAVDCALDPLSETKCTLKSFTVEKGIYQTSNFRVQPTESIVRFPNITNLCPFGEVFNATRFASVYAWNRKRISNCVADYSVLYNSASFSTFKCYGVSPTKLNDLCFTNVYADSFVIRGDEVRQIAPGQTGKIADYNYKLPDDFTGCVIAWNSNNLDSKVGGNYNYLYRLFRKSNLKPFERDISTEIYQAGSTPCNGVEGFNCYFPLQSYGFQPTNGVGYQPYRVVVLSFELLHAPATVCGPKKSTNLVKNKCVNFNFNGLTGTGVLTESNKKFLPFQQFGRDIADTTDAVRDPQTLEILDITPCSFGGVSVITPGTNTSNQVAVLYQDVNCTEVPVAIHADQLTPTWRVYSTGSNVFQTRAGCLIGAEHVNNSYECDIPIGAGICASYQTQTNSPRRARSVASQSIIAYTMSLGAENSVAYSNNSIAIPTNFTISVTTEILPVSMTKTSVDCTMYICGDSTECSNLLLQYGSFCTQLNRALTGIAVEQDKNTQEVFAQVKQIYKTPPIKDFGGFNFSQILPDPSKPSKRSFIEDLLFNKVTLADAGFIKQYGDCLGDIAARDLICAQKFNGLTVLPPLLTDEMIAQYTSALLAGTITSGWTFGAGAALQIPFAMQMAYRFNGIGVTQNVLYENQKLIANQFNSAIGKIQDSLSSTASALGKLQDVVNQNAQALNTLVKQLSSNFGAISSVLNDILSRLDPPEAEVQIDRLITGRLQSLQTYVTQQLIRAAEIRASANLAATKMSECVLGQSKRVDFCGKGYQLMSFPQSAPHGVVFLNVTYVPAQEKNFTTAPAICNDGKAHFPREGVFVSNGTNWFVTQRNFYEPQIITTDNTFVSGNCDVVIGIVNNTVYDPLQPELDSFKEELDKYFKNHTSPDVDLGDISGINASVVNIQKEIDRLNEVAKNLNESLIDLQELGKYEQYIK

SEQ ID NO: 1886 - protein, 1211 aa, Artificial Sequence
  SARS-CoV-2/Shenzhen/SZTH-001/2020__EPI_ISL_406592 spike protein (1-1211)(K986P_V987P_ H1048Q_H1064N_ H1083N_H1101N)
MFVFLVLLPLVSSQCVNLTTRTQLPPAYTNSFTRGVYYPDKVFRSSVLHSTQDLFLPFFSNVTWFHAIHVSGTNGTKRFDNPVLPFNDGVYFASTEKSNIIRGWIFGTTLDSKTQSLLIVNNATNVVIKVCEFQFCNDPFLGVYYHKNNKSWMESEFRVYSSANNCTFEYVSQPFLMDLEGKQGNFKNLREFVFKNIDGYFKIYSKHTPINLVRDLPQGFSALEPLVDLPIGINITRFQTLLALHRSYLTPGDSSSGWTAGAAAYYVGYLQPRTFLLKYNENGTITDAVDCALDPLSETKCTLKSFTVEKGIYQTSNFRVQPTESIVRFPNITNLCPFGEVFNATRFASVYAWNRKRISNCVADYSVLYNSASFSTFKCYGVSPTKLNDLCFTNVYADSFVIRGDEVRQIAPGQTGKIADYNYKLPDDFTGCVIAWNSNNLDSKVGGNYNYLYRLFRKSNLKPFERDISTEIYQAGSTPCNGVEGFNCYFPLQSYGFQPTNGVGYQPYRVVVLSFELLHAPATVCGPKKSTNLVKNKCVNFNFNGLTGTGVLTESNKKFLPFQQFGRDIADTTDAVRDPQTLEILDITPCSFGGVSVITPGTNTSNQVAVLYQDVNCTEVPVAIHADQLTPTWRVYSTGSNVFQTRAGCLIGAEHVNNSYECDIPIGAGICASYQTQTNSPRRARSVASQSIIAYTMSLGAENSVAYSNNSIAIPTNFTISVTTEILPVSMTKTSVDCTMYICGDSTECSNLLLQYGSFCTQLNRALTGIAVEQDKNTQEVFAQVKQIYKTPPIKDFGGFNFSQILPDPSKPSKRSFIEDLLFNKVTLADAGFIKQYGDCLGDIAARDLICAQKFNGLTVLPPLLTDEMIAQYTSALLAGTITSGWTFGAGAALQIPFAMQMAYRFNGIGVTQNVLYENQKLIANQFNSAIGKIQDSLSSTASALGKLQDVVNQNAQALNTLVKQLSSNFGAISSVLNDILSRLDPPEAEVQIDRLITGRLQSLQTYVTQQLIRAAEIRASANLAATKMSECVLGQSKRVDFCGKGYQLMSFPQSAPHGVVFLNVTYVPAQEKNFTTAPAICNDGKAHFPREGVFVSNGTNWFVTQRNFYEPQIITTDNTFVSGNCDVLIGIVNNTVYDPLQPELDSFKEELDKYFKNHTSPDVDLGDISGINASVVNIQKEIDRLNEVAKNLNESLIDLQELGKYEQYIK

SEQ ID NO: 1887 - protein, 1211 aa, Artificial Sequence
  SARS-CoV-2/Shenzhen/SZTH-004/2020__EPI_ISL_406595 spike protein (1-1211)(K986P_V987P_ H1048Q_H1064N_ H1083N_H1101N)
MFVFLVLLPLVSSQCVNLTTRTQLPPAYTNSFTRGVYYPDKVFRSSVLHSTQDLFLPFFSNVTWFHAIHVSGTNGTKRFDNPVLPFNDGVYFASTEKSNIIRGWIFGTTLDSKTQSLLIVNNATNVVIKVCEFQFCNDPFLGVYYHKNNKSWMESEFRVYSSANNCTFEYVSQPFLMDLEGKQGNFKNLREFVFKNIDGYFKIYSKHTPINLVRDLPQGFSALEPLVDLPIGINITRFQTLLALHRSYLTPGDSSSGWTAGAAAYYVGYLQPRTFLLKYNENGTITDAVDCALDPLSETKCTLKSFTVEKGIYQTSNFRVQPTESIVRFPNITNLCPFGEVFNATRFASVYAWDRKRISNCVAYYSVLYNSASFSTFKCYGVSPTKLNDLCFTNVYADSFVIRGDEVRQIAPGQTGKIADYNYKLPDDFTGCVIAWNSNNLDSKVGGNYNYLYRLFRKSNLKPFERDISTEIYQAGSTPCNGVEGFNCYFPLQSYGFQPTNGVGYQPYRVVVLSFELLHAPATVCGPKKSTNLVKNKCVNFNFNGLTGTGVLTESNKKFLPFQQFGRDIADTTDAVRDPQTLEILDITPCSFGGVSVITPGTNTSNQVAVLYQDVNCTEVPVAIHADQLTPTWRVYSTGSNVFQTRAGCLIGAEHVNNSYECDIPIGAGICASYQTQTNSPRRARSVASQSIIAYTMSLGAENSVAYSNNSIAIPTNFTISVTTEILPVSMTKTSVDCTMYICGDSTECSNLLLQYGSFCTQLNRALTGIAVEQDKNTQEVFAQVKQIYKTPPIKDFGGFNFSQILPDPSKPSKRSFIEDLLFNKVTLADAGFIKQYGDCLGDIAARDLICAQKFNGLTVLPPLLTDEMIAQYTSALLAGTITSGWTFGAGAALQIPFAMQMAYRFNGIGVTQNVLYENQKLIANQFNSAIGKIQDSLSSTASALGKLQDVVNQNAQALNTLVKQLSSNFGAISSVLNDILSRLDPPEAEVQIDRLITGRLQSLQTYVTQQLIRAAEIRASANLAATKMSECVLGQSKRVDFCGKGYQLMSFPQSAPHGVVFLNVTYVPAQEKNFTTAPAICNDGKAHFPREGVFVSNGTNWFVTQRNFYEPQIITTDNTFVSGNCDVVIGIVNNTVYDPLQPELDSFKEELDKYFKNHTSPDVDLGDISGINASVVNIQKEIDRLNEVAKNLNESLIDLQELGKYEQYIK

SEQ ID NO: 1888 - protein, 1211 aa, Artificial Sequence
  SARS-CoV-2/France/IDF0372/2020__EPI_ISL_406596 spike protein (1-1211)(K986P_V987P_ H1048Q_H1064N_ H1083N_H1101N)
MFVFLVLLPLVSSQCVNLTTRTQLPPAYTNSFTRGVYYPDKVFRSSVLHSTQDLFLPFFSNVTWFHAIHVSGTNGTKRFDNPVLPFNDGVYFASTEKSNIIRGWIFGTTLDSKTQSLLIVNNATNVVIKVCEFQFCNDPFLGVYYHKNNKSWMESEFRVYSSANNCTFEYVSQPFLMDLEGKQGNFKNLREFVFKNIDGYFKIYSKHTPINLVRDLPQGFSALEPLVDLPIGINITRFQTLLALHRSYLTPGDSSSGWTAGAAAYYVGYLQPRTFLLKYNENGTITDAVDCALDPLSETKCTLKSFTVEKGIYQTSNFRVQPTESIVRFPNITNLCPFGEVFNATRFASVYAWNRKRISNCVADYSFLYNSASFSTFKCYGVSPTKLNDLCFTNVYADSFVIRGDEVRQIAPGQTGKIADYNYKLPDDFTGCVIAWNSNNLDSKVGGNYNYLYRLFRKSNLKPFERDISTEIYQAGSTPCNGVEGFNCYFPLQSYGFQPTNGVGYQPYRVVVLSFELLHAPATVCGPKKSTNLVKNKCVNFNFNGLTGTGVLTESNKKFLPFQQFGRDIADTTDAVRDPQTLEILDITPCSFGGVSVITPGTNTSNQVAVLYQDVNCTEVPVAIHADQLTPTWRVYSTGSNVFQTRAGCLIGAEHVNNSYECDIPIGAGICASYQTQTNSPRRARSVASQSIIAYTMSLGAENSVAYSNNSIAIPTNFTISVTTEILPVSMTKTSVDCTMYICGDSTECSNLLLQYGSFCTQLNRALTGIAVEQDKNTQEVFAQVKQIYKTPPIKDFGGFNFSQILPDPSKPSKRSFIEDLLFNKVTLADAGFIKQYGDCLGDIAARDLICAQKFNGLTVLPPLLTDEMIAQYTSALLAGTITSGWTFGAGAALQIPFAMQMAYRFNGIGVTQNVLYENQKLIANQFNSAIGKIQDSLSSTASALGKLQDVVNQNAQALNTLVKQLSSNFGAISSVLNDILSRLDPPEAEVQIDRLITGRLQSLQTYVTQQLIRAAEIRASANLAATKMSECVLGQSKRVDFCGKGYQLMSFPQSAPHGVVFLNVTYVPAQEKNFTTAPAICNDGKAHFPREGVFVSNGTNWFVTQRNFYEPQIITTDNTFVSGNCDVVIGIVNNTVYDPLQPELDSFKEELDKYFKNHTSPDVDLGDISGINASVVNIQKEIDRLNEVAKNLNESLIDLQELGKYEQYIK

SEQ ID NO: 1889 - protein, 1211 aa, Artificial Sequence
  SARS-CoV-2/Australia/VIC01/2020__EPI_ISL_406844 spike protein (1-1211)(K986P_V987P_ H1048Q_H1064N_ H1083N_H1101N)
MFVFLVLLPLVSSQCVNLTTRTQLPPAYTNSFTRGVYYPDKVFRSSVLHSTQDLFLPFFSNVTWFHAIHVSGTNGTKRFDNPVLPFNDGVYFASTEKSNIIRGWIFGTTLDSKTQSLLIVNNATNVVIKVCEFQFCNDPFLGVYYHKNNKSWMESEFRVYSSANNCTFEYVSQPFLMDLEGKQGNFKNLREFVFKNIDGYFKIYSKHTPINLVRDLPQGFSALEPLVDLPIGINITRFQTLLALHRRYLTPGDSSSGWTAGAAAYYVGYLQPRTFLLKYNENGTITDAVDCALDPLSETKCTLKSFTVEKGIYQTSNFRVQPTESIVRFPNITNLCPFGEVFNATRFASVYAWNRKRISNCVADYSVLYNSASFSTFKCYGVSPTKLNDLCFTNVYADSFVIRGDEVRQIAPGQTGKIADYNYKLPDDFTGCVIAWNSNNLDSKVGGNYNYLYRLFRKSNLKPFERDISTEIYQAGSTPCNGVEGFNCYFPLQSYGFQPTNGVGYQPYRVVVLSFELLHAPATVCGPKKSTNLVKNKCVNFNFNGLTGTGVLTESNKKFLPFQQFGRDIADTTDAVRDPQTLEILDITPCSFGGVSVITPGTNTSNQVAVLYQDVNCTEVPVAIHADQLTPTWRVYSTGSNVFQTRAGCLIGAEHVNNSYECDIPIGAGICASYQTQTNSPRRARSVASQSIIAYTMSLGAENSVAYSNNSIAIPTNFTISVTTEILPVSMTKTSVDCTMYICGDSTECSNLLLQYGSFCTQLNRALTGIAVEQDKNTQEVFAQVKQIYKTPPIKDFGGFNFSQILPDPSKPSKRSFIEDLLFNKVTLADAGFIKQYGDCLGDIAARDLICAQKFNGLTVLPPLLTDEMIAQYTSALLAGTITSGWTFGAGAALQIPFAMQMAYRFNGIGVTQNVLYENQKLIANQFNSAIGKIQDSLSSTASALGKLQDVVNQNAQALNTLVKQLSSNFGAISSVLNDILSRLDPPEAEVQIDRLITGRLQSLQTYVTQQLIRAAEIRASANLAATKMSECVLGQSKRVDFCGKGYQLMSFPQSAPHGVVFLNVTYVPAQEKNFTTAPAICNDGKAHFPREGVFVSNGTNWFVTQRNFYEPQIITTDNTFVSGNCDVVIGIVNNTVYDPLQPELDSFKEELDKYFKNHTSPDVDLGDISGINASVVNIQKEIDRLNEVAKNLNESLIDLQELGKYEQYIK

SEQ ID NO: 1890 - protein, 1211 aa, Artificial Sequence
  SARS-CoV-2/Germany/BavPat1/2020__EPI_ISL_406862 spike protein (1-1211)(K986P_V987P_ H1048Q_H1064N_ H1083N_H1101N)
MFVFLVLLPLVSSQCVNLTTRTQLPPAYTNSFTRGVYYPDKVFRSSVLHSTQDLFLPFFSNVTWFHAIHVSGTNGTKRFDNPVLPFNDGVYFASTEKSNIIRGWIFGTTLDSKTQSLLIVNNATNVVIKVCEFQFCNDPFLGVYYHKNNKSWMESEFRVYSSANNCTFEYVSQPFLMDLEGKQGNFKNLREFVFKNIDGYFKIYSKHTPINLVRDLPQGFSALEPLVDLPIGINITRFQTLLALHRSYLTPGDSSSGWTAGAAAYYVGYLQPRTFLLKYNENGTITDAVDCALDPLSETKCTLKSFTVEKGIYQTSNFRVQPTESIVRFPNITNLCPFGEVFNATRFASVYAWNRKRISNCVADYSVLYNSASFSTFKCYGVSPTKLNDLCFTNVYADSFVIRGDEVRQIAPGQTGKIADYNYKLPDDFTGCVIAWNSNNLDSKVGGNYNYLYRLFRKSNLKPFERDISTEIYQAGSTPCNGVEGFNCYFPLQSYGFQPTNGVGYQPYRVVVLSFELLHAPATVCGPKKSTNLVKNKCVNFNFNGLTGTGVLTESNKKFLPFQQFGRDIADTTDAVRDPQTLEILDITPCSFGGVSVITPGTNTSNQVAVLYQGVNCTEVPVAIHADQLTPTWRVYSTGSNVFQTRAGCLIGAEHVNNSYECDIPIGAGICASYQTQTNSPRRARSVASQSIIAYTMSLGAENSVAYSNNSIAIPTNFTISVTTEILPVSMTKTSVDCTMYICGDSTECSNLLLQYGSFCTQLNRALTGIAVEQDKNTQEVFAQVKQIYKTPPIKDFGGFNFSQILPDPSKPSKRSFIEDLLFNKVTLADAGFIKQYGDCLGDIAARDLICAQKFNGLTVLPPLLTDEMIAQYTSALLAGTITSGWTFGAGAALQIPFAMQMAYRFNGIGVTQNVLYENQKLIANQFNSAIGKIQDSLSSTASALGKLQDVVNQNAQALNTLVKQLSSNFGAISSVLNDILSRLDPPEAEVQIDRLITGRLQSLQTYVTQQLIRAAEIRASANLAATKMSECVLGQSKRVDFCGKGYQLMSFPQSAPHGVVFLNVTYVPAQEKNFTTAPAICNDGKAHFPREGVFVSNGTNWFVTQRNFYEPQIITTDNTFVSGNCDVVIGIVNNTVYDPLQPELDSFKEELDKYFKNHTSPDVDLGDISGINASVVNIQKEIDRLNEVAKNLNESLIDLQELGKYEQYIK

SEQ ID NO: 1891 - protein, 1211 aa, Artificial Sequence
  SARS-CoV-2/Wuhan/HBCDC-HB-02/2020__EPI_ISL_412978 spike protein (1-1211)(K986P_V987P_ H1048Q_H1064N_ H1083N_H1101N)
MFVFLVLLPLVSSQCVNLTTRTQLPPAYTNSFTRGVYYPDKVFRSSVLHSTQDLFLPFFSNVTWFHAIHVSGTNGTKRFDNPVLPFNDGVYFASTEKSNIIRGWIFGTTLDSKTQSLLIVNNATNVVIKVCEFQFCNDPFLGVYYHKNNKSWMESEFRVYSSANNCTFEYVSQPFLMDLEGKQGNFKNLREFVFKNIDGYFKIYSKHTPINLVRDLPQGFSALEPLVDLPIGINITRFQTLLALHRSYLTPGDSSSGWTAGAAAYYVGYLQPRTFLLKYNENGTITDAVDCALDPLSETKCTLKSFTVEKGIYQTSNFRVQPTESIVRFPNITNLCPFGEVFNATRFASVYAWNRKRISNCVADYSVLYNSASFSTFKCYGVSPTKLNDLCFTNVYADSFVIRGDEVRQIAPGQTGKIADYNYKLPDDFTGCVIAWNSNNLDSKVGGNYNYLYRLFRKSNLKPFERDISTEIYQAGSTPCNGVEGFNCYFPLQSYGFQPTNGVGYQPYRVVVLSFELLHAPATVCGPKKSTNLVKNKCVNFNFNGLTGTGVLTESNKKFLPFQQFGRDIADTTDAVRDPQTLEILDITPCSFGGVSVITPGTNTSNQVAVLYQDVNCTEVPVAIHADQLTPTWRVYSTGSNVFQTRAGCLIGAEHVNNSYECDIPIGAGICASYQTQTNSPRRARSVASQSIIAYTMSLGAENSVAYSNNSIAIPTNFTISVTTEILPVSMTKTSVDCTMYICGDSTECSNFLLQYGSFCTQLNRALTGIAVEQDKNTQEVFAQVKQIYKTPPIKDFGGFNFSQILPDPSKPSKRSFIEDLLFNKVTLADAGFIKQYGDCLGDIAARDLICAQKFNGLTVLPPLLTDEMIAQYTSALLAGTITSGWTFGAGAALQIPFAMQMAYRFNGIGVTQNVLYENQKLIANQFNSAIGKIQDSLSSTASALGKLQDVVNQNAQALNTLVKQLSSNFGAISSVLNDILSRLDPPEAEVQIDRLITGRLQSLQTYVTQQLIRAAEIRASANLAATKMSECVLGQSKRVDFCGKGYQLMSFPQSAPHGVVFLNVTYVPAQEKNFTTAPAICNDGKAHFPREGVFVSNGTNWFVTQRNFYEPQIITTDNTFVSGNCDVVIGIVNNTVYDPLQPELDSFKEELDKYFKNHTSPDVDLGDISGINASVVNIQKEIDRLNEVAKNLNESLIDLQELGKYEQYIK

SEQ ID NO: 1892 - protein, 1211 aa, Artificial Sequence
  SARS-CoV-2/Australia/QLD02/2020__EPI_ISL_407896 spike protein (1-1211)(K986P_V987P_ H1048Q_H1064N_ H1083N_H1101N)
MFVFLVLLPLVSSQCVNLTTRTQLPPAYTNSFTRGVYYPDKVFRSSVLHSTQDLFLPFFSNVTWFHAIHVSGTNGTKRFDNPVLPFNDGVYFASTEKSNIIRGWIFGTTLDSKTQSLLIVNNATNVVIKVCEFQFCNDPFLGVYYHKNNKSWMESEFRVYSSANNCTFEYVSQPFLMDLEGKQGNFKNLREFVFKNIDGYFKIYSKHTPINLVRDLPQGFSALEPLVDLPIGINITRFQTLLALHRSYLTPGDSSSGWTAGAAAYYVGYLQPRTFLLKYNENGTITDAVDCALDPLSETKCTLKSFTVEKGIYQTSNFRVQPTESIVRFPNITNLCPFGEVFNATRFASVYAWNRKRISNCVADYSVLYNSASFSTFKCYGVSPTKLNDLCFTNVYADSFVIRGDEVRQIAPGQTGKIADYNYKLPDDFTGCVIAWNSNNLDSKVGGNYNYLYRLFRKSNLKPFERDISTEIYQAGSTPCNGVEGFNCYFPLQSYGFQPTNGVGYQPYRVVVLSFELLHAPATVCGPKKSTNLVKNKCVNFNFNGLTGTGVLTESNKKFLPFQQFGRDIADTTDAVRDPQTLEILDITPCSFGGVSVITPGTNTSNQVAVLYQDVNCTEVPVAIHADQLTPTWRVYSTGSNVFQTRAGCLIGAEHVNNSYECDIPIGAGICASYQTQTNSPRRARSVASQSIIAYTMSLGAENSVAYSNNSIAIPTNFTISVTTEILPVSMTKTSVDCTMYICGDSTECSNLLLQYGSFCTQLNRALTGIAVEQDKNTQEVFAQVKQIYKTPPIKDFGGFNFSQILPDPSKPSKRSFIEDLLFNKVTLADAGFIKQYGDCLGDIAARDLICAQKFNGLTVLPPLLTDEMIAQYTSALLAGTITSGWTFGAGAALQIPFAMQMAYRFNGIGVTQNVLYENQKLIANQFNSAIGKIQDSLSSTASALGKLQDVVNQNAQALNTLVKQLSSNFGAISSVLNDILSRLDPPEAEVQIDRLITGRLQSLQTYVTQQLIRAAEIRASANLAATKMSECVLGQSKRVDFCGKGYQLMSFPQSAPHGVVFLNVTYVPAQEKNFTTAPAICNDGKAHFPREGVFVSNGTNWFVTQRNFYEPQIITTDNTFVSGNCDVVIGIVNNTVYDPLQLELDSFKEELDKYFKNHTSPDVDLGDISGINASVVNIQKEIDRLNEVAKNLNESLIDLQELGKYEQYIK

SEQ ID NO: 1893 - protein, 1211 aa, Artificial Sequence
  SARS-CoV-2/India/1-31/2020__EPI_ISL_413523 spike protein (1-1211)(K986P_V987P_ H1048Q_H1064N_ H1083N_H1101N)
MFVFLVLLPLVSSQCVNLTTRTQLPPAYTNSFTRGVYYPDKVFRSSVLHSTQDLFLPFFSNVTWFHAIHVSGTNGTKRFDNPVLPFNDGVYFASTEKSNIIRGWIFGTTLDSKTQSLLIVNNATNVVIKVCEFQFCNDPFLGVYYHKNNKSWMESEFRVYSSANNCTFEYVSQPFLMDLEGKQGNFKNLREFVFKNIDGYFKIYSKHTPINLVRDLPQGFSALEPLVDLPIGINITRFQTLLALHRSYLTPGDSSSGWTAGAAAYYVGYLQPRTFLLKYNENGTITDAVDCALDPLSETKCTLKSFTVEKGIYQTSNFRVQPTESIVRFPNITNLCPFGEVFNATRFASVYAWNRKRISNCVADYSVLYNSASFSTFKCYGVSPTKLNDLCFTNVYADSFVIRGDEVRQIAPGQTGKIADYNYKLPDDFTGCVIAWNSNNLDSKVGGNYNYLYRLFRKSNLKPFERDISTEIYQAGSTPCNGVEGFNCYFPLQSYGFQPTNGVGYQPYRVVVLSFELLHAPATVCGPKKSTNLVKNKCVNFNFNGLTGTGVLTESNKKFLPFQQFGRDIADTTDAVRDPQTLEILDITPCSFGGVSVITPGTNTSNQVAVLYQDVNCTEVPVAIHADQLTPTWRVYSTGSNVFQTRAGCLIGAEHVNNSYECDIPIGAGICASYQTQTNSPRRARSVASQSIIAYTMSLGAENSVAYSNNSIAIPTNFTISVTTEILPVSMTKTSVDCTMYICGDSTECSNLLLQYGSFCTQLNRALTGIAVEQDKNTQEVFAQVKQIYKTPPIKDFGGFNFSQILPDPSKPSKRSFIEDLLFNKVTLADAGFIKQYGDCLGDIAARDLICAQKFNGLTVLPPLLTDEMIAQYTSALLAGTITSGWTFGAGAALQIPFAMQMAYRFNGIGVTQNVLYENQKLIANQFNSVIGKIQDSLSSTASALGKLQDVVNQNAQALNTLVKQLSSNFGAISSVLNDILSRLDPPEAEVQIDRLITGRLQSLQTYVTQQLIRAAEIRASANLAATKMSECVLGQSKRVDFCGKGYQLMSFPQSAPHGVVFLNVTYVPAQEKNFTTAPAICNDGKAHFPREGVFVSNGTNWFVTQRNFYEPQIITTDNTFVSGNCDVVIGIVNNTVYDPLQPELDSFKEELDKYFKNHTSPDVDLGDISGINASVVNIQKEIDRLNEVAKNLNESLIDLQELGKYEQYIK

SEQ ID NO: 1894 - protein, 1211 aa, Artificial Sequence
  SARS-CoV-2/Guangdong/GD2020087-P0008/2020__EPI_ISL_413863 spike protein (1-1211)(K986P_V987P_ H1048Q_H1064N_ H1083N_H1101N)
MFVFLVLLPLVSSQCVNLTTRTQLPPAYTNSFTRGVYYPDKVFRSSVLHSTQDLFLPFFSNVTWFHAIHVSGTNGTKRFDNPVLPFNDGVYFASTEKSNIIRGWIFGTTLDSKTQSLLIVNNATNVVIKVCEFQFCNDPFLGVYYHKNNKSWMESEFRVYSSANNCTFEYVSQPFLMDLEGKQGNFKNLREFVFKNIDGYFKIYSKHTPINLVRDLPQGFSALEPLVDLPIGINITRFQTLLALHRSYLTPGDSSSGWTAGAAAYYVGYLQPRTFLLKYNENGTITDAVDCALDPLSETKCTLKSFTVEKGIYQTSNFRVQPTESIVRFPNITNLCPFGEVFNATRFASVYAWNRKRISNCVADYSVLYNSASFSTFKCYGVSPTKLNDLCFTNVYADSFVIRGDEVREIAPGQTGKIADYNYKLPDDFTGCVIAWNSNNLDSKVGGNYNYLYRLFRKSNLKPFERDISTEIYQAGSTPCNGVEGFNCYFPLQSYGFQPTNGVGYQPYRVVVLSFELLHAPATVCGPKKSTNLVKNKCVNFNFNGLTGTGVLTESNKKFLPFQQFGRDIADTTDAVRDPQTLEILDITPCSFGGVSVITPGTNTSNQVAVLYQDVNCTEVPVAIHADQLTPTWRVYSTGSNVFQTRAGCLIGAEHVNNSYECDIPIGAGICASYQTQTNSPRRARSVASQSIIAYTMSLGAENSVAYSNNSIAIPTNFTISVTTEILPVSMTKTSVDCTMYICGDSTECSNLLLQYGSFCTQLNRALTGIAVEQDKNTQEVFAQVKQIYKTPPIKDFGGFNFSQILPDPSKPSKRSFIEDLLFNKVTLADAGFIKQYGDCLGDIAARDLICAQKFNGLTVLPPLLTDEMIAQYTSALLAGTITSGWTFGAGAALQIPFAMQMAYRFNGIGVTQNVLYENQKLIANQFNSAIGKIQDSLSSTASALGKLQDVVNQNAQALNTLVKQLSSNFGAISSVLNDILSRLDPPEAEVQIDRLITGRLQSLQTYVTQQLIRAAEIRASANLAATKMSECVLGQSKRVDFCGKGYQLMSFPQSAPHGVVFLNVTYVPAQEKNFTTAPAICNDGKAHFPREGVFVSNGTNWFVTQRNFYEPQIITTDNTFVSGNCDVVIGIVNNTVYDPLQPELDSFKEELDKYFKNHTSPDVDLGDISGINASVVNIQKEIDRLNEVAKNLNESLIDLQELGKYEQYIK

SEQ ID NO: 1895 - protein, 1211 aa, Artificial Sequence
  SARS-CoV-2/Sweden/01/2020__EPI_ISL_411951 spike protein (1-1211)(K986P_V987P_ H1048Q_H1064N_ H1083N_H1101N)
MFVFLVLLPLVSSQCVNLTTRTQLPPAYTNSFTRGVYYPDKVFRSSVLHSTQDLFLPFFSNVTWFHAIHVSGTNGTKRFDNPVLPFNDGVYFASTEKSNIIRGWIFGTTLDSKTQSLLIVNNATNVVIKVCEFQFCNDPFLGVYYHKNNKSWMESEFRVYSSANNCTFEYVSQPFLMDLEGKQGNFKNLREFVFKNIDGYFKIYSKHTPINLVRDLPQGFSALEPLVDLPIGINITRFQTLLALHRSYLTPGDSSSGWTAGAAAYYVGYLQPRTFLLKYNENGTITDAVDCALDPLSETKCTLKSFTVEKGIYQTSNFRVQPTESIVRFPNITNLCPFGEVFNATRFASVYAWNRKRISNCVADYSVLYNSASFSTFKCYGVSPTKLNDLCFTNVYADSFVIRGDEVRQIAPGQTGKIADYNYKLPDDFTGCVIAWNSNNLDSKVGGNYNYLYRLFRKSNLKPFERDISTEIYQAGSTPCNGVEGFNCYFPLQSYGFQPTNGVGYQPYRVVVLSFELLHAPATVCGPKKSTNLVKNKCVNFNFNGLTGTGVLTESNKKFLPFQQFGRDIADTTDAVRDPQTLEILDITPCSFGGVSVITPGTNTSNQVAVLYQDVNCTEVPVAIHADQLTPTWRVYSTGSNVFQTRAGCLIGAEHVNNSYECDIPIGAGICASYQTQTNSPRRARSVASQSIIAYTMSLGAENSVAYSNNSIAIPTNFTISVTTEILPVSMTKTSVDCTMYICGDSTECSNLLLQYGSFCTQLNRALTGIAVEQDKNTQEVFAQVKQIYKTPPIKDCGGFNFSQILPDPSKPSKRSFIEDLLFNKVTLADAGFIKQYGDCLGDIAARDLICAQKFNGLTVLPPLLTDEMIAQYTSALLAGTITSGWTFGAGAALQIPFAMQMAYRFNGIGVTQNVLYENQKLIANQFNSAIGKIQDSLSSTASALGKLQDVVNQNAQALNTLVKQLSSNFGAISSVLNDILSRLDPPEAEVQIDRLITGRLQSLQTYVTQQLIRAAEIRASANLAATKMSECVLGQSKRVDFCGKGYQLMSFPQSAPHGVVFLNVTYVPAQEKNFTTAPAICNDGKAHFPREGVFVSNGTNWFVTQRNFYEPQIITTDNTFVSGNCDVVIGIVNNTVYDPLQPELDSFKEELDKYFKNHTSPDVDLGDISGINASVVNIQKEIDRLNEVAKNLNESLIDLQELGKYEQYIK

SEQ ID NO: 1896 - protein, 1211 aa, Artificial Sequence
  SARS-CoV-2/Tianmen/HBCDC-HB-07/2020__EPI_ISL_412983 spike protein (1-1211)(K986P_V987P_ H1048Q_H1064N_ H1083N_H1101N)
MFVFLVLLPLVSSQCVNLTTRTQLPPAYTNSFTRGVYYPDKVFRSSVLHSTQDLFLPFFSNVTWFHAIHVSGTNGTKRFDNPVLPFNDGVYFASTEKSNIIRGWIFGTTLDSKTQSLLIVNNATNVVIKVCEFQFCNDPFLGVYYHKNNKSWMESEFRVYSSANNCTFEYVSQPFLMDLEGKQGNFKNLREFVFKNIDGYFKIYSKHTPINLVRDLPQGFSALEPLVDLPIGINITRFQTLLALHRSYLTPGDSSSGWTAGAAAYYVGYLQPRTFLLKYNENGTITDAVDCALDPLSETKCTLKSFTVEKGIYQTSNFRVQPTESIVRFPNITNLCPFGEVFNATRFASVYAWNRKRISNCVADYSVLYNSASFSTFKCYGVSPTKLNDLCFTNVYADSFVIRGDEVRQIAPGQTGKIADYNYKLPDDFTGCVIAWNSNNLDSKVGGNYNYLYRLFRKSNLKPFERDISTEIYQAGSTPCNGVEGFNCYFPLQSYGFQPTNGVGYQPYRVVVLSFELLHAPATVCGPKKSTNLVKNKCVNFNFNGLTGTGVLTESNKKFLPFQQFGRDIADTTDAVRDPQTLEILDITPCSFGGVSVITPGTNTSNQVAVLYQDLNCTEVPVAIHADQLTPTWRVYSTGSNVFQTRAGCLIGAEHVNNSYECDIPIGAGICASYQTQTNSPRRARSVASQSIIAYTMSLGAENSVAYSNNSIAIPTNFTISVTTEILPVSMTKTSVDCTMYICGDSTECSNLLLQYGSFCTQLNRALTGIAVEQDKNTQEVFAQVKQIYKTPPIKDFGGFNFSQILPDPSKPSKRSFIEDLLFNKVTLADAGFIKQYGDCLGDIAARDLICAQKFNGLTVLPPLLTDEMIAQYTSALLAGTITSGWTFGAGAALQIPFAMQMAYRFNGIGVTQNVLYENQKLIANQFNSAIGKIQDSLSSTASALGKLQDVVNQNAQALNTLVKQLSSNFGAISSVLNDILSRLDPPEAEVQIDRLITGRLQSLQTYVTQQLIRAAEIRASANLAATKMSECVLGQSKRVDFCGKGYQLMSFPQSAPHGVVFLNVTYVPAQEKNFTTAPAICNDGKAHFPREGVFVSNGTNWFVTQRNFYEPQIITTDNTFVSGNCDVVIGIVNNTVYDPLQPELDSFKEELDKYFKNHTSPDVDLGDISGINASVVNIQKEIDRLNEVAKNLNESLIDLQELGKYEQYIK

SEQ ID NO: 1897 - protein, 1211 aa, Artificial Sequence
  SARS-CoV-2/Hong Kong/case42_VM20002493/2020__EPI_ISL_414527 spike protein (1-1211)(K986P_V987P_ H1048Q_H1064N_ H1083N_H1101N)
MFVFLVLLPLVSSQCVNLTTRTQLPPAYTNSFTRGVYYPDKVFRSSVLHSTQDLFLPFFSNVTWFHAIHVSGTNGTKRFDNPVLPFNDGVYFASTEKSNIIRGWIFGTTLDSKTQSLLIVNNATNVVIKVCEFQFCNDPFLGVYYHKNNKSWMESEFRVYSSANNCTFEYVSQPFLMDLEGKQGNFKNLREFVFKNIDGYFKIYSKHTPINLVRDLPQGFSALEPLVDLPIGINITRFQTLLALHRSYLTPGDSSSGWTAGAAAYYVGYLQPRTFLLKYNENGTITDAVDCALDPLSETKCTLKSFTVEKGIYQTSNFRVQPTESIVRFPNITNLCPFGEVFNATRFASVYAWNRKRISNCVADYSVLYNSASFSTFKCYGVSPTKLNDLCFTNVYADSFVIRGDEVRQIAPGQTGKIADYNYKLPDDFTGCVIAWNSNNLDSKVGGNYNYLYRLFRKSNLKPFERDISTEIYQAGSTPCNGVEGFNCYFPLQSYGFQPTNGVGYQPYRVVVLSFELLHAPATVCGPKKSTNLVKNKCVNFNFNGLTGTGVLTESNKKFLPFQQFGRDIADTTDAVRDPQTLEILDITPCSFGGVSVITPGTNTSNQVAVLYQDVNCTEVPVAIHADQLTPTWRVYSTGSNVFQTRAGCLIGAEHVNNSYECDIPIGAGICASYQTQTNSPRRARSVASQSIIAYTMSLGAENSVAYSNNSIAIPTNFAISVTTEILPVSMTKTSVDCTMYICGDSTECSNLLLQYGSFCTQLNRALTGIAVEQDKNTQEVFAQVKQIYKTPPIKDFGGFNFSQILPDPSKPSKRSFIEDLLFNKVTLADAGFIKQYGDCLGDIAARDLICAQKFNGLTVLPPLLTDEMIAQYTSALLAGTITSGWTFGAGAALQIPFAMQMAYRFNGIGVTQNVLYENQKLIANQFNSAIGKIQDSLSSTASALGKLQDVVNQNAQALNTLVKQLSSNFGAISSVLNDILSRLDPPEAEVQIDRLITGRLQSLQTYVTQQLIRAAEIRASANLAATKMSECVLGQSKRVDFCGKGYQLMSFPQSAPHGVVFLNVTYVPAQEKNFTTAPAICNDGKAHFPREGVFVSNGTNWFVTQRNFYEPQIITTDNTFVSGNCDVVIGIVNNTVYDPLQPELDSFKEELDKYFKNHTSPDVDLGDISGINASVVNIQKEIDRLNEVAKNLNESLIDLQELGKYEQYIK

SEQ ID NO: 1898 - protein, 1211 aa, Artificial Sequence
  SARS-CoV-2/USA/CruiseA-23/2020__EPI_ISL_414482 spike protein (1-1211)(K986P_V987P_ H1048Q_H1064N_ H1083N_H1101N)
MFVFLVLLPLVSSQCVNLTTRTQLPPAYTNSFTRGVYYPDKVFRSSVLHSTQDLFLPFFSNVTWFHAIHVSGTNGTKRFDNPVLPFNDGVYFASTEKSNIIRGWIFGTTLDSKTQSLLIVNNATNVVIKVCEFQFCNDPFLGVYYHKNNKSWMESEFRVYSSANNCTFEYVSQPFLMDLEVKQGNFKNLREFVFKNIDGYFKIYSKHTPINLVRDLPQGFSALEPLVDLPIGINITRFQTLLALHRSYLTPGDSSSGWTAGAAAYYVGYLQPRTFLLKYNENGTITDAVDCALDPLSETKCTLKSFTVEKGIYQTSNFRVQPTESIVRFPNITNLCPFGEVFNATRFASVYAWNRKRISNCVADYSVLYNSASFSTFKCYGVSPTKLNDLCFTNVYADSFVIRGDEVRQIAPGQTGKIADYNYKLPDDFTGCVIAWNSNNLDSKVGGNYNYLYRLFRKSNLKPFERDISTEIYQAGSTPCNGVEGFNCYFPLQSYGFQPTNGVGYQPYRVVVLSFELLHAPATVCGPKKSTNLVKNKCVNFNFNGLTGTGVLTESNKKFLPFQQFGRDIADTTDAVRDPQTLEILDITPCSFGGVSVITPGTNTSNQVAVLYQDVNCTEVPVAIHADQLTPTWRVYSTGSNVFQTRAGCLIGAEHVNNSYECDIPIGAGICASYQTQTNSPRRARSVASQSIIAYTMSLGAENSVAYSNNSIAIPTNFTISVTTEILPVSMTKTSVDCTMYICGDSTECSNLLLQYGSFCTQLNRALTGIAVEQDKNTQEVFAQVKQIYKTPPIKDFGGFNFSQILPDPSKPSKRSFIEDLLFNKVTLADAGFIKQYGDCLGDIAARDLICAQKFNGLTVLPPLLTDEMIAQYTSALLAGTITSGWTFGAGAALQIPFAMQMAYRFNGIGVTQNVLYENQKLIANQFNSAIGKIQDSLSSTASALGKLQDVVNQNAQALNTLVKQLSSNFGAISSVLNDILSRLDPPEAEVQIDRLITGRLQSLQTYVTQQLIRAAEIRASANLAATKMSECVLGQSKRVDFCGKGYQLMSFPQSAPHGVVFLNVTYVPAQEKNFTTAPAICNDGKAHFPREGVFVSNGTNWFVTQRNFYEPQIITTDNTFVSGNCDVVIGIVNNTVYDPLQPELDSFKEELDKYFKNHTSPDVDLGDISGINASVVNIQKEIDRLNEVAKNLNESLIDLQELGKYEQYIK

SEQ ID NO: 1899 - protein, 1211 aa, Artificial Sequence
  SARS-CoV-2/Hong Kong/case85_VM20002868/2020__EPI_ISL_414519 spike protein (1-1211)(K986P_V987P_ H1048Q_H1064N_ H1083N_H1101N)
MFVFLVLVPLVSSQCVNLTTRTQLPPAYTNSFTRGVYYPDKVFRSSVLHSTQDLFLPFFSNVTWFHAIHVSGTNGTKRFDNPVLPFNDGVYFASTEKSNIIRGWIFGTTLDSKTQSLLIVNNATNVVIKVCEFQFCNDPFLGVYYHKNNKSWMESEFRVYSSANNCTFEYVSQPFLMDLEGKQGNFKNLREFVFKNIDGYFKIYSKHTPINLVRDLPQGFSALEPLVDLPIGINITRFQTLLALHRSYLTPGDSSSGWTAGAAAYYVGYLQPRTFLLKYNENGTITDAVDCALDPLSETKCTLKSFTVEKGIYQTSNFRVQPTESIVRFPNITNLCPFGEVFNATRFASVYAWNRKRISNCVADYSVLYNSASFSTFKCYGVSPTKLNDLCFTNVYADSFVIRGDEVRQIAPGQTGKIADYNYKLPDDFTGCVIAWNSNNLDSKVGGNYNYLYRLFRKSNLKPFERDISTEIYQAGSTPCNGVEGFNCYFPLQSYGFQPTNGVGYQPYRVVVLSFELLHAPATVCGPKKSTNLVKNKCVNFNFNGLTGTGVLTESNKKFLPFQQFGRDIADTTDAVRDPQTLEILDITPCSFGGVSVITPGTNTSNQVAVLYQDVNCTEVPVAIHADQLTPTWRVYSTGSNVFQTRAGCLIGAEHVNNSYECDIPIGAGICASYQTQTNSPRRARSVASQSIIAYTMSLGAENSVAYSNNSIAIPTNFTISVTTEILPVSMTKTSVDCTMYICGDSTECSNLLLQYGSFCTQLNRALTGIAVEQDKNTQEVFAQVKQIYKTPPIKDFGGFNFSQILPDPSKPSKRSFIEDLLFNKVTLADAGFIKQYGDCLGDIAARDLICAQKFNGLTVLPPLLTDEMIAQYTSALLAGTITSGWTFGAGAALQIPFAMQMAYRFNGIGVTQNVLYENQKLIANQFNSAIGKIQDSLSSTASALGKLQDVVNQNAQALNTLVKQLSSNFGAISSVLNDILSRLDPPEAEVQIDRLITGRLQSLQTYVTQQLIRAAEIRASANLAATKMSECVLGQSKRVDFCGKGYQLMSFPQSAPHGVVFLNVTYVPAQEKNFTTAPAICNDGKAHFPREGVFVSNGTNWFVTQRNFYEPQIITTDNTFVSGNCDVVIGIVNNTVYDPLQPELDSFKEELDKYFKNHTSPDVDLGDISGINASVVNIQKEIDRLNEVAKNLNESLIDLQELGKYEQYIK

SEQ ID NO: 1900 - protein, 1211 aa, Artificial Sequence; identical to SEQ ID NO: 1890
  SARS-CoV-2/England/200990660/2020__EPI_ISL_414523 spike protein (1-1211)(K986P_V987P_ H1048Q_H1064N_ H1083N_H1101N)

SEQ ID NO: 1901 - protein, 1211 aa, Artificial Sequence
  SARS-CoV-2/Australia/NSW09/2020__EPI_ISL_413595 spike protein (1-1211)(K986P_V987P_ H1048Q_H1064N_ H1083N_H1101N)
MFVFLVLLPLVSSQCVNLTTRTQLPPAYTNSFTRGVYYPDKVFRSSVLHSTQDLFLPFFSNVTWFHAIHVSGTNGTKRFDNPVLPFNDGVYFASTEKSNIIRGWIFGTTLDSKTQSLLIVNNATNVVIKVCEFQFCNDPFLGVYYHKNNKSWMESEFRVYSSANNCTFEYVSQPFLMDLEGKQGNFKNLREFVFKNIDGYFKIYSKHTPINLVRDLPQGFSALEPLVDLPIGINITRFQTLLALHRSYLTPGDSSSGWTAGAAAYYVGYLQPRTFLLKYNENGTITDAVDCALDPLSETKCTLKSFTVEKGIYQTSNFRVQPTESIVRFPNITNLCPFGEVFNATRFASVYAWNRKRISNCVADYSVLYNSASFSTFKCYGVSPTKLNDLCFTNVYADSFVIRGDEVRQIAPGQTGKIADYNYKLPDDFTGCVIAWNSNNLDSKVGGNYNYLYRLFRKSNLKPFERDISTEIYQAGSTPCNGVEGFNCYFPLQSYGFQPTNGVGYQPYRVVVLSFELLHAPATVCGPKKSTNLVKNKCVNFNFNGLTGTGVLTESNKKFLPFQQFGRDIADTTDAVRDPQTLEILDITPCSFGGVSVITPGTNTSNQVAVLYQDVNCTEVPVAIHADQLTPTWRVYSTGSNVFQTRAGCLIGAEHVNNSYECDIPIGAGICASYQTQTNSPRRARSVASQSIIAYTMSLGAENSVAYSNNSIAIPTNFTISVTTEILPVSMTKTSVDCTMYICGDSTECSNLLLQYGSFCTQLNRALTGIAVEQDKNTQEVFAQVKQIYKTPPIKDFGGFNFSQILPDPSKPSKRSFIEDLLFNKVTLADAGFIKQYGDCLGDIAARDLICAQKFNGLTVLPPLLTDEMIAQYTSALLAGTITSGWTFGAGAALQIPFAMQMAYRFNGIGVTQNVLYENQKLIANQFNSAIGKIQDSLSFTASALGKLQDVVNQNAQALNTLVKQLSSNFGAISSVLNDILSRLDPPEAEVQIDRLITGRLQSLQTYVTQQLIRAAEIRASANLAATKMSECVLGQSKRVDFCGKGYQLMSFPQSAPHGVVFLNVTYVPAQEKNFTTAPAICNDGKAHFPREGVFVSNGTNWFVTQRNFYEPQIITTDNTFVSGNCDVVIGIVNNTVYDPLQPELDSFKEELDKYFKNHTSPDVDLGDISGINASVVNIQKEIDRLNEVAKNLNESLIDLQELGKYEQYIK

SEQ ID NO: 1902 - protein, 1211 aa, Artificial Sequence; identical to SEQ ID NO: 1882
  SARS-CoV-2/Australia/NSW10/2020__EPI_ISL_413596 spike protein (1-1211)(K986P_V987P_ H1048Q_H1064N_ H1083N_H1101N)

SEQ ID NO: 1903 - protein, 1211 aa, Artificial Sequence
  SARS-CoV-2/Switzerland/1000477797/2020__EPI_ISL_413023 spike protein (1-1211)(K986P_V987P_ H1048Q_H1064N_ H1083N_H1101N)
MFVFLVLLPLVSSQCVNLTTRTQLPPAYTNSFTRGVYYPDKVFRSSVLHSTQDLFLPFFSNVTWFHAIHVSGTNGTKRFDNPVLPFNDGVYFASTEKSNIIRGWIFGTTLDSKTQSLLIVNNATNVVIKVCEFQFCNDPFLGVYYHKNNKSWMESEFRVYSSANNCTFEYVSQPFLMDLEGKQGNFKNLREFVFKNIDGYFNIYSKHTPINLVRDLPQGFSALEPLVDLPIGINITRFQTLLALHRSYLTPGDSSSGWTAGAAAYYVGYLQPRTFLLKYNENGTITDAVDCALDPLSETKCTLKSFTVEKGIYQTSNFRVQPTESIVRFPNITNLCPFGEVFNATRFASVYAWNRKRISNCVADYSVLYNSASFSTFKCYGVSPTKLNDLCFTNVYADSFVIRGDEVRQIAPGQTGKIADYNYKLPDDFTGCVIAWNSNNLDSKVGGNYNYLYRLFRKSNLKPFERDISTEIYQAGSTPCNGVEGFNCYFPLQSYGFQPTNGVGYQPYRVVVLSFELLHAPATVCGPKKSTNLVKNKCVNFNFNGLTGTGVLTESNKKFLPFQQFGRDIADTTDAVRDPQTLEILDITPCSFGGVSVITPGTNTSNQVAVLYQGVNCTEVPVAIHADQLTPTWRVYSTGSNVFQTRAGCLIGAEHVNNSYECDIPIGAGICASYQTQTNSPRRARSVASQSIIAYTMSLGAENSVAYSNNSIAIPTNFTISVTTEILPVSMTKTSVDCTMYICGDSTECSNLLLQYGSFCTQLNRALTGIAVEQDKNTQEVFAQVKQIYKTPPIKDFGGFNFSQILPDPSKPSKRSFIEDLLFNKVTLADAGFIKQYGDCLGDIAARDLICAQKFNGLTVLPPLLTDEMIAQYTSALLAGTITSGWTFGAGAALQIPFAMQMAYRFNGIGVTQNVLYENQKLIANQFNSAIGKIQDSLSSTASALGKLQDVVNQNAQALNTLVKQLSSNFGAISSVLNDILSRLDPPEAEVQIDRLITGRLQSLQTYVTQQLIRAAEIRASANLAATKMSECVLGQSKRVDFCGKGYQLMSFPQSAPHGVVFLNVTYVPAQEKNFTTAPAICNDGKAHFPREGVFVSNGTNWFVTQRNFYEPQIITTDNTFVSGNCDVVIGIVNNTVYDPLQPELDSFKEELDKYFKNHTSPDVDLGDISGINASVVNIQKEIDRLNEVAKNLNESLIDLQELGKYEQYIK

SEQ ID NO: 1904 - protein, 1211 aa, Artificial Sequence
  SARS-CoV-2/Belgium/BA-02291/2020__EPI_ISL_415159 spike protein (1-1211)(K986P_V987P_ H1048Q_H1064N_ H1083N_H1101N)
MFVFLVLLPLVSSQCVNLTTRTQLPPAYTNSFTRGVYYPDKVFRSSVLHSTQDLFLPFFSNVTWFHAIHVSGTNGTKRFDNPVLPFNDGVYFASTEKSNIIRGWIFGTTLDSKTQSLLIVNNATNVVIKVCEFQFCNDPFLGVYYHKNNKSWMESEFRVYSSANNCTFEYVSQPFLMDLEGKQGNFKNLREFVFKNIDGYFKIYSKHTPINLVRDLPQGFSALEPLVDLPIGINITRFQTLLALHRSYLTPGDSSSGWTAGAAAYYVGYLQPRTFLLKYNENGTITDAVDCALDPLSETKCTLKSFTVEKGIYQTSNFRVQPTESIVRFPNITNLCPFGEVFNATRFASVYAWNRKRISNCVADYSVLYNSASFSTFKCYGVSPTKLNDLCFTNVYADSFVIRGDEVRQIAPGQTGKIADYNYKLPDDFTGCVIAWNSNNLDSKVGGNYNYLYRLFRRSNLKPFERDISTEIYQAGSTPCNGVEGFNCYFPLQSYGFQPTNGVGYQPYRVVVLSFELLPAPATVCGPKKSTNLVKNKCVNFNFNGLTGTGVLTESNKKFLPFQQFGRDIADTTDAVRDPQTLEILDITPCSFGGVSVITPGTNTSNQVAVLYQGVNCTEVPVAIHADQLTPTWRVYSTGSNVFQTRAGCLIGAEHVNNSYECDIPIGAGICASYQTQTNSPRRARSVASQSIIAYTMSLGAENSVAYSNNSIAIPTNFTISVTTEILPVSMTKTSVDCTMYICGDSTECSNLLLQYGSFCTQLNRALTGIAVEQDKNTQEVFAQVKQIYKTPPIKDFGGFNFSQILPDPSKPSKRSFIEDLLFNKVTLADAGFIKQYGDCLGDIAARDLICAQKFNGLTVLPPLLTDEMIAQYTSALLAGTITSGWTFGAGAALQIPFAMQMAYRFNGIGVTQNVLYENQKLIANQFNSAIGKIQDSLSSAAPALGKLQDVVNQNAQALNTLVKQLSSNFGAISSVLNDILSRLDPPEAEVQIDRLITGRLQSLQTYVTQQLIRAAEIRASANLAATKMSECVLGQSKRVDFCGKGYQLMSFPQSAPHGVVFLNVTYVPAQEKNFTTAPAICNDGKAHFPREGVFVSNGTNWFVTQRNFYEPQIITTDNTFVSGNCDVVIGIVNNTVYDPLQPELDSFKEELDKYFKNHTSPDVDLGDISGINASVVNIQKEIDRLNEVAKNLNESLIDLQELGKYEQYIK

SEQ ID NO: 1905 - protein, 1211 aa, Artificial Sequence
  SARS-CoV-2/USA/WA8-UW5/2020__EPI_ISL_413486 spike protein (1-1211)(K986P_V987P_ H1048Q_H1064N_ H1083N_H1101N)
MFVFLVLLPLVSSQCVNLTTRTQLPPAYTNSFTRGVYYPDKVFRSSVLHSTQDLFLPFFSNVTWFHAIHVSGTNGTKRFDNPVLPFNDGVYFASTEKSNIIRGWIFGTTLDSKTQSLLIVNNATNVVIKVCEFQFCNDPFLGVYYHKNNKSWMESEFRVYSSANNCTFEYVSQPFLMDLEGKQGNFKNLREFVFKNIDGYFKIYSKHTPINLVRDLPQGFSALEPLVDLPIGINITRFQTLLALHRSYLTPGDSSSGWTAGAAAYYVGYLQPRTFLLKYNENGTITDAVDCALDPLSETKCTLKSFTVEKGIYQTSNFRVQPTESIVRFPNITNLCPFGEVFNATRFASVYAWNRKRISNCVADYSVLYNSASFSTFKCYGVSPTKLNDLCFTNVYADSFVIRGDEVRQIAPGQTGKIADYNYKLPDDFTGCVIAWNSNNLDSKVGGNYNYLYRLFRKSNLKPFERDISTEIYQAGSTPCNGVEGFNCYFPLQSYGFQPTNGVGYQPYRVVVLSFELLHAPATVCGPKKSTNLVKNKCVNFNFNGLTGTGVLTESNKKFLPFQQFGRDIADTTDAVRDPQTLEILDITPCSFGGVSVITPGTNTSNQVAVLYQDVNCTEVPVAIHADQLTPTWRVYSTGSNVFQTRAGCLIGAEYVNNSYECDIPIGAGICASYQTQTNSPRRARSVASQSIIAYTMSLGAENSVAYSNNSIAIPTNFTISVTTEILPVSMTKTSVDCTMYICGDSTECSNLLLQYGSFCTQLNRALTGIAVEQDKNTQEVFAQVKQIYKTPPIKDFGGFNFSQILPDPSKPSKRSFIEDLLFNKVTLADAGFIKQYGDCLGDIAARDLICAQKFNGLTVLPPLLTDEMIAQYTSALLAGTITSGWTFGAGAALQIPFAMQMAYRFNGIGVTQNVLYENQKLIANQFNSAIGKIQDSLSSTASALGKLQDVVNQNAQALNTLVKQLSSNFGAISSVLNDILSRLDPPEAEVQIDRLITGRLQSLQTYVTQQLIRAAEIRASANLAATKMSECVLGQSKRVDFCGKGYQLMSFPQSAPHGVVFLNVTYVPAQEKNFTTAPAICNDGKAHFPREGVFVSNGTNWFVTQRNFYEPQIITTDNTFVSGNCDVVIGIVNNTVYDPLQPELDSFKEELDKYFKNHTSPDVDLGDISGINASVVNIQKEIDRLNEVAKNLNESLIDLQELGKYEQYIK

SEQ ID NO: 1906 - protein, 1211 aa, Artificial Sequence
  SARS-CoV-2/England/20102000506/2020__EPI_ISL_415147 spike protein (1-1211)(K986P_V987P_ H1048Q_H1064N_ H1083N_H1101N)
MFVFLVLLPLVSSQCVNLTTRTQLPPAYTNSFTRGVYYPDKVFRSSVLHSTQDLFLPFFSNVTWFHAIHVSGTNGTKRFDNPVLPFNDGVYFASTEKSNIIRGWIFGTTLDSKTQSLLIVNNATNVVIKVCEFQFCNDPFLGVYYHKNNKSWMESEFRVYSSANNCTFEYVSQPFLMDLEGKQGNFKNLREFVFKNIDGYFKIYSKHTPINLVRDLPQGFSALEPLVDLPIGINITRFQTLLALHRSYLTPGDSSSGWTAGAAAYYVGYLQPRTFLLKYNENGTITDAVDCALDPLSETKCTLKSFTVEKGIYQTSNFRVQPTESIVRFPNITNLCPFGEVFNATRFASVYAWNRKRISNCVADYSVLYNSASFSTFKCYGVSPTKLNDLCFTNVYADSFVIRGDEVRQIAPGQTGKIADYNYKLPDDFTGCVIAWNSNNLDSKVGGNYNYLYRLFRKSNLKPFERDISTEIYQAGSTPCNGVEGFNCYFPLQSYGFQPTNGVGYQPYRVVVLSFELLHAPATVCGPKKSTNLVKNKCVNFNFNGLTGTGVLTESNKKFLPFQQFGRDIADTTDAVRDPQTLEILDITPCSFGGVSVITPGTNTSNQVAVLYQGVNCTEVPVAIHADQLTPTWRVYSTGSNVFQTRAGCLIGAEHVNNSYECDIPIGAGICASYQTQTNSPRRARSVASQSIIAYTMSLGAENSVAYSNNSIAIPTNFTISVTTEILPVSMTKTSVDCTMYICGDSTECSNLLLQYGSFCTQLNRALTGIAVEQDKNTQEVFAQVKQIYKTPPIKDFGGFNFSQILPDPSKPSKRSFIEDLLFNKVTLADAGFIKQYGYCLGDIAARDLICAQKFNGLTVLPPLLTDEMIAQYTSALLAGTITSGWTFGAGAALQIPFAMQMAYRFNGIGVTQNVLYENQKLIANQFNSAIGKIQDSLSSTASALGKLQDVVNQNAQALNTLVKQLSSNFGAISSVLNDILSRLDPPEAEVQIDRLITGRLQSLQTYVTQQLIRAAEIRASANLAATKMSECVLGQSKRVDFCGKGYQLMSFPQSAPHGVVFLNVTYVPAQEKNFTTAPAICNDGKAHFPREGVFVSNGTNWFVTQRNFYEPQIITTDNTFVSGNCDVVIGIVNNTVYDPLQPELDSFKEELDKYFKNHTSPDVDLGDISGINASVVNIQKEIDRLNEVAKNLNESLIDLQELGKYEQYIK

SEQ ID NO: 1907 - protein, 1211 aa, Artificial Sequence
  SARS-CoV-2/Belgium/VAG-03013/2020__EPI_ISL_415155 spike protein (1-1211)(K986P_V987P_ H1048Q_H1064N_ H1083N_H1101N)
MFVFLVLLPLVSSQCVNLTTRTQLPPAYTNSFTRGVYYPDKVFRSSVLHSTQDLFLPFFSNVTWFHAIHVSGTNGTKRFDNPVLPFNDGVYFASTEKSNIIRGWIFGTTLDSKTQSLLIVNNATNVVIKVCEFQFCNDPFLGVYYHKNNKSWMESEFRVYSSANNCTFEYVSQPFLMDLEGKQGNFKNLREFVFKNIDGYFKIYSKHTPINLVRDLPQGFSALEPLVDLPIGINITRFQTLLALHRSYLTPGDSSSGWTAGAAAYYVGYLQPRTFLLKYNENGTITDAVDCALDPLSETKCTLKSFTVEKGIYQTSNFRVQPTESIVRFPNITNLCPFGEVFNATRFASVYAWNRKRISNCVADYSVLYNSASFSTFKCYGVSPTKLNDLCFTNVYADSFVIRGDEVRQIAPGQTGKIADYNYKLPDDFTGCVIAWNSNNLDSKVGGNYNYLYRLFRKSNLKPFERDISTEIYQAGSTPCNGVEGFNCYFPLQSYGFQPTNGVGYQPYRVVVLSFELLHAPATVCGPKKSTNLVKNKCVNFNFNGLTGTGVLTESNKKFLPFQQFGRDIADTTDAVRDPQTLEILDITPCSFGGVSVITPGTNTSNQVAVLYQGVNCTEVPVAIHADQLTPTWRVYSTGSNVFQTRAGCLIGAEHVNNSYECDIPIGAGICASYQTQTNSPRRARSVASQSIIAYTMSLGAENSVAYSNNSIAIPTNFTISVTTEILPVSMTKTSVDCTMYICGDSTECSNLLLQYGSFCTQLNRALTGIAVEQDKNTQEVFAQVKQIYKTPPIKDFGGFNFSQILPDPSKPSKRSFIEDLLFNKVTLADAGFIKQYGDCLGDIAARDLICAQKFNGLTVLPPLLTDEMIAQYTSALLAGTITSGWTFGAGAALQIPFAMQMAYRFNGIGVTQNVLYENQKLIANQFNSAIGKIQDSLSSTATALGKLQDVVNQNAQALNTLVKQLSSNFGAISSVLNDILSRLDPPEAEVQIDRLITGRLQSLQTYVTQQLIRAAEIRASANLAATKMSECVLGQSKRVDFCGKGYQLMSFPQSAPHGVVFLNVTYVPAQEKNFTTAPAICNDGKAHFPREGVFVSNGTNWFVTQRNFYEPQIITTDNTFVSGNCDVVIGIVNNTVYDPLQPELDSFKEELDKYFKNHTSPDVDLGDISGINASVVNIQKEIDRLNEVAKNLNESLIDLQELGKYEQYIK

SEQ ID NO: 1908 - protein, 1211 aa, Artificial Sequence
  SARS-CoV-2/Belgium/BC-03016/2020__EPI_ISL_415157 spike protein (1-1211)(K986P_V987P_ H1048Q_H1064N_ H1083N_H1101N)
MFVFLVLLPLVSSQCVNLTTRTQLPPAYTNSFTRGVYYPDKVFRSSVLHSTQDLFLPFFSNVTWFHAIHVSGTNGTKRFDNPVLPFNDGVYFASTEKSNIIRGWIFGTTLDSKTQSLLIVNNATNVVIKVCEFQFCNDPFLGVYYHKNNKSWMESEFRVYSSANNCTFEYVSQPFLMDLEGKQGNFKNLREFVFKNIDGYFKIYSKHTPINLVRDLPQGFSALEPLVDLPIGINITRFQTLLALHRSYLTPGDSSSGWTAGAAAYYVGYLQPRTFLLKYNENGTITDAVDCALDPLSETKCTLKSFTVEKGIYQTSNFRVQPTESIVRFPNITNLCPFGEVFNATRFASVYAWNRKRISNCVADYSVLYNSASFSTFKCYGVSPTKLNDLCFTNVYADSFVIRGDEVRQIAPGQTGKIADYNYKLPDDFTGCVIAWNSNNLDSKVGGNYNYLYRLFRKSNLKPFERDISTEIYQAGSTPCNGVEGFNCYFPLQSYGFQPTNGVGYQPYRVVVLSFELLHAPATVCGPKKSTNLVKNKCVNFNFNGLTGTGVLTESNKKFLPFQQFGRDIADTTDAVRDPQTLEILDITPCSFGGVSVITPGTNTSNQVAVLYQGVNCTEVPVAIHADQLTPTWRVYSTGSNVFQTRAGCLIGAEHVNNSYECDIPIGAGICASYQTQTNSPRRARSVASQSIIAYTMSLGAENSVAYSNNSIAIPTNFTISVTTEILPVSMTKTSVDCTMYICGDSTECSNLLLQYGSFCTQLNRALTGIAVEQDKNTQEVFAQVKQIYKTPPIKDFGGFNFSQILPDPSKPSKRSFIEDLLFNKVTLADAGFIKQYGDCLGDIAARDLICAQKFNGLTVLPPLLTDEMIAQYTSALLAGTITSGWTFGAGAALQIPFAMQMAYRFNGIGVTQNVLYENQKLIANQFNSAIGKIQDSLSSTAPALGKLQDVVNQNAQALNTLVKQLSSNFGAISSVLNDILSRLDPPEAEVQIDRLITGRLQSLQTYVTQQLIRAAEIRASANLAATKMSECVLGQSKRVDFCGKGYQLMSFPQSAPHGVVFLNVTYVPAQEKNFTTAPAICNDGKAHFPREGVFVSNGTNWFVTQRNFYEPQIITTDNTFVSGNCDVVIGIVNNTVYDPLQPELDSFKEELDKYFKNHTSPDVDLGDISGINASVVNIQKEIDRLNEVAKNLNESLIDLQELGKYEQYIK

SEQ ID NO: 1909 - protein, 1211 aa, Artificial Sequence
  SARS-CoV-2/Germany/BavPat3/2020__EPI_ISL_414521 spike protein (1-1211)(K986P_V987P_ H1048Q_H1064N_ H1083N_H1101N)
MFVFLVLLPLVSSQCVNLTTRTQLPPAYTNSFTRGVYYPDKVFRSSVLHSTQDLFLPFFSNVTWFHAIHVSGTNGTKRFDNPVLPFNDGVYFASTEKSNIIRGWIFGTTLDSKTQSLLIVNNATNVVIKVCEFQFCNDPFLGVYYHKNNKSWMESEFRVYSSANNCTFEYVSQPFLMDLEGKQGNFKNLREFVFKNIDGYFKIYSKHTPINLVRDLPQGFSALEPLVDLPIGINITRFQTLLALHRSYLTPGDSSSGWTAGAAAYYVGYLQPRTFLLKYNENGTITDAVDCALDPLSETKCTLKSFTVEKGIYQTSNFRVQPTESIVRFPNITNLCPFGEVFNATRFASVYAWNRKRISNCVADYSVLYNSASFSTFKCYGVSPTKLNDLCFTNVYADSFVIRGDEVRQIAPGQTGKIADYNYKLPDDFTGCVIAWNSNNLDSKVGGNYNYLYRLFRKSNLKPFERDISTEIYQAGSTPCNGVEGFNCYFPLQSYGFQPTNGVGYQPYRVVVLSFELLHAPATVCGPKKSTNLVKNKCVNFNFNGLTGTGVLTESNKKFLPFQQFGRDIADTTDAVRDPQTLEILDITPCSFGGVSVITPGTNTSNQVAVLYQDVNCTEVPVAIHADQLTPTWRVYSTGSNVFQTRAGCLIGAEHVNNSYECDIPIGAGICASYQTQTNSPRRARSVASQSIIAYTMSLGAENSVAYSNNSIAIPTNFTISVTTEILPVSMTKTSVDCTMYICGDSTECSNLLLQYGSFCTQLNRALTGIAVEQDKNTQQVFAQVKQIYKTPPIKDFGGFNFSQILPDPSKPSKRSFIEDLLFNKVTLADAGFIKQYGDCLGDIAARDLICAQKFNGLTVLPPLLTDEMIAQYTSALLAGTITSGWTFGAGAALQIPFAMQMAYRFNGIGVTQNVLYENQKLIANQFNSAIGKIQDSLSSTASALGKLQDVVNQNAQALNTLVKQLSSNFGAISSVLNDILSRLDPPEAEVQIDRLITGRLQSLQTYVTQQLIRAAEIRASANLAATKMSECVLGQSKRVDFCGKGYQLMSFPQSAPHGVVFLNVTYVPAQEKNFTTAPAICNDGKAHFPREGVFVSNGTNWFVTQRNFYEPQIITTDNTFVSGNCDVVIGIVNNTVYDPLQPELDSFKEELDKYFKNHTSPDVDLGDISGINASVVNIQKEIDRLNEVAKNLNESLIDLQELGKYEQYIK

SEQ ID NO: 1910 - protein, 1211 aa, Artificial Sequence
  SARS-CoV-2/France/HF1805/2020__EPI_ISL_414628 spike protein (1-1211)(K986P_V987P_ H1048Q_H1064N_ H1083N_H1101N)
MFVFLVLLPLVSSQCVNLTTRTQLPPAYTNSFTRGVYYPDKVFRSSVLHSTQDLFLPFFSNVTWFHAIHVSGTNGTKRFDNPVLPFNDGVYFASTEKSNIIRGWIFGTTLDSKTQSLLIVNNATNVVIKVCEFQFCNDPFLGVYYHKNNKSWMESEFRVYSSANNCTFEYVSQPFLMDLEGKQGNFKNLREFVFKNIDGYFKIYSKHTPINLVRDLPQGFSALEPLVDLPIGINITRFQTLLALHRSYLTPGDSSSGWTAGAAAYYVGYLQPRTFLLKYNENGTITDAVDCALDPLSETKCTLKSFTVEKGIYQTSNFRVQPTESIVRFPNITNLCPFGEVFNATRFASVYAWNRKRISNCVADYSVLYNSASFSTFKCYGVSPTKLNDLCFTNVYADSFVIRGDEVRQIAPGQTGKIADYNYKLPDDFTGCVIAWNSNNLDSKVGGNYNYLYRLFRKSNLKPFERDISTEIYQAGSTPCNGVEGFNCYFPLQSYGFQPTNGVGYQPYRVVVLSFELLHAPATVCGPKKSTNLVKNKCVNFNFNGLTGTGVLTESNKKFLPFQQFGRDIADTTDAVRDPQTLEILDITPCSFGGVSVITPGTNTSNQVAVLYQGVNCTEVPVAIHADQLTPTWRVYSTGSNVFQTRAGCLIGAEHVNNSYECDIPIGAGICASYQTQTNSPRRARSVASQSIIAYTMSLGAENSVAYSNNSIAIPTNFTISVTTEILPVSMTKTSVDCTMYICGDSTECSNLLLQYGSFCTQLNRALTGIAVEQDKNTQEVFAQVKQIYKTPPIKDFGGFNFSQILPDPSKPSKRSFIEDLLFNKVTLADAGFIKQYGDCLGDIAARDLICAQKFNGLTVLPPLLTDEMIAQYTSALLAGTITSGWTFGAGAALQIPFAMQMAYRFNGIGVTQNVLYENQKLIANQFNSAIGKIQDSLSSTASALGKLQDVVNQNAQALNTLVKQLSSNFGAISSVLNDILSRLDPPEAEVQIDRLITGRLQSLQTYVTQQLIRAAEIRASANLAATKMSECVLGQSKRVDFCGKGYQLMSFPQSAPHGVVFLNVTYVPAQEKNFTTAPAICNDGKAHFPREGVFVSNGTNWFVTQRNFYEPQIITTDNTFVSGNCDVVIGVVNNTVYDPLQPELDSFKEELDKYFKNHTSPDVDLGDISGINASVVNIQKEIDRLNEVAKNLNESLIDLQELGKYEQYIK

SEQ ID NO: 1911 - protein, 1211 aa, Artificial Sequence
  SARS-CoV-2/Netherlands/ZuidHolland_9/2020__EPI_ISL_414445 spike protein (1-1211)(K986P_V987P_ H1048Q_H1064N_ H1083N_H1101N)
MFVFLVLLPLVSSQCVNLTTRTQLPPAYTNSFTRGVYYPDKVFRSSVLHSTQDLFLPFFSNVTWFHAIHVSGTNGTKRFDNPVLPFNDGVYFASTEKSNIIRGWIFGTTLDSKTQSLLIVNNATNVVIKVCEFQFCNDPFLGVYYHKNNKSWMESEFRVYSSANNCTFEYVSQPFLMDLEGKQGNFKNLREFVFKNIDGYFKIYSKHTPINLVRDLPQGFSALEPLVDLPIGINITRFQTLLALHRSYLTPGDSSSGWTAGAAAYYVGYLQPRTFLLKYNENGTITDAVDCALDPLSETKCTLKSFTVEKGIYQTSNFRVQPTESIVRFPNITNLCPFGEVFNATRFASVYAWNRKRISNCVADYSVLYNSASFSTFKCYGVSPTKLNDLCFTNVYADSFVIRGDEVRQIAPGQTGKIADYNYKLPDDFTGCVIAWNSNNLDSKVGGNYNYLYRLFRKSNLKPFERDISTEIYQAGSTPCNGVEGFNCYFPLQSYGFQPTNGVGYQPYRVVVLSFELLHAPATVCGPKKSTNLVKNKCVNFNFNGLTGTGVLTESNKKFLPFQQFGRDIADTTDAVRDPQTLEILDITPCSFGGVSVITPGTNTSNQVAVLYQGVNCTEVPVAIHADQLTPTWRVYSTGSNVFQTRAGCLIGAEHVNNSYECDIPIGAGICASYQTQTNSPRRARSVASQSIIAYTMSLGAENSVAYSNNSIAIPTNFTISVTTEILPVSMTKTSVDCTMYICGDSTECSNLLLQYGSFCTQLNRALTGIAVEQDKNTQEVFAQVKQIYKTPPIKDFGGFNFSQILPDPSKPSKRSFIEDLLFNKVTLADAGFIKQYGDCLGDIAARDLICVQKFNGLTVLPPLLTDEMIAQYTSALLAGTITSGWTFGAGAALQIPFAMQMAYRFNGIGVTQNVLYENQKLIANQFNSAIGKIQDSLSSTASALGKLQDVVNQNAQALNTLVKQLSSNFGAISSVLNDILSRLDPPEAEVQIDRLITGRLQSLQTYVTQQLIRAAEIRASANLAATKMSECVLGQSKRVDFCGKGYQLMSFPQSAPHGVVFLNVTYVPAQEKNFTTAPAICNDGKAHFPREGVFVSNGTNWFVTQRNFYEPQIITTDNTFVSGNCDVVIGIVNNTVYDPLQPELDSFKEELDKYFKNHTSPDVDLGDISGINASVVNIQKEIDRLNEVAKNLNESLIDLQELGKYEQYIK

SEQ ID NO: 1912 - protein, 1211 aa, Artificial Sequence
  SARS-CoV-2/Finland/FIN03032020A/2020__EPI_ISL_413602 spike protein (1-1211)(K986P_V987P_ H1048Q_H1064N_ H1083N_H1101N)
MFVFLVLLPLVSSQCVNLTTRTQLPPAYTNSFTRGVYYPDKVFRSSVLHSTQDLFLPFFSNVTWFHAIHVSGTNGTKRFDNPVLPFNDGVYFASTEKSNIIRGWIFGTTLDSKTQSLLIVNNATNVVIKVCEFQFCNDPFLGVYYHKNNKSWMESEFRVYSSANNCTFEYVSQPFLMDLEGKQGNFKNLREFVFKNIDGYFKIYSKHTPINLVRDLPQGFSALEPLVDLPIGINITRFQTLLALHRSYLTPGDSSSGWTAGAAAYYVGYLQPRTFLLKYNENGTITDAVDCALDPLSETKCTLKSFTVEKGIYQTSNFRVQPTESIVRFPNITNLCPFGEVFNATRFASVYAWNRKRISNCVADYSVLYNSASFSTFKCYGVSPTKLNDLCFTNVYADSFVIRGDEVRQIAPGQTGKIADYNYKLPDDFTGCVISWNSNNLDSKVGGNYNYLYRLFRKSNLKPFERDISTEIYQAGSTPCNGVEGFNCYFPLQSYGFQPTNGVGYQPYRVVVLSFELLHAPATVCGPKKSTNLVKNKCVNFNFNGLTGTGVLTESNKKFLPFQQFGRDIADTTDAVRDPQTLEILDITPCSFGGVSVITPGTNTSNQVAVLYQGVNCTEVPVAIHADQLTPTWRVYSTGSNVFQTRAGCLIGAEHVNNSYECDIPIGAGICASYQTQTNSPRRARSVASQSIIAYTMSLGAENSVAYSNNSIAIPTNFTISVTTEILPVSMTKTSVDCTMYICGDSTECSNLLLQYGSFCTQLNRALTGIAVEQDKNTQEVFAQVKQIYKTPPIKDFGGFNFSQILPDPSKPSKRSFIEDLLFNKVTLADAGFIKQYGDCLGDIAARDLICAQKFNGLTVLPPLLTDEMIAQYTSALLAGTITSGWTFGAGAALQIPFAMQMAYRFNGIGVTQNVLYENQKLIANQFNSAIGKIQDSLSSTASALGKLQDVVNQNAQALNTLVKQLSSNFGAISSVLNDILSRLDPPEAEVQIDRLITGRLQSLQTYVTQQLIRAAEIRASANLAATKMSECVLGQSKRVDFCGKGYQLMSFPQSAPHGVVFLNVTYVPAQEKNFTTAPAICNDGKAHFPREGVFVSNGTNWFVTQRNFYEPQIITTDNTFVSGNCDVVIGIVNNTVYDPLQPELDSFKEELDKYFKNHTSPDVDLGDISGINASVVNIQKEIDRLNEVAKNLNESLIDLQELGKYEQYIK

SEQ ID NO: 1913 - protein, 1211 aa, Artificial Sequence
  SARS-CoV-2/France/GE1977/2020__EPI_ISL_414632 spike protein (1-1211)(K986P_V987P_ H1048Q_H1064N_ H1083N_H1101N)
MFVFLVLLPLVSSQCVNLTTRTQLPPAYTNSFTRGVYYPDKVFRSSVLHSTQDLFLPFFSNVTWFHAIHVSGTNGTKRFDNPVLPFNDGVYFASTEKSNIIRGWIFGTTLDSKTQSLLIVNNATNVVIKVCEFQFCNDPFLGVYYHKNNKSWMESEFRVYSSANNCTFEYVSQPFLMDLEGKQGNFKNLREFVFKNIDGYFKIYSKHTPINLVRDLPQGFSALEPLVDLPIGINITRFQTLLALHRSYLTPGDSSSGWTAGAAAYYVGYLQPRTFLLKYNENGTITDAVDCALDPLSETKCTLKSFTVEKGIYQTSNFRVQPTESIVRFPNITNLCPFGEVFNATRFASVYAWNRKRISNCVADYSVLYNSASFSTFKCYGVSPTKLNDLCFTNVYADSFVIRGDEVRQIAPGQTGKIADYNYKLPDDFTGCVIAWNSNNLDSKVGGNYNYLYRLFRKSNLKPFERDISTEIYQAGSTPCNGVEGFNCYFPLQSYGFQPTNGVGYQPYRVVVLSFELLHAPATVCGPKKSTNLVKNKCVNFNFNGLTGTGVLTESNKKFLPFQQFGRDIADTTDAVRDPQTLEILDITPCSFGGVSVITPGTNTSNQVAVLYQGVNCTEVPVAIHADQLTPTWRVYSTGSNVFQTRAGCLIGAEHVNNSYECDIPIGAGICASYQTQTNSPRRARSVASQSIIAYTMSLGAENSVAYSNNSIAIPTNFTISVTTEILPVSMTKTSVDCTMYICGDSTECSNLLLQYGSFCTQLNRALTGIAVEQDKNTQEVFAQVKQIYKTPPIKDFGGFNFSQILPDPSKPSKRSFIEDLLFNKVTLADAGFIKQYGDCLGDIAARDLICAQKFNGLTVLPPLLTDEMIAQYTSALLAGTITSGWTFGAGAALQIPFAMQMAYRFNGIGVTQNVLYENQKLIANQFNSAIGKIQDSLFSTASALGKLQDVVNQNAQALNTLVKQLSSNFGAISSVLNDILSRLDPPEAEVQIDRLITGRLQSLQTYVTQQLIRAAEIRASANLAATKMSECVLGQSKRVDFCGKGYQLMSFPQSAPHGVVFLNVTYVPAQEKNFTTAPAICNDGKAHFPREGVFVSNGTNWFVTQRNFYEPQIITTDNTFVSGNCDVVIGIVNNTVYDPLQPELDSFKEELDKYFKNHTSPDVDLGDISGINASVVNIQKEIDRLNEVAKNLNESLIDLQELGKYEQYIK

SEQ ID NO: 1914 - protein, 1211 aa, Artificial Sequence
  SARS-CoV-2/Finland/FIN-313/2020__EPI_ISL_414641 spike protein (1-1211)(K986P_V987P_ H1048Q_H1064N_ H1083N_H1101N)
MFVFLVLLPLVSSQCVNLTTRTQLPPAYTNSFTRGVYYPDKVFRSSVLHSTQDLFLPFFSNVTWFHAIHVSGTNGTKRFDNPVLPFNDGVYFASTEKSNIIRGWIFGTTLDSKTQSLLIVNNATNVVIKVCEFQFCNDPFLGVYYHKNNKSWMESEFRVYSSANNCTFEYVSQPFLMDLEGKQGNFKNLREFVFKNIDGYFKIYSKHTPINLVRDLPQGFSALEPLVDLPIGINITRFKTLLALHRSYLTPGDSSSGWTAGAAAYYVGYLQPRTFLLKYNENGTITDAVDCALDPLSETKCTLKSFTVEKGIYQTSNFRVQPTESIVRFPNITNLCPFGEVFNATRFASVYAWNRKRISNCVADYSVLYNSASFSTFKCYGVSPTKLNDLCFTNVYADSFVIRGDEVRQIAPGQTGKIADYNYKLPDDFTGCVIAWNSNNLDSKVGGNYNYLYRLFRKSNLKPFERDISTEIYQAGSTPCNGVEGFNCYFPLQSYGFQPTNGVGYQPYRVVVLSFELLHAPATVCGPKKSTNLVKNKCVNFNFNGLTGTGVLTESNKKFLPFQQFGRDIADTTDAVRDPQTLEILDITPCSFGGVSVITPGTNTSNQVAVLYQGVNCTEVPVAIHADQLTPTWRVYSTGSNVFQTRAGCLIGAEHVNNSYECDIPIGAGICASYQTQTNSPRRARSVASQSIIAYTMSLGAENSVAYSNNSIAIPTNFTISVTTEILPVSMTKTSVDCTMYICGDSTECSNLLLQYGSFCTQLNRALTGIAVEQDKNTQEVFAQVKQIYKTPPIKDFGGFNFSQILPDPSKPSKRSFIEDLLFNKVTLADAGFIKQYGDCLGDIAARDLICAQKFNGLTVLPPLLTDEMIAQYTSALLAGTITSGWTFGAGAALQIPFAMQMAYRFNGIGVTQNVLYENQKLIANQFNSAIGKIQDSLSSTASALGKLQDVVNQNAQALNTLVKQLSSNFGAISSVLNDILSRLDPPEAEVQIDRLITGRLQSLQTYVTQQLIRAAEIRASANLAATKMSECVLGQSKRVDFCGKGYQLMSFPQSAPHGVVFLNVTYVPAQEKNFTTAPAICNDGKAHFPREGVFVSNGTNWFVTQRNFYEPQIITTDNTFVSGNCDVVIGIVNNTVYDPLQPELDSFKEELDKYFKNHTSPDVDLGDISGINASVVNIQKEIDRLNEVAKNLNESLIDLQELGKYEQYIK

SEQ ID NO: 1915 - protein, 1211 aa, Artificial Sequence
  SARS-CoV-2/Netherlands/ZuidHolland_2/2020__EPI_ISL_414556 spike protein (1-1211)(K986P_V987P_ H1048Q_H1064N_ H1083N_H1101N)
MFVFLVLLPLVSSQCVNLTTRTQLPPAYTNSFTRGVYYPDKVFRSSVLHSTQDLFLPFFSNVTWFHAIHVSGTNGTKRFDNPVLPFNDGVYFASTEKSNIIRGWIFGTTLDSKTQSLLIVNNATNVVIKVCEFQFCNDPFLGVYYHKNNKSWMESEFRVYSSANNCTFEYVSQPFLMDLEGKQGNFKNLREFVFKNIDGYFKIYSKHTPINLVRDLPQGFSALEPLVDLPIGINITRFQTLLALHRSYLTPGDSSSGWTAGAAAYYVGYLQPRTFLLKYNENGTITDAVDCALDPLSETKCTLKSFTVEKGIYQTSNFRVQPTESIVRFPNITNLCPFGEVFNATRFASVYAWNRKRISNCVADYSVLYNSASFSTFKCYGVSPTKLNDLCFTNVYADSFVIRGDEVRQIAPGQTGKIADYNYKLPDDFTGCVIAWNSNNLDSKVGGNYNYLYRLFRKSNLKPFERDISTEIYQAGSTPCNGVEGFNCYFPLQSYGFQPTNGVGYQPYRVVVLSFELLHAPATVCGPKKSTNLVKNKCVNFNFNGLTGTGVLTESNKKFLPFQQFGRDIADTTDAVRDPQTLEILDITPCSFGGVSVITPGTNTSNQVAVLYQGVNCTEVPVAIHADQLTPTWRVYSTGSNVFQTRAGCLIGAEHVNNSYECDIPIGAGICASYQTQTNSPRRARSVASQSIIAYTMSLGAENSVAYSNNSIAIPTNFTISVTTEILPVSMTKTSVDCTMYICGDSTECSNLLLQYGSFCTQLNRALTGIALEQDKNTQEVFAQVKQIYKTPPIKDFGGFNFSQILPDPSKPSKRSFIEDLLFNKVTLADAGFIKQYGDCLGDIAARDLICAQKFNGLTVLPPLLTDEMIAQYTSALLAGTITSGWTFGAGAALQIPFAMQMAYRFNGIGVTQNVLYENQKLIANQFNSAIGKIQDSLSSTASALGKLQDVVNQNAQALNTLVKQLSSNFGAISSVLNDILSRLDPPEAEVQIDRLITGRLQSLQTYVTQQLIRAAEIRASANLAATKMSECVLGQSKRVDFCGKGYQLMSFPQSAPHGVVFLNVTYVPAQEKNFTTAPAICNDGKAHFPREGVFVSNGTNWFVTQRNFYEPQIITTDNTFVSGNCDVVIGIVNNTVYDPLQPELDSFKEELDKYFKNHTSPDVDLGDISGINASVVNIQKEIDRLNEVAKNLNESLIDLQELGKYEQYIK

SEQ ID NO: 1916 - protein, 1211 aa, Artificial Sequence
  SARS-CoV-2/USA/WA-UW31/2020__EPI_ISL_414618 spike protein (1-1211)(K986P_V987P_ H1048Q_H1064N_ H1083N_H1101N)
MFVFLVLLPLVSSQCVNLTTRTQLPPAYTNSFTRGVYYPDKVFRSSVLHSTQDLFLPFFSNVTWFHAIHVSGTNGTKRFDNPVLPFNDGVYFASTEKSNIIRGWIFGTTLDSKTQSLLIVNNATNVVIKVCEFQFCNDPFLGVYYHKNNKSWMESEFRVYSSANNCTFEYVSQPFLMDLEGKQGNFKNLREFVFKNIDGYFKIYSKHTPINLVRDLPQGFSALEPLVDLPIGINITRFQTLLALHRSYLTPGDSSSGWTAGAAAYYVGYLQPRTFLLKYNENGTITDAVDCALDPLSETKCTLKSFTVEKGIYQTSNFRVQPTESIVRFPNITNLCPFGEVFNATRFASVYAWNRKRISNCVADYSVLYNSASFSTFKCYGVSPTKLNDLCFTNVYADSFVIRGDEVRQIAPGQTGKIADYNYKLPDDFTGCVIAWNSNNLDSKVGGNYNYLYRLFRKSNLKPFERDISTEIYQAGSTPCNGAEGFNCYFPLQSYGFQPTNGVGYQPYRVVVLSFELLHAPATVCGPKKSTNLVKNKCVNFNFNGLTGTGVLTESNKKFLPFQQFGRDIADTTDAVRDPQTLEILDITPCSFGGVSVITPGTNTSNQVAVLYQDVNCTEVPVAIHADQLTPTWRVYSTGSNVFQTRAGCLIGAEHVNNSYECDIPIGAGICASYQTQTNSPRRARSVASQSIIAYTMSLGAENSVAYSNNSIAIPTNFTISVTTEILPVSMTKTSVDCTMYICGDSTECSNLLLQYGSFCTQLNRALTGIAVEQDKNTQEVFAQVKQIYKTPPIKDFGGFNFSQILPDPSKPSKRSFIEDLLFNKVTLADAGFIKQYGDCLGDIAARDLICAQKFNGLTVLPPLLTDEMIAQYTSALLAGTITSGWTFGAGAALQIPFAMQMAYRFNGIGVTQNVLYENQKLIANQFNSAIGKIQDSLSSTASALGKLQDVVNQNAQALNTLVKQLSSNFGAISSVLNDILSRLDPPEAEVQIDRLITGRLQSLQTYVTQQLIRAAEIRASANLAATKMSECVLGQSKRVDFCGKGYQLMSFPQSAPHGVVFLNVTYVPAQEKNFTTAPAICNDGKAHFPREGVFVSNGTNWFVTQRNFYEPQIITTDNTFVSGNCDVVIGIVNNTVYDPLQPELDSFKEELDKYFKNHTSPDVDLGDISGINASVVNIQKEIDRLNEVAKNLNESLIDLQELGKYEQYIK

SEQ ID NO: 1917 - protein, 1211 aa, Artificial Sequence
  SARS-CoV-2/South Korea/SNU01/2020__EPI_ISL_411929 spike protein (1-1211)(K986P_V987P_ H1048Q_H1064N_ H1083N_H1101N)
MFVFLVLLPLVSSQCVNLTTRTQLPPAYTNSFTRGVYYPDKVFRSSVLHSTQDLFLPFFSNVTWFHAIHVSGTNGTKRFDNPVLPFNDGVYFASTEKSNIIRGWIFGTTLDSKTQSLLIVNNATNVVIKVCEFQFCNDPFLGVYYHKNNKSWMESEFRVYSSANNCTFEYVSQPFLMDLEGKQGNFKNLREFVFKNIDGYFKIYSKHTPINLVRDLPQGFWALEPLVDLPIGINITRFQTLLALHRSYLTPGDSSSGWTAGAAAYYVGYLQPRTFLLKYNENGTITDAVDCALDPLSETKCTLKSFTVEKGIYQTSNFRVQPTESIVRFPNITNLCPFGEVFNATRFASVYAWNRKRISNCVADYSVLYNSASFSTFKCYGVSPTKLNDLCFTNVYADSFVIRGDEVRQIAPGQTGKIADYNYKLPDDFTGCVIAWNSNNLDSKVGGNYNYLYRLFRKSNLKPFERDISTEIYQAGSTPCNGVEGFNCYFPLQSYGFQPTNGVGYQPYRVVVLSFELLHAPATVCGPKKSTNLVKNKCVNFNFNGLTGTGVLTESNKKFLPFQQFGRDIADTTDAVRDPQTLEILDITPCSFGGVSVITPGTNTSNQVAVLYQDVNCTEVPVAIHADQLTPTWRVYSTGSNVFQTRAGCLIGAEHVNNSYECDIPIGAGICASYQTQTNSPRRARSVASQSIIAYTMSLGAENSVAYSNNSIAIPTNFTISVTTEILPVSMTKTSVDCTMYICGDSTECSNLLLQYGSFCTQLNRALTGIAVEQDKNTQEVFAQVKQIYKTPPIKDFGGFNFSQILPDPSKPSKRSFIEDLLFNKVTLADAGFIKQYGDCLGDIAARDLICAQKFNGLTVLPPLLTDEMIAQYTSALLAGTITSGWTFGAGAALQIPFAMQMAYRFNGIGVTQNVLYENQKLIANQFNSAIGKIQDSLSSTASALGKLQDVVNQNAQALNTLVKQLSSNFGAISSVLNDILSRLDPPEAEVQIDRLITGRLQSLQTYVTQQLIRAAEIRASANLAATKMSECVLGQSKRVDFCGKGYQLMSFPQSAPHGVVFLNVTYVPAQEKNFTTAPAICNDGKAHFPREGVFVSNGTNWFVTQRNFYEPQIITTDNTFVSGNCDVVIGIVNNTVYDPLQPELDSFKEELDKYFKNHTSPDVDLGDISGINASVVNIQKEIDRLNEVAKNLNESLIDLQELGKYEQYIK

SEQ ID NO: 1918 - protein, 1211 aa, Artificial Sequence
  SARS-CoV-2/China/WF0004/2020__EPI_ISL_413694 spike protein (1-1211)(K986P_V987P_ H1048Q_H1064N_ H1083N_H1101N)
MFVFLVLLPLVSSQCVNLTTRTQLPPAYTNSFTRGVYYPDKVFRSSVLHSTQDLFLPFFSNVTWFHAIHVSGTNGTKRFDNPVLPFNDGVYFASTEKSNIIRGWIFGTTLDSKTQSLLIVNNATNVVIKVCEFQFCNDPFLGVYYHKNNKSWTESEFRVYSSANNCTFEYVSQPFLMDLEGKQGNFKNLREFVFKNIDGYFKIYSKHTPINLVRDLPQGFSALEPLVDLPIGINITRFQTLLALHRSYLTPGDSSSGWTAGAAAYYVGYLQPRTFLLKYNENGTITDAVDCALDPLSETKCTLKSFTVEKGIYQTSNFRVQPTESIVRFPNITNLCPFGEVFNATRFASVYAWNRKRISNCVADYSVLYNSASFSTFKCYGVSPTKLNDLCFTNVYADSFVIRGDEVRQIAPGQTGKIADYNYKLPDDFTGCVIAWNSNNLDSKVGGNYNYLYRLFRKSNLKPFERDISTEIYQAGSTPCNGVEGFNCYFPLQSYGFQPTNGVGYQPYRVVVLSFELLHAPATVCGPKKSTNLVKNKCVNFNFNGLTGTGVLTESNKKFLPFQQFGRDIADTTDAVRDPQTLEILDITPCSFGGVSVITPGTNTSNQVAVLYQDVNCTEVPVAIHADQLTPTWRVYSTGSNVFQTRAGCLIGAEHVNNSYECDIPIGAGICASYQTQTNSPRRARSVASQSIIAYTMSLGAENSVAYSNNSIAIPTNFTISVTTEILPVSMTKTSVDCTMYICGDSTECSNLLLQYGSFCTQLNRALTGIAVEQDKNTQEVFAQVKQIYKTPPIKDFGGFNFSQILPDPSKPSKRSFIEDLLFNKVTLADAGFIKQYGDCLGDIAARDLICAQKFNGLTVLPPLLTDEMIAQYTSALLAGTITSGWTFGAGAALQIPFAMQMAYRFNGIGVTQNVLYENQKLIANQFNSAIGKIQDSLSSTASALGKLQDVVNQNAQALNTLVKQLSSNFGAISSVLNDILSRLDPPEAEVQIDRLITGRLQSLQTYVTQQLIRAAEIRASANLAATKMSECVLGQSKRFDFCGKGYQLMSFPQSAPHGVVFLNVTYVPAQEKNFTTAPAICNDGKAHFPREGVFVSNGTNWFVTQRNFYEPQIITTDNTFVSGNCDVVIGIVNNTVYDPLQPELDSFKEELDKYFKNHTSPDVDLGDISGINASVVNIQKEIDRLNEVAKNLNESLIDLQELGKYEQYIK

SEQ ID NO: 1919 - protein, 1211 aa, Artificial Sequence
  SARS-CoV-2/China/WF0028/2020__EPI_ISL_413791 spike protein (1-1211)(K986P_V987P_ H1048Q_H1064N_ H1083N_H1101N)
MFVFLVLLPLVSSQCVNLTTRTQLPPAYTNSFTRGVYYPDKVFRSSVLHSTQDLFLPFFSNVTWFHAIHVSGTNGTKRFDNPVLPFNDGVYFASTEKSNIIRGWIFGTTLDSKTQSLLIVNNATNVVIKVCEFQFCNDPFLGVYYHKNNKSWMESEFRVYSSANNCTFEYVSQPFLMDLEGKQGNFKNLREFVFKNIDGYFKIYSKHTPINLVRDLPQGFSALEPLVDLPIGINITRFQTLLALHRSYLTPGDSSSGWTAGAAAYYVGYLQPRTFLLKYNENGTITDAVDCALDPLSETKCTLKSFTVEKGIYQTSNFRVQPTESIVRFPNITNLCPFGEVFNATRFASVYAWNRKRISNCVADYSVLYNSASFSTFKCYGVSPTKLNDLCFTNVYADSFVIRGDEVRQIAPGQTGKIADYNYKLPDDFTGCVIAWNSNNLDSKVGGNYNYLYRLFRKSNLKPFERDISTEIYQAGSTPCNGVEGFNCYFPLQSYGFQPTNGVGYQPYRVVVLSFELLHAPATVCGPKKSTNLVKNKCVNFNFNGLTGTGVLTESNKKFLPFQQFGRDIADTTDAVRDPQTLEILDITPCSFGGVSVITPGTNTSNQVAVLYQDVNCTEVPVAIHADQLTPTWRVYSTGSNVFQTRAGCLIGAEHVNNSYECDIPIGAGICASYQTQTNSPRRARSVASQSIIAYTMSLGAENSVAYSNNSIAIPTNFTISVTTEILPVSMTKTSVDCTMYICGDSTECSNLLLQYGSFCTQLNRALTGIAVEQDKNTQEVFAQVKQIYKTPPIKDFGGFNFSQILPDPSKPSKRSFIEDLLFNKVTLADAGFIKQYGDCLGDIAARDLICAQKFNGLTVLPPLLTDEMIAQYTSALLAGTITSGWTFGAGAALQIPFAMQMAYRFNGIGVTQNVLYENQKLIANQFNSAIGKIQDSLSSTASALGKLQDVVNQNAQALNTLVKQLSSNFGAISSVLNDILSRLDPPEAEVQIDRLITGRLQSLQTYVTQQLIRAAEIRASANLAATKMSECVLGQSKRVDFCGKGYQLMSFPQSAPHGVVFLNVTYVPAQEKNFTTAPAICNDGKAHFPREGVFVSNGTNWFVTQRNFYEPQIITTDNTFVSGNCDVVIGIVNNTVYDPLQPELESFKEELDKYFKNHTSPDVDLGDISGINASVVNIQKEIDRLNEVAKNLNESLIDLQELGKYEQYIK

SEQ ID NO: 1920 - protein, 1211 aa, Artificial Sequence
  SARS-CoV-2/2019-nCoV/USA-CruiseA-18/2020__MT159716.1 spike protein (1-1211)(K986P_V987P_ H1048Q_H1064N_ H1083N_H1101N)
MFVFLVLLPLVSSQCVNLTTRTQLPPAYTNSFTRGVYYPDKVFRSSVLHSTQDLFLPFFSNVTWFHAIHVSGTNGTKRFDNPVLPFNDGVYFASTEKSNIIRGWIFGTTLDSKTQSLLIVNNATNVVIKVCEFQFCNDPFLGVYYHKNNKSWMESELRVYSSANNCTFEYVSQPFLMDLEGKQGNFKNLREFVFKNIDGYFKIYSKHTPINLVRDLPQGFSALEPLVDLPIGINITRFQTLLALHRSYLTPGDSSSGWTAGAAAYYVGYLQPRTFLLKYNENGTITDAVDCALDPLSETKCTLKSFTVEKGIYQTSNFRVQPTESIVRFPNITNLCPFGEVFNATRFASVYAWNRKRISNCVADYSVLYNSASFSTFKCYGVSPTKLNDLCFTNVYADSFVIRGDEVRQIAPGQTGKIADYNYKLPDDFTGCVIAWNSNNLDSKVGGNYNYLYRLFRKSNLKPFERDISTEIYQAGSTPCNGVEGFNCYFPLQSYGFQPTNGVGYQPYRVVVLSFELLHAPATVCGPKKSTNLVKNKCVNFNFNGLTGTGVLTESNKKFLPFQQFGRDIADTTDAVRDPQTLEILDITPCSFGGVSVITPGTNTSNQVAVLYQDVNCTEVPVAIHADQLTPTWRVYSTGSNVFQTRAGCLIGAEHVNNSYECDIPIGAGICASYQTQTNSPRRARSVASQSIIAYTMSLGAENSVAYSNNSIAIPTNFTISVTTEILPVSMTKTSVDCTMYICGDSTECSNLLLQYGSFCTQLNRALTGIAVEQDKNTQEVFAQVKQIYKTPPIKDFGGFNFSQILPDPSKPSKRSFIEDLLFNKVTLADAGFIKQYGDCLGDIAARDLICAQKFNGLTVLPPLLTDEMIAQYTSALLAGTITSGWTFGAGAALQIPFAMQMAYRFNGIGVTQNVLYENQKLIANQFNSAIGKIQDSLSSTASALGKLQDVVNQNAQALNTLVKQLSSNFGAISSVLNDILSRLDPPEAEVQIDRLITGRLQSLQTYVTQQLIRAAEIRASANLAATKMSECVLGQSKRVDFCGKGYQLMSFPQSAPHGVVFLNVTYVPAQEKNFTTAPAICNDGKAHFPREGVFVSNGTNWFVTQRNFYEPQIITTDNTFVSGNCDVVIGIVNNTVYDPLQPELDSFKEELDKYFKNHTSPDVDLGDISGINASVVNIQKEIDRLNEVAKNLNESLIDLQELGKYEQYIK

SEQ ID NO: 1921 - protein, 1211 aa, Artificial Sequence
  SARS-CoV-2/SARS-CoV-2/Yunnan-01/human/2020/CHN__MT049951.1 spike protein (1-1211)(K986P_V987P_ H1048Q_H1064N_ H1083N_H1101N)
MFVFLVLLPLVSSQCVNLTTRTQLPPANTNSFTRGVYYPDKVFRSSVLHSTQDLFLPFFSNVTWFHAIHVSGTNGTKRFDNPVLPFNDGVYFASTEKSNIIRGWIFGTTLDSKTQSLLIVNNATNVVIKVCEFQFCNDPFLGVYYHKNNKSWMESEFRVYSSANNCTFEYVSQPFLMDLEGKQGNFKNLREFVFKNIDGYFKIYSKHTPINLVRDLPQGFSALEPLVDLPIGINITRFQTLLALHRSYLTPGDSSSGWTAGAAAYYVGYLQPRTFLLKYNENGTITDAVDCALDPLSETKCTLKSFTVEKGIYQTSNFRVQPTESIVRFPNITNLCPFGEVFNATRFASVYAWNRKRISNCVADYSVLYNSASFSTFKCYGVSPTKLNDLCFTNVYADSFVIRGDEVRQIAPGQTGKIADYNYKLPDDFTGCVIAWNSNNLDSKVGGNYNYLYRLFRKSNLKPFERDISTEIYQAGSTPCNGVEGFNCYFPLQSYGFQPTNGVGYQPYRVVVLSFELLHAPATVCGPKKSTNLVKNKCVNFNFNGLTGTGVLTESNKKFLPFQQFGRDIADTTDAVRDPQTLEILDITPCSFGGVSVITPGTNTSNQVAVLYQDVNCTEVPVAIHADQLTPTWRVYSTGSNVFQTRAGCLIGAEHVNNSYECDIPIGAGICASYQTQTNSPRRARSVASQSIIAYTMSLGAENSVAYSNNSIAIPTNFTISVTTEILPVSMTKTSVDCTMYICGDSTECSNLLLQYGSFCTQLNRALTGIAVEQDKNTQEVFAQVKQIYKTPPIKDFGGFNFSQILPDPSKPSKRSFIEDLLFNKVTLADAGFIKQYGDCLGDIAARDLICAQKFNGLTVLPPLLTDEMIAQYTSALLAGTITSGWTFGAGAALQIPFAMQMAYRFNGIGVTQNVLYENQKLIANQFNSAIGKIQDSLSSTASALGKLQDVVNQNAQALNTLVKQLSSNFGAISSVLNDILSRLDPPEAEVQIDRLITGRLQSLQTYVTQQLIRAAEIRASANLAATKMSECVLGQSKRVDFCGKGYQLMSFPQSAPHGVVFLNVTYVPAQEKNFTTAPAICNDGKAHFPREGVFVSNGTNWFVTQRNFYEPQIITTDNTFVSGNCDVVIGIVNNTVYDPLQPELDSFKEELDKYFKNHTSPDVDLGDISGINASVVNIQKEIDRLNEVAKNLNESLIDLQELGKYEQYIK

SEQ ID NO: 1922 - protein, 1211 aa, Artificial Sequence
  SARS-CoV-2/USA/WA-UW292/2020__EPI_ISL_418077 spike protein (1-1211)(K986P_V987P_ H1048Q_H1064N_ H1083N_H1101N)
MFVFLVLLPLVSSQCVNLTTRTQLPPAYTNSFTRGVYYPDKVFRSSVLHSTQDLFLPFFSNVTWFHAIHVSGTNGTKRFDNPVLPFNDGVYFASTEKSNIIRGWIFGTTLDSKTQSLLIVNNATNVVIKVCEFQFCNDPFLGVYYHKNNKSWMESEFRVYSSANNCTFEYVSQPFLMDLEGKQGNFKNLREFVFKNIDGYFKIYSKHTPINLVRDLPQGFSALEPLVDLPIGINITRFQTLLALHRSYLTPGDSSSGWTAGAAAYYVGYLQPRTFLLKYNENGTITDAVDCALDPLSETKCTLKSFTVEKGIYQTSNFRVQPTESIVRFPNITNLCPFGEVFNATRFASVYAWNRKRISNCVADYSVLYNSASFSTFKCYGVSPTKLNDLCFTNVYADSFVIRGDEVRQIAPGQTGKIADYNYKLPDDFTGCVIAWNSNNLDSKVGGNYNYLYRLFRKSNLKPFERDISTEIYQASSTPCNGVEGFNCYFPLQSYGFQPTNGVGYQPYRVVVLSFELLHAPATVCGPKKSTNLVKNKCVNFNFNGLTGTGVLTESNKKFLPFQQFGRDIADTTDAVRDPQTLEILDITPCSFGGVSVITPGTNTSNQVAVLYQDVNCTEVPVAIHADQLTPTWRVYSTGSNVFQTRAGCLIGAEHVNNSYECDIPIGAGICASYQTQTNSPRRARSVASQSIIAYTMSLGAENSVAYSNNSIAIPTNFTISVTTEILPVSMTKTSVDCTMYICGDSTECSNLLLQYGSFCTQLNRALTGIAVEQDKNTQEVFAQVKQIYKTPPIKDFGGFNFSQILPDPSKPSKRSFIEDLLFNKVTLADAGFIKQYGDCLGDIAARDLICAQKFNGLTVLPPLLTDEMIAQYTSALLAGTITSGWTFGAGAALQIPFAMQMAYRFNGIGVTQNVLYENQKLIANQFNSAIGKIQDSLSSTASALGKLQDVVNQNAQALNTLVKQLSSNFGAISSVLNDILSRLDPPEAEVQIDRLITGRLQSLQTYVTQQLIRAAEIRASANLAATKMSECVLGQSKRVDFCGKGYQLMSFPQSAPHGVVFLNVTYVPAQEKNFTTAPAICNDGKAHFPREGVFVSNGTNWFVTQRNFYEPQIITTDNTFVSGNCDVVIGIVNNTVYDPLQPELDSFKEELDKYFKNHTSPDVDLGDISGINASVVNIQKEIDRLNEVAKNLNESLIDLQELGKYEQYIK

SEQ ID NO: 1923 - protein, 1211 aa, Artificial Sequence
  SARS-CoV-2/Iceland/192/2020__EPI_ISL_417819 spike protein (1-1211)(K986P_V987P_ H1048Q_H1064N_ H1083N_H1101N)
MFVFFVLLPLVSSQCVNLTTRTQLPPAYTNSFTRGVYYPDKVFRSSVLHSTQDLFLPFFSNVTWFHAIHVSGTNGTKRFDNPVLPFNDGVYFASTEKSNIIRGWIFGTTLDSKTQSLLIVNNATNVVIKVCEFQFCNDPFLGVYYHKNNKSWMESEFRVYSSANNCTFEYVSQPFLMDLEGKQGNFKNLREFVFKNIDGYFKIYSKHTPINLVRDLPQGFSALEPLVDLPIGINITRFQTLLALHRSYLTPGDSSSGWTAGAAAYYVGYLQPRTFLLKYNENGTITDAVDCALDPLSETKCTLKSFTVEKGIYQTSNFRVQPTESIVRFPNITNLCPFGEVFNATRFASVYAWNRKRISNCVADYSVLYNSASFSTFKCYGVSPTKLNDLCFTNVYADSFVIRGDEVRQIAPGQTGKIADYNYKLPDDFTGCVIAWNSNNLDSKVGGNYNYLYRLFRKSNLKPFERDISTEIYQAGSTPCNGVEGFNCYFPLQSYGFQPTNGVGYQPYRVVVLSFELLHAPATVCGPKKSTNLVKNKCVNFNFNGLTGTGVLTESNKKFLPFQQFGRDIADTTDAVRDPQTLEILDITPCSFGGVSVITPGTNTSNQVAVLYQGVNCTEVPVAIHADQLTPTWRVYSTGSNVFQTRAGCLIGAEHVNNSYECDIPIGAGICASYQTQTNSPRRARSVASQSIIAYTMSLGAENSVAYSNNSIAIPTNFTISVTTEILPVSMTKTSVDCTMYICGDSTECSNLLLQYGSFCTQLNRALTGIAVEQDKNTQEVFAQVKQIYKTPPIKDFGGFNFSQILPDPSKPSKRSFIEDLLFNKVTLADAGFIKQYGDCLGDIAARDLICAQKFNGLTVLPPLLTDEMIAQYTSALLAGTITSGWTFGAGAALQIPFAMQMAYRFNGIGVTQNVLYENQKLIANQFNSAIGKIQDSLSSTASALGKLQDVVNQNAQALNTLVKQLSSNFGAISSVLNDILSRLDPPEAEVQIDRLITGRLQSLQTYVTQQLIRAAEIRASANLAATKMSECVLGQSKRVDFCGKGYQLMSFPQSAPHGVVFLNVTYVPAQEKNFTTAPAICNDGKAHFPREGVFVSNGTNWFVTQRNFYEPQIITTDNTFVSGNCDVVIGIVNNTVYDPLQPELDSFKEELDKYFKNHTSPDVDLGDISGINASVVNIQKEIDRLNEVAKNLNESLIDLQELGKYEQYIK

SEQ ID NO: 1924 - protein, 1211 aa, Artificial Sequence
  SARS-CoV-2/Belgium/ULG-6939/2020__EPI_ISL_417020 spike protein (1-1211)(K986P_V987P_ H1048Q_H1064N_ H1083N_H1101N)
MFVFLVLLPLVSSQCVNLTTRTQLPPAYTNSFTRGVYYPDKVFRSSVLHSTQDLFLPFFSNVTWFHAIHVSGTNGTKRFDNPVLPFNDGVYFASTEKSNIIRGWIFGTTLDSKTQSLLIVNNATNVVIKVCEFQFCNDPFLGVYYHKNNKSWMESEFRVYSSANNCTFEYVSQPFLMDLEGKQGNFKNLREFVFKNIDGYFKIYSKHTPINLVRDLPQGFSALEPLVDLPIGINITRFQTLLALHRSYLTPGDSSSGWTAGAAAYYVGYLQPRTFLLKYNENGTITDAVDCALDPLSETKCTLKSFTVEKGIYQTSNFRVQPTESIVRFPNITNLCPFGEVFNATRFASVYAWNRKRISNCVADYSVLYNSASFSTFKCYGVSPTKLNDLCFTNVYADSFVIRGDEVRQIAPGQTGKIADYNYKLPDDFTGCVIAWNSNNLDSKVGGNYNYLYRLFRKSNLKPFERDISTEIYQAGSTPCNGVEGFNCYFPLQSYGFQPTNGVGYQPYRVVVLSFELLHAPATVCGPKKSTNLVKNKCVNFNFNGLTGTGVLTESNKKFLPFQQFGRDIADTTDAVRDPQTLEILDITPCSFGGVSVITPGTNTSNQVAVLYQGVNCTEVPVAIHADQLTPTWRVYSTGSNVFQTRAGCLIGAEHVNNSYECDIPIGAGICASYQTQTNSPRRARSVASQSIIAYTMSLGAENSVVYSNNSIAIPTNFTISVTTEILPVSMTKTSVDCTMYICGDSTECSNLLLQYGSFCTQLNRALTGIAVEQDKNTQEVFAQVKQIYKTPPIKDFGGFNFSQILPDPSKPSKRSFIEDLLFNKVTLADAGFIKQYGDCLGDIAARDLICAQKFNGLTVLPPLLTDEMIAQYTSALLAGTITSGWTFGAGAALQIPFAMQMAYRFNGIGVTQNVLYENQKLIANQFNSAIGKIQDSLSSTASALGKLQDVVNQNAQALNTLVKQLSSNFGAISSVLNDILSRLDPPEAEVQIDRLITGRLQSLQTYVTQQLIRAAEIRASANLAATKMSECVLGQSKRVDFCGKGYQLMSFPQSAPHGVVFLNVTYVPAQEKNFTTAPAICNDGKAHFPREGVFVSNGTNWFVTQRNFYEPQIITTDNTFVSGNCDVVIGIVNNTVYDPLQPELDSFKEELDKYFKNHTSPDVDLGDISGINASVVNIQKEIDRLNEVAKNLNESLIDLQELGKYEQYIK

SEQ ID NO: 1925 - protein, 1211 aa, Artificial Sequence
  SARS-CoV-2/France/HF2496/2020__EPI_ISL_418231 spike protein (1-1211)(K986P_V987P_ H1048Q_H1064N_ H1083N_H1101N)
MFVFLVLLPLVSSQCVNLTTRTQLPPAYTNSFTRGVYYPDKVFRSSVLHSTQDLFLPFFSNVTWFHAIHVSGTNGTKRFDNPVLPFNDGVYFASTEKSNIIRGWIFGTTLDSKTQSLLIVNNATNVVIKVCEFQFCNDPFLGVYYHKNNKSWMESEFRVYSSANNCTFEYVSQPFLMDLEGKQGNFKNLREFVFKNIDGYFKIYSKHTPINLVRDLPQGFSALEPLVDLPIGINITRFQTLLALHRSYLTPGDSSSGWTAGAAAYYVGYLQPRTFLLKYNENGTITDAVDCALDPLSETKCTLKSFTVEKGIYQTSNFRVQPTESIVRFPNITNLCPFGEVFNATRFASVYAWNRKRISNCVADYSVLYNSASFSTFKCYGVSPTKLNDLCFTNVYADSFVIRGDEVRQIAPGQTGKIADYNYKLPDDFTGCVIAWNSNNLDSKVGGNYNYLYRLFRKSNLKPFERDISTEIYQAGSTPCNGVEGFNCYFPLQSYGFQPTNGVGYQPYRVVVLSFELLHAPATVCGPKKSTNLVKNKCVNFNFNGLTGTGVLTESNKKFLPFQQFGRDIADTTDAVRDPQTLEILDITPCSFGGVSVITPGTNTSNQVAVLYQGVNCTEVPVAIHADQLTPTWRVYSTGSNVFQTRAGCLIGAEHVNNSYECDIPIGAGICASYQTQTNSPRRARSVASQSIIAYTMSLGAENSVAYSNNSIAIPTNFTISVTTEILPVSMTKTSVDCTMYICGDSTECSNLLLQYGSFCTQLNRALTGIAVEQDKNTQEVFAQVKQIYKTPPIKDFGGFNFSQILPDPSKPSKRSFIEDLLFNKVTLADAGFIKQYGDCLGDIVARDLICAQKFNGLTVLPPLLTDEMIAQYTSALLAGTITSGWTFGAGAALQIPFAMQMAYRFNGIGVTQNVLYENQKLIANQFNSAIGKIQDSLSSTASALGKLQDVVNQNAQALNTLVKQLSSNFGAISSVLNDILSRLDPPEAEVQIDRLITGRLQSLQTYVTQQLIRAAEIRASANLAATKMSECVLGQSKRVDFCGKGYQLMSFPQSAPHGVVFLNVTYVPAQEKNFTTAPAICNDGKAHFPREGVFVSNGTNWFVTQRNFYEPQIITTDNTFVSGNCDVVIGIVNNTVYDPLQPELDSFKEELDKYFKNHTSPDVDLGDISGINASVVNIQKEIDRLNEVAKNLNESLIDLQELGKYEQYIK

SEQ ID NO: 1926 - protein, 1211 aa, Artificial Sequence
  SARS-CoV-2/USA/WA-UW291/2020__EPI_ISL_418076 spike protein (1-1211)(K986P_V987P_ H1048Q_H1064N_ H1083N_H1101N)
MFVFLVLLPLVSSQCVNLTTRTQLPPAYTNSFTRGVYYPDKVFRSSVLHSTQDLFLPFFSNVTWFHAIHVSGTNGTKRFDNPVLPFNDGVYFASTEKSNIIRGWIFGTTLDSKTQSLLIVNNATNVVIKVCEFQFCNDPFLGVYYHKNNKSWMESEFRVYSSANNCTFEYVSQPFLMDLEGKQGNFKNLREFVFKNIDGYFKIYSKHTPINLVRDLPQGFSALEPLVDLPIGINITRFQTLLALHRSYLTPGDSSSGWTAGAAAYYVGYLQPRTFLLKYNENGTITDAVDCALDPLSETKCTLKSFTVEKGIYQTSNFRVQPTESIVRFPNITNLCPFGEVFNATRFASVYAWNRKRISNCVADYSVLYNSASFSTFKCYGVSPTKLNDLCFTNVYADSFVIRGDEVRQIAPGQTGKIADYNYKLPDDFTGCVIAWNSNNLDSKVGGNYNYLYRLFRKSNLKPFERDISTEIYQAGSTPCNGVEGFNCYFPLQSYGFQPTNGVGYQPYRVVVLSFELLHAPATVCGPKKSTNLVKNKCVNFNFNGLTGTGVLTESNKKFLPFQQFGRDIADTTDAVRDPQTLEILDITPCSFGGVSVITPGTNTSNQVAVLYQGVNCTEVPVAIHADQLTPTWRVYSTGSNVFQTRAGCLIGAEHVNNSYECDIPIGAGICASYQTQTNSPRRARSVASQSIIAYTMSLGAENSVAYSNNSIAIPTNFTISVTTEILPVSMTKTSVDCTMYICGDSTECSNLLLQYGSFCTQLNRALTGIAVEQDKNTQEVFAQVKQIYKTPPIKDFGGFNFSQILPDPSKPSKRSFIEDLLFNKVTLADAGFIKQYGDCLGDIAARDLICAQKFNGLTVLPPLLTDEMIAQYTSALLAGTITSGWTFGAGAALQIPFAMQMAYRFNGIGVTQNVLYENQKLIANQFNSAIGKIQYSLSSTASALGKLQDVVNQNAQALNTLVKQLSSNFGAISSVLNDILSRLDPPEAEVQIDRLITGRLQSLQTYVTQQLIRAAEIRASANLAATKMSECVLGQSKRVDFCGKGYQLMSFPQSAPHGVVFLNVTYVPAQEKNFTTAPAICNDGKAHFPREGVFVSNGTNWFVTQRNFYEPQIITTDNTFVSGNCDVVIGIVNNTVYDPLQPELDSFKEELDKYFKNHTSPDVDLGDISGINASVVNIQKEIDRLNEVAKNLNESLIDLQELGKYEQYIK

SEQ ID NO: 1927 - protein, 1211 aa, Artificial Sequence; identical to SEQ ID NO: 1890
  SARS-CoV-2/Portugal/PT0034/2020__EPI_ISL_418019 spike protein (1-1211)(K986P_V987P_ H1048Q_H1064N_ H1083N_H1101N)

SEQ ID NO: 1928 - protein, 1211 aa, Artificial Sequence
  SARS-CoV-2/Iceland/202/2020__EPI_ISL_417750 spike protein (1-1211)(K986P_V987P_ H1048Q_H1064N_ H1083N_H1101N)
MFVFLVLLPLVSSQCVNLTTRTQLPPAYTNSFTRGVYYPDKVFRSSVLHSTQDLFLPFFSNVTWFHAIHVSGTNGTKRFDNPVLPFNDGVYFASTEKSNIIRGWIFGTTLDSKTQSLLIVNNATNVVIKVCEFQFCNDPFLGVYYHKNNKSWMESEFRVYSSANNCTFEYVSQPFLMDLEGKQGNFKNLREFVFKNIDGYFKIYSKHTPINLVRDLPQGFSALEPLVDLPIGINITRFQTLLALHRSYLTPGDSSSGWTAGAAAYYVGYLQPRTFLLKYNENGTITDAVDCALDPLSETKCTLKSFTVEKGIYQTSNFRVQPTESIVRFPNITNLCPFGEVFNATRFASVYAWNRKRISNCVADYSVLYNSASFSTFKCYGVSPTKLNDLCFTNVYADSFVIRGDEVRQIAPGQTGKIADYNYKLPDDFTGCVIAWNSNNLDSKVGGNYNYLYRLFRKSNLKPFERDISTEIYQAGSTPCNGVEGFNCYFPLQSYGFQPTNGVGYQPYRVVVLSFELLHAPATVCGPKKSTNLVKNKCVNFNFNGLTGTGVLTESNKKFLPFQQFGRDIADTTDAVRDPQTLEILDITPCSFGGVSVITPGTNTSNQVAVLYQDVNCTEVPVAIHADQLTPTWRVYSTGSNVFQTRAGCLIGAEHVNNSYECDIPIGAGICASYQTQTNSPRRARSVASQSIIAYTMSLGAENSVAYSNNSIAIPTNFTISVTTEILPVSMTKTSVDCTMYICGDSTECSNLLLQYGSFCTQLNRALTGIAVEQDKNTQEVFAQVKQIYKTPPIKDFGGFNFSQILPDPSKPSKRSFIEDLLFNKVTLADAGFIKQYGDCLGDIAARDLICAQKFNGLTVLPPLLTDEMIAQYTSALLAGTITSGWTFGAGAALQIPFAMQMAYRFNGIGVTQNVLYENQKLIANQFNSAIGKIQDSLSSTASALGKLQDVVNQNAQALNTLVKQLSSNFGAISSVLNDILSRLDPPEAEVQIDRLITGRLQSLQTYVTQQLIRAAEIRASANLAATKMSECVLGQSKRVDFCGKGYQLMSFPQSAPHGVVFLNVTYVPAQEKNFTTAPAICNDGKAHFPREGVFVSNGTNWFVTQRNFYEPQIITTDNTFVSGNCDVVIGIVNNTVYDPLQPELDSFKEELDKYFKNHTSPDVDLGDIPGINASVVNIQKEIDRLNEVAKNLNESLIDLQELGKYEQYIK

SEQ ID NO: 1929 - protein, 1211 aa, Artificial Sequence
  SARS-CoV-2/USA/WA-UW261/2020__EPI_ISL_418046 spike protein (1-1211)(K986P_V987P_ H1048Q_H1064N_ H1083N_H1101N)
MFVFLVLLPLVSSQCVNLTTRTQLPPAYTNSFTRGVYYPDKVFRSSVLHSTQDLFLPFFSNVTWFHAIHVSGTNGTKRFDNPVLPFNDGVYFASTEKSNIIRGWIFGTTLDSKTQSLLIVNNATNVVIKVCEFQFCNDPFLGVYYHKNNKSWMESEFRVYSSANNCTFEYVSQPFLMDLEGKQGNFKNLREFVFKNIDGYFKIYSKHTPINLVRDLPQGFSALEPLVDLPIGINITRFQTLLALHRSYLTPGDSSSGWTAGAAAYYVGYLQPRTFLLKYNENGTITDAVDCALDPLSETKCTLKSFTVEKGIYQTSNFRVQPTESIVRFPNITNLCPFGEVFNATRFTSVYAWNRKRISNCVADYSVLYNSASFSTFKCYGVSPTKLNDLCFTNVYADSFVIRGDEVRQIAPGQTGKIADYNYKLPDDFTGCVIAWNSNNLDSKVGGNYNYLYRLFRKSNLKPFERDISTEIYQAGSTPCNGVEGFNCYFPLQSYGFQPTNGVGYQPYRVVVLSFELLHAPATVCGPKKSTNLVKNKCVNFNFNGLTGTGVLTESNKKFLPFQQFGRDIADTTDAVRDPQTLEILDITPCSFGGVSVITPGTNTSNQVAVLYQDVNCTEVPVAIHADQLTPTWRVYSTGSNVFQTRAGCLIGAEHVNNSYECDIPIGAGICASYQTQTNSPRRARSVASQSIIAYTMSLGAENSVAYSNNSIAIPTNFTISVTTEILPVSMTKTSVDCTMYICGDSTECSNLLLQYGSFCTQLNRALTGIAVEQDKNTQEVFAQVKQIYKTPPIKDFGGFNFSQILPDPSKPSKRSFIEDLLFNKVTLADAGFIKQYGDCLGDIAARDLICAQKFNGLTVLPPLLTDEMIAQYTSALLAGTITSGWTFGAGAALQIPFAMQMAYRFNGIGVTQNVLYENQKLIANQFNSAIGKIQDSLSSTASALGKLQDVVNQNAQALNTLVKQLSSNFGAISSVLNDILSRLDPPEAEVQIDRLITGRLQSLQTYVTQQLIRAAEIRASANLAATKMSECVLGQSKRVDFCGKGYQLMSFPQSAPHGVVFLNVTYVPAQEKNFTTAPAICNDGKAHFPREGVFVSNGTNWFVTQRNFYEPQIITTDNTFVSGNCDVVIGIVNNTVYDPLQPELDSFKEELDKYFKNHTSPDVDLGDISGINASVVNIQKEIDRLNEVAKNLNESLIDLQELGKYEQYIK

SEQ ID NO: 1930 - protein, 1211 aa, Artificial Sequence
  SARS-CoV-2/Portugal/PT0035/2020__EPI_ISL_418020 spike protein (1-1211)(K986P_V987P_ H1048Q_H1064N_ H1083N_H1101N)
MFVFLVLLPLVSSQCVNLTTRTQLPPAYTNSFTRGVYYPDKVFRSSVLHSTQDLFLPFFSNVTWFHAIHVSGTNGTKRFDNPVLPFNDGVYFASTEKSNIIRGWIFGTTLDSKTQSLLIVNNATNVVIKVCEFQFCNDPFLGVYYHKNNKSWMESEFRVYSSANNCTFEYVSQPFLMDLEGKQGNFKNLREFVFKNIDGYFKIYSKHTPINLVRDLPQGFSALEPLVDLPIGINITRFQTLLALHRSYLTPGDSSSGWTAGAAAYYVGYLQPRTFLLKYNENGTITDAVDCALDPLSETKCTLKSFTVEKGIYQTSNFRVQPTESIVRFPNITNLCPFGEVFNATRFASVYAWNRKRISNCVADYSVLYNSASFSTFKCYGVSPTKLNDLCFTNVYADSFVIRGDEVRQIAPGQTGKIADYNYKLPDDFTGCVIAWNSNNLDSKVGGNYNYLYRLFRKSNLKPFERDISTEIYQAGSTPCNGVEGFNCYFPLQSYGFQPTNGVGYQPYRVVVLSFELLHAPATVCGPKKSTNLVKNKCVNFNFNGLTGTGVLTESNKKFLPFQQFGRDIADTTDAVRDPQTLEILDITPCSFGGVSVITPGTNTSNQVAVLYQDVNCTEVPVAIHADQLTPTWRVYSTGSNVFQTRAGCLIGAEHVNNSYECDIPIGAGICASYQTQTNSPRRARSVASQSIIAYTMSLGAENSVAYSNNSIAIPTNFTISVTTEILPVSMTKTSVDCTMYICGDSTECSNLLLQYGSFCTQLNRALTGIAVEQDKNTQEVFAQVKQIYKTPPIKDFGGFNFSQILPDPSKPSKRSFIEDLLFNKVTLADAGFIKQYGDCLGDISARDLICAQKFNGLTVLPPLLTDEMIAQYTSALLAGTITSGWTFGAGAALQIPFAMQMAYRFNGIGVTQNVLYENQKLIANQFNSAIGKIQDSLSSTASALGKLQDVVNQNAQALNTLVKQLSSNFGAISSVLNDILSRLDPPEAEVQIDRLITGRLQSLQTYVTQQLIRAAEIRASANLAATKMSECVLGQSKRVDFCGKGYQLMSFPQSAPHGVVFLNVTYVPAQEKNFTTAPAICNDGKAHFPREGVFVSNGTNWFVTQRNFYEPQIITTDNTFVSGNCDVVIGIVNNTVYDPLQPELDSFKEELDKYFKNHTSPDVDLGDISGINASVVNIQKEIDRLNEVAKNLNESLIDLQELGKYEQYIK

SEQ ID NO: 1931 - protein, 1211 aa, Artificial Sequence
  SARS-CoV-2/USA/NY-NYUMC7/2020__EPI_ISL_418192 spike protein (1-1211)(K986P_V987P_ H1048Q_H1064N_ H1083N_H1101N)
MFVFLVLLPLVSSQCVNLTTRTQLPPAYTNSFTRGVYYPDKVFRSSVLHSTQDLFLPFFSNVTWFHAIHVSGTNGTKRFDNPVLPFNDGVYFASTEKSNIIRGWIFGTTLDSKTQSLLIVNNATNVVIKVCEFQFCNDPFLGVYHHKNNKSWMESEFRVYSSANNCTFEYVSQPFLMDLEGKQGNFKNLREFVFKNIDGYFKIYSKHTPINLVRDLPQGFSALEPLVDLPIGINITRFQTLLALHRSYLTPGDSSSGWTAGAAAYYVGYLQPRTFLLKYNENGTITDAVDCALDPLSETKCTLKSFTVEKGIYQTSNFRVQPTESIVRFPNITNLCPFGEVFNATRFASVYAWNRKRISNCVADYSVLYNSASFSTFKCYGVSPTKLNDLCFTNVYADSFVIRGDEVRQIAPGQTGKIADYNYKLPDDFTGCVIAWNSNNLDSKVGGNYNYLYRLFRKSNLKPFERDISTEIYQAGSTPCNGVEGFNCYFPLQSYGFQPTNGVGYQPYRVVVLSFELLHAPATVCGPKKSTNLVKNKCVNFNFNGLTGTGVLTESNKKFLPFQQFGRDIADTTDAVRDPQTLEILDITPCSFGGVSVITPGTNTSNQVAVLYQGVNCTEVPVAIHADQLTPTWRVYSTGSNVFQTRAGCLIGAEHVNNSYECDIPIGAGICASYQTQTNSPRRARSVASQSIIAYTMSLGAENSVAYSNNSIAIPTNFTISVTTEILPVSMTKTSVDCTMYICGDSTECSNLLLQYGSFCTQLNRALTGIAVEQDKNTQEVFAQVKQIYKTPPIKDFGGFNFSQILPDPSKPSKRSFIEDLLFNKVTLADAGFIKQYGDCLGDIAARDLICAQKFNGLTVLPPLLTDEMIAQYTSALLAGTITSGWTFGAGAALQIPFAMQMAYRFNGIGVTQNVLYENQKLIANQFNSAIGKIQDSLSSTASALGKLQDVVNQNAQALNTLVKQLSSNFGAISSVLNDILSRLDPPEAEVQIDRLITGRLQSLQTYVTQQLIRAAEIRASANLAATKMSECVLGQSKRVDFCGKGYQLMSFPQSAPHGVVFLNVTYVPAQEKNFTTAPAICNDGKAHFPREGVFVSNGTNWFVTQRNFYEPQIITTDNTFVSGNCDVVIGIVNNTVYDPLQPELDSFKEELDKYFKNHTSPDVDLGDISGINASVVNIQKEIDRLNEVAKNLNESLIDLQELGKYEQYIK

SEQ ID NO: 1932 - protein, 1211 aa, Artificial Sequence
  SARS-CoV-2/Iceland/189/2020__EPI_ISL_417709 spike protein (1-1211)(K986P_V987P_ H1048Q_H1064N_ H1083N_H1101N)
MFVFLVLLPLVSSQCVNLTTRTQLPPAYTNSFTRGVYYPDKVFRSSVLHSTQDLFLPFFSNVTWFHAIHVSGTNGTKRFDNPVLPFNDGVYFASTEKSNIIRGWIFGTTLDSKTQSLLIVNNATNVVIKVCEFQFCNDPFLGVYYHKNNKSWMESEFRVYSSANNCTFEYVSQPFLMDLEGKQGNFKNLREFVFKNIDGYFKIYSKHTPINLVRDLPQGFSALEPLVDLPIGINITRFQTLLALHRSYLTPGDSSSGWTAGAAAYYVGYLQPRTFLLKYNENGTITDAVDCALDPLSETKCTLKSFTVEKGIYQTSNFRVQPTESIVRFPNITNLCPFGEVFNATRFASVYAWNRKRISNCVADYSVLYNSASFSTFKCYGVSPTKLNDLCFTNVYADSFVIRGDEVRQIAPGQTGKIADYNYKLPDDFTGCVIAWNSNNLDSKVGGNYNYLYRLFRKSNLKPFERDISTEIYQAGSTPCNGVEGFNCYFPLQSYGFQPTNGVGYQPYRVVVLSFELLHAPATVCGPKKSTNLVKNKCVNFNFNGLTGTGVLTESNKKFLPFQQFGRDIADTTDAVRDPQTLEILDITPCSFGGVSVITPGTNTSNQVAVLYQGVNCTEVPVAIHADQLTPTWRVYSTGSNVFQTRAGCLIGAEHVNNSYECDIPIGAGICASYQTQTNSPRRARSVASQSIIAYTMSLGAENSVAYSNNSIAIPTNFTISVTTEILPVSMTKTSVDCTMYICGDSTECSNLLLQYGSFCTQLNRALTGIAVEQDKNTQEVFAQVKQIYKTPPIKDFGGFNFSQILPDPSKPSKRSFIEDLLFNKVTLADAGFTKQYGDCLGDIAARDLICAQKFNGLTVLPPLLTDEMIAQYTSALLAGTITSGWTFGAGAALQIPFAMQMAYRFNGIGVTQNVLYENQKLIANQFNSAIGKIQDSLSSTASALGKLQDVVNQNAQALNTLVKQLSSNFGAISSVLNDILSRLDPPEAEVQIDRLITGRLQSLQTYVTQQLIRAAEIRASANLAATKMSECVLGQSKRVDFCGKGYQLMSFPQSAPHGVVFLNVTYVPAQEKNFTTAPAICNDGKAHFPREGVFVSNGTNWFVTQRNFYEPQIITTDNTFVSGNCDVVIGIVNNTVYDPLQPELDSFKEELDKYFKNHTSPDVDLGDISGINASVVNIQKEIDRLNEVAKNLNESLIDLQELGKYEQYIK

SEQ ID NO: 1933 - protein, 1211 aa, Artificial Sequence
  SARS-CoV-2/Australia/NSW56/2020__EPI_ISL_417408 spike protein (1-1211)(K986P_V987P_ H1048Q_H1064N_ H1083N_H1101N)
MFVFLVLLPLVSSQCVNLTTRTQLPPAYTNSFTRGVYYPDKVFRSSVLHSTQDLFLPFFSNVTWFHAIHVSGTNGTKRFDNPVLPFNDGVYFASTEKSNIIRGWIFGTTLDSKTQSLLIVNNATNVVIKVCEFQFCNDPFLGVYYHKNNKSWMESEFRVYSSANNCTFEYVSQPFLMDLEGKQGNFKNLREFVFKNIDGYFKIYSKHTPINLVRDLPQGFSALEPLVDLPIGINITRFQTLLALHRSYLTPGDSSSGWTAGAAAYYVGYLQPRTFLLKYNENGTITDAVDCALDPLSETKCTLKSFTVEKGIYQTSNFRVQPTESIVRFPNITNLCPFGEVFNATRFASVYAWNRKRISNCVADYSVLYNSASFSTFKCYGVSPTKLNDLCFTNVYADSFVIRGDEVRQIAPGQTGKIADYNYKLPDDFTGCVIAWNSNNLDSKVGGNYNYLYRLFRKSNLKPFERDISTEIYQAGSTPCNGVEGFNCYFPLQSYGFQPTNGVGYQPYRVVVLSFELLHAPATVCGPKKSTNLVKNKCVNFNFNGLTGTGVLTESNKKFLPFQQFGRDIADTTDAVRDPQTLEILDITPCSFGGVSVITPGTNTSNQVAVLYQDVNCTEVPVAIHADQLTPTWRVYSTGSNVFQTRAGCLIGAEHVNNSYECDIPIGAGICASYQTQTNSPRRARSVASQSIIAYTMSLGAENSVAYSNNSIAIPTNFTISVTTEILPVSMTKTSVDCTMYICGDSTECSNLLLQYGSFCTQLNRALTGIAVEQDKNTQEVFAQVKQIYKTPPIKDFGGFNFSQILPDSSKPSKRSFIEDLLFNKVTLADAGFIKQYGDCLGDIAARDLICAQKFNGLTVLPPLLTDEMIAQYTSALLAGTITSGWTFGAGAALQIPFAMQMAYRFNGIGVTQNVLYENQKLIANQFNSAIGKIQDSLSSTASALGKLQDVVNQNAQALNTLVKQLSSNFGAISSVLNDILSRLDPPEAEVQIDRLITGRLQSLQTYVTQQLIRAAEIRASANLAATKMSECVLGQSKRVDFCGKGYQLMSFPQSAPHGVVFLNVTYVPAQEKNFTTAPAICNDGKAHFPREGVFVSNGTNWFVTQRNFYEPQIITTDNTFVSGNCDVVIGIVNNTVYDPLQPELDSFKEELDKYFKNHTSPDVDLGDISGINASVVNIQKEIDRLNEVAKNLNESLIDLQELGKYEQYIK

SEQ ID NO: 1934 - protein, 1211 aa, Artificial Sequence
  SARS-CoV-2/Iceland/280/2020__EPI_ISL_417608 spike protein (1-1211)(K986P_V987P_ H1048Q_H1064N_ H1083N_H1101N)
MFVFLVLLPLVSSQCVNLTTRTQLPPAYTNSFTRGVYYPDKVFRSSVLHSTQDLFLPFFSNVTWFHAIHVSGTNGTKRFDNPVLPFNDGVYFASTEKSNIIRGWIFGTTLDSKTQSLLIVNNATNVVIKVCEFQFCNDPFLGVYYHKNNKSWMESEFRVYSSANNCTFEYVSQPFLMDLEGKQGNFKNLREFVFKNIDGYFKIYSKHTPINLVRDLPQGFSALEPLVDLPIGINITRFQTLLALHRSYLTPGDSSSGWTAGAAAYYVGYLQPRTFLLKYNENGTITDAVDCALDPLSETKCTLKSFTVEKGIYQTSNFRVQPTESIVRFPNITNLCPFGEVFNATRFASVYAWNRKRISNCVADYSVLYNSASFSTFKCYGVSPTKLNDLCFTNVYADSFVIRGDEVRQIAPGQTGKIADYNYKLPDDFTGCVIAWNSNNLDSKVGGNYNYLYRLFRKSNLKPFERDISTEIYQAGSTPCNGVEGFNCYFPLQSYGFQPTNGVGYQPYRVVVLSFELLHAPATVCGPKKSTNLVKNKCVNFNFNGLTGTGVLTESNKKFLPFQQFGRDIADTTDAVRDPQTLEILDITPCSFGGVSVITPGTNTSNQVAVLYQGVNCTEVPVAIHADQLTPTWRVYSTGSNVFQTRAGCLIGAEHVNNSYECDIPIGAGICASYHTQTNSPRRARSVASQSIIAYTMSLGAENSVAYSNNSIAIPTNFTISVTTEILPVSMTKTSVDCTMYICGDSTECSNLLLQYGSFCTQLNRALTGIAVEQDKNTQEVFAQVKQIYKTPPIKDFGGFNFSQILPDPSKPSKRSFIEDLLFNKVTLADAGFIKQYGDCLGDIAARDLICAQKFNGLTVLPPLLTDEMIAQYTSALLAGTITSGWTFGAGAALQIPFAMQMAYRFNGIGVTQNVLYENQKLIANQFNSAIGKIQDSLSSTASALGKLQDVVNQNAQALNTLVKQLSSNFGAISSVLNDILSRLDPPEAEVQIDRLITGRLQSLQTYVTQQLIRAAEIRASANLAATKMSECVLGQSKRVDFCGKGYQLMSFPQSAPHGVVFLNVTYVPAQEKNFTTAPAICNDGKAHFPREGVFVSNGTNWFVTQRNFYEPQIITTDNTFVSGNCDVVIGIVNNTVYDPLQPELDSFKEELDKYFKNHTSPDVDLGDISGINASVVNIQKEIDRLNEVAKNLNESLIDLQELGKYEQYIK

SEQ ID NO: 1935 - protein, 1211 aa, Artificial Sequence; identical to SEQ ID NO: 1890
  SARS-CoV-2/Iceland/247/2020__EPI_ISL_417575 spike protein (1-1211)(K986P_V987P_ H1048Q_H1064N_ H1083N_H1101N)

SEQ ID NO: 1936 - protein, 1211 aa, Artificial Sequence
  SARS-CoV-2/Iceland/238/2020__EPI_ISL_417566 spike protein (1-1211)(K986P_V987P_ H1048Q_H1064N_ H1083N_H1101N)
MFVFLVLLPLVSSQCVNLTTRTQLPPAYTNSFTRGVYYPDKVFRSSVLHSTQDLFLPFFSNVTWFHAIHVSGTNGTKRFDNPVLPFNDGVYFASTEKSNIIRGWIFGTTLDSKTQSLLIVNNATNVVIKVCEFQFCNDPFLGVYYHKNNKSWMESEFRVYSSANNCTFEYVSQPFLMDLEGKQGNFKNLREFVFKNIDGYFKIYSKHTPINLVRDLPQGFSALEPLVDLPIGINITRFQTLLALHRSYLTPGDSSSGWTAGAAAYYVGYLQPRTFLLKYNENGTITDAVDCALDPLSETKCTLKSFTVEKGIYQTSNFRVQPTESIVRFPNITNLCPFGEVFNATRFASVYAWNRKRISNCVADYSVLYNSASFSTFKCYGVSPTKLNDLCFTNVYADSFVIRGDEVRQIAPGQTGKIADYNYKLPDDFTGCVIAWNSNNLDSKVGGNYNYLYRLFRKSNLKPFERDISTEIYQAGSTPCNGVEGFNCYFPLQSYGFQPTNGVGYQPYRVVVLSFELLHAPATVCGPKKSTNLVKNKCVNFNFNGLTGTGVLTESNKKFLPFQQFGRDIADTTDAVRDPQTLEILDITPCSFGGVSVITPGTNTSNQVAVLYQGVNCTEVPVAIHADQLTPTWRVYSTGSNVFQTRAGCLIGAEHVNNSYECDIPIGAGICASYQTQTNSPRRARSVASQSIIAYTMSLGAENSVAYSNNSIAIPTNFTISVTTEILPVSMTKTSVDCTMYICGDSTECSNLLLQYGSFCTQLNRALTGIAVEQDKNTQEVFAQVKQIYKTPPIKDFGGFNFSQILPDPSKPSKRSFIEDLLFNKVTLADVGFIKQYGDCLGDIAARDLICAQKFNGLTVLPPLLTDEMIAQYTSALLAGTITSGWTFGAGAALQIPFAMQMAYRFNGIGVTQNVLYENQKLIANQFNSAIGKIQDSLSSTASALGKLQDVVNQNAQALNTLVKQLSSNFGAISSVLNDILSRLDPPEAEVQIDRLITGRLQSLQTYVTQQLIRAAEIRASANLAATKMSECVLGQSKRVDFCGKGYQLMSFPQSAPHGVVFLNVTYVPAQEKNFTTAPAICNDGKAHFPREGVFVSNGTNWFVTQRNFYEPQIITTDNTFVSGNCDVVIGIVNNTVYDPLQPELDSFKEELDKYFKNHTSPDVDLGDISGINASVVNIQKEIDRLNEVAKNLNESLIDLQELGKYEQYIK

SEQ ID NO: 1937 - protein, 1211 aa, Artificial Sequence
  SARS-CoV-2/Greece/16/2020__EPI_ISL_418265 spike protein (1-1211)(K986P_V987P_ H1048Q_H1064N_ H1083N_H1101N)
MFVFLVLLPLVSSQCVNLTTRTQLPPAYTNSFTRGVYYPDKVFRSSVLHSTQDLFLPFFSNVTWFHAIHVSGTNGTKRFDNPVLPFNDGVYFASTEKSNIIRGWIFGTTLDSKTQSLLIVNNATNVVIKVCEFQFCNDPFLGVYYHKNNKSWMESEFRVYSSANNCTFEYVSQPFLMDLEGKQGNFKNLREFVFKNVDGYFKIYSKHTPINLVRDLPQGFSALEPLVDLPIGINITRFQTLLALHRSYLTPGDSSSGWTAGAAAYYVGYLQPRTFLLKYNENGTITDAVDCALDPLSETKCTLKSFTVEKGIYQTSNFRVQPTESIVRFPNITNLCPFGEVFNATRFASVYAWNRKRISNCVADYSVLYNSASFSTFKCYGVSPTKLNDLCFTNVYADSFVIRGDEVRQIAPGQTGKIADYNYKLPDDFTGCVIAWNSNNLDSKVGGNYNYLYRLFRKSNLKPFERDISTEIYQAGSTPCNGVEGFNCYFPLQSYGFQPTNGVGYQPYRVVVLSFELLHAPATVCGPKKSTNLVKNKCVNFNFNGLTGTGVLTESNKKFLPFQQFGRDIADTTDAVRDPQTLEILDITPCSFGGVSVITPGTNTSNQVAVLYQDVNCTEVPVAIHADQLTPTWRVYSTGSNVFQTRAGCLIGAEHVNNSYECDIPIGAGICASYQTQTNSPRRARSVASQSIIAYTMSLGAENSVAYSNNSIAIPTNFTISVTTEILPVSMTKTSVDCTMYICGDSTECSNLLLQYGSFCTQLNRALTGIAVEQDKNTQEVFAQVKQIYKTPPIKDFGGFNFSQILPDPSKPSKRSFIEDLLFNKVTLADAGFIKQYGDCLGDIAARDLICAQKFNGLTVLPPLLTDEMIAQYTSALLAGTITSGWTFGAGAALQIPFAMQMAYRFNGIGVTQNVLYENQKLIANQFNSAIGKIQDSLSSTASALGKLQDVVNQNAQALNTLVKQLSSNFGAISSVLNDILSRLDPPEAEVQIDRLITGRLQSLQTYVTQQLIRAAEIRASANLAATKMSECVLGQSKRVDFCGKGYQLMSFPQSAPHGVVFLNVTYVPAQEKNFTTAPAICNDGKAHFPREGVFVSNGTNWFVTQRNFYEPQIITTDNTFVSGNCDVVIGIVNNTVYDPLQPELDSFKEELDKYFKNHTSPDVDLGDISGINASVVNIQKEIDRLNEVAKNLNESLIDLQELGKYEQYIK

SEQ ID NO: 1938 - protein, 1211 aa, Artificial Sequence
  SARS-CoV-2/Iceland/319/2020__EPI_ISL_417648 spike protein (1-1211)(K986P_V987P_ H1048Q_H1064N_ H1083N_H1101N)
MFVFLVLLPLVSSQCVNLTTRTQLPPAYTNSFTRGVYYPDKVFRSSVLHSTQDLFLPFFSNVTWFHAIHVSGTNGTKRFDNPVLPFNDGVYFASTEKSNIIRGWIFGTTLDSKTQSLLIVNNATNVVIKVCEFQFCNDPFLGVYYHKNNKSWMESEFRVYSSANNCTFEYVSQPFLIDLEGKQGNFKNLREFVFKNIDGYFKIYSKHTPINLVRDLPQGFSALEPLVDLPIGINITRFQTLLALHRSYLTPGDSSSGWTAGAAAYYVGYLQPRTFLLKYNENGTITDAVDCALDPLSETKCTLKSFTVEKGIYQTSNFRVQPTESIVRFPNITNLCPFGEVFNATRFASVYAWNRKRISNCVADYSVLYNSASFSTFKCYGVSPTKLNDLCFTNVYADSFVIRGDEVRQIAPGQTGKIADYNYKLPDDFTGCVIAWNSNNLDSKVGGNYNYLYRLFRKSNLKPFERDISTEIYQAGSTPCNGVEGFNCYFPLQSYGFQPTNGVGYQPYRVVVLSFELLHAPATVCGPKKSTNLVKNKCVNFNFNGLTGTGVLTESNKKFLPFQQFGRDIADTTDAVRDPQTLEILDITPCSFGGVSVITPGTNTSNQVAVLYQGVNCTEVPVAIHADQLTPTWRVYSTGSNVFQTRAGCLIGAEHVNNSYECDIPIGAGICASYQTQTNSPRRARSVASQSIIAYTMSLGAENSVAYSNNSIAIPTNFTISVTTEILPVSMTKTSVDCTMYICGDSTECSNLLLQYGSFCTQLNRALTGIAVEQDKNTQEVFAQVKQIYKTPPIKDFGGFNFSQILPDPSKPSKRSFIEDLLFNKVTLADAGFIKQYGDCLGDIAARDLICAQKFNGLTVLPPLLTDEMIAQYTSALLAGTITSGWTFGAGAALQIPFAMQMAYRFNGIGVTQNVLYENQKLIANQFNSAIGKIQDSLSSTASALGKLQDVVNQNAQALNTLVKQLSSNFGAISSVLNDILSRLDPPEAEVQIDRLITGRLQSLQTYVTQQLIRAAEIRASANLAATKMSECVLGQSKRVDFCGKGYQLMSFPQSAPHGVVFLNVTYVPAQEKNFTTAPAICNDGKAHFPREGVFVSNGTNWFVTQRNFYEPQIITTDNTFVSGNCDVVIGIVNNTVYDPLQPELDSFKEELDKYFKNHTSPDVDLGDISGINASVVNIQKEIDRLNEVAKNLNESLIDLQELGKYEQYIK

SEQ ID NO: 1939 - protein, 1211 aa, Artificial Sequence
  SARS-CoV-2/Congo/94/2020__EPI_ISL_417947 spike protein (1-1211)(K986P_V987P_ H1048Q_H1064N_ H1083N_H1101N)
MFVFLVLLPLVSSQCVNLTTRTQLPPAYTNSFTRGVYYPDKVFRSSVLHSTQDLFLPFFSNVTWFHAIHVSGTNGTKRFDNPVLPFNDGVYFASTEKSNIIRGWIFGTTLDSKTQSLLIVNNATNVVIKVCEFQFCNDPFLGVYYHKNNKSWMESEFRVYSSANNCTFEYVSQPFLMDLEGKQGNFKNLREFVFKNIDGYFKIYSKHTPINLVRDLPQGFSALEPLVDLPIGINITRFQTLLALHRSYLTPGDSSSGWTAGAAAYYVGYLQPRTFLLKYNENGTITDAVDCALDPLSETKCTLKSFTVEKGIYQTSNFRVQPTESIVRFPNITNLCPFGEVFNATRFASVYAWNRKRISNCVADYSVLYNSASFSTFKCYGVSPTKLNDLCFTNVYADSFVIRGDEVRQIAPGQTGKIADYNYKLPDDFTGCVIAWNSNNLDSKVGGNYNYLYRLFRKSNLKPFERDISTEIYQAGSTPCNGVEGFNCYFPLQSYGFQPTNGVGYQPYRVVVLSFELLHAPATVCGPKKSTNLVKNKCVNFNFNGLTGTGVLTESNKKFLPFQQFGRDIADTTDAVRDPQTLEILDITPCSFGGVSVITPGTNTSNQVAVLYQGVNCTEVPVAIHADQLTPTWRVYSTGSNVFQTRAGCLIGAEHVNNSYECDIPIGAGICASYQTQTNSPRRARSVASQSIIAYTMSLGAENSVAYSNNSIAIPTNFTISVTTEILPVSMTKTSVDCTMYICGDSTECSNLLLQYGSFCTQLNRALTGIAVEQDKNTQEVFAQVKQIYKTPPIKDFGGFNFSQILPDPSKPSKRSFIEDILFNKVTLADAGFIKQYGDCLGDIAARDLICAQKFNGLTVLPPLLTDEMIAQYTSALLAGTITSGWTFGAGAALQIPFAMQMAYRFNGIGVTQNVLYENQKLIANQFNSAIGKIQDSLSSTASALGKLQDVVNQNAQALNTLVKQLSSNFGAISSVLNDILSRLDPPEAEVQIDRLITGRLQSLQTYVTQQLIRAAEIRASANLAATKMSECVLGQSKRVDFCGKGYQLMSFPQSAPHGVVFLNVTYVPAQEKNFTTAPAICNDGKAHFPREGVFVSNGTNWFVTQRNFYEPQIITTDNTFVSGNCDVVIGIVNNTVYDPLQPELDSFKEELDKYFKNHTSPDVDLGDISGINASVVNIQKEIDRLNEVAKNLNESLIDLQELGKYEQYIK

SEQ ID NO: 1940 - protein, 1211 aa, Artificial Sequence
  SARS-CoV-2/Congo/158/2020__EPI_ISL_417950 spike protein (1-1211)(K986P_V987P_ H1048Q_H1064N_ H1083N_H1101N)
MFVFLVLLPLVSSQCVNLTTRTQLPPAYTNSFTRGVYYPDKVFRSSVLHSTQDLFLPFFSNVTWFHAIHVSGTNGTKRFDNPVLPFNDGVYFASTEKSNIIRGWIFGTTLDSKTQSLLIVNNATNVVIKVCEFQFCNDPFLGVYYHKNNKSWMESEFRVYSSANNCTFEYVSQPFLMDLEGKQGNFKNLREFVFKNIDGYFKIYSKHTPINLVRDLPQGFSALEPLVDLPIGINITRFQTLLALHRSYLTPGDSSSGWTAGAAAYYVGYLQPRTFLLKYNENGTITDAVDCALDPLSETKCTLKSFTVEKGIYQTSNFRVQPTESIVRFPNITNLCPFGEVFNATRFASVYAWNRKRISNCVADYSVLYNSASFSTFKCYGVSPTKLNDLCFTNVYADSFVIRGDEVRQIAPGQTGKIADYNYKLPDDFTGCVIAWNSNNLDSKVGGNYNYLYRLFRKSNLKPFERDISTEIYQAGSTPCNGVEGFNCYFPLQSYGFQPTNGVGYQPYRVVVLSFELLHAPATVCGPKKSTNLVKNKCVNFNFNGLTGTGVLTESNKKFLPFQQFGRDIADTTDAVRDPQTLEILDITPCSFGGVSVITPGTNTSNQVAVLYQDVNCTEVPVAIHADQLTPTWRVYSTGSNVFQTRAGCLIGAEHVNNSYECDIPIGAGICASYQTQTNSPRRARSVASQSIIAYTMSLGAENSVAYSNNSIAIPTNFTISVTTEILPVSMTKTSVDCTMYICGDSTECSNLLLQYGSFCTQLNRALTGIAVEQDKNTQEVFAQVKQIYKTPPIKDFGGFNFSQILPDPSKPSKRSFIEDLLFNKVTLADAGFIKQYGDCLGDIAARDLICAQKFNGLTVLPPLLTDEMIAQYTSALLAGTITSGWTFGAGAALQIPFAMQMAYRFNGIGVTQNVLYENQKLIANQFNSAIGKIQDSLSSTASALGKLQDVVNQNAQALNTLVKQLSSNFGAISSVLNDILSRLDPPEAEVQIDRLITGRLQSLQTYVTQQLIRAAEIRASANLAATKMSECVLGQSKRVDFCGKGYQLMSFPQSAPHGVVFLNVTYVPAQEKNFTTAPAICNDGKAHFPREGVFVSNGTNWFVTQRNFYEPQIITTDNTFLSGNCDVVIGIVNNTVYDPLQPELDSFKEELDKYFKNHTSPDVDLGDISGINASVVNIQKEIDRLNEVAKNLNESLIDLQELGKYEQYIK

SEQ ID NO: 1941 - protein, 1211 aa, Artificial Sequence
  SARS-CoV-2/USA/UT-00034/2020__EPI_ISL_417977 spike protein (1-1211)(K986P_V987P_ H1048Q_H1064N_ H1083N_H1101N)
MFVFLVLLPLVSSQCVNLTTRTQLPPAYTNSFTRGVYYPDKVFRSSVLHSTQDLFLPFFSNVTWFHAIHVSGTNGTKRFDNPVLPFNDGVYFASTEKSNIIRGWIFGTTLDSKTQSLLIVNNATNVVIKVCEFQFCNDPFLGVYYYKNNKSWMESEFRVYSSANNCTFEYVSQPFLMDLEGKQGNFKNLREFVFKNIDGYFKIYSKHTPINLVRDLPQGFSALEPLVDLPIGINITRFQTLLALHRSYLTPGDSSSGWTAGAAAYYVGYLQPRTFLLKYNENGTITDAVDCALDPLSETKCTLKSFTVEKGIYQTSNFRVQPTESIVRFPNITNLCPFGEVFNATRFASVYAWNRKRISNCVADYSVLYNSASFSTFKCYGVSPTKLNDLCFTNVYADSFVIRGDEVRQIAPGQTGKIADYNYKLPDDFTGCVIAWNSNNLDSKVGGNYNYLYRLFRKSNLKPFERDISTEIYQAGSTPCNGVEGFNCYFPLQSYGFQPTNGVGYQPYRVVVLSFELLHAPATVCGPKKSTNLVKNKCVNFNFNGLTGTGVLTESNKKFLPFQQFGRDIADTTDAVRDPQTLEILDITPCSFGGVSVITPGTNTSNQVAVLYQGVNCTEVPVAIHADQLTPTWRVYSTGSNVFQTRAGCLIGAEHVNNSYECDIPIGAGICASYQTQTNSPRRARSVASQSIIAYTMSLGAENSVAYSNNSIAIPTNFTISVTTEILPVSMTKTSVDCTMYICGDSTECSNLLLQYGSFCTQLNRALTGIAVEQDKNTQEVFAQVKQIYKTPPIKDFGGFNFSQILPDPSKPSKRSFIEDLLFNKVTLADAGFIKQYGDCLGDIAARDLICAQKFNGLTVLPPLLTDEMIAQYTSALLAGTITSGWTFGAGAALQIPFAMQMAYRFNGIGVTQNVLYENQKLIANQFNSAIGKIQDSLSSTASALGKLQDVVNQNAQALNTLVKQLSSNFGAISSVLNDILSRLDPPEAEVQIDRLITGRLQSLQTYVTQQLIRAAEIRASANLAATKMSECVLGQSKRVDFCGKGYQLMSFPQSAPHGVVFLNVTYVPAQEKNFTTAPAICNDGKAHFPREGVFVSNGTNWFVTQRNFYEPQIITTDNTFVSGNCDVVIGIVNNTVYDPLQPELDSFKEELDKYFKNHTSPDVDLGDISGINASVVNIQKEIDRLNEVAKNLNESLIDLQELGKYEQYIK

SEQ ID NO: 1942 - protein, 1211 aa, Artificial Sequence
  SARS-CoV-2/USA/UT-00033/2020__EPI_ISL_417976 spike protein (1-1211)(K986P_V987P_ H1048Q_H1064N_ H1083N_H1101N)
MFVFLVLLPLVSSQCVNLTTRTQLPPAYTNSFTRGVYYPDKVFRSSVLHSTQDLFLPFFSNVTWFHAIHVSGTNGTKRFDNPVLPFNDGVYFASTEKSNIIRGWIFGTTLDSKTQSLLIVNNATNVVIKVCEFQFCNDPFLGVYYHKNNKSWMESEFRVYSSANNCTFEYVSQPFLMDLEGKQGNFKNLREFVFKNIDGYFKIYSKHTPINLVRDLPQGFSALEPLVDLPIGINITRFQTLLALHRSYLTPGDSSSGLTAGAAAYYVGYLQPRTFLLKYNENGTITDAVDCALDPLSETKCTLKSFTVEKGIYQTSNFRVQPTESIVRFPNITNLCPFGEVFNATRFASVYAWNRKRISNCVADYSVLYNSASFSTFKCYGVSPTKLNDLCFTNVYADSFVIRGDEVRQIAPGQTGKIADYNYKLPDDFTGCVIAWNSNNLDSKVGGNYNYLYRLFRKSNLKPFERDISTEIYQAGSTPCNGVEGFNCYFPLQSYGFQPTNGVGYQPYRVVVLSFELLHAPATVCGPKKSTNLVKNKCVNFNFNGLTGTGVLTESNKKFLPFQQFGRDIADTTDAVRDPQTLEILDITPCSFGGVSVITPGTNTSNQVAVLYQGVNCTEVPVAIHADQLTPTWRVYSTGSNVFQTRAGCLIGAEHVNNSYECDIPIGAGICASYQTQTNSPRRARSVASQSIIAYTMSLGAENSVAYSNNSIAIPTNFTISVTTEILPVSMTKTSVDCTMYICGDSTECSNLLLQYGSFCTQLNRALTGIAVEQDKNTQEVFAQVKQIYKTPPIKDFGGFNFSQILPDPSKPSKRSFIEDLLFNKVTLADAGFIKQYGDCLGDIAARDLICAQKFNGLTVLPPLLTDEMIAQYTSALLAGTITSGWTFGAGAALQIPFAMQMAYRFNGIGVTQNVLYENQKLIANQFNSAIGKIQDSLSSTASALGKLQDVVNQNAQALNTLVKQLSSNFGAISSVLNDILSRLDPPEAEVQIDRLITGRLQSLQTYVTQQLIRAAEIRASANLAATKMSECVLGQSKRVDFCGKGYQLMSFPQSAPHGVVFLNVTYVPAQEKNFTTAPAICNDGKAHFPREGVFVSNGTNWFVTQRNFYEPQIITTDNTFVSGNCDVVIGIVNNTVYDPLQPELDSFKEELDKYFKNHTSPDVDLGDISGINASVVNIQKEIDRLNEVAKNLNESLIDLQELGKYEQYIK

SEQ ID NO: 1943 - protein, 1211 aa, Artificial Sequence
  SARS-CoV-2/USA/WI-13/2020__EPI_ISL_417516 spike protein (1-1211)(K986P_V987P_ H1048Q_H1064N_ H1083N_H1101N)
MFVFLVLLPLVSSQCVNLTTRTQLPPAYTNSFTRGVYYPDKVFRSSVLHSTQDLFLPFFSNVTWFHAIHVSGTNGTKRFDNPVLPFNDGVYFASTEKSNIIRGWIFGTTLDSKTQSLLIVNNATNVVIKVCEFQFCNDPFLGVYYHKNNKSWMESEFRVYSSANNCTFEYVSQPFLMDLEGKQGNFKNLREFVFKNIDGYFKIYSKHTPINLVRDLPQGFSALEPLVDLPIGINITRFQTLLALHRSYLTPGDSSSGWTAGAAAYYVGYLQPRTFLLKYNENGTITDAVDCALDPLSETKCTLKSFTVEKGIYQTSNFRVLPTESIVRFPNITNLCPFGEVFNATRFASVYAWNRKRISNCVADYSVLYNSASFSTFKCYGVSPTKLNDLCFTNVYADSFVIRGDEVRQIAPGQTGKIADYNYKLPDDFTGCVIAWNSNNLDSKVGGNYNYLYRLFRKSNLKPFERDISTEIYQAGSTPCNGVEGFNCYFPLQSYGFQPTNGVGYQPYRVVVLSFELLHAPATVCGPKKSTNLVKNKCVNFNFNGLTGTGVLTESNKKFLPFQQFGRDIADTTDAVRDPQTLEILDITPCSFGGVSVITPGTNTSNQVAVLYQGVNCTEVPVAIHADQLTPTWRVYSTGSNVFQTRAGCLIGAEHVNNSYECDIPIGAGICASYQTQTNSPRRARSVASQSIIAYTMSLGAENSVAYSNNSIAIPTNFTISVTTEILPVSMTKTSVDCTMYICGDSTECSNLLLQYGSFCTQLNRALTGIAVEQDKNTQEVFAQVKQIYKTPPIKDFGGFNFSQILPDPSKPSKRSFIEDLLFNKVTLADAGFIKQYGDCLGDIAARDLICAQKFNGLTVLPPLLTDEMIAQYTSALLAGTITSGWTFGAGAALQIPFAMQMAYRFNGIGVTQNVLYENQKLIANQFNSAIGKIQDSLSSTASALGKLQDVVNQNAQALNTLVKQLSSNFGAISSVLNDILSRLDPPEAEVQIDRLITGRLQSLQTYVTQQLIRAAEIRASANLAATKMSECVLGQSKRVDFCGKGYQLMSFPQSAPHGVVFLNVTYVPAQEKNFTTAPAICNDGKAHFPREGVFVSNGTNWFVTQRNFYEPQIITTDNTFVSGNCDVVIGIVNNTVYDPLQPELDSFKEELDKYFKNHTSPDVDLGDISGINASVVNIQKEIDRLNEVAKNLNESLIDLQELGKYEQYIK

SEQ ID NO: 1944 - protein, 1210 aa, Artificial Sequence
  SARS-CoV-2/India/1-27/2020__EPI_ISL_413522 spike protein (1-1210)(K985P_V986P_ H1047Q_H1063N_ H1082N_H1100N)
MFVFLVLLPLVSSQCVNLTTRTQLPPAYTNSFTRGVYYPDKVFRSSVLHSTQDLFLPFFSNVTWFHAIHVSGTNGTKRFDNPVLPFNDGVYFASTEKSNIIRGWIFGTTLDSKTQSLLIVNNATNVVIKVCEFQFCNDPFLGVYHKNNKSWMESEFRVYSSANNCTFEYVSQPFLMDLEGKQGNFKNLREFVFKNIDGYFKIYSKHTPINLVRDLPQGFSALEPLVDLPIGINITRFQTLLALHRSYLTPGDSSSGWTAGAAAYYVGYLQPRTFLLKYNENGTITDAVDCALDPLSETKCTLKSFTVEKGIYQTSNFRVQPTESIVRFPNITNLCPFGEVFNATRFASVYAWNRKRISNCVADYSVLYNSASFSTFKCYGVSPTKLNDLCFTNVYADSFVIRGDEVIQIAPGQTGKIADYNYKLPDDFTGCVIAWNSNNLDSKVGGNYNYLYRLFRKSNLKPFERDISTEIYQAGSTPCNGVEGFNCYFPLQSYGFQPTNGVGYQPYRVVVLSFELLHAPATVCGPKKSTNLVKNKCVNFNFNGLTGTGVLTESNKKFLPFQQFGRDIADTTDAVRDPQTLEILDITPCSFGGVSVITPGTNTSNQVAVLYQDVNCTEVPVAIHADQLTPTWRVYSTGSNVFQTRAGCLIGAEHVNNSYECDIPIGAGICASYQTQTNSPRRARSVASQSIIAYTMSLGAENSVAYSNNSIAIPTNFTISVTTEILPVSMTKTSVDCTMYICGDSTECSNLLLQYGSFCTQLNRALTGIAVEQDKNTQEVFAQVKQIYKTPPIKDFGGFNFSQILPDPSKPSKRSFIEDLLFNKVTLADAGFIKQYGDCLGDIAARDLICAQKFNGLTVLPPLLTDEMIAQYTSALLAGTITSGWTFGAGAALQIPFAMQMAYRFNGIGVTQNVLYENQKLIANQFNSAIGKIQDSLSSTASALGKLQDVVNQNAQALNTLVKQLSSNFGAISSVLNDILSRLDPPEAEVQIDRLITGRLQSLQTYVTQQLIRAAEIRASANLAATKMSECVLGQSKRVDFCGKGYQLMSFPQSAPHGVVFLNVTYVPAQEKNFTTAPAICNDGKAHFPREGVFVSNGTNWFVTQRNFYEPQIITTDNTFVSGNCDVVIGIVNNTVYDPLQPELDSFKEELDKYFKNHTSPDVDLGDISGINASVVNIQKEIDRLNEVAKNLNESLIDLQELGKYEQYIK

SEQ ID NO: 1945 - protein, 1205 aa, Artificial Sequence
  SARS-CoV-2/pangolin/Guangxi/P4L/2017__EPI_ISL_410538 spike protein (1-1205)(K980P_V981P_ H1042Q_H1058N_ H1077N_H1095N)
MFVFLFVLPLVSSQCVNLTTRTGIPPGYTNSSTRGVYYPDKVFRSSILHLTQDLFLPFFSNVTWFNTINYQGGFKKFDNPVLPFNDGVYFASTEKSNIIRGWIFGTTLDARTQSLLIVNNATNVVIKVCEFQFCTDPFLGVYYHNNNKTWVENEFRVYSSANNCTFEYISQPFLMDLEGKQGNFKNLREFVFKNVDGYFKIYSKHTPIDLVRDLPRGFAALEPLVDLPIGINITRFQTLLALHRSYLTPGNLESGWTTGAAAYYVGYLQQRTFLLSYNQNGTITDAVDCSLDPLSETKCTLKSLTVEKGIYQTSNFRVQPTISIVRFPNITNLCPFGEVFNASKFASVYAWNRKRISNCVADYSVLYNSTSFSTFKCYGVSPTKLNDLCFTNVYADSFVVKGDEVRQIAPGQTGVIADYNYKLPDDFTGCVIAWNSVKQDALTGGNYGYLYRLFRKSKLKPFERDISTEIYQAGSTPCNGQVGLNCYYPLERYGFHPTTGVNYQPFRVVVLSFELLNGPATVCGPKLSTTLVKDKCVNFNFNGLTGTGVLTTSKKQFLPFQQFGRDISDTTDAVRDPQTLEILDITPCSFGGVSVITPGTNTSNQVAVLYQDVNCTEVPMAIHAEQLTPAWRVYSAGANVFQTRAGCLVGAEHVNNSYECDIPVGAGICASYHSMSSLRSVNQRSIIAYTMSLGAENSVAYSNNSIAIPTNFTISVTTEILPVSMTKTSVDCTMYICGDSIECSNLLLQYGSFCTQLNRALTGIAVEQDKNTQEVFAQVKQIYKTPPIKDFGGFNFSQILPDPSKPSKRSFIEDLLFNKVTLADAGFIKQYGDCLGDIAARDLICAQKFNGLTVLPPLLTDEMIAQYTSALLAGTITSGWTFGAGAALQIPFAMQMAYRFNGIGVTQNVLYENQKLIANQFNSAIGKIQDSLSSTASALGKLQDVVNQNAQALNTLVKQLSSNFGAISSVLNDILSRLDPPEAEVQIDRLITGRLQSLQTYVTQQLIRAAEIRASANLAATKMSECVLGQSKRVDFCGKGYQLMSFPQSAPHGVVFLNVTYVPAQEKNFTTAPAICNEGKAHFPREGVFVSNGTNWFITQRNFYEPQIITTDNTFVSGSCDVVIGIVNNTVYDPLQPELDSFKEELDKYFKNHTSPDVDLGDISGINASVVNIQKEIDRLNEVAKNLNESPIDLQELGKYEQYIK

SEQ ID NO: 1946 - protein, 1205 aa, Artificial Sequence
  SARS-CoV-2/pangolin/Guangxi/P5L/2017__EPI_ISL_410540 spike protein (1-1205)(K980P_V981P_ H1042Q_H1058N_ H1077N_H1095N)
MFVFLFVLPLVSSQCVNLTTRTGIPPGYTNSSTRGVYYPDKVFRSSILHLTQDLFLPFFSNVTWFNTINYQGGFKKFDNPVLPFNDGVYFASTEKSNIIRGWIFGTTLDARTQSLLIVNNATNVVIKVCEFQFCTDPFLGVYYHNNNKTWVENEFRVYSSANNCTFEYISQPFLMDLEGKQGNFKNLREFVFKNVDGYFKIYSKHTPIDLVRDLPRGFAALEPLVDLPIGINITRFQTLLALHRSYLTPGKLESGWTTGAAAYYVGYLQQRTFLLSYNQNGTITDAVDCSLDPLSETKCTLKSLTVEKGIYQTSNFRVQPTISIVRFPNITNLCPFGEVFNASKFASVYAWNRKRISNCVADYSVLYNSTSFSTFKCYGVSPTKLNDLCFTNVYADSFVVKGDEVRQIAPGQTGVIADYNYKLPDDFTGCVIAWNSVKQDALTGGNYGYLYRLFRKSKLKPFERDISTEIYQAGSTPCNGQVGLNCYYPLERYGFHPTTGVNYQPFRVVVLSFELLNGPATVCGPKLSTTLVKDKCVNFNFNGLTGTGVLTTSKKQFLPFQQFGRDISDTTDAVRDPQTLEILDITPCSFGGVSVITPGTNTSNQVAVLYQDVNCTEVPMAIHAEQLTPAWRVYSAGANVFQTRAGCLVGAEHVNNSYECDIPVGAGICASYHSMSSFRSVNQRSIIAYTMSLGAENSVAYSNNSIAIPTNFTISVTTEILPVSMTKTSVDCTMYICGDSIECSNLLLQYGSFCTQLNRALTGIAVEQDKNTQEVFAQVKQIYKTPPIKDFGGFNFSQILPDPSKPSKRSFIEDLLFNKVTLADAGFIKQYGDCLGDIAARDLICAQKFNGLTVLPPLLTDEMIAQYTSALLAGTITSGWTFGAGAALQIPFAMQMAYRFNGIGVTQNVLYENQKLIANQFNSAIGKIQDSLSSTASALGKLQDVVNQNAQALNTLVKQLSSNFGAISSVLNDILSRLDPPEAEVQIDRLITGRLQSLQTYVTQQLIRAAEIRASANLAATKMSECVLGQSKRVDFCGKGYQLMSFPQSAPHGVVFLNVTYVPAQEKNFTTAPAICNEGKAHFPREGVFVSNGTNWFITQRNFYEPQIITTDNTFVSGSCDVVIGIVNNTVYDPLQPELDSFKEELDKYFKNHTSPDVDLGDISGINASVVNIQKEIDRLNEVAKNLNESLIDLQELGKYEQYIK

SEQ ID NO: 1947 - protein, 1205 aa, Artificial Sequence
  SARS-CoV-2/pangolin/Guangxi/P5E/2017__EPI_ISL_410541 spike protein (1-1205)(K980P_V981P_ H1042Q_H1058N_ H1077N_H1095N)
MFVFLFVLPLVSSQCVNLTTRTGIPPGYTNSSTRGVYYPDKVFRSSILHLTQDLFLPFFSNVTWFNTITYQGGSKKFDNPVLPFNDGVYFASTEKSNIIRGWIFGTTLDARTQSLLIVNNATNVVIKVCEFQFCTDPFLGVYYHNNNKTWVENEFRVYSSANNCTFEYISQPFLMDLEGKQGNFKNLREFVFKNVDGYFKIYSKHTPIDLVRDLPRGFAALEPLVDLPIGINITRFQTLLALHRSYLTPGKLESGWTTGAAAYYVGYLQQRTFLLSYNQNGTITDAVDCSLDPLSETKCTLKSLTVEKGIYQTSNFRVQPTISIVRFPNITNLCPFGEVFNASKFASVYAWNRKRISNCVADYSVLYNSTSFSTFKCYGVSPTKLNDLCFTNVYADSFVVKGDEVRQIAPGQTGVIADYNYKLPDDFTGCVIAWNSVKQDALTGDNYGYLYRLFRKSKLKPFERDISTEIYQAGSTPCNGQVGLNCYYPLERYGFHPTTGVNYQPFRVVVLSFELLNGPATVCGPKLSTTLVKDKCVNFNFNGLTGTGVLTTSKKQFLPFQQFGRDISDTTDAVRDPQTLEILDITPCSFGGVSVITPGTNTSNQVAVLYQDVNCTEVPMAIHAEQLTPAWRVYSAGANVFQTRAGCLVGAEHVNNSYECDIPVGAGICASYHSMSSFRSVNQRSIIAYTMSLGAENSVAYSNNSIAIPTNFTISVTTEILPVSMTKTSVDCTMYICGDSIECSNLLLQYGSFCTQLNRALTGIAVEQDKNTQEVFAQVKQIYKTPPIKDFGGFNFSQILPDPSKPSKRSFIEDLLFNKVTLADAGFIKQYGDCLGDIAARDLICAQKFNGLTVLPPLLTDEMIAQYTSALLAGTITSGWTFGAGAALQIPFAMQMAYRFNGIGVTQNVLYENQKLIANQFNSAIGKIQDSLSSTASALGKLQDVVNQNAQALNTLVKQLSSNFGAISSVLNDILSRLDPPEAEVQIDRLITGRLQSLQTYVTQQLIRAAEIRASANLAATKMSECVLGQSKRVDFCGKGYQLMSFPQSAPHGVVFLNVTYVPAQEKNFTTAPAICNEGKAHFPREGVFVSNGTNWFITQRNFYEPQIITTDNTFVSGSCDVVIGIVNNTVYDPLQPELDSFKEELDKYFKNHTSPDVDLGDISGINASVVNIQKEIDRLNEVAKNLNESLIDLQELGKYEQYIK

SEQ ID NO: 1948 - protein, 1203 aa, Artificial Sequence
  SARS-CoV-2/pangolin/Guangxi/P1E/2017__EPI_ISL_410539 spike protein (1-1203)(K978P_V979P_ H1040Q_H1056N_ H1075N_H1093N)
MFVFLFVLPLVSSQCVNLTTRTGIQPGYTNSSTRGVYYPDKVFRSSILHLTQDLFLPFFSNVTWFNTINYQGGFKKFDNPVLPFNDGVYFASTEKSNIIRGWIFGTTLDARTQSLLIVNNATNVVIKVCEFQFCTDPFLGVYYHNNNKTWVENEFRVYSSANNCTFEYISQPFLMDLEGKQGNFKNLREFVFKNVDGYFKIYSKHTPIDLVRDLPRGFAALEPLVDLPIGINITRFQTLLALHRSYLTPGKLESGWTTGAAAYYVGYLQQRTFLLSYNQNGTITDAVDCSLDPLSETKCTLKSLTVEKGIYQTSNFRVQPTISIVRFPNITNLCPFGEVFNASKFASVYAWNRKRISNCVADYSVLYNSTSFSTFKCYGVSPTKLNDLCFTNVYADSFVVKGDEVRQIAPGQTGVIADYNYKLPDDFTGCVIAWNSVKQDALTGGNYLYRLFRKSKLKPFERDISTEIYQAGSTPCNGQVGLNCYYPLERYGFHPTTGVNYQPFRVVVLSFELLNGPATVCGPKLSTTLVKDKCVNFNFNGLTGTGVLTTSKKQFLPFQQFGRDISDTTDAVRDPQTLEILDITPCSFGGVSVITPGTNTSNQVAVLYQDVNCTEVPMAIHAEQLTPAWRVYSAGANVFQTRAGCLVGAEHVNNSYECDIPVGAGICASYHSMSSLRSVNQRSIIAYTMSLGAENSVAYSNNSIAIPTNFTISVTTEILPVSMTKTSVDCTMYICGDSIECSNLLLQYGSFCTQLNRALTGIAVEQDKNTQEVFAQVKQIYKTPPIKDFGGFNFSQILPDPSKPSKRSFIEDLLFNKVTLADAGFIKQYGDCLGDIAARDLICAQKFNGLTVLPPLLTDEMIAQYTSALLAGTITSGWTFGAGAALQIPFAMQMAYRFNGIGVTQNVLYENQKLIANQFNSAIGKIQDSLSSTASALGKLQDVVNQNAQALNTLVKQLSSNFGAISSVLNDILSRLDPPEAEVQIDRLITGRLQSLQTYVTQQLIRAAEIRASANLAATKMSECVLGQSKRVDFCGKGYQLMSFPQSAPHGVVFLNVTYVPAQEKNFTTAPAICNEGKAHFPREGVFVSNGTNWFITQRNFYEPQIITTDNTFVSGSCDVVIGIVNNTVYDPLQPELDSFKEELDKYFKNHTSPDVDLGDISGINASVVNIQKEIDRLNEVAKNLNESLIDLQELGKYEQYIK

SEQ ID NO: 1949 - protein, 1211 aa, Artificial Sequence
  SARS-CoV-2/Wuhan/WIV05/2019__EPI_ISL_402128 spike protein (1-1211)(I712C_T1077C)
MFVFLVLLPLVSSQCVNLTTRTQLPPAYTNSFTRGVYYPDKVFRSSVLHSTQDLFLPFFSNVTWFHAIHVSGTNGTKRFDNPVLPFNDGVYFASTEKSNIIRGWIFGTTLDSKTQSLLIVNNATNVVIKVCEFQFCNDPFLGVYYHKNNKSWMESEFRVYSSANNCTFEYVSQPFLMDLEGKQGNFKNLREFVFKNIDGYFKIYSKHTPINLVRDLPQGFSALEPLVDLPIGINITRFQTLLALHRSYLTPGDSSSGWTAGAAAYYVGYLQPRTFLLKYNENGTITDAVDCALDPLSETKCTLKSFTVEKGIYQTSNFRVQPTESIVRFPNITNLCPFGEVFNATRFASVYAWNRKRISNCVADYSVLYNSASFSTFKCYGVSPTKLNDLCFTNVYADSFVIRGDEVRQIAPGQTGKIADYNYKLPDDFTGCVIAWNSNNLDSKVGGNYNYLYRLFRKSNLKPFERDISTEIYQAGSTPCNGVEGFNCYFPLQSYGFQPTNGVGYQPYRVVVLSFELLHAPATVCGPKKSTNLVKNKCVNFNFNGLTGTGVLTESNKKFLPFQQFGRDIADTTDAVRDPQTLEILDITPCSFGGVSVITPGTNTSNQVAVLYQDVNCTEVPVAIHADQLTPTWRVYSTGSNVFQTRAGCLIGAEHVNNSYECDIPIGAGICASYQTQTNSPRRARSVASQSIIAYTMSLGAENSVAYSNNSCAIPTNFTISVTTEILPVSMTKTSVDCTMYICGDSTECSNLLLQYGSFCTQLNRALTGIAVEQDKNTQEVFAQVKQIYKTPPIKDFGGFNFSQILPDPSKPSKRSFIEDLLFNKVTLADAGFIKQYGDCLGDIAARDLICAQKFNGLTVLPPLLTDEMIAQYTSALLAGTITSGWTFGAGAALQIPFAMQMAYRFNGIGVTQNVLYENQKLIANQFNSAIGKIQDSLSSTASALGKLQDVVNQNAQALNTLVKQLSSNFGAISSVLNDILSRLDKVEAEVQIDRLITGRLQSLQTYVTQQLIRAAEIRASANLAATKMSECVLGQSKRVDFCGKGYHLMSFPQSAPHGVVFLHVTYVPAQEKNFTCAPAICHDGKAHFPREGVFVSNGTHWFVTQRNFYEPQIITTDNTFVSGNCDVVIGIVNNTVYDPLQPELDSFKEELDKYFKNHTSPDVDLGDISGINASVVNIQKEIDRLNEVAKNLNESLIDLQELGKYEQYIK

SEQ ID NO: 1950 - protein, 1207 aa, Artificial Sequence
  SARS-CoV-2/bat/Yunnan/RaTG13/2013__EPI_ISL_402131 spike protein (1-1207)(I708C_T1073C)
MFVFLVLLPLVSSQCVNLTTRTQLPPAYTNSSTRGVYYPDKVFRSSVLHLTQDLFLPFFSNVTWFHAIHVSGTNGIKRFDNPVLPFNDGVYFASTEKSNIIRGWIFGTTLDSKTQSLLIVNNATNVVIKVCEFQFCNDPFLGVYYHKNNKSWMESEFRVYSSANNCTFEYVSQPFLMDLEGKQGNFKNLREFVFKNIDGYFKIYSKHTPINLVRDLPPGFSALEPLVDLPIGINITRFQTLLALHRSYLTPGDSSSGWTAGAAAYYVGYLQPRTFLLKYNENGTITDAVDCALDPLSETKCTLKSFTVEKGIYQTSNFRVQPTDSIVRFPNITNLCPFGEVFNATTFASVYAWNRKRISNCVADYSVLYNSTSFSTFKCYGVSPTKLNDLCFTNVYADSFVITGDEVRQIAPGQTGKIADYNYKLPDDFTGCVIAWNSKHIDAKEGGNFNYLYRLFRKANLKPFERDISTEIYQAGSKPCNGQTGLNCYYPLYRYGFYPTDGVGHQPYRVVVLSFELLNAPATVCGPKKSTNLVKNKCVNFNFNGLTGTGVLTESNKKFLPFQQFGRDIADTTDAVRDPQTLEILDITPCSFGGVSVITPGTNASNQVAVLYQDVNCTEVPVAIHADQLTPTWRVYSTGSNVFQTRAGCLIGAEHVNNSYECDIPIGAGICASYQTQTNSRSVASQSIIAYTMSLGAENSVAYSNNSCAIPTNFTISVTTEILPVSMTKTSVDCTMYICGDSTECSNLLLQYGSFCTQLNRALTGIAVEQDKNTQEVFAQVKQIYKTPPIKDFGGFNFSQILPDPSKPSKRSFIEDLLFNKVTLADAGFIKQYGDCLGDIAARDLICAQKFNGLTVLPPLLTDEMIAQYTSALLAGTITSGWTFGAGAALQIPFAMQMAYRFNGIGVTQNVLYENQKLIANQFNSAIGKIQDSLSSTASALGKLQDVVNQNAQALNTLVKQLSSNFGAISSVLNDILSRLDKVEAEVQIDRLITGRLQSLQTYVTQQLIRAAEIRASANLAATKMSECVLGQSKRVDFCGKGYHLMSFPQSAPHGVVFLHVTYVPAQEKNFTCAPAICHDGKAHFPREGVFVSNGTHWFVTQRNFYEPQIITTDNTFVSGSCDVVIGIVNNTVYDPLQPELDSFKEELDKYFKNHTSPDVDLGDISGINASVVNIQKEIDRLNEVAKNLNESLIDLQELGKYEQYIK

SEQ ID NO: 1951 - protein, 1211 aa, Artificial Sequence
  SARS-CoV-2/Wuhan/HBCDC-HB-01/2019__EPI_ISL_402132 spike protein (1-1211)(I712C_T1077C)
MFVFLVLLPLVSSQCVNLTTRTQLPPAYTNSITRGVYYPDKVFRSSVLHSTQDLFLPFFSNVTWFHAIHVSGTNGTKRFDNPVLPFNDGVYFASTEKSNIIRGWIFGTTLDSKTQSLLIVNNATNVVIKVCEFQFCNDPFLGVYYHKNNKSWMESEFRVYSSANNCTFEYVSQPFLMDLEGKQGNFKNLREFVFKNIDGYFKIYSKHTPINLVRDLPQGFSALEPLVDLPIGINITRFQTLLALHRSYLTPGDSSSGWTAGAAAYYVGYLQPRTFLLKYNENGTITDAVDCALDPLSETKCTLKSFTVEKGIYQTSNFRVQPTESIVRFPNITNLCPFGEVFNATRFASVYAWNRKRISNCVADYSVLYNSASFSTFKCYGVSPTKLNDLCFTNVYADSFVIRGDEVRQIAPGQTGKIADYNYKLPDDFTGCVIAWNSNNLDSKVGGNYNYLYRLFRKSNLKPFERDISTEIYQAGSTPCNGVEGFNCYFPLQSYGFQPTNGVGYQPYRVVVLSFELLHAPATVCGPKKSTNLVKNKCVNFNFNGLTGTGVLTESNKKFLPFQQFGRDIADTTDAVRDPQTLEILDITPCSFGGVSVITPGTNTSNQVAVLYQDVNCTEVPVAIHADQLTPTWRVYSTGSNVFQTRAGCLIGAEHVNNSYECDIPIGAGICASYQTQTNSPRRARSVASQSIIAYTMSLGAENSVAYSNNSCAIPTNFTISVTTEILPVSMTKTSVDCTMYICGDSTECSNLLLQYGSFCTQLNRALTGIAVEQDKNTQEVFAQVKQIYKTPPIKDFGGFNFSQILPDPSKPSKRSFIEDLLFNKVTLADAGFIKQYGDCLGDIAARDLICAQKFNGLTVLPPLLTDEMIAQYTSALLAGTITSGWTFGAGAALQIPFAMQMAYRFNGIGVTQNVLYENQKLIANQFNSAIGKIQDSLSSTASALGKLQDVVNQNAQALNTLVKQLSSNFGAISSVLNDILSRLDKVEAEVQIDRLITGRLQSLQTYVTQQLIRAAEIRASANLAATKMSECVLGQSKRVDFCGKGYHLMSFPQSAPHGVVFLHVTYVPAQEKNFTCAPAICHDGKAHFPREGVFVSNGTHWFVTQRNFYEPQIITTDNTFVSGNCDVVIGIVNNTVYDPLQPELDSFKEELDKYFKNHTSPDVDLGDISGINASVVNIQKEIDRLNEVAKNLNESLIDLQELGKYEQYIK

SEQ ID NO: 1952 - protein, 1211 aa, Artificial Sequence
  SARS-CoV-2/Guangdong/20SF028/2020__EPI_ISL_403936 spike protein (1-1211)(I712C_T1077C)
MFVFLVLLPLVSSQCVNLTTRTQLPPAYTNSFTRGVYYPDKVFRSSVLYSTQDLFLPFFSNVTWFHAIHVSGTNGTKRFDNPVLPFNDGVYFASTEKSNIIRGWIFGTTLDSKTQSLLIVNNATNVVIKVCEFQFCNDPFLGVYYHKNNKSWMESEFRVYSSANNCTFEYVSQPFLMDLEGKQGNFKNLREFVFKNIDGYFKIYSKHTPINLVRDLPQGFSALEPLVDLPIGINITRFQTLLALHRSYLTPGDSSSGWTAGAAAYYVGYLQPRTFLLKYNENGTITDAVDCALDPLSETKCTLKSFTVEKGIYQTSNFRVQPTESIVRFPNITNLCPFGEVFNATRFASVYAWNRKRISNCVADYSVLYNSASFSTFKCYGVSPTKLNDLCFTNVYADSFVIRGDEVRQIAPGQTGKIADYNYKLPDDFTGCVIAWNSNNLDSKVGGNYNYLYRLFRKSNLKPFERDISTEIYQAGSTPCNGVEGFNCYFPLQSYGFQPTNGVGYQPYRVVVLSFELLHAPATVCGPKKSTNLVKNKCVNFNFNGLTGTGVLTESNKKFLPFQQFGRDIADTTDAVRDPQTLEILDITPCSFGGVSVITPGTNTSNQVAVLYQDVNCTEVPVAIHADQLTPTWRVYSTGSNVFQTRAGCLIGAEHVNNSYECDIPIGAGICASYQTQTNSPRRARSVASQSIIAYTMSLGAENSVAYSNNSCAIPTNFTISVTTEILPVSMTKTSVDCTMYICGDSTECSNLLLQYGSFCTQLNRALTGIAVEQDKNTQEVFAQVKQIYKTPPIKDFGGFNFSQILPDPSKPSKRSFIEDLLFNKVTLADAGFIKQYGDCLGDIAARDLICAQKFNGLTVLPPLLTDEMIAQYTSALLAGTITSGWTFGAGAALQIPFAMQMAYRFNGIGVTQNVLYENQKLIANQFNSAIGKIQDSLSSTASALGKLQDVVNQNAQALNTLVKQLSSNFGAISSVLNDILSRLDKVEAEVQIDRLITGRLQSLQTYVTQQLIRAAEIRASANLAATKMSECVLGQSKRVDFCGKGYHLMSFPQSAPHGVVFLHVTYVPAQEKNFTCAPAICHDGKAHFPREGVFVSNGTHWFVTQRNFYEPQIITTDNTFVSGNCDVVIGIVNNTVYDPLQPELDSFKEELDKYFKNHTSPDVDLGDISGINASVVNIQKEIDRLNEVAKNLNESLIDLQELGKYEQYIK

SEQ ID NO: 1953 - protein, 1211 aa, Artificial Sequence
  SARS-CoV-2/Shenzhen/SZTH-001/2020__EPI_ISL_406592 spike protein (1-1211)(I712C_T1077C)
MFVFLVLLPLVSSQCVNLTTRTQLPPAYTNSFTRGVYYPDKVFRSSVLHSTQDLFLPFFSNVTWFHAIHVSGTNGTKRFDNPVLPFNDGVYFASTEKSNIIRGWIFGTTLDSKTQSLLIVNNATNVVIKVCEFQFCNDPFLGVYYHKNNKSWMESEFRVYSSANNCTFEYVSQPFLMDLEGKQGNFKNLREFVFKNIDGYFKIYSKHTPINLVRDLPQGFSALEPLVDLPIGINITRFQTLLALHRSYLTPGDSSSGWTAGAAAYYVGYLQPRTFLLKYNENGTITDAVDCALDPLSETKCTLKSFTVEKGIYQTSNFRVQPTESIVRFPNITNLCPFGEVFNATRFASVYAWNRKRISNCVADYSVLYNSASFSTFKCYGVSPTKLNDLCFTNVYADSFVIRGDEVRQIAPGQTGKIADYNYKLPDDFTGCVIAWNSNNLDSKVGGNYNYLYRLFRKSNLKPFERDISTEIYQAGSTPCNGVEGFNCYFPLQSYGFQPTNGVGYQPYRVVVLSFELLHAPATVCGPKKSTNLVKNKCVNFNFNGLTGTGVLTESNKKFLPFQQFGRDIADTTDAVRDPQTLEILDITPCSFGGVSVITPGTNTSNQVAVLYQDVNCTEVPVAIHADQLTPTWRVYSTGSNVFQTRAGCLIGAEHVNNSYECDIPIGAGICASYQTQTNSPRRARSVASQSIIAYTMSLGAENSVAYSNNSCAIPTNFTISVTTEILPVSMTKTSVDCTMYICGDSTECSNLLLQYGSFCTQLNRALTGIAVEQDKNTQEVFAQVKQIYKTPPIKDFGGFNFSQILPDPSKPSKRSFIEDLLFNKVTLADAGFIKQYGDCLGDIAARDLICAQKFNGLTVLPPLLTDEMIAQYTSALLAGTITSGWTFGAGAALQIPFAMQMAYRFNGIGVTQNVLYENQKLIANQFNSAIGKIQDSLSSTASALGKLQDVVNQNAQALNTLVKQLSSNFGAISSVLNDILSRLDKVEAEVQIDRLITGRLQSLQTYVTQQLIRAAEIRASANLAATKMSECVLGQSKRVDFCGKGYHLMSFPQSAPHGVVFLHVTYVPAQEKNFTCAPAICHDGKAHFPREGVFVSNGTHWFVTQRNFYEPQIITTDNTFVSGNCDVLIGIVNNTVYDPLQPELDSFKEELDKYFKNHTSPDVDLGDISGINASVVNIQKEIDRLNEVAKNLNESLIDLQELGKYEQYIK

SEQ ID NO: 1954 - protein, 1211 aa, Artificial Sequence
  SARS-CoV-2/Shenzhen/SZTH-004/2020__EPI_ISL_406595 spike protein (1-1211)(I712C_T1077C)
MFVFLVLLPLVSSQCVNLTTRTQLPPAYTNSFTRGVYYPDKVFRSSVLHSTQDLFLPFFSNVTWFHAIHVSGTNGTKRFDNPVLPFNDGVYFASTEKSNIIRGWIFGTTLDSKTQSLLIVNNATNVVIKVCEFQFCNDPFLGVYYHKNNKSWMESEFRVYSSANNCTFEYVSQPFLMDLEGKQGNFKNLREFVFKNIDGYFKIYSKHTPINLVRDLPQGFSALEPLVDLPIGINITRFQTLLALHRSYLTPGDSSSGWTAGAAAYYVGYLQPRTFLLKYNENGTITDAVDCALDPLSETKCTLKSFTVEKGIYQTSNFRVQPTESIVRFPNITNLCPFGEVFNATRFASVYAWDRKRISNCVAYYSVLYNSASFSTFKCYGVSPTKLNDLCFTNVYADSFVIRGDEVRQIAPGQTGKIADYNYKLPDDFTGCVIAWNSNNLDSKVGGNYNYLYRLFRKSNLKPFERDISTEIYQAGSTPCNGVEGFNCYFPLQSYGFQPTNGVGYQPYRVVVLSFELLHAPATVCGPKKSTNLVKNKCVNFNFNGLTGTGVLTESNKKFLPFQQFGRDIADTTDAVRDPQTLEILDITPCSFGGVSVITPGTNTSNQVAVLYQDVNCTEVPVAIHADQLTPTWRVYSTGSNVFQTRAGCLIGAEHVNNSYECDIPIGAGICASYQTQTNSPRRARSVASQSIIAYTMSLGAENSVAYSNNSCAIPTNFTISVTTEILPVSMTKTSVDCTMYICGDSTECSNLLLQYGSFCTQLNRALTGIAVEQDKNTQEVFAQVKQIYKTPPIKDFGGFNFSQILPDPSKPSKRSFIEDLLFNKVTLADAGFIKQYGDCLGDIAARDLICAQKFNGLTVLPPLLTDEMIAQYTSALLAGTITSGWTFGAGAALQIPFAMQMAYRFNGIGVTQNVLYENQKLIANQFNSAIGKIQDSLSSTASALGKLQDVVNQNAQALNTLVKQLSSNFGAISSVLNDILSRLDKVEAEVQIDRLITGRLQSLQTYVTQQLIRAAEIRASANLAATKMSECVLGQSKRVDFCGKGYHLMSFPQSAPHGVVFLHVTYVPAQEKNFTCAPAICHDGKAHFPREGVFVSNGTHWFVTQRNFYEPQIITTDNTFVSGNCDVVIGIVNNTVYDPLQPELDSFKEELDKYFKNHTSPDVDLGDISGINASVVNIQKEIDRLNEVAKNLNESLIDLQELGKYEQYIK

SEQ ID NO: 1955 - protein, 1211 aa, Artificial Sequence
  SARS-CoV-2/France/IDF0372/2020__EPI_ISL_406596 spike protein (1-1211)(I712C_T1077C)
MFVFLVLLPLVSSQCVNLTTRTQLPPAYTNSFTRGVYYPDKVFRSSVLHSTQDLFLPFFSNVTWFHAIHVSGTNGTKRFDNPVLPFNDGVYFASTEKSNIIRGWIFGTTLDSKTQSLLIVNNATNVVIKVCEFQFCNDPFLGVYYHKNNKSWMESEFRVYSSANNCTFEYVSQPFLMDLEGKQGNFKNLREFVFKNIDGYFKIYSKHTPINLVRDLPQGFSALEPLVDLPIGINITRFQTLLALHRSYLTPGDSSSGWTAGAAAYYVGYLQPRTFLLKYNENGTITDAVDCALDPLSETKCTLKSFTVEKGIYQTSNFRVQPTESIVRFPNITNLCPFGEVFNATRFASVYAWNRKRISNCVADYSFLYNSASFSTFKCYGVSPTKLNDLCFTNVYADSFVIRGDEVRQIAPGQTGKIADYNYKLPDDFTGCVIAWNSNNLDSKVGGNYNYLYRLFRKSNLKPFERDISTEIYQAGSTPCNGVEGFNCYFPLQSYGFQPTNGVGYQPYRVVVLSFELLHAPATVCGPKKSTNLVKNKCVNFNFNGLTGTGVLTESNKKFLPFQQFGRDIADTTDAVRDPQTLEILDITPCSFGGVSVITPGTNTSNQVAVLYQDVNCTEVPVAIHADQLTPTWRVYSTGSNVFQTRAGCLIGAEHVNNSYECDIPIGAGICASYQTQTNSPRRARSVASQSIIAYTMSLGAENSVAYSNNSCAIPTNFTISVTTEILPVSMTKTSVDCTMYICGDSTECSNLLLQYGSFCTQLNRALTGIAVEQDKNTQEVFAQVKQIYKTPPIKDFGGFNFSQILPDPSKPSKRSFIEDLLFNKVTLADAGFIKQYGDCLGDIAARDLICAQKFNGLTVLPPLLTDEMIAQYTSALLAGTITSGWTFGAGAALQIPFAMQMAYRFNGIGVTQNVLYENQKLIANQFNSAIGKIQDSLSSTASALGKLQDVVNQNAQALNTLVKQLSSNFGAISSVLNDILSRLDKVEAEVQIDRLITGRLQSLQTYVTQQLIRAAEIRASANLAATKMSECVLGQSKRVDFCGKGYHLMSFPQSAPHGVVFLHVTYVPAQEKNFTCAPAICHDGKAHFPREGVFVSNGTHWFVTQRNFYEPQIITTDNTFVSGNCDVVIGIVNNTVYDPLQPELDSFKEELDKYFKNHTSPDVDLGDISGINASVVNIQKEIDRLNEVAKNLNESLIDLQELGKYEQYIK

SEQ ID NO: 1956 - protein, 1211 aa, Artificial Sequence
  SARS-CoV-2/Australia/VIC01/2020__EPI_ISL_406844 spike protein (1-1211)(I712C_T1077C)
MFVFLVLLPLVSSQCVNLTTRTQLPPAYTNSFTRGVYYPDKVFRSSVLHSTQDLFLPFFSNVTWFHAIHVSGTNGTKRFDNPVLPFNDGVYFASTEKSNIIRGWIFGTTLDSKTQSLLIVNNATNVVIKVCEFQFCNDPFLGVYYHKNNKSWMESEFRVYSSANNCTFEYVSQPFLMDLEGKQGNFKNLREFVFKNIDGYFKIYSKHTPINLVRDLPQGFSALEPLVDLPIGINITRFQTLLALHRRYLTPGDSSSGWTAGAAAYYVGYLQPRTFLLKYNENGTITDAVDCALDPLSETKCTLKSFTVEKGIYQTSNFRVQPTESIVRFPNITNLCPFGEVFNATRFASVYAWNRKRISNCVADYSVLYNSASFSTFKCYGVSPTKLNDLCFTNVYADSFVIRGDEVRQIAPGQTGKIADYNYKLPDDFTGCVIAWNSNNLDSKVGGNYNYLYRLFRKSNLKPFERDISTEIYQAGSTPCNGVEGFNCYFPLQSYGFQPTNGVGYQPYRVVVLSFELLHAPATVCGPKKSTNLVKNKCVNFNFNGLTGTGVLTESNKKFLPFQQFGRDIADTTDAVRDPQTLEILDITPCSFGGVSVITPGTNTSNQVAVLYQDVNCTEVPVAIHADQLTPTWRVYSTGSNVFQTRAGCLIGAEHVNNSYECDIPIGAGICASYQTQTNSPRRARSVASQSIIAYTMSLGAENSVAYSNNSCAIPTNFTISVTTEILPVSMTKTSVDCTMYICGDSTECSNLLLQYGSFCTQLNRALTGIAVEQDKNTQEVFAQVKQIYKTPPIKDFGGFNFSQILPDPSKPSKRSFIEDLLFNKVTLADAGFIKQYGDCLGDIAARDLICAQKFNGLTVLPPLLTDEMIAQYTSALLAGTITSGWTFGAGAALQIPFAMQMAYRFNGIGVTQNVLYENQKLIANQFNSAIGKIQDSLSSTASALGKLQDVVNQNAQALNTLVKQLSSNFGAISSVLNDILSRLDKVEAEVQIDRLITGRLQSLQTYVTQQLIRAAEIRASANLAATKMSECVLGQSKRVDFCGKGYHLMSFPQSAPHGVVFLHVTYVPAQEKNFTCAPAICHDGKAHFPREGVFVSNGTHWFVTQRNFYEPQIITTDNTFVSGNCDVVIGIVNNTVYDPLQPELDSFKEELDKYFKNHTSPDVDLGDISGINASVVNIQKEIDRLNEVAKNLNESLIDLQELGKYEQYIK

SEQ ID NO: 1957 - protein, 1211 aa, Artificial Sequence
  SARS-CoV-2/Germany/BavPat1/2020__EPI_ISL_406862 spike protein (1-1211)(I712C_T1077C)
MFVFLVLLPLVSSQCVNLTTRTQLPPAYTNSFTRGVYYPDKVFRSSVLHSTQDLFLPFFSNVTWFHAIHVSGTNGTKRFDNPVLPFNDGVYFASTEKSNIIRGWIFGTTLDSKTQSLLIVNNATNVVIKVCEFQFCNDPFLGVYYHKNNKSWMESEFRVYSSANNCTFEYVSQPFLMDLEGKQGNFKNLREFVFKNIDGYFKIYSKHTPINLVRDLPQGFSALEPLVDLPIGINITRFQTLLALHRSYLTPGDSSSGWTAGAAAYYVGYLQPRTFLLKYNENGTITDAVDCALDPLSETKCTLKSFTVEKGIYQTSNFRVQPTESIVRFPNITNLCPFGEVFNATRFASVYAWNRKRISNCVADYSVLYNSASFSTFKCYGVSPTKLNDLCFTNVYADSFVIRGDEVRQIAPGQTGKIADYNYKLPDDFTGCVIAWNSNNLDSKVGGNYNYLYRLFRKSNLKPFERDISTEIYQAGSTPCNGVEGFNCYFPLQSYGFQPTNGVGYQPYRVVVLSFELLHAPATVCGPKKSTNLVKNKCVNFNFNGLTGTGVLTESNKKFLPFQQFGRDIADTTDAVRDPQTLEILDITPCSFGGVSVITPGTNTSNQVAVLYQGVNCTEVPVAIHADQLTPTWRVYSTGSNVFQTRAGCLIGAEHVNNSYECDIPIGAGICASYQTQTNSPRRARSVASQSIIAYTMSLGAENSVAYSNNSCAIPTNFTISVTTEILPVSMTKTSVDCTMYICGDSTECSNLLLQYGSFCTQLNRALTGIAVEQDKNTQEVFAQVKQIYKTPPIKDFGGFNFSQILPDPSKPSKRSFIEDLLFNKVTLADAGFIKQYGDCLGDIAARDLICAQKFNGLTVLPPLLTDEMIAQYTSALLAGTITSGWTFGAGAALQIPFAMQMAYRFNGIGVTQNVLYENQKLIANQFNSAIGKIQDSLSSTASALGKLQDVVNQNAQALNTLVKQLSSNFGAISSVLNDILSRLDKVEAEVQIDRLITGRLQSLQTYVTQQLIRAAEIRASANLAATKMSECVLGQSKRVDFCGKGYHLMSFPQSAPHGVVFLHVTYVPAQEKNFTCAPAICHDGKAHFPREGVFVSNGTHWFVTQRNFYEPQIITTDNTFVSGNCDVVIGIVNNTVYDPLQPELDSFKEELDKYFKNHTSPDVDLGDISGINASVVNIQKEIDRLNEVAKNLNESLIDLQELGKYEQYIK

SEQ ID NO: 1958 - protein, 1211 aa, Artificial Sequence
  SARS-CoV-2/Wuhan/HBCDC-HB-02/2020__EPI_ISL_412978 spike protein (1-1211)(I712C_T1077C)
MFVFLVLLPLVSSQCVNLTTRTQLPPAYTNSFTRGVYYPDKVFRSSVLHSTQDLFLPFFSNVTWFHAIHVSGTNGTKRFDNPVLPFNDGVYFASTEKSNIIRGWIFGTTLDSKTQSLLIVNNATNVVIKVCEFQFCNDPFLGVYYHKNNKSWMESEFRVYSSANNCTFEYVSQPFLMDLEGKQGNFKNLREFVFKNIDGYFKIYSKHTPINLVRDLPQGFSALEPLVDLPIGINITRFQTLLALHRSYLTPGDSSSGWTAGAAAYYVGYLQPRTFLLKYNENGTITDAVDCALDPLSETKCTLKSFTVEKGIYQTSNFRVQPTESIVRFPNITNLCPFGEVFNATRFASVYAWNRKRISNCVADYSVLYNSASFSTFKCYGVSPTKLNDLCFTNVYADSFVIRGDEVRQIAPGQTGKIADYNYKLPDDFTGCVIAWNSNNLDSKVGGNYNYLYRLFRKSNLKPFERDISTEIYQAGSTPCNGVEGFNCYFPLQSYGFQPTNGVGYQPYRVVVLSFELLHAPATVCGPKKSTNLVKNKCVNFNFNGLTGTGVLTESNKKFLPFQQFGRDIADTTDAVRDPQTLEILDITPCSFGGVSVITPGTNTSNQVAVLYQDVNCTEVPVAIHADQLTPTWRVYSTGSNVFQTRAGCLIGAEHVNNSYECDIPIGAGICASYQTQTNSPRRARSVASQSIIAYTMSLGAENSVAYSNNSCAIPTNFTISVTTEILPVSMTKTSVDCTMYICGDSTECSNFLLQYGSFCTQLNRALTGIAVEQDKNTQEVFAQVKQIYKTPPIKDFGGFNFSQILPDPSKPSKRSFIEDLLFNKVTLADAGFIKQYGDCLGDIAARDLICAQKFNGLTVLPPLLTDEMIAQYTSALLAGTITSGWTFGAGAALQIPFAMQMAYRFNGIGVTQNVLYENQKLIANQFNSAIGKIQDSLSSTASALGKLQDVVNQNAQALNTLVKQLSSNFGAISSVLNDILSRLDKVEAEVQIDRLITGRLQSLQTYVTQQLIRAAEIRASANLAATKMSECVLGQSKRVDFCGKGYHLMSFPQSAPHGVVFLHVTYVPAQEKNFTCAPAICHDGKAHFPREGVFVSNGTHWFVTQRNFYEPQIITTDNTFVSGNCDVVIGIVNNTVYDPLQPELDSFKEELDKYFKNHTSPDVDLGDISGINASVVNIQKEIDRLNEVAKNLNESLIDLQELGKYEQYIK

SEQ ID NO: 1959 - protein, 1211 aa, Artificial Sequence
  SARS-CoV-2/Australia/QLD02/2020__EPI_ISL_407896 spike protein (1-1211)(I712C_T1077C)
MFVFLVLLPLVSSQCVNLTTRTQLPPAYTNSFTRGVYYPDKVFRSSVLHSTQDLFLPFFSNVTWFHAIHVSGTNGTKRFDNPVLPFNDGVYFASTEKSNIIRGWIFGTTLDSKTQSLLIVNNATNVVIKVCEFQFCNDPFLGVYYHKNNKSWMESEFRVYSSANNCTFEYVSQPFLMDLEGKQGNFKNLREFVFKNIDGYFKIYSKHTPINLVRDLPQGFSALEPLVDLPIGINITRFQTLLALHRSYLTPGDSSSGWTAGAAAYYVGYLQPRTFLLKYNENGTITDAVDCALDPLSETKCTLKSFTVEKGIYQTSNFRVQPTESIVRFPNITNLCPFGEVFNATRFASVYAWNRKRISNCVADYSVLYNSASFSTFKCYGVSPTKLNDLCFTNVYADSFVIRGDEVRQIAPGQTGKIADYNYKLPDDFTGCVIAWNSNNLDSKVGGNYNYLYRLFRKSNLKPFERDISTEIYQAGSTPCNGVEGFNCYFPLQSYGFQPTNGVGYQPYRVVVLSFELLHAPATVCGPKKSTNLVKNKCVNFNFNGLTGTGVLTESNKKFLPFQQFGRDIADTTDAVRDPQTLEILDITPCSFGGVSVITPGTNTSNQVAVLYQDVNCTEVPVAIHADQLTPTWRVYSTGSNVFQTRAGCLIGAEHVNNSYECDIPIGAGICASYQTQTNSPRRARSVASQSIIAYTMSLGAENSVAYSNNSCAIPTNFTISVTTEILPVSMTKTSVDCTMYICGDSTECSNLLLQYGSFCTQLNRALTGIAVEQDKNTQEVFAQVKQIYKTPPIKDFGGFNFSQILPDPSKPSKRSFIEDLLFNKVTLADAGFIKQYGDCLGDIAARDLICAQKFNGLTVLPPLLTDEMIAQYTSALLAGTITSGWTFGAGAALQIPFAMQMAYRFNGIGVTQNVLYENQKLIANQFNSAIGKIQDSLSSTASALGKLQDVVNQNAQALNTLVKQLSSNFGAISSVLNDILSRLDKVEAEVQIDRLITGRLQSLQTYVTQQLIRAAEIRASANLAATKMSECVLGQSKRVDFCGKGYHLMSFPQSAPHGVVFLHVTYVPAQEKNFTCAPAICHDGKAHFPREGVFVSNGTHWFVTQRNFYEPQIITTDNTFVSGNCDVVIGIVNNTVYDPLQLELDSFKEELDKYFKNHTSPDVDLGDISGINASVVNIQKEIDRLNEVAKNLNESLIDLQELGKYEQYIK

SEQ ID NO: 1960 - protein, 1211 aa, Artificial Sequence
  SARS-CoV-2/India/1-31/2020__EPI_ISL_413523 spike protein (1-1211)(I712C_T1077C)
MFVFLVLLPLVSSQCVNLTTRTQLPPAYTNSFTRGVYYPDKVFRSSVLHSTQDLFLPFFSNVTWFHAIHVSGTNGTKRFDNPVLPFNDGVYFASTEKSNIIRGWIFGTTLDSKTQSLLIVNNATNVVIKVCEFQFCNDPFLGVYYHKNNKSWMESEFRVYSSANNCTFEYVSQPFLMDLEGKQGNFKNLREFVFKNIDGYFKIYSKHTPINLVRDLPQGFSALEPLVDLPIGINITRFQTLLALHRSYLTPGDSSSGWTAGAAAYYVGYLQPRTFLLKYNENGTITDAVDCALDPLSETKCTLKSFTVEKGIYQTSNFRVQPTESIVRFPNITNLCPFGEVFNATRFASVYAWNRKRISNCVADYSVLYNSASFSTFKCYGVSPTKLNDLCFTNVYADSFVIRGDEVRQIAPGQTGKIADYNYKLPDDFTGCVIAWNSNNLDSKVGGNYNYLYRLFRKSNLKPFERDISTEIYQAGSTPCNGVEGFNCYFPLQSYGFQPTNGVGYQPYRVVVLSFELLHAPATVCGPKKSTNLVKNKCVNFNFNGLTGTGVLTESNKKFLPFQQFGRDIADTTDAVRDPQTLEILDITPCSFGGVSVITPGTNTSNQVAVLYQDVNCTEVPVAIHADQLTPTWRVYSTGSNVFQTRAGCLIGAEHVNNSYECDIPIGAGICASYQTQTNSPRRARSVASQSIIAYTMSLGAENSVAYSNNSCAIPTNFTISVTTEILPVSMTKTSVDCTMYICGDSTECSNLLLQYGSFCTQLNRALTGIAVEQDKNTQEVFAQVKQIYKTPPIKDFGGFNFSQILPDPSKPSKRSFIEDLLFNKVTLADAGFIKQYGDCLGDIAARDLICAQKFNGLTVLPPLLTDEMIAQYTSALLAGTITSGWTFGAGAALQIPFAMQMAYRFNGIGVTQNVLYENQKLIANQFNSVIGKIQDSLSSTASALGKLQDVVNQNAQALNTLVKQLSSNFGAISSVLNDILSRLDKVEAEVQIDRLITGRLQSLQTYVTQQLIRAAEIRASANLAATKMSECVLGQSKRVDFCGKGYHLMSFPQSAPHGVVFLHVTYVPAQEKNFTCAPAICHDGKAHFPREGVFVSNGTHWFVTQRNFYEPQIITTDNTFVSGNCDVVIGIVNNTVYDPLQPELDSFKEELDKYFKNHTSPDVDLGDISGINASVVNIQKEIDRLNEVAKNLNESLIDLQELGKYEQYIK

SEQ ID NO: 1961 - protein, 1211 aa, Artificial Sequence
  SARS-CoV-2/Guangdong/GD2020087-P0008/2020__EPI_ISL_413863 spike protein (1-1211)(I712C_T1077C)
MFVFLVLLPLVSSQCVNLTTRTQLPPAYTNSFTRGVYYPDKVFRSSVLHSTQDLFLPFFSNVTWFHAIHVSGTNGTKRFDNPVLPFNDGVYFASTEKSNIIRGWIFGTTLDSKTQSLLIVNNATNVVIKVCEFQFCNDPFLGVYYHKNNKSWMESEFRVYSSANNCTFEYVSQPFLMDLEGKQGNFKNLREFVFKNIDGYFKIYSKHTPINLVRDLPQGFSALEPLVDLPIGINITRFQTLLALHRSYLTPGDSSSGWTAGAAAYYVGYLQPRTFLLKYNENGTITDAVDCALDPLSETKCTLKSFTVEKGIYQTSNFRVQPTESIVRFPNITNLCPFGEVFNATRFASVYAWNRKRISNCVADYSVLYNSASFSTFKCYGVSPTKLNDLCFTNVYADSFVIRGDEVREIAPGQTGKIADYNYKLPDDFTGCVIAWNSNNLDSKVGGNYNYLYRLFRKSNLKPFERDISTEIYQAGSTPCNGVEGFNCYFPLQSYGFQPTNGVGYQPYRVVVLSFELLHAPATVCGPKKSTNLVKNKCVNFNFNGLTGTGVLTESNKKFLPFQQFGRDIADTTDAVRDPQTLEILDITPCSFGGVSVITPGTNTSNQVAVLYQDVNCTEVPVAIHADQLTPTWRVYSTGSNVFQTRAGCLIGAEHVNNSYECDIPIGAGICASYQTQTNSPRRARSVASQSIIAYTMSLGAENSVAYSNNSCAIPTNFTISVTTEILPVSMTKTSVDCTMYICGDSTECSNLLLQYGSFCTQLNRALTGIAVEQDKNTQEVFAQVKQIYKTPPIKDFGGFNFSQILPDPSKPSKRSFIEDLLFNKVTLADAGFIKQYGDCLGDIAARDLICAQKFNGLTVLPPLLTDEMIAQYTSALLAGTITSGWTFGAGAALQIPFAMQMAYRFNGIGVTQNVLYENQKLIANQFNSAIGKIQDSLSSTASALGKLQDVVNQNAQALNTLVKQLSSNFGAISSVLNDILSRLDKVEAEVQIDRLITGRLQSLQTYVTQQLIRAAEIRASANLAATKMSECVLGQSKRVDFCGKGYHLMSFPQSAPHGVVFLHVTYVPAQEKNFTCAPAICHDGKAHFPREGVFVSNGTHWFVTQRNFYEPQIITTDNTFVSGNCDVVIGIVNNTVYDPLQPELDSFKEELDKYFKNHTSPDVDLGDISGINASVVNIQKEIDRLNEVAKNLNESLIDLQELGKYEQYIK

SEQ ID NO: 1962 - protein, 1211 aa, Artificial Sequence
  SARS-CoV-2/Sweden/01/2020__EPI_ISL_411951 spike protein (1-1211)(I712C_T1077C)
MFVFLVLLPLVSSQCVNLTTRTQLPPAYTNSFTRGVYYPDKVFRSSVLHSTQDLFLPFFSNVTWFHAIHVSGTNGTKRFDNPVLPFNDGVYFASTEKSNIIRGWIFGTTLDSKTQSLLIVNNATNVVIKVCEFQFCNDPFLGVYYHKNNKSWMESEFRVYSSANNCTFEYVSQPFLMDLEGKQGNFKNLREFVFKNIDGYFKIYSKHTPINLVRDLPQGFSALEPLVDLPIGINITRFQTLLALHRSYLTPGDSSSGWTAGAAAYYVGYLQPRTFLLKYNENGTITDAVDCALDPLSETKCTLKSFTVEKGIYQTSNFRVQPTESIVRFPNITNLCPFGEVFNATRFASVYAWNRKRISNCVADYSVLYNSASFSTFKCYGVSPTKLNDLCFTNVYADSFVIRGDEVRQIAPGQTGKIADYNYKLPDDFTGCVIAWNSNNLDSKVGGNYNYLYRLFRKSNLKPFERDISTEIYQAGSTPCNGVEGFNCYFPLQSYGFQPTNGVGYQPYRVVVLSFELLHAPATVCGPKKSTNLVKNKCVNFNFNGLTGTGVLTESNKKFLPFQQFGRDIADTTDAVRDPQTLEILDITPCSFGGVSVITPGTNTSNQVAVLYQDVNCTEVPVAIHADQLTPTWRVYSTGSNVFQTRAGCLIGAEHVNNSYECDIPIGAGICASYQTQTNSPRRARSVASQSIIAYTMSLGAENSVAYSNNSCAIPTNFTISVTTEILPVSMTKTSVDCTMYICGDSTECSNLLLQYGSFCTQLNRALTGIAVEQDKNTQEVFAQVKQIYKTPPIKDCGGFNFSQILPDPSKPSKRSFIEDLLFNKVTLADAGFIKQYGDCLGDIAARDLICAQKFNGLTVLPPLLTDEMIAQYTSALLAGTITSGWTFGAGAALQIPFAMQMAYRFNGIGVTQNVLYENQKLIANQFNSAIGKIQDSLSSTASALGKLQDVVNQNAQALNTLVKQLSSNFGAISSVLNDILSRLDKVEAEVQIDRLITGRLQSLQTYVTQQLIRAAEIRASANLAATKMSECVLGQSKRVDFCGKGYHLMSFPQSAPHGVVFLHVTYVPAQEKNFTCAPAICHDGKAHFPREGVFVSNGTHWFVTQRNFYEPQIITTDNTFVSGNCDVVIGIVNNTVYDPLQPELDSFKEELDKYFKNHTSPDVDLGDISGINASVVNIQKEIDRLNEVAKNLNESLIDLQELGKYEQYIK

SEQ ID NO: 1963 - protein, 1211 aa, Artificial Sequence
  SARS-CoV-2/Tianmen/HBCDC-HB-07/2020__EPI_ISL_412983 spike protein (1-1211)(I712C_T1077C)
MFVFLVLLPLVSSQCVNLTTRTQLPPAYTNSFTRGVYYPDKVFRSSVLHSTQDLFLPFFSNVTWFHAIHVSGTNGTKRFDNPVLPFNDGVYFASTEKSNIIRGWIFGTTLDSKTQSLLIVNNATNVVIKVCEFQFCNDPFLGVYYHKNNKSWMESEFRVYSSANNCTFEYVSQPFLMDLEGKQGNFKNLREFVFKNIDGYFKIYSKHTPINLVRDLPQGFSALEPLVDLPIGINITRFQTLLALHRSYLTPGDSSSGWTAGAAAYYVGYLQPRTFLLKYNENGTITDAVDCALDPLSETKCTLKSFTVEKGIYQTSNFRVQPTESIVRFPNITNLCPFGEVFNATRFASVYAWNRKRISNCVADYSVLYNSASFSTFKCYGVSPTKLNDLCFTNVYADSFVIRGDEVRQIAPGQTGKIADYNYKLPDDFTGCVIAWNSNNLDSKVGGNYNYLYRLFRKSNLKPFERDISTEIYQAGSTPCNGVEGFNCYFPLQSYGFQPTNGVGYQPYRVVVLSFELLHAPATVCGPKKSTNLVKNKCVNFNFNGLTGTGVLTESNKKFLPFQQFGRDIADTTDAVRDPQTLEILDITPCSFGGVSVITPGTNTSNQVAVLYQDLNCTEVPVAIHADQLTPTWRVYSTGSNVFQTRAGCLIGAEHVNNSYECDIPIGAGICASYQTQTNSPRRARSVASQSIIAYTMSLGAENSVAYSNNSCAIPTNFTISVTTEILPVSMTKTSVDCTMYICGDSTECSNLLLQYGSFCTQLNRALTGIAVEQDKNTQEVFAQVKQIYKTPPIKDFGGFNFSQILPDPSKPSKRSFIEDLLFNKVTLADAGFIKQYGDCLGDIAARDLICAQKFNGLTVLPPLLTDEMIAQYTSALLAGTITSGWTFGAGAALQIPFAMQMAYRFNGIGVTQNVLYENQKLIANQFNSAIGKIQDSLSSTASALGKLQDVVNQNAQALNTLVKQLSSNFGAISSVLNDILSRLDKVEAEVQIDRLITGRLQSLQTYVTQQLIRAAEIRASANLAATKMSECVLGQSKRVDFCGKGYHLMSFPQSAPHGVVFLHVTYVPAQEKNFTCAPAICHDGKAHFPREGVFVSNGTHWFVTQRNFYEPQIITTDNTFVSGNCDVVIGIVNNTVYDPLQPELDSFKEELDKYFKNHTSPDVDLGDISGINASVVNIQKEIDRLNEVAKNLNESLIDLQELGKYEQYIK

SEQ ID NO: 1964 - protein, 1211 aa, Artificial Sequence
  SARS-CoV-2/Hong Kong/case42_VM20002493/2020__EPI_ISL_414527 spike protein (1-1211)(I712C_T1077C)
MFVFLVLLPLVSSQCVNLTTRTQLPPAYTNSFTRGVYYPDKVFRSSVLHSTQDLFLPFFSNVTWFHAIHVSGTNGTKRFDNPVLPFNDGVYFASTEKSNIIRGWIFGTTLDSKTQSLLIVNNATNVVIKVCEFQFCNDPFLGVYYHKNNKSWMESEFRVYSSANNCTFEYVSQPFLMDLEGKQGNFKNLREFVFKNIDGYFKIYSKHTPINLVRDLPQGFSALEPLVDLPIGINITRFQTLLALHRSYLTPGDSSSGWTAGAAAYYVGYLQPRTFLLKYNENGTITDAVDCALDPLSETKCTLKSFTVEKGIYQTSNFRVQPTESIVRFPNITNLCPFGEVFNATRFASVYAWNRKRISNCVADYSVLYNSASFSTFKCYGVSPTKLNDLCFTNVYADSFVIRGDEVRQIAPGQTGKIADYNYKLPDDFTGCVIAWNSNNLDSKVGGNYNYLYRLFRKSNLKPFERDISTEIYQAGSTPCNGVEGFNCYFPLQSYGFQPTNGVGYQPYRVVVLSFELLHAPATVCGPKKSTNLVKNKCVNFNFNGLTGTGVLTESNKKFLPFQQFGRDIADTTDAVRDPQTLEILDITPCSFGGVSVITPGTNTSNQVAVLYQDVNCTEVPVAIHADQLTPTWRVYSTGSNVFQTRAGCLIGAEHVNNSYECDIPIGAGICASYQTQTNSPRRARSVASQSIIAYTMSLGAENSVAYSNNSCAIPTNFAISVTTEILPVSMTKTSVDCTMYICGDSTECSNLLLQYGSFCTQLNRALTGIAVEQDKNTQEVFAQVKQIYKTPPIKDFGGFNFSQILPDPSKPSKRSFIEDLLFNKVTLADAGFIKQYGDCLGDIAARDLICAQKFNGLTVLPPLLTDEMIAQYTSALLAGTITSGWTFGAGAALQIPFAMQMAYRFNGIGVTQNVLYENQKLIANQFNSAIGKIQDSLSSTASALGKLQDVVNQNAQALNTLVKQLSSNFGAISSVLNDILSRLDKVEAEVQIDRLITGRLQSLQTYVTQQLIRAAEIRASANLAATKMSECVLGQSKRVDFCGKGYHLMSFPQSAPHGVVFLHVTYVPAQEKNFTCAPAICHDGKAHFPREGVFVSNGTHWFVTQRNFYEPQIITTDNTFVSGNCDVVIGIVNNTVYDPLQPELDSFKEELDKYFKNHTSPDVDLGDISGINASVVNIQKEIDRLNEVAKNLNESLIDLQELGKYEQYIK

SEQ ID NO: 1965 - protein, 1211 aa, Artificial Sequence
  SARS-CoV-2/USA/CruiseA-23/2020__EPI_ISL_414482 spike protein (1-1211)(I712C_T1077C)
MFVFLVLLPLVSSQCVNLTTRTQLPPAYTNSFTRGVYYPDKVFRSSVLHSTQDLFLPFFSNVTWFHAIHVSGTNGTKRFDNPVLPFNDGVYFASTEKSNIIRGWIFGTTLDSKTQSLLIVNNATNVVIKVCEFQFCNDPFLGVYYHKNNKSWMESEFRVYSSANNCTFEYVSQPFLMDLEVKQGNFKNLREFVFKNIDGYFKIYSKHTPINLVRDLPQGFSALEPLVDLPIGINITRFQTLLALHRSYLTPGDSSSGWTAGAAAYYVGYLQPRTFLLKYNENGTITDAVDCALDPLSETKCTLKSFTVEKGIYQTSNFRVQPTESIVRFPNITNLCPFGEVFNATRFASVYAWNRKRISNCVADYSVLYNSASFSTFKCYGVSPTKLNDLCFTNVYADSFVIRGDEVRQIAPGQTGKIADYNYKLPDDFTGCVIAWNSNNLDSKVGGNYNYLYRLFRKSNLKPFERDISTEIYQAGSTPCNGVEGFNCYFPLQSYGFQPTNGVGYQPYRVVVLSFELLHAPATVCGPKKSTNLVKNKCVNFNFNGLTGTGVLTESNKKFLPFQQFGRDIADTTDAVRDPQTLEILDITPCSFGGVSVITPGTNTSNQVAVLYQDVNCTEVPVAIHADQLTPTWRVYSTGSNVFQTRAGCLIGAEHVNNSYECDIPIGAGICASYQTQTNSPRRARSVASQSIIAYTMSLGAENSVAYSNNSCAIPTNFTISVTTEILPVSMTKTSVDCTMYICGDSTECSNLLLQYGSFCTQLNRALTGIAVEQDKNTQEVFAQVKQIYKTPPIKDFGGFNFSQILPDPSKPSKRSFIEDLLFNKVTLADAGFIKQYGDCLGDIAARDLICAQKFNGLTVLPPLLTDEMIAQYTSALLAGTITSGWTFGAGAALQIPFAMQMAYRFNGIGVTQNVLYENQKLIANQFNSAIGKIQDSLSSTASALGKLQDVVNQNAQALNTLVKQLSSNFGAISSVLNDILSRLDKVEAEVQIDRLITGRLQSLQTYVTQQLIRAAEIRASANLAATKMSECVLGQSKRVDFCGKGYHLMSFPQSAPHGVVFLHVTYVPAQEKNFTCAPAICHDGKAHFPREGVFVSNGTHWFVTQRNFYEPQIITTDNTFVSGNCDVVIGIVNNTVYDPLQPELDSFKEELDKYFKNHTSPDVDLGDISGINASVVNIQKEIDRLNEVAKNLNESLIDLQELGKYEQYIK

SEQ ID NO: 1966 - protein, 1211 aa, Artificial Sequence
  SARS-CoV-2/Hong Kong/case85_VM20002868/2020__EPI_ISL_414519 spike protein (1-1211)(I712C_T1077C)
MFVFLVLVPLVSSQCVNLTTRTQLPPAYTNSFTRGVYYPDKVFRSSVLHSTQDLFLPFFSNVTWFHAIHVSGTNGTKRFDNPVLPFNDGVYFASTEKSNIIRGWIFGTTLDSKTQSLLIVNNATNVVIKVCEFQFCNDPFLGVYYHKNNKSWMESEFRVYSSANNCTFEYVSQPFLMDLEGKQGNFKNLREFVFKNIDGYFKIYSKHTPINLVRDLPQGFSALEPLVDLPIGINITRFQTLLALHRSYLTPGDSSSGWTAGAAAYYVGYLQPRTFLLKYNENGTITDAVDCALDPLSETKCTLKSFTVEKGIYQTSNFRVQPTESIVRFPNITNLCPFGEVFNATRFASVYAWNRKRISNCVADYSVLYNSASFSTFKCYGVSPTKLNDLCFTNVYADSFVIRGDEVRQIAPGQTGKIADYNYKLPDDFTGCVIAWNSNNLDSKVGGNYNYLYRLFRKSNLKPFERDISTEIYQAGSTPCNGVEGFNCYFPLQSYGFQPTNGVGYQPYRVVVLSFELLHAPATVCGPKKSTNLVKNKCVNFNFNGLTGTGVLTESNKKFLPFQQFGRDIADTTDAVRDPQTLEILDITPCSFGGVSVITPGTNTSNQVAVLYQDVNCTEVPVAIHADQLTPTWRVYSTGSNVFQTRAGCLIGAEHVNNSYECDIPIGAGICASYQTQTNSPRRARSVASQSIIAYTMSLGAENSVAYSNNSCAIPTNFTISVTTEILPVSMTKTSVDCTMYICGDSTECSNLLLQYGSFCTQLNRALTGIAVEQDKNTQEVFAQVKQIYKTPPIKDFGGFNFSQILPDPSKPSKRSFIEDLLFNKVTLADAGFIKQYGDCLGDIAARDLICAQKFNGLTVLPPLLTDEMIAQYTSALLAGTITSGWTFGAGAALQIPFAMQMAYRFNGIGVTQNVLYENQKLIANQFNSAIGKIQDSLSSTASALGKLQDVVNQNAQALNTLVKQLSSNFGAISSVLNDILSRLDKVEAEVQIDRLITGRLQSLQTYVTQQLIRAAEIRASANLAATKMSECVLGQSKRVDFCGKGYHLMSFPQSAPHGVVFLHVTYVPAQEKNFTCAPAICHDGKAHFPREGVFVSNGTHWFVTQRNFYEPQIITTDNTFVSGNCDVVIGIVNNTVYDPLQPELDSFKEELDKYFKNHTSPDVDLGDISGINASVVNIQKEIDRLNEVAKNLNESLIDLQELGKYEQYIK

SEQ ID NO: 1967 - protein, 1211 aa, Artificial Sequence; identical to SEQ ID NO: 1957
  SARS-CoV-2/England/200990660/2020__EPI_ISL_414523 spike protein (1-1211)(I712C_T1077C)

SEQ ID NO: 1968 - protein, 1211 aa, Artificial Sequence
  SARS-CoV-2/Australia/NSW09/2020__EPI_ISL_413595 spike protein (1-1211)(I712C_T1077C)
MFVFLVLLPLVSSQCVNLTTRTQLPPAYTNSFTRGVYYPDKVFRSSVLHSTQDLFLPFFSNVTWFHAIHVSGTNGTKRFDNPVLPFNDGVYFASTEKSNIIRGWIFGTTLDSKTQSLLIVNNATNVVIKVCEFQFCNDPFLGVYYHKNNKSWMESEFRVYSSANNCTFEYVSQPFLMDLEGKQGNFKNLREFVFKNIDGYFKIYSKHTPINLVRDLPQGFSALEPLVDLPIGINITRFQTLLALHRSYLTPGDSSSGWTAGAAAYYVGYLQPRTFLLKYNENGTITDAVDCALDPLSETKCTLKSFTVEKGIYQTSNFRVQPTESIVRFPNITNLCPFGEVFNATRFASVYAWNRKRISNCVADYSVLYNSASFSTFKCYGVSPTKLNDLCFTNVYADSFVIRGDEVRQIAPGQTGKIADYNYKLPDDFTGCVIAWNSNNLDSKVGGNYNYLYRLFRKSNLKPFERDISTEIYQAGSTPCNGVEGFNCYFPLQSYGFQPTNGVGYQPYRVVVLSFELLHAPATVCGPKKSTNLVKNKCVNFNFNGLTGTGVLTESNKKFLPFQQFGRDIADTTDAVRDPQTLEILDITPCSFGGVSVITPGTNTSNQVAVLYQDVNCTEVPVAIHADQLTPTWRVYSTGSNVFQTRAGCLIGAEHVNNSYECDIPIGAGICASYQTQTNSPRRARSVASQSIIAYTMSLGAENSVAYSNNSCAIPTNFTISVTTEILPVSMTKTSVDCTMYICGDSTECSNLLLQYGSFCTQLNRALTGIAVEQDKNTQEVFAQVKQIYKTPPIKDFGGFNFSQILPDPSKPSKRSFIEDLLFNKVTLADAGFIKQYGDCLGDIAARDLICAQKFNGLTVLPPLLTDEMIAQYTSALLAGTITSGWTFGAGAALQIPFAMQMAYRFNGIGVTQNVLYENQKLIANQFNSAIGKIQDSLSFTASALGKLQDVVNQNAQALNTLVKQLSSNFGAISSVLNDILSRLDKVEAEVQIDRLITGRLQSLQTYVTQQLIRAAEIRASANLAATKMSECVLGQSKRVDFCGKGYHLMSFPQSAPHGVVFLHVTYVPAQEKNFTCAPAICHDGKAHFPREGVFVSNGTHWFVTQRNFYEPQIITTDNTFVSGNCDVVIGIVNNTVYDPLQPELDSFKEELDKYFKNHTSPDVDLGDISGINASVVNIQKEIDRLNEVAKNLNESLIDLQELGKYEQYIK

SEQ ID NO: 1969 - protein, 1211 aa, Artificial Sequence; identical to SEQ ID NO: 1949
  SARS-CoV-2/Australia/NSW10/2020__EPI_ISL_413596 spike protein (1-1211)(I712C_T1077C)

SEQ ID NO: 1970 - protein, 1211 aa, Artificial Sequence
  SARS-CoV-2/Switzerland/1000477797/2020__EPI_ISL_413023 spike protein (1-1211)(I712C_T1077C)
MFVFLVLLPLVSSQCVNLTTRTQLPPAYTNSFTRGVYYPDKVFRSSVLHSTQDLFLPFFSNVTWFHAIHVSGTNGTKRFDNPVLPFNDGVYFASTEKSNIIRGWIFGTTLDSKTQSLLIVNNATNVVIKVCEFQFCNDPFLGVYYHKNNKSWMESEFRVYSSANNCTFEYVSQPFLMDLEGKQGNFKNLREFVFKNIDGYFNIYSKHTPINLVRDLPQGFSALEPLVDLPIGINITRFQTLLALHRSYLTPGDSSSGWTAGAAAYYVGYLQPRTFLLKYNENGTITDAVDCALDPLSETKCTLKSFTVEKGIYQTSNFRVQPTESIVRFPNITNLCPFGEVFNATRFASVYAWNRKRISNCVADYSVLYNSASFSTFKCYGVSPTKLNDLCFTNVYADSFVIRGDEVRQIAPGQTGKIADYNYKLPDDFTGCVIAWNSNNLDSKVGGNYNYLYRLFRKSNLKPFERDISTEIYQAGSTPCNGVEGFNCYFPLQSYGFQPTNGVGYQPYRVVVLSFELLHAPATVCGPKKSTNLVKNKCVNFNFNGLTGTGVLTESNKKFLPFQQFGRDIADTTDAVRDPQTLEILDITPCSFGGVSVITPGTNTSNQVAVLYQGVNCTEVPVAIHADQLTPTWRVYSTGSNVFQTRAGCLIGAEHVNNSYECDIPIGAGICASYQTQTNSPRRARSVASQSIIAYTMSLGAENSVAYSNNSCAIPTNFTISVTTEILPVSMTKTSVDCTMYICGDSTECSNLLLQYGSFCTQLNRALTGIAVEQDKNTQEVFAQVKQIYKTPPIKDFGGFNFSQILPDPSKPSKRSFIEDLLFNKVTLADAGFIKQYGDCLGDIAARDLICAQKFNGLTVLPPLLTDEMIAQYTSALLAGTITSGWTFGAGAALQIPFAMQMAYRFNGIGVTQNVLYENQKLIANQFNSAIGKIQDSLSSTASALGKLQDVVNQNAQALNTLVKQLSSNFGAISSVLNDILSRLDKVEAEVQIDRLITGRLQSLQTYVTQQLIRAAEIRASANLAATKMSECVLGQSKRVDFCGKGYHLMSFPQSAPHGVVFLHVTYVPAQEKNFTCAPAICHDGKAHFPREGVFVSNGTHWFVTQRNFYEPQIITTDNTFVSGNCDVVIGIVNNTVYDPLQPELDSFKEELDKYFKNHTSPDVDLGDISGINASVVNIQKEIDRLNEVAKNLNESLIDLQELGKYEQYIK

SEQ ID NO: 1971 - protein, 1211 aa, Artificial Sequence
  SARS-CoV-2/Belgium/BA-02291/2020__EPI_ISL_415159 spike protein (1-1211)(I712C_T1077C)
MFVFLVLLPLVSSQCVNLTTRTQLPPAYTNSFTRGVYYPDKVFRSSVLHSTQDLFLPFFSNVTWFHAIHVSGTNGTKRFDNPVLPFNDGVYFASTEKSNIIRGWIFGTTLDSKTQSLLIVNNATNVVIKVCEFQFCNDPFLGVYYHKNNKSWMESEFRVYSSANNCTFEYVSQPFLMDLEGKQGNFKNLREFVFKNIDGYFKIYSKHTPINLVRDLPQGFSALEPLVDLPIGINITRFQTLLALHRSYLTPGDSSSGWTAGAAAYYVGYLQPRTFLLKYNENGTITDAVDCALDPLSETKCTLKSFTVEKGIYQTSNFRVQPTESIVRFPNITNLCPFGEVFNATRFASVYAWNRKRISNCVADYSVLYNSASFSTFKCYGVSPTKLNDLCFTNVYADSFVIRGDEVRQIAPGQTGKIADYNYKLPDDFTGCVIAWNSNNLDSKVGGNYNYLYRLFRRSNLKPFERDISTEIYQAGSTPCNGVEGFNCYFPLQSYGFQPTNGVGYQPYRVVVLSFELLPAPATVCGPKKSTNLVKNKCVNFNFNGLTGTGVLTESNKKFLPFQQFGRDIADTTDAVRDPQTLEILDITPCSFGGVSVITPGTNTSNQVAVLYQGVNCTEVPVAIHADQLTPTWRVYSTGSNVFQTRAGCLIGAEHVNNSYECDIPIGAGICASYQTQTNSPRRARSVASQSIIAYTMSLGAENSVAYSNNSCAIPTNFTISVTTEILPVSMTKTSVDCTMYICGDSTECSNLLLQYGSFCTQLNRALTGIAVEQDKNTQEVFAQVKQIYKTPPIKDFGGFNFSQILPDPSKPSKRSFIEDLLFNKVTLADAGFIKQYGDCLGDIAARDLICAQKFNGLTVLPPLLTDEMIAQYTSALLAGTITSGWTFGAGAALQIPFAMQMAYRFNGIGVTQNVLYENQKLIANQFNSAIGKIQDSLSSAAPALGKLQDVVNQNAQALNTLVKQLSSNFGAISSVLNDILSRLDKVEAEVQIDRLITGRLQSLQTYVTQQLIRAAEIRASANLAATKMSECVLGQSKRVDFCGKGYHLMSFPQSAPHGVVFLHVTYVPAQEKNFTCAPAICHDGKAHFPREGVFVSNGTHWFVTQRNFYEPQIITTDNTFVSGNCDVVIGIVNNTVYDPLQPELDSFKEELDKYFKNHTSPDVDLGDISGINASVVNIQKEIDRLNEVAKNLNESLIDLQELGKYEQYIK

SEQ ID NO: 1972 - protein, 1211 aa, Artificial Sequence
  SARS-CoV-2/USA/WA8-UW5/2020__EPI_ISL_413486 spike protein (1-1211)(I712C_T1077C)
MFVFLVLLPLVSSQCVNLTTRTQLPPAYTNSFTRGVYYPDKVFRSSVLHSTQDLFLPFFSNVTWFHAIHVSGTNGTKRFDNPVLPFNDGVYFASTEKSNIIRGWIFGTTLDSKTQSLLIVNNATNVVIKVCEFQFCNDPFLGVYYHKNNKSWMESEFRVYSSANNCTFEYVSQPFLMDLEGKQGNFKNLREFVFKNIDGYFKIYSKHTPINLVRDLPQGFSALEPLVDLPIGINITRFQTLLALHRSYLTPGDSSSGWTAGAAAYYVGYLQPRTFLLKYNENGTITDAVDCALDPLSETKCTLKSFTVEKGIYQTSNFRVQPTESIVRFPNITNLCPFGEVFNATRFASVYAWNRKRISNCVADYSVLYNSASFSTFKCYGVSPTKLNDLCFTNVYADSFVIRGDEVRQIAPGQTGKIADYNYKLPDDFTGCVIAWNSNNLDSKVGGNYNYLYRLFRKSNLKPFERDISTEIYQAGSTPCNGVEGFNCYFPLQSYGFQPTNGVGYQPYRVVVLSFELLHAPATVCGPKKSTNLVKNKCVNFNFNGLTGTGVLTESNKKFLPFQQFGRDIADTTDAVRDPQTLEILDITPCSFGGVSVITPGTNTSNQVAVLYQDVNCTEVPVAIHADQLTPTWRVYSTGSNVFQTRAGCLIGAEYVNNSYECDIPIGAGICASYQTQTNSPRRARSVASQSIIAYTMSLGAENSVAYSNNSCAIPTNFTISVTTEILPVSMTKTSVDCTMYICGDSTECSNLLLQYGSFCTQLNRALTGIAVEQDKNTQEVFAQVKQIYKTPPIKDFGGFNFSQILPDPSKPSKRSFIEDLLFNKVTLADAGFIKQYGDCLGDIAARDLICAQKFNGLTVLPPLLTDEMIAQYTSALLAGTITSGWTFGAGAALQIPFAMQMAYRFNGIGVTQNVLYENQKLIANQFNSAIGKIQDSLSSTASALGKLQDVVNQNAQALNTLVKQLSSNFGAISSVLNDILSRLDKVEAEVQIDRLITGRLQSLQTYVTQQLIRAAEIRASANLAATKMSECVLGQSKRVDFCGKGYHLMSFPQSAPHGVVFLHVTYVPAQEKNFTCAPAICHDGKAHFPREGVFVSNGTHWFVTQRNFYEPQIITTDNTFVSGNCDVVIGIVNNTVYDPLQPELDSFKEELDKYFKNHTSPDVDLGDISGINASVVNIQKEIDRLNEVAKNLNESLIDLQELGKYEQYIK

SEQ ID NO: 1973 - protein, 1211 aa, Artificial Sequence
  SARS-CoV-2/England/20102000506/2020__EPI_ISL_415147 spike protein (1-1211)(I712C_T1077C)
MFVFLVLLPLVSSQCVNLTTRTQLPPAYTNSFTRGVYYPDKVFRSSVLHSTQDLFLPFFSNVTWFHAIHVSGTNGTKRFDNPVLPFNDGVYFASTEKSNIIRGWIFGTTLDSKTQSLLIVNNATNVVIKVCEFQFCNDPFLGVYYHKNNKSWMESEFRVYSSANNCTFEYVSQPFLMDLEGKQGNFKNLREFVFKNIDGYFKIYSKHTPINLVRDLPQGFSALEPLVDLPIGINITRFQTLLALHRSYLTPGDSSSGWTAGAAAYYVGYLQPRTFLLKYNENGTITDAVDCALDPLSETKCTLKSFTVEKGIYQTSNFRVQPTESIVRFPNITNLCPFGEVFNATRFASVYAWNRKRISNCVADYSVLYNSASFSTFKCYGVSPTKLNDLCFTNVYADSFVIRGDEVRQIAPGQTGKIADYNYKLPDDFTGCVIAWNSNNLDSKVGGNYNYLYRLFRKSNLKPFERDISTEIYQAGSTPCNGVEGFNCYFPLQSYGFQPTNGVGYQPYRVVVLSFELLHAPATVCGPKKSTNLVKNKCVNFNFNGLTGTGVLTESNKKFLPFQQFGRDIADTTDAVRDPQTLEILDITPCSFGGVSVITPGTNTSNQVAVLYQGVNCTEVPVAIHADQLTPTWRVYSTGSNVFQTRAGCLIGAEHVNNSYECDIPIGAGICASYQTQTNSPRRARSVASQSIIAYTMSLGAENSVAYSNNSCAIPTNFTISVTTEILPVSMTKTSVDCTMYICGDSTECSNLLLQYGSFCTQLNRALTGIAVEQDKNTQEVFAQVKQIYKTPPIKDFGGFNFSQILPDPSKPSKRSFIEDLLFNKVTLADAGFIKQYGYCLGDIAARDLICAQKFNGLTVLPPLLTDEMIAQYTSALLAGTITSGWTFGAGAALQIPFAMQMAYRFNGIGVTQNVLYENQKLIANQFNSAIGKIQDSLSSTASALGKLQDVVNQNAQALNTLVKQLSSNFGAISSVLNDILSRLDKVEAEVQIDRLITGRLQSLQTYVTQQLIRAAEIRASANLAATKMSECVLGQSKRVDFCGKGYHLMSFPQSAPHGVVFLHVTYVPAQEKNFTCAPAICHDGKAHFPREGVFVSNGTHWFVTQRNFYEPQIITTDNTFVSGNCDVVIGIVNNTVYDPLQPELDSFKEELDKYFKNHTSPDVDLGDISGINASVVNIQKEIDRLNEVAKNLNESLIDLQELGKYEQYIK

SEQ ID NO: 1974 - protein, 1211 aa, Artificial Sequence
  SARS-CoV-2/Belgium/VAG-03013/2020__EPI_ISL_415155 spike protein (1-1211)(I712C_T1077C)
MFVFLVLLPLVSSQCVNLTTRTQLPPAYTNSFTRGVYYPDKVFRSSVLHSTQDLFLPFFSNVTWFHAIHVSGTNGTKRFDNPVLPFNDGVYFASTEKSNIIRGWIFGTTLDSKTQSLLIVNNATNVVIKVCEFQFCNDPFLGVYYHKNNKSWMESEFRVYSSANNCTFEYVSQPFLMDLEGKQGNFKNLREFVFKNIDGYFKIYSKHTPINLVRDLPQGFSALEPLVDLPIGINITRFQTLLALHRSYLTPGDSSSGWTAGAAAYYVGYLQPRTFLLKYNENGTITDAVDCALDPLSETKCTLKSFTVEKGIYQTSNFRVQPTESIVRFPNITNLCPFGEVFNATRFASVYAWNRKRISNCVADYSVLYNSASFSTFKCYGVSPTKLNDLCFTNVYADSFVIRGDEVRQIAPGQTGKIADYNYKLPDDFTGCVIAWNSNNLDSKVGGNYNYLYRLFRKSNLKPFERDISTEIYQAGSTPCNGVEGFNCYFPLQSYGFQPTNGVGYQPYRVVVLSFELLHAPATVCGPKKSTNLVKNKCVNFNFNGLTGTGVLTESNKKFLPFQQFGRDIADTTDAVRDPQTLEILDITPCSFGGVSVITPGTNTSNQVAVLYQGVNCTEVPVAIHADQLTPTWRVYSTGSNVFQTRAGCLIGAEHVNNSYECDIPIGAGICASYQTQTNSPRRARSVASQSIIAYTMSLGAENSVAYSNNSCAIPTNFTISVTTEILPVSMTKTSVDCTMYICGDSTECSNLLLQYGSFCTQLNRALTGIAVEQDKNTQEVFAQVKQIYKTPPIKDFGGFNFSQILPDPSKPSKRSFIEDLLFNKVTLADAGFIKQYGDCLGDIAARDLICAQKFNGLTVLPPLLTDEMIAQYTSALLAGTITSGWTFGAGAALQIPFAMQMAYRFNGIGVTQNVLYENQKLIANQFNSAIGKIQDSLSSTATALGKLQDVVNQNAQALNTLVKQLSSNFGAISSVLNDILSRLDKVEAEVQIDRLITGRLQSLQTYVTQQLIRAAEIRASANLAATKMSECVLGQSKRVDFCGKGYHLMSFPQSAPHGVVFLHVTYVPAQEKNFTCAPAICHDGKAHFPREGVFVSNGTHWFVTQRNFYEPQIITTDNTFVSGNCDVVIGIVNNTVYDPLQPELDSFKEELDKYFKNHTSPDVDLGDISGINASVVNIQKEIDRLNEVAKNLNESLIDLQELGKYEQYIK

SEQ ID NO: 1975 - protein, 1211 aa, Artificial Sequence
  SARS-CoV-2/Belgium/BC-03016/2020__EPI_ISL_415157 spike protein (1-1211)(I712C_T1077C)
MFVFLVLLPLVSSQCVNLTTRTQLPPAYTNSFTRGVYYPDKVFRSSVLHSTQDLFLPFFSNVTWFHAIHVSGTNGTKRFDNPVLPFNDGVYFASTEKSNIIRGWIFGTTLDSKTQSLLIVNNATNVVIKVCEFQFCNDPFLGVYYHKNNKSWMESEFRVYSSANNCTFEYVSQPFLMDLEGKQGNFKNLREFVFKNIDGYFKIYSKHTPINLVRDLPQGFSALEPLVDLPIGINITRFQTLLALHRSYLTPGDSSSGWTAGAAAYYVGYLQPRTFLLKYNENGTITDAVDCALDPLSETKCTLKSFTVEKGIYQTSNFRVQPTESIVRFPNITNLCPFGEVFNATRFASVYAWNRKRISNCVADYSVLYNSASFSTFKCYGVSPTKLNDLCFTNVYADSFVIRGDEVRQIAPGQTGKIADYNYKLPDDFTGCVIAWNSNNLDSKVGGNYNYLYRLFRKSNLKPFERDISTEIYQAGSTPCNGVEGFNCYFPLQSYGFQPTNGVGYQPYRVVVLSFELLHAPATVCGPKKSTNLVKNKCVNFNFNGLTGTGVLTESNKKFLPFQQFGRDIADTTDAVRDPQTLEILDITPCSFGGVSVITPGTNTSNQVAVLYQGVNCTEVPVAIHADQLTPTWRVYSTGSNVFQTRAGCLIGAEHVNNSYECDIPIGAGICASYQTQTNSPRRARSVASQSIIAYTMSLGAENSVAYSNNSCAIPTNFTISVTTEILPVSMTKTSVDCTMYICGDSTECSNLLLQYGSFCTQLNRALTGIAVEQDKNTQEVFAQVKQIYKTPPIKDFGGFNFSQILPDPSKPSKRSFIEDLLFNKVTLADAGFIKQYGDCLGDIAARDLICAQKFNGLTVLPPLLTDEMIAQYTSALLAGTITSGWTFGAGAALQIPFAMQMAYRFNGIGVTQNVLYENQKLIANQFNSAIGKIQDSLSSTAPALGKLQDVVNQNAQALNTLVKQLSSNFGAISSVLNDILSRLDKVEAEVQIDRLITGRLQSLQTYVTQQLIRAAEIRASANLAATKMSECVLGQSKRVDFCGKGYHLMSFPQSAPHGVVFLHVTYVPAQEKNFTCAPAICHDGKAHFPREGVFVSNGTHWFVTQRNFYEPQIITTDNTFVSGNCDVVIGIVNNTVYDPLQPELDSFKEELDKYFKNHTSPDVDLGDISGINASVVNIQKEIDRLNEVAKNLNESLIDLQELGKYEQYIK

SEQ ID NO: 1976 - protein, 1211 aa, Artificial Sequence
  SARS-CoV-2/Germany/BavPat3/2020__EPI_ISL_414521 spike protein (1-1211)(I712C_T1077C)
MFVFLVLLPLVSSQCVNLTTRTQLPPAYTNSFTRGVYYPDKVFRSSVLHSTQDLFLPFFSNVTWFHAIHVSGTNGTKRFDNPVLPFNDGVYFASTEKSNIIRGWIFGTTLDSKTQSLLIVNNATNVVIKVCEFQFCNDPFLGVYYHKNNKSWMESEFRVYSSANNCTFEYVSQPFLMDLEGKQGNFKNLREFVFKNIDGYFKIYSKHTPINLVRDLPQGFSALEPLVDLPIGINITRFQTLLALHRSYLTPGDSSSGWTAGAAAYYVGYLQPRTFLLKYNENGTITDAVDCALDPLSETKCTLKSFTVEKGIYQTSNFRVQPTESIVRFPNITNLCPFGEVFNATRFASVYAWNRKRISNCVADYSVLYNSASFSTFKCYGVSPTKLNDLCFTNVYADSFVIRGDEVRQIAPGQTGKIADYNYKLPDDFTGCVIAWNSNNLDSKVGGNYNYLYRLFRKSNLKPFERDISTEIYQAGSTPCNGVEGFNCYFPLQSYGFQPTNGVGYQPYRVVVLSFELLHAPATVCGPKKSTNLVKNKCVNFNFNGLTGTGVLTESNKKFLPFQQFGRDIADTTDAVRDPQTLEILDITPCSFGGVSVITPGTNTSNQVAVLYQDVNCTEVPVAIHADQLTPTWRVYSTGSNVFQTRAGCLIGAEHVNNSYECDIPIGAGICASYQTQTNSPRRARSVASQSIIAYTMSLGAENSVAYSNNSCAIPTNFTISVTTEILPVSMTKTSVDCTMYICGDSTECSNLLLQYGSFCTQLNRALTGIAVEQDKNTQQVFAQVKQIYKTPPIKDFGGFNFSQILPDPSKPSKRSFIEDLLFNKVTLADAGFIKQYGDCLGDIAARDLICAQKFNGLTVLPPLLTDEMIAQYTSALLAGTITSGWTFGAGAALQIPFAMQMAYRFNGIGVTQNVLYENQKLIANQFNSAIGKIQDSLSSTASALGKLQDVVNQNAQALNTLVKQLSSNFGAISSVLNDILSRLDKVEAEVQIDRLITGRLQSLQTYVTQQLIRAAEIRASANLAATKMSECVLGQSKRVDFCGKGYHLMSFPQSAPHGVVFLHVTYVPAQEKNFTCAPAICHDGKAHFPREGVFVSNGTHWFVTQRNFYEPQIITTDNTFVSGNCDVVIGIVNNTVYDPLQPELDSFKEELDKYFKNHTSPDVDLGDISGINASVVNIQKEIDRLNEVAKNLNESLIDLQELGKYEQYIK

SEQ ID NO: 1977 - protein, 1211 aa, Artificial Sequence
  SARS-CoV-2/France/HF1805/2020__EPI_ISL_414628 spike protein (1-1211)(I712C_T1077C)
MFVFLVLLPLVSSQCVNLTTRTQLPPAYTNSFTRGVYYPDKVFRSSVLHSTQDLFLPFFSNVTWFHAIHVSGTNGTKRFDNPVLPFNDGVYFASTEKSNIIRGWIFGTTLDSKTQSLLIVNNATNVVIKVCEFQFCNDPFLGVYYHKNNKSWMESEFRVYSSANNCTFEYVSQPFLMDLEGKQGNFKNLREFVFKNIDGYFKIYSKHTPINLVRDLPQGFSALEPLVDLPIGINITRFQTLLALHRSYLTPGDSSSGWTAGAAAYYVGYLQPRTFLLKYNENGTITDAVDCALDPLSETKCTLKSFTVEKGIYQTSNFRVQPTESIVRFPNITNLCPFGEVFNATRFASVYAWNRKRISNCVADYSVLYNSASFSTFKCYGVSPTKLNDLCFTNVYADSFVIRGDEVRQIAPGQTGKIADYNYKLPDDFTGCVIAWNSNNLDSKVGGNYNYLYRLFRKSNLKPFERDISTEIYQAGSTPCNGVEGFNCYFPLQSYGFQPTNGVGYQPYRVVVLSFELLHAPATVCGPKKSTNLVKNKCVNFNFNGLTGTGVLTESNKKFLPFQQFGRDIADTTDAVRDPQTLEILDITPCSFGGVSVITPGTNTSNQVAVLYQGVNCTEVPVAIHADQLTPTWRVYSTGSNVFQTRAGCLIGAEHVNNSYECDIPIGAGICASYQTQTNSPRRARSVASQSIIAYTMSLGAENSVAYSNNSCAIPTNFTISVTTEILPVSMTKTSVDCTMYICGDSTECSNLLLQYGSFCTQLNRALTGIAVEQDKNTQEVFAQVKQIYKTPPIKDFGGFNFSQILPDPSKPSKRSFIEDLLFNKVTLADAGFIKQYGDCLGDIAARDLICAQKFNGLTVLPPLLTDEMIAQYTSALLAGTITSGWTFGAGAALQIPFAMQMAYRFNGIGVTQNVLYENQKLIANQFNSAIGKIQDSLSSTASALGKLQDVVNQNAQALNTLVKQLSSNFGAISSVLNDILSRLDKVEAEVQIDRLITGRLQSLQTYVTQQLIRAAEIRASANLAATKMSECVLGQSKRVDFCGKGYHLMSFPQSAPHGVVFLHVTYVPAQEKNFTCAPAICHDGKAHFPREGVFVSNGTHWFVTQRNFYEPQIITTDNTFVSGNCDVVIGVVNNTVYDPLQPELDSFKEELDKYFKNHTSPDVDLGDISGINASVVNIQKEIDRLNEVAKNLNESLIDLQELGKYEQYIK

SEQ ID NO: 1978 - protein, 1211 aa, Artificial Sequence
  SARS-CoV-2/Netherlands/ZuidHolland_9/2020__EPI_ISL_414445 spike protein (1-1211)(I712C_T1077C)
MFVFLVLLPLVSSQCVNLTTRTQLPPAYTNSFTRGVYYPDKVFRSSVLHSTQDLFLPFFSNVTWFHAIHVSGTNGTKRFDNPVLPFNDGVYFASTEKSNIIRGWIFGTTLDSKTQSLLIVNNATNVVIKVCEFQFCNDPFLGVYYHKNNKSWMESEFRVYSSANNCTFEYVSQPFLMDLEGKQGNFKNLREFVFKNIDGYFKIYSKHTPINLVRDLPQGFSALEPLVDLPIGINITRFQTLLALHRSYLTPGDSSSGWTAGAAAYYVGYLQPRTFLLKYNENGTITDAVDCALDPLSETKCTLKSFTVEKGIYQTSNFRVQPTESIVRFPNITNLCPFGEVFNATRFASVYAWNRKRISNCVADYSVLYNSASFSTFKCYGVSPTKLNDLCFTNVYADSFVIRGDEVRQIAPGQTGKIADYNYKLPDDFTGCVIAWNSNNLDSKVGGNYNYLYRLFRKSNLKPFERDISTEIYQAGSTPCNGVEGFNCYFPLQSYGFQPTNGVGYQPYRVVVLSFELLHAPATVCGPKKSTNLVKNKCVNFNFNGLTGTGVLTESNKKFLPFQQFGRDIADTTDAVRDPQTLEILDITPCSFGGVSVITPGTNTSNQVAVLYQGVNCTEVPVAIHADQLTPTWRVYSTGSNVFQTRAGCLIGAEHVNNSYECDIPIGAGICASYQTQTNSPRRARSVASQSIIAYTMSLGAENSVAYSNNSCAIPTNFTISVTTEILPVSMTKTSVDCTMYICGDSTECSNLLLQYGSFCTQLNRALTGIAVEQDKNTQEVFAQVKQIYKTPPIKDFGGFNFSQILPDPSKPSKRSFIEDLLFNKVTLADAGFIKQYGDCLGDIAARDLICVQKFNGLTVLPPLLTDEMIAQYTSALLAGTITSGWTFGAGAALQIPFAMQMAYRFNGIGVTQNVLYENQKLIANQFNSAIGKIQDSLSSTASALGKLQDVVNQNAQALNTLVKQLSSNFGAISSVLNDILSRLDKVEAEVQIDRLITGRLQSLQTYVTQQLIRAAEIRASANLAATKMSECVLGQSKRVDFCGKGYHLMSFPQSAPHGVVFLHVTYVPAQEKNFTCAPAICHDGKAHFPREGVFVSNGTHWFVTQRNFYEPQIITTDNTFVSGNCDVVIGIVNNTVYDPLQPELDSFKEELDKYFKNHTSPDVDLGDISGINASVVNIQKEIDRLNEVAKNLNESLIDLQELGKYEQYIK

SEQ ID NO: 1979 - protein, 1211 aa, Artificial Sequence
  SARS-CoV-2/Finland/FIN03032020A/2020__EPI_ISL_413602 spike protein (1-1211)(I712C_T1077C)
MFVFLVLLPLVSSQCVNLTTRTQLPPAYTNSFTRGVYYPDKVFRSSVLHSTQDLFLPFFSNVTWFHAIHVSGTNGTKRFDNPVLPFNDGVYFASTEKSNIIRGWIFGTTLDSKTQSLLIVNNATNVVIKVCEFQFCNDPFLGVYYHKNNKSWMESEFRVYSSANNCTFEYVSQPFLMDLEGKQGNFKNLREFVFKNIDGYFKIYSKHTPINLVRDLPQGFSALEPLVDLPIGINITRFQTLLALHRSYLTPGDSSSGWTAGAAAYYVGYLQPRTFLLKYNENGTITDAVDCALDPLSETKCTLKSFTVEKGIYQTSNFRVQPTESIVRFPNITNLCPFGEVFNATRFASVYAWNRKRISNCVADYSVLYNSASFSTFKCYGVSPTKLNDLCFTNVYADSFVIRGDEVRQIAPGQTGKIADYNYKLPDDFTGCVISWNSNNLDSKVGGNYNYLYRLFRKSNLKPFERDISTEIYQAGSTPCNGVEGFNCYFPLQSYGFQPTNGVGYQPYRVVVLSFELLHAPATVCGPKKSTNLVKNKCVNFNFNGLTGTGVLTESNKKFLPFQQFGRDIADTTDAVRDPQTLEILDITPCSFGGVSVITPGTNTSNQVAVLYQGVNCTEVPVAIHADQLTPTWRVYSTGSNVFQTRAGCLIGAEHVNNSYECDIPIGAGICASYQTQTNSPRRARSVASQSIIAYTMSLGAENSVAYSNNSCAIPTNFTISVTTEILPVSMTKTSVDCTMYICGDSTECSNLLLQYGSFCTQLNRALTGIAVEQDKNTQEVFAQVKQIYKTPPIKDFGGFNFSQILPDPSKPSKRSFIEDLLFNKVTLADAGFIKQYGDCLGDIAARDLICAQKFNGLTVLPPLLTDEMIAQYTSALLAGTITSGWTFGAGAALQIPFAMQMAYRFNGIGVTQNVLYENQKLIANQFNSAIGKIQDSLSSTASALGKLQDVVNQNAQALNTLVKQLSSNFGAISSVLNDILSRLDKVEAEVQIDRLITGRLQSLQTYVTQQLIRAAEIRASANLAATKMSECVLGQSKRVDFCGKGYHLMSFPQSAPHGVVFLHVTYVPAQEKNFTCAPAICHDGKAHFPREGVFVSNGTHWFVTQRNFYEPQIITTDNTFVSGNCDVVIGIVNNTVYDPLQPELDSFKEELDKYFKNHTSPDVDLGDISGINASVVNIQKEIDRLNEVAKNLNESLIDLQELGKYEQYIK

SEQ ID NO: 1980 - protein, 1211 aa, Artificial Sequence
  SARS-CoV-2/France/GE1977/2020__EPI_ISL_414632 spike protein (1-1211)(I712C_T1077C)
MFVFLVLLPLVSSQCVNLTTRTQLPPAYTNSFTRGVYYPDKVFRSSVLHSTQDLFLPFFSNVTWFHAIHVSGTNGTKRFDNPVLPFNDGVYFASTEKSNIIRGWIFGTTLDSKTQSLLIVNNATNVVIKVCEFQFCNDPFLGVYYHKNNKSWMESEFRVYSSANNCTFEYVSQPFLMDLEGKQGNFKNLREFVFKNIDGYFKIYSKHTPINLVRDLPQGFSALEPLVDLPIGINITRFQTLLALHRSYLTPGDSSSGWTAGAAAYYVGYLQPRTFLLKYNENGTITDAVDCALDPLSETKCTLKSFTVEKGIYQTSNFRVQPTESIVRFPNITNLCPFGEVFNATRFASVYAWNRKRISNCVADYSVLYNSASFSTFKCYGVSPTKLNDLCFTNVYADSFVIRGDEVRQIAPGQTGKIADYNYKLPDDFTGCVIAWNSNNLDSKVGGNYNYLYRLFRKSNLKPFERDISTEIYQAGSTPCNGVEGFNCYFPLQSYGFQPTNGVGYQPYRVVVLSFELLHAPATVCGPKKSTNLVKNKCVNFNFNGLTGTGVLTESNKKFLPFQQFGRDIADTTDAVRDPQTLEILDITPCSFGGVSVITPGTNTSNQVAVLYQGVNCTEVPVAIHADQLTPTWRVYSTGSNVFQTRAGCLIGAEHVNNSYECDIPIGAGICASYQTQTNSPRRARSVASQSIIAYTMSLGAENSVAYSNNSCAIPTNFTISVTTEILPVSMTKTSVDCTMYICGDSTECSNLLLQYGSFCTQLNRALTGIAVEQDKNTQEVFAQVKQIYKTPPIKDFGGFNFSQILPDPSKPSKRSFIEDLLFNKVTLADAGFIKQYGDCLGDIAARDLICAQKFNGLTVLPPLLTDEMIAQYTSALLAGTITSGWTFGAGAALQIPFAMQMAYRFNGIGVTQNVLYENQKLIANQFNSAIGKIQDSLFSTASALGKLQDVVNQNAQALNTLVKQLSSNFGAISSVLNDILSRLDKVEAEVQIDRLITGRLQSLQTYVTQQLIRAAEIRASANLAATKMSECVLGQSKRVDFCGKGYHLMSFPQSAPHGVVFLHVTYVPAQEKNFTCAPAICHDGKAHFPREGVFVSNGTHWFVTQRNFYEPQIITTDNTFVSGNCDVVIGIVNNTVYDPLQPELDSFKEELDKYFKNHTSPDVDLGDISGINASVVNIQKEIDRLNEVAKNLNESLIDLQELGKYEQYIK

SEQ ID NO: 1981 - protein, 1211 aa, Artificial Sequence
  SARS-CoV-2/Finland/FIN-313/2020__EPI_ISL_414641 spike protein (1-1211)(I712C_T1077C)
MFVFLVLLPLVSSQCVNLTTRTQLPPAYTNSFTRGVYYPDKVFRSSVLHSTQDLFLPFFSNVTWFHAIHVSGTNGTKRFDNPVLPFNDGVYFASTEKSNIIRGWIFGTTLDSKTQSLLIVNNATNVVIKVCEFQFCNDPFLGVYYHKNNKSWMESEFRVYSSANNCTFEYVSQPFLMDLEGKQGNFKNLREFVFKNIDGYFKIYSKHTPINLVRDLPQGFSALEPLVDLPIGINITRFKTLLALHRSYLTPGDSSSGWTAGAAAYYVGYLQPRTFLLKYNENGTITDAVDCALDPLSETKCTLKSFTVEKGIYQTSNFRVQPTESIVRFPNITNLCPFGEVFNATRFASVYAWNRKRISNCVADYSVLYNSASFSTFKCYGVSPTKLNDLCFTNVYADSFVIRGDEVRQIAPGQTGKIADYNYKLPDDFTGCVIAWNSNNLDSKVGGNYNYLYRLFRKSNLKPFERDISTEIYQAGSTPCNGVEGFNCYFPLQSYGFQPTNGVGYQPYRVVVLSFELLHAPATVCGPKKSTNLVKNKCVNFNFNGLTGTGVLTESNKKFLPFQQFGRDIADTTDAVRDPQTLEILDITPCSFGGVSVITPGTNTSNQVAVLYQGVNCTEVPVAIHADQLTPTWRVYSTGSNVFQTRAGCLIGAEHVNNSYECDIPIGAGICASYQTQTNSPRRARSVASQSIIAYTMSLGAENSVAYSNNSCAIPTNFTISVTTEILPVSMTKTSVDCTMYICGDSTECSNLLLQYGSFCTQLNRALTGIAVEQDKNTQEVFAQVKQIYKTPPIKDFGGFNFSQILPDPSKPSKRSFIEDLLFNKVTLADAGFIKQYGDCLGDIAARDLICAQKFNGLTVLPPLLTDEMIAQYTSALLAGTITSGWTFGAGAALQIPFAMQMAYRFNGIGVTQNVLYENQKLIANQFNSAIGKIQDSLSSTASALGKLQDVVNQNAQALNTLVKQLSSNFGAISSVLNDILSRLDKVEAEVQIDRLITGRLQSLQTYVTQQLIRAAEIRASANLAATKMSECVLGQSKRVDFCGKGYHLMSFPQSAPHGVVFLHVTYVPAQEKNFTCAPAICHDGKAHFPREGVFVSNGTHWFVTQRNFYEPQIITTDNTFVSGNCDVVIGIVNNTVYDPLQPELDSFKEELDKYFKNHTSPDVDLGDISGINASVVNIQKEIDRLNEVAKNLNESLIDLQELGKYEQYIK

SEQ ID NO: 1982 - protein, 1211 aa, Artificial Sequence
  SARS-CoV-2/Netherlands/ZuidHolland_2/2020__EPI_ISL_414556 spike protein (1-1211)(I712C_T1077C)
MFVFLVLLPLVSSQCVNLTTRTQLPPAYTNSFTRGVYYPDKVFRSSVLHSTQDLFLPFFSNVTWFHAIHVSGTNGTKRFDNPVLPFNDGVYFASTEKSNIIRGWIFGTTLDSKTQSLLIVNNATNVVIKVCEFQFCNDPFLGVYYHKNNKSWMESEFRVYSSANNCTFEYVSQPFLMDLEGKQGNFKNLREFVFKNIDGYFKIYSKHTPINLVRDLPQGFSALEPLVDLPIGINITRFQTLLALHRSYLTPGDSSSGWTAGAAAYYVGYLQPRTFLLKYNENGTITDAVDCALDPLSETKCTLKSFTVEKGIYQTSNFRVQPTESIVRFPNITNLCPFGEVFNATRFASVYAWNRKRISNCVADYSVLYNSASFSTFKCYGVSPTKLNDLCFTNVYADSFVIRGDEVRQIAPGQTGKIADYNYKLPDDFTGCVIAWNSNNLDSKVGGNYNYLYRLFRKSNLKPFERDISTEIYQAGSTPCNGVEGFNCYFPLQSYGFQPTNGVGYQPYRVVVLSFELLHAPATVCGPKKSTNLVKNKCVNFNFNGLTGTGVLTESNKKFLPFQQFGRDIADTTDAVRDPQTLEILDITPCSFGGVSVITPGTNTSNQVAVLYQGVNCTEVPVAIHADQLTPTWRVYSTGSNVFQTRAGCLIGAEHVNNSYECDIPIGAGICASYQTQTNSPRRARSVASQSIIAYTMSLGAENSVAYSNNSCAIPTNFTISVTTEILPVSMTKTSVDCTMYICGDSTECSNLLLQYGSFCTQLNRALTGIALEQDKNTQEVFAQVKQIYKTPPIKDFGGFNFSQILPDPSKPSKRSFIEDLLFNKVTLADAGFIKQYGDCLGDIAARDLICAQKFNGLTVLPPLLTDEMIAQYTSALLAGTITSGWTFGAGAALQIPFAMQMAYRFNGIGVTQNVLYENQKLIANQFNSAIGKIQDSLSSTASALGKLQDVVNQNAQALNTLVKQLSSNFGAISSVLNDILSRLDKVEAEVQIDRLITGRLQSLQTYVTQQLIRAAEIRASANLAATKMSECVLGQSKRVDFCGKGYHLMSFPQSAPHGVVFLHVTYVPAQEKNFTCAPAICHDGKAHFPREGVFVSNGTHWFVTQRNFYEPQIITTDNTFVSGNCDVVIGIVNNTVYDPLQPELDSFKEELDKYFKNHTSPDVDLGDISGINASVVNIQKEIDRLNEVAKNLNESLIDLQELGKYEQYIK

SEQ ID NO: 1983 - protein, 1211 aa, Artificial Sequence
  SARS-CoV-2/USA/WA-UW31/2020__EPI_ISL_414618 spike protein (1-1211)(I712C_T1077C)
MFVFLVLLPLVSSQCVNLTTRTQLPPAYTNSFTRGVYYPDKVFRSSVLHSTQDLFLPFFSNVTWFHAIHVSGTNGTKRFDNPVLPFNDGVYFASTEKSNIIRGWIFGTTLDSKTQSLLIVNNATNVVIKVCEFQFCNDPFLGVYYHKNNKSWMESEFRVYSSANNCTFEYVSQPFLMDLEGKQGNFKNLREFVFKNIDGYFKIYSKHTPINLVRDLPQGFSALEPLVDLPIGINITRFQTLLALHRSYLTPGDSSSGWTAGAAAYYVGYLQPRTFLLKYNENGTITDAVDCALDPLSETKCTLKSFTVEKGIYQTSNFRVQPTESIVRFPNITNLCPFGEVFNATRFASVYAWNRKRISNCVADYSVLYNSASFSTFKCYGVSPTKLNDLCFTNVYADSFVIRGDEVRQIAPGQTGKIADYNYKLPDDFTGCVIAWNSNNLDSKVGGNYNYLYRLFRKSNLKPFERDISTEIYQAGSTPCNGAEGFNCYFPLQSYGFQPTNGVGYQPYRVVVLSFELLHAPATVCGPKKSTNLVKNKCVNFNFNGLTGTGVLTESNKKFLPFQQFGRDIADTTDAVRDPQTLEILDITPCSFGGVSVITPGTNTSNQVAVLYQDVNCTEVPVAIHADQLTPTWRVYSTGSNVFQTRAGCLIGAEHVNNSYECDIPIGAGICASYQTQTNSPRRARSVASQSIIAYTMSLGAENSVAYSNNSCAIPTNFTISVTTEILPVSMTKTSVDCTMYICGDSTECSNLLLQYGSFCTQLNRALTGIAVEQDKNTQEVFAQVKQIYKTPPIKDFGGFNFSQILPDPSKPSKRSFIEDLLFNKVTLADAGFIKQYGDCLGDIAARDLICAQKFNGLTVLPPLLTDEMIAQYTSALLAGTITSGWTFGAGAALQIPFAMQMAYRFNGIGVTQNVLYENQKLIANQFNSAIGKIQDSLSSTASALGKLQDVVNQNAQALNTLVKQLSSNFGAISSVLNDILSRLDKVEAEVQIDRLITGRLQSLQTYVTQQLIRAAEIRASANLAATKMSECVLGQSKRVDFCGKGYHLMSFPQSAPHGVVFLHVTYVPAQEKNFTCAPAICHDGKAHFPREGVFVSNGTHWFVTQRNFYEPQIITTDNTFVSGNCDVVIGIVNNTVYDPLQPELDSFKEELDKYFKNHTSPDVDLGDISGINASVVNIQKEIDRLNEVAKNLNESLIDLQELGKYEQYIK

SEQ ID NO: 1984 - protein, 1211 aa, Artificial Sequence
  SARS-CoV-2/South Korea/SNU01/2020__EPI_ISL_411929 spike protein (1-1211)(I712C_T1077C)
MFVFLVLLPLVSSQCVNLTTRTQLPPAYTNSFTRGVYYPDKVFRSSVLHSTQDLFLPFFSNVTWFHAIHVSGTNGTKRFDNPVLPFNDGVYFASTEKSNIIRGWIFGTTLDSKTQSLLIVNNATNVVIKVCEFQFCNDPFLGVYYHKNNKSWMESEFRVYSSANNCTFEYVSQPFLMDLEGKQGNFKNLREFVFKNIDGYFKIYSKHTPINLVRDLPQGFWALEPLVDLPIGINITRFQTLLALHRSYLTPGDSSSGWTAGAAAYYVGYLQPRTFLLKYNENGTITDAVDCALDPLSETKCTLKSFTVEKGIYQTSNFRVQPTESIVRFPNITNLCPFGEVFNATRFASVYAWNRKRISNCVADYSVLYNSASFSTFKCYGVSPTKLNDLCFTNVYADSFVIRGDEVRQIAPGQTGKIADYNYKLPDDFTGCVIAWNSNNLDSKVGGNYNYLYRLFRKSNLKPFERDISTEIYQAGSTPCNGVEGFNCYFPLQSYGFQPTNGVGYQPYRVVVLSFELLHAPATVCGPKKSTNLVKNKCVNFNFNGLTGTGVLTESNKKFLPFQQFGRDIADTTDAVRDPQTLEILDITPCSFGGVSVITPGTNTSNQVAVLYQDVNCTEVPVAIHADQLTPTWRVYSTGSNVFQTRAGCLIGAEHVNNSYECDIPIGAGICASYQTQTNSPRRARSVASQSIIAYTMSLGAENSVAYSNNSCAIPTNFTISVTTEILPVSMTKTSVDCTMYICGDSTECSNLLLQYGSFCTQLNRALTGIAVEQDKNTQEVFAQVKQIYKTPPIKDFGGFNFSQILPDPSKPSKRSFIEDLLFNKVTLADAGFIKQYGDCLGDIAARDLICAQKFNGLTVLPPLLTDEMIAQYTSALLAGTITSGWTFGAGAALQIPFAMQMAYRFNGIGVTQNVLYENQKLIANQFNSAIGKIQDSLSSTASALGKLQDVVNQNAQALNTLVKQLSSNFGAISSVLNDILSRLDKVEAEVQIDRLITGRLQSLQTYVTQQLIRAAEIRASANLAATKMSECVLGQSKRVDFCGKGYHLMSFPQSAPHGVVFLHVTYVPAQEKNFTCAPAICHDGKAHFPREGVFVSNGTHWFVTQRNFYEPQIITTDNTFVSGNCDVVIGIVNNTVYDPLQPELDSFKEELDKYFKNHTSPDVDLGDISGINASVVNIQKEIDRLNEVAKNLNESLIDLQELGKYEQYIK

SEQ ID NO: 1985 - protein, 1211 aa, Artificial Sequence
  SARS-CoV-2/China/WF0004/2020__EPI_ISL_413694 spike protein (1-1211)(I712C_T1077C)
MFVFLVLLPLVSSQCVNLTTRTQLPPAYTNSFTRGVYYPDKVFRSSVLHSTQDLFLPFFSNVTWFHAIHVSGTNGTKRFDNPVLPFNDGVYFASTEKSNIIRGWIFGTTLDSKTQSLLIVNNATNVVIKVCEFQFCNDPFLGVYYHKNNKSWTESEFRVYSSANNCTFEYVSQPFLMDLEGKQGNFKNLREFVFKNIDGYFKIYSKHTPINLVRDLPQGFSALEPLVDLPIGINITRFQTLLALHRSYLTPGDSSSGWTAGAAAYYVGYLQPRTFLLKYNENGTITDAVDCALDPLSETKCTLKSFTVEKGIYQTSNFRVQPTESIVRFPNITNLCPFGEVFNATRFASVYAWNRKRISNCVADYSVLYNSASFSTFKCYGVSPTKLNDLCFTNVYADSFVIRGDEVRQIAPGQTGKIADYNYKLPDDFTGCVIAWNSNNLDSKVGGNYNYLYRLFRKSNLKPFERDISTEIYQAGSTPCNGVEGFNCYFPLQSYGFQPTNGVGYQPYRVVVLSFELLHAPATVCGPKKSTNLVKNKCVNFNFNGLTGTGVLTESNKKFLPFQQFGRDIADTTDAVRDPQTLEILDITPCSFGGVSVITPGTNTSNQVAVLYQDVNCTEVPVAIHADQLTPTWRVYSTGSNVFQTRAGCLIGAEHVNNSYECDIPIGAGICASYQTQTNSPRRARSVASQSIIAYTMSLGAENSVAYSNNSCAIPTNFTISVTTEILPVSMTKTSVDCTMYICGDSTECSNLLLQYGSFCTQLNRALTGIAVEQDKNTQEVFAQVKQIYKTPPIKDFGGFNFSQILPDPSKPSKRSFIEDLLFNKVTLADAGFIKQYGDCLGDIAARDLICAQKFNGLTVLPPLLTDEMIAQYTSALLAGTITSGWTFGAGAALQIPFAMQMAYRFNGIGVTQNVLYENQKLIANQFNSAIGKIQDSLSSTASALGKLQDVVNQNAQALNTLVKQLSSNFGAISSVLNDILSRLDKVEAEVQIDRLITGRLQSLQTYVTQQLIRAAEIRASANLAATKMSECVLGQSKRFDFCGKGYHLMSFPQSAPHGVVFLHVTYVPAQEKNFTCAPAICHDGKAHFPREGVFVSNGTHWFVTQRNFYEPQIITTDNTFVSGNCDVVIGIVNNTVYDPLQPELDSFKEELDKYFKNHTSPDVDLGDISGINASVVNIQKEIDRLNEVAKNLNESLIDLQELGKYEQYIK

SEQ ID NO: 1986 - protein, 1211 aa, Artificial Sequence
  SARS-CoV-2/China/WF0028/2020__EPI_ISL_413791 spike protein (1-1211)(I712C_T1077C)
MFVFLVLLPLVSSQCVNLTTRTQLPPAYTNSFTRGVYYPDKVFRSSVLHSTQDLFLPFFSNVTWFHAIHVSGTNGTKRFDNPVLPFNDGVYFASTEKSNIIRGWIFGTTLDSKTQSLLIVNNATNVVIKVCEFQFCNDPFLGVYYHKNNKSWMESEFRVYSSANNCTFEYVSQPFLMDLEGKQGNFKNLREFVFKNIDGYFKIYSKHTPINLVRDLPQGFSALEPLVDLPIGINITRFQTLLALHRSYLTPGDSSSGWTAGAAAYYVGYLQPRTFLLKYNENGTITDAVDCALDPLSETKCTLKSFTVEKGIYQTSNFRVQPTESIVRFPNITNLCPFGEVFNATRFASVYAWNRKRISNCVADYSVLYNSASFSTFKCYGVSPTKLNDLCFTNVYADSFVIRGDEVRQIAPGQTGKIADYNYKLPDDFTGCVIAWNSNNLDSKVGGNYNYLYRLFRKSNLKPFERDISTEIYQAGSTPCNGVEGFNCYFPLQSYGFQPTNGVGYQPYRVVVLSFELLHAPATVCGPKKSTNLVKNKCVNFNFNGLTGTGVLTESNKKFLPFQQFGRDIADTTDAVRDPQTLEILDITPCSFGGVSVITPGTNTSNQVAVLYQDVNCTEVPVAIHADQLTPTWRVYSTGSNVFQTRAGCLIGAEHVNNSYECDIPIGAGICASYQTQTNSPRRARSVASQSIIAYTMSLGAENSVAYSNNSCAIPTNFTISVTTEILPVSMTKTSVDCTMYICGDSTECSNLLLQYGSFCTQLNRALTGIAVEQDKNTQEVFAQVKQIYKTPPIKDFGGFNFSQILPDPSKPSKRSFIEDLLFNKVTLADAGFIKQYGDCLGDIAARDLICAQKFNGLTVLPPLLTDEMIAQYTSALLAGTITSGWTFGAGAALQIPFAMQMAYRFNGIGVTQNVLYENQKLIANQFNSAIGKIQDSLSSTASALGKLQDVVNQNAQALNTLVKQLSSNFGAISSVLNDILSRLDKVEAEVQIDRLITGRLQSLQTYVTQQLIRAAEIRASANLAATKMSECVLGQSKRVDFCGKGYHLMSFPQSAPHGVVFLHVTYVPAQEKNFTCAPAICHDGKAHFPREGVFVSNGTHWFVTQRNFYEPQIITTDNTFVSGNCDVVIGIVNNTVYDPLQPELESFKEELDKYFKNHTSPDVDLGDISGINASVVNIQKEIDRLNEVAKNLNESLIDLQELGKYEQYIK

SEQ ID NO: 1987 - protein, 1211 aa, Artificial Sequence
  SARS-CoV-2/2019-nCoV/USA-CruiseA-18/2020__MT159716.1 spike protein (1-1211)(I712C_T1077C)
MFVFLVLLPLVSSQCVNLTTRTQLPPAYTNSFTRGVYYPDKVFRSSVLHSTQDLFLPFFSNVTWFHAIHVSGTNGTKRFDNPVLPFNDGVYFASTEKSNIIRGWIFGTTLDSKTQSLLIVNNATNVVIKVCEFQFCNDPFLGVYYHKNNKSWMESELRVYSSANNCTFEYVSQPFLMDLEGKQGNFKNLREFVFKNIDGYFKIYSKHTPINLVRDLPQGFSALEPLVDLPIGINITRFQTLLALHRSYLTPGDSSSGWTAGAAAYYVGYLQPRTFLLKYNENGTITDAVDCALDPLSETKCTLKSFTVEKGIYQTSNFRVQPTESIVRFPNITNLCPFGEVFNATRFASVYAWNRKRISNCVADYSVLYNSASFSTFKCYGVSPTKLNDLCFTNVYADSFVIRGDEVRQIAPGQTGKIADYNYKLPDDFTGCVIAWNSNNLDSKVGGNYNYLYRLFRKSNLKPFERDISTEIYQAGSTPCNGVEGFNCYFPLQSYGFQPTNGVGYQPYRVVVLSFELLHAPATVCGPKKSTNLVKNKCVNFNFNGLTGTGVLTESNKKFLPFQQFGRDIADTTDAVRDPQTLEILDITPCSFGGVSVITPGTNTSNQVAVLYQDVNCTEVPVAIHADQLTPTWRVYSTGSNVFQTRAGCLIGAEHVNNSYECDIPIGAGICASYQTQTNSPRRARSVASQSIIAYTMSLGAENSVAYSNNSCAIPTNFTISVTTEILPVSMTKTSVDCTMYICGDSTECSNLLLQYGSFCTQLNRALTGIAVEQDKNTQEVFAQVKQIYKTPPIKDFGGFNFSQILPDPSKPSKRSFIEDLLFNKVTLADAGFIKQYGDCLGDIAARDLICAQKFNGLTVLPPLLTDEMIAQYTSALLAGTITSGWTFGAGAALQIPFAMQMAYRFNGIGVTQNVLYENQKLIANQFNSAIGKIQDSLSSTASALGKLQDVVNQNAQALNTLVKQLSSNFGAISSVLNDILSRLDKVEAEVQIDRLITGRLQSLQTYVTQQLIRAAEIRASANLAATKMSECVLGQSKRVDFCGKGYHLMSFPQSAPHGVVFLHVTYVPAQEKNFTCAPAICHDGKAHFPREGVFVSNGTHWFVTQRNFYEPQIITTDNTFVSGNCDVVIGIVNNTVYDPLQPELDSFKEELDKYFKNHTSPDVDLGDISGINASVVNIQKEIDRLNEVAKNLNESLIDLQELGKYEQYIK

SEQ ID NO: 1988 - protein, 1211 aa, Artificial Sequence
  SARS-CoV-2/SARS-CoV-2/Yunnan-01/human/2020/CHN__MT049951.1 spike protein (1-1211)(I712C_T1077C)
MFVFLVLLPLVSSQCVNLTTRTQLPPANTNSFTRGVYYPDKVFRSSVLHSTQDLFLPFFSNVTWFHAIHVSGTNGTKRFDNPVLPFNDGVYFASTEKSNIIRGWIFGTTLDSKTQSLLIVNNATNVVIKVCEFQFCNDPFLGVYYHKNNKSWMESEFRVYSSANNCTFEYVSQPFLMDLEGKQGNFKNLREFVFKNIDGYFKIYSKHTPINLVRDLPQGFSALEPLVDLPIGINITRFQTLLALHRSYLTPGDSSSGWTAGAAAYYVGYLQPRTFLLKYNENGTITDAVDCALDPLSETKCTLKSFTVEKGIYQTSNFRVQPTESIVRFPNITNLCPFGEVFNATRFASVYAWNRKRISNCVADYSVLYNSASFSTFKCYGVSPTKLNDLCFTNVYADSFVIRGDEVRQIAPGQTGKIADYNYKLPDDFTGCVIAWNSNNLDSKVGGNYNYLYRLFRKSNLKPFERDISTEIYQAGSTPCNGVEGFNCYFPLQSYGFQPTNGVGYQPYRVVVLSFELLHAPATVCGPKKSTNLVKNKCVNFNFNGLTGTGVLTESNKKFLPFQQFGRDIADTTDAVRDPQTLEILDITPCSFGGVSVITPGTNTSNQVAVLYQDVNCTEVPVAIHADQLTPTWRVYSTGSNVFQTRAGCLIGAEHVNNSYECDIPIGAGICASYQTQTNSPRRARSVASQSIIAYTMSLGAENSVAYSNNSCAIPTNFTISVTTEILPVSMTKTSVDCTMYICGDSTECSNLLLQYGSFCTQLNRALTGIAVEQDKNTQEVFAQVKQIYKTPPIKDFGGFNFSQILPDPSKPSKRSFIEDLLFNKVTLADAGFIKQYGDCLGDIAARDLICAQKFNGLTVLPPLLTDEMIAQYTSALLAGTITSGWTFGAGAALQIPFAMQMAYRFNGIGVTQNVLYENQKLIANQFNSAIGKIQDSLSSTASALGKLQDVVNQNAQALNTLVKQLSSNFGAISSVLNDILSRLDKVEAEVQIDRLITGRLQSLQTYVTQQLIRAAEIRASANLAATKMSECVLGQSKRVDFCGKGYHLMSFPQSAPHGVVFLHVTYVPAQEKNFTCAPAICHDGKAHFPREGVFVSNGTHWFVTQRNFYEPQIITTDNTFVSGNCDVVIGIVNNTVYDPLQPELDSFKEELDKYFKNHTSPDVDLGDISGINASVVNIQKEIDRLNEVAKNLNESLIDLQELGKYEQYIK

SEQ ID NO: 1989 - protein, 1211 aa, Artificial Sequence
  SARS-CoV-2/USA/WA-UW292/2020__EPI_ISL_418077 spike protein (1-1211)(I712C_T1077C)
MFVFLVLLPLVSSQCVNLTTRTQLPPAYTNSFTRGVYYPDKVFRSSVLHSTQDLFLPFFSNVTWFHAIHVSGTNGTKRFDNPVLPFNDGVYFASTEKSNIIRGWIFGTTLDSKTQSLLIVNNATNVVIKVCEFQFCNDPFLGVYYHKNNKSWMESEFRVYSSANNCTFEYVSQPFLMDLEGKQGNFKNLREFVFKNIDGYFKIYSKHTPINLVRDLPQGFSALEPLVDLPIGINITRFQTLLALHRSYLTPGDSSSGWTAGAAAYYVGYLQPRTFLLKYNENGTITDAVDCALDPLSETKCTLKSFTVEKGIYQTSNFRVQPTESIVRFPNITNLCPFGEVFNATRFASVYAWNRKRISNCVADYSVLYNSASFSTFKCYGVSPTKLNDLCFTNVYADSFVIRGDEVRQIAPGQTGKIADYNYKLPDDFTGCVIAWNSNNLDSKVGGNYNYLYRLFRKSNLKPFERDISTEIYQASSTPCNGVEGFNCYFPLQSYGFQPTNGVGYQPYRVVVLSFELLHAPATVCGPKKSTNLVKNKCVNFNFNGLTGTGVLTESNKKFLPFQQFGRDIADTTDAVRDPQTLEILDITPCSFGGVSVITPGTNTSNQVAVLYQDVNCTEVPVAIHADQLTPTWRVYSTGSNVFQTRAGCLIGAEHVNNSYECDIPIGAGICASYQTQTNSPRRARSVASQSIIAYTMSLGAENSVAYSNNSCAIPTNFTISVTTEILPVSMTKTSVDCTMYICGDSTECSNLLLQYGSFCTQLNRALTGIAVEQDKNTQEVFAQVKQIYKTPPIKDFGGFNFSQILPDPSKPSKRSFIEDLLFNKVTLADAGFIKQYGDCLGDIAARDLICAQKFNGLTVLPPLLTDEMIAQYTSALLAGTITSGWTFGAGAALQIPFAMQMAYRFNGIGVTQNVLYENQKLIANQFNSAIGKIQDSLSSTASALGKLQDVVNQNAQALNTLVKQLSSNFGAISSVLNDILSRLDKVEAEVQIDRLITGRLQSLQTYVTQQLIRAAEIRASANLAATKMSECVLGQSKRVDFCGKGYHLMSFPQSAPHGVVFLHVTYVPAQEKNFTCAPAICHDGKAHFPREGVFVSNGTHWFVTQRNFYEPQIITTDNTFVSGNCDVVIGIVNNTVYDPLQPELDSFKEELDKYFKNHTSPDVDLGDISGINASVVNIQKEIDRLNEVAKNLNESLIDLQELGKYEQYIK

SEQ ID NO: 1990 - protein, 1211 aa, Artificial Sequence
  SARS-CoV-2/Iceland/192/2020__EPI_ISL_417819 spike protein (1-1211)(I712C_T1077C)
MFVFFVLLPLVSSQCVNLTTRTQLPPAYTNSFTRGVYYPDKVFRSSVLHSTQDLFLPFFSNVTWFHAIHVSGTNGTKRFDNPVLPFNDGVYFASTEKSNIIRGWIFGTTLDSKTQSLLIVNNATNVVIKVCEFQFCNDPFLGVYYHKNNKSWMESEFRVYSSANNCTFEYVSQPFLMDLEGKQGNFKNLREFVFKNIDGYFKIYSKHTPINLVRDLPQGFSALEPLVDLPIGINITRFQTLLALHRSYLTPGDSSSGWTAGAAAYYVGYLQPRTFLLKYNENGTITDAVDCALDPLSETKCTLKSFTVEKGIYQTSNFRVQPTESIVRFPNITNLCPFGEVFNATRFASVYAWNRKRISNCVADYSVLYNSASFSTFKCYGVSPTKLNDLCFTNVYADSFVIRGDEVRQIAPGQTGKIADYNYKLPDDFTGCVIAWNSNNLDSKVGGNYNYLYRLFRKSNLKPFERDISTEIYQAGSTPCNGVEGFNCYFPLQSYGFQPTNGVGYQPYRVVVLSFELLHAPATVCGPKKSTNLVKNKCVNFNFNGLTGTGVLTESNKKFLPFQQFGRDIADTTDAVRDPQTLEILDITPCSFGGVSVITPGTNTSNQVAVLYQGVNCTEVPVAIHADQLTPTWRVYSTGSNVFQTRAGCLIGAEHVNNSYECDIPIGAGICASYQTQTNSPRRARSVASQSIIAYTMSLGAENSVAYSNNSCAIPTNFTISVTTEILPVSMTKTSVDCTMYICGDSTECSNLLLQYGSFCTQLNRALTGIAVEQDKNTQEVFAQVKQIYKTPPIKDFGGFNFSQILPDPSKPSKRSFIEDLLFNKVTLADAGFIKQYGDCLGDIAARDLICAQKFNGLTVLPPLLTDEMIAQYTSALLAGTITSGWTFGAGAALQIPFAMQMAYRFNGIGVTQNVLYENQKLIANQFNSAIGKIQDSLSSTASALGKLQDVVNQNAQALNTLVKQLSSNFGAISSVLNDILSRLDKVEAEVQIDRLITGRLQSLQTYVTQQLIRAAEIRASANLAATKMSECVLGQSKRVDFCGKGYHLMSFPQSAPHGVVFLHVTYVPAQEKNFTCAPAICHDGKAHFPREGVFVSNGTHWFVTQRNFYEPQIITTDNTFVSGNCDVVIGIVNNTVYDPLQPELDSFKEELDKYFKNHTSPDVDLGDISGINASVVNIQKEIDRLNEVAKNLNESLIDLQELGKYEQYIK

SEQ ID NO: 1991 - protein, 1211 aa, Artificial Sequence
  SARS-CoV-2/Belgium/ULG-6939/2020__EPI_ISL_417020 spike protein (1-1211)(I712C_T1077C)
MFVFLVLLPLVSSQCVNLTTRTQLPPAYTNSFTRGVYYPDKVFRSSVLHSTQDLFLPFFSNVTWFHAIHVSGTNGTKRFDNPVLPFNDGVYFASTEKSNIIRGWIFGTTLDSKTQSLLIVNNATNVVIKVCEFQFCNDPFLGVYYHKNNKSWMESEFRVYSSANNCTFEYVSQPFLMDLEGKQGNFKNLREFVFKNIDGYFKIYSKHTPINLVRDLPQGFSALEPLVDLPIGINITRFQTLLALHRSYLTPGDSSSGWTAGAAAYYVGYLQPRTFLLKYNENGTITDAVDCALDPLSETKCTLKSFTVEKGIYQTSNFRVQPTESIVRFPNITNLCPFGEVFNATRFASVYAWNRKRISNCVADYSVLYNSASFSTFKCYGVSPTKLNDLCFTNVYADSFVIRGDEVRQIAPGQTGKIADYNYKLPDDFTGCVIAWNSNNLDSKVGGNYNYLYRLFRKSNLKPFERDISTEIYQAGSTPCNGVEGFNCYFPLQSYGFQPTNGVGYQPYRVVVLSFELLHAPATVCGPKKSTNLVKNKCVNFNFNGLTGTGVLTESNKKFLPFQQFGRDIADTTDAVRDPQTLEILDITPCSFGGVSVITPGTNTSNQVAVLYQGVNCTEVPVAIHADQLTPTWRVYSTGSNVFQTRAGCLIGAEHVNNSYECDIPIGAGICASYQTQTNSPRRARSVASQSIIAYTMSLGAENSVVYSNNSCAIPTNFTISVTTEILPVSMTKTSVDCTMYICGDSTECSNLLLQYGSFCTQLNRALTGIAVEQDKNTQEVFAQVKQIYKTPPIKDFGGFNFSQILPDPSKPSKRSFIEDLLFNKVTLADAGFIKQYGDCLGDIAARDLICAQKFNGLTVLPPLLTDEMIAQYTSALLAGTITSGWTFGAGAALQIPFAMQMAYRFNGIGVTQNVLYENQKLIANQFNSAIGKIQDSLSSTASALGKLQDVVNQNAQALNTLVKQLSSNFGAISSVLNDILSRLDKVEAEVQIDRLITGRLQSLQTYVTQQLIRAAEIRASANLAATKMSECVLGQSKRVDFCGKGYHLMSFPQSAPHGVVFLHVTYVPAQEKNFTCAPAICHDGKAHFPREGVFVSNGTHWFVTQRNFYEPQIITTDNTFVSGNCDVVIGIVNNTVYDPLQPELDSFKEELDKYFKNHTSPDVDLGDISGINASVVNIQKEIDRLNEVAKNLNESLIDLQELGKYEQYIK

SEQ ID NO: 1992 - protein, 1211 aa, Artificial Sequence
  SARS-CoV-2/France/HF2496/2020__EPI_ISL_418231 spike protein (1-1211)(I712C_T1077C)
MFVFLVLLPLVSSQCVNLTTRTQLPPAYTNSFTRGVYYPDKVFRSSVLHSTQDLFLPFFSNVTWFHAIHVSGTNGTKRFDNPVLPFNDGVYFASTEKSNIIRGWIFGTTLDSKTQSLLIVNNATNVVIKVCEFQFCNDPFLGVYYHKNNKSWMESEFRVYSSANNCTFEYVSQPFLMDLEGKQGNFKNLREFVFKNIDGYFKIYSKHTPINLVRDLPQGFSALEPLVDLPIGINITRFQTLLALHRSYLTPGDSSSGWTAGAAAYYVGYLQPRTFLLKYNENGTITDAVDCALDPLSETKCTLKSFTVEKGIYQTSNFRVQPTESIVRFPNITNLCPFGEVFNATRFASVYAWNRKRISNCVADYSVLYNSASFSTFKCYGVSPTKLNDLCFTNVYADSFVIRGDEVRQIAPGQTGKIADYNYKLPDDFTGCVIAWNSNNLDSKVGGNYNYLYRLFRKSNLKPFERDISTEIYQAGSTPCNGVEGFNCYFPLQSYGFQPTNGVGYQPYRVVVLSFELLHAPATVCGPKKSTNLVKNKCVNFNFNGLTGTGVLTESNKKFLPFQQFGRDIADTTDAVRDPQTLEILDITPCSFGGVSVITPGTNTSNQVAVLYQGVNCTEVPVAIHADQLTPTWRVYSTGSNVFQTRAGCLIGAEHVNNSYECDIPIGAGICASYQTQTNSPRRARSVASQSIIAYTMSLGAENSVAYSNNSCAIPTNFTISVTTEILPVSMTKTSVDCTMYICGDSTECSNLLLQYGSFCTQLNRALTGIAVEQDKNTQEVFAQVKQIYKTPPIKDFGGFNFSQILPDPSKPSKRSFIEDLLFNKVTLADAGFIKQYGDCLGDIVARDLICAQKFNGLTVLPPLLTDEMIAQYTSALLAGTITSGWTFGAGAALQIPFAMQMAYRFNGIGVTQNVLYENQKLIANQFNSAIGKIQDSLSSTASALGKLQDVVNQNAQALNTLVKQLSSNFGAISSVLNDILSRLDKVEAEVQIDRLITGRLQSLQTYVTQQLIRAAEIRASANLAATKMSECVLGQSKRVDFCGKGYHLMSFPQSAPHGVVFLHVTYVPAQEKNFTCAPAICHDGKAHFPREGVFVSNGTHWFVTQRNFYEPQIITTDNTFVSGNCDVVIGIVNNTVYDPLQPELDSFKEELDKYFKNHTSPDVDLGDISGINASVVNIQKEIDRLNEVAKNLNESLIDLQELGKYEQYIK

SEQ ID NO: 1993 - protein, 1211 aa, Artificial Sequence
  SARS-CoV-2/USA/WA-UW291/2020__EPI_ISL_418076 spike protein (1-1211)(I712C_T1077C)
MFVFLVLLPLVSSQCVNLTTRTQLPPAYTNSFTRGVYYPDKVFRSSVLHSTQDLFLPFFSNVTWFHAIHVSGTNGTKRFDNPVLPFNDGVYFASTEKSNIIRGWIFGTTLDSKTQSLLIVNNATNVVIKVCEFQFCNDPFLGVYYHKNNKSWMESEFRVYSSANNCTFEYVSQPFLMDLEGKQGNFKNLREFVFKNIDGYFKIYSKHTPINLVRDLPQGFSALEPLVDLPIGINITRFQTLLALHRSYLTPGDSSSGWTAGAAAYYVGYLQPRTFLLKYNENGTITDAVDCALDPLSETKCTLKSFTVEKGIYQTSNFRVQPTESIVRFPNITNLCPFGEVFNATRFASVYAWNRKRISNCVADYSVLYNSASFSTFKCYGVSPTKLNDLCFTNVYADSFVIRGDEVRQIAPGQTGKIADYNYKLPDDFTGCVIAWNSNNLDSKVGGNYNYLYRLFRKSNLKPFERDISTEIYQAGSTPCNGVEGFNCYFPLQSYGFQPTNGVGYQPYRVVVLSFELLHAPATVCGPKKSTNLVKNKCVNFNFNGLTGTGVLTESNKKFLPFQQFGRDIADTTDAVRDPQTLEILDITPCSFGGVSVITPGTNTSNQVAVLYQGVNCTEVPVAIHADQLTPTWRVYSTGSNVFQTRAGCLIGAEHVNNSYECDIPIGAGICASYQTQTNSPRRARSVASQSIIAYTMSLGAENSVAYSNNSCAIPTNFTISVTTEILPVSMTKTSVDCTMYICGDSTECSNLLLQYGSFCTQLNRALTGIAVEQDKNTQEVFAQVKQIYKTPPIKDFGGFNFSQILPDPSKPSKRSFIEDLLFNKVTLADAGFIKQYGDCLGDIAARDLICAQKFNGLTVLPPLLTDEMIAQYTSALLAGTITSGWTFGAGAALQIPFAMQMAYRFNGIGVTQNVLYENQKLIANQFNSAIGKIQYSLSSTASALGKLQDVVNQNAQALNTLVKQLSSNFGAISSVLNDILSRLDKVEAEVQIDRLITGRLQSLQTYVTQQLIRAAEIRASANLAATKMSECVLGQSKRVDFCGKGYHLMSFPQSAPHGVVFLHVTYVPAQEKNFTCAPAICHDGKAHFPREGVFVSNGTHWFVTQRNFYEPQIITTDNTFVSGNCDVVIGIVNNTVYDPLQPELDSFKEELDKYFKNHTSPDVDLGDISGINASVVNIQKEIDRLNEVAKNLNESLIDLQELGKYEQYIK

SEQ ID NO: 1994 - protein, 1211 aa, Artificial Sequence; identical to SEQ ID NO: 1957
  SARS-CoV-2/Portugal/PT0034/2020__EPI_ISL_418019 spike protein (1-1211)(I712C_T1077C)

SEQ ID NO: 1995 - protein, 1211 aa, Artificial Sequence
  SARS-CoV-2/Iceland/202/2020__EPI_ISL_417750 spike protein (1-1211)(I712C_T1077C)
MFVFLVLLPLVSSQCVNLTTRTQLPPAYTNSFTRGVYYPDKVFRSSVLHSTQDLFLPFFSNVTWFHAIHVSGTNGTKRFDNPVLPFNDGVYFASTEKSNIIRGWIFGTTLDSKTQSLLIVNNATNVVIKVCEFQFCNDPFLGVYYHKNNKSWMESEFRVYSSANNCTFEYVSQPFLMDLEGKQGNFKNLREFVFKNIDGYFKIYSKHTPINLVRDLPQGFSALEPLVDLPIGINITRFQTLLALHRSYLTPGDSSSGWTAGAAAYYVGYLQPRTFLLKYNENGTITDAVDCALDPLSETKCTLKSFTVEKGIYQTSNFRVQPTESIVRFPNITNLCPFGEVFNATRFASVYAWNRKRISNCVADYSVLYNSASFSTFKCYGVSPTKLNDLCFTNVYADSFVIRGDEVRQIAPGQTGKIADYNYKLPDDFTGCVIAWNSNNLDSKVGGNYNYLYRLFRKSNLKPFERDISTEIYQAGSTPCNGVEGFNCYFPLQSYGFQPTNGVGYQPYRVVVLSFELLHAPATVCGPKKSTNLVKNKCVNFNFNGLTGTGVLTESNKKFLPFQQFGRDIADTTDAVRDPQTLEILDITPCSFGGVSVITPGTNTSNQVAVLYQDVNCTEVPVAIHADQLTPTWRVYSTGSNVFQTRAGCLIGAEHVNNSYECDIPIGAGICASYQTQTNSPRRARSVASQSIIAYTMSLGAENSVAYSNNSCAIPTNFTISVTTEILPVSMTKTSVDCTMYICGDSTECSNLLLQYGSFCTQLNRALTGIAVEQDKNTQEVFAQVKQIYKTPPIKDFGGFNFSQILPDPSKPSKRSFIEDLLFNKVTLADAGFIKQYGDCLGDIAARDLICAQKFNGLTVLPPLLTDEMIAQYTSALLAGTITSGWTFGAGAALQIPFAMQMAYRFNGIGVTQNVLYENQKLIANQFNSAIGKIQDSLSSTASALGKLQDVVNQNAQALNTLVKQLSSNFGAISSVLNDILSRLDKVEAEVQIDRLITGRLQSLQTYVTQQLIRAAEIRASANLAATKMSECVLGQSKRVDFCGKGYHLMSFPQSAPHGVVFLHVTYVPAQEKNFTCAPAICHDGKAHFPREGVFVSNGTHWFVTQRNFYEPQIITTDNTFVSGNCDVVIGIVNNTVYDPLQPELDSFKEELDKYFKNHTSPDVDLGDIPGINASVVNIQKEIDRLNEVAKNLNESLIDLQELGKYEQYIK

SEQ ID NO: 1996 - protein, 1211 aa, Artificial Sequence
  SARS-CoV-2/USA/WA-UW261/2020__EPI_ISL_418046 spike protein (1-1211)(I712C_T1077C)
MFVFLVLLPLVSSQCVNLTTRTQLPPAYTNSFTRGVYYPDKVFRSSVLHSTQDLFLPFFSNVTWFHAIHVSGTNGTKRFDNPVLPFNDGVYFASTEKSNIIRGWIFGTTLDSKTQSLLIVNNATNVVIKVCEFQFCNDPFLGVYYHKNNKSWMESEFRVYSSANNCTFEYVSQPFLMDLEGKQGNFKNLREFVFKNIDGYFKIYSKHTPINLVRDLPQGFSALEPLVDLPIGINITRFQTLLALHRSYLTPGDSSSGWTAGAAAYYVGYLQPRTFLLKYNENGTITDAVDCALDPLSETKCTLKSFTVEKGIYQTSNFRVQPTESIVRFPNITNLCPFGEVFNATRFTSVYAWNRKRISNCVADYSVLYNSASFSTFKCYGVSPTKLNDLCFTNVYADSFVIRGDEVRQIAPGQTGKIADYNYKLPDDFTGCVIAWNSNNLDSKVGGNYNYLYRLFRKSNLKPFERDISTEIYQAGSTPCNGVEGFNCYFPLQSYGFQPTNGVGYQPYRVVVLSFELLHAPATVCGPKKSTNLVKNKCVNFNFNGLTGTGVLTESNKKFLPFQQFGRDIADTTDAVRDPQTLEILDITPCSFGGVSVITPGTNTSNQVAVLYQDVNCTEVPVAIHADQLTPTWRVYSTGSNVFQTRAGCLIGAEHVNNSYECDIPIGAGICASYQTQTNSPRRARSVASQSIIAYTMSLGAENSVAYSNNSCAIPTNFTISVTTEILPVSMTKTSVDCTMYICGDSTECSNLLLQYGSFCTQLNRALTGIAVEQDKNTQEVFAQVKQIYKTPPIKDFGGFNFSQILPDPSKPSKRSFIEDLLFNKVTLADAGFIKQYGDCLGDIAARDLICAQKFNGLTVLPPLLTDEMIAQYTSALLAGTITSGWTFGAGAALQIPFAMQMAYRFNGIGVTQNVLYENQKLIANQFNSAIGKIQDSLSSTASALGKLQDVVNQNAQALNTLVKQLSSNFGAISSVLNDILSRLDKVEAEVQIDRLITGRLQSLQTYVTQQLIRAAEIRASANLAATKMSECVLGQSKRVDFCGKGYHLMSFPQSAPHGVVFLHVTYVPAQEKNFTCAPAICHDGKAHFPREGVFVSNGTHWFVTQRNFYEPQIITTDNTFVSGNCDVVIGIVNNTVYDPLQPELDSFKEELDKYFKNHTSPDVDLGDISGINASVVNIQKEIDRLNEVAKNLNESLIDLQELGKYEQYIK

SEQ ID NO: 1997 - protein, 1211 aa, Artificial Sequence
  SARS-CoV-2/Portugal/PT0035/2020__EPI_ISL_418020 spike protein (1-1211)(I712C_T1077C)
MFVFLVLLPLVSSQCVNLTTRTQLPPAYTNSFTRGVYYPDKVFRSSVLHSTQDLFLPFFSNVTWFHAIHVSGTNGTKRFDNPVLPFNDGVYFASTEKSNIIRGWIFGTTLDSKTQSLLIVNNATNVVIKVCEFQFCNDPFLGVYYHKNNKSWMESEFRVYSSANNCTFEYVSQPFLMDLEGKQGNFKNLREFVFKNIDGYFKIYSKHTPINLVRDLPQGFSALEPLVDLPIGINITRFQTLLALHRSYLTPGDSSSGWTAGAAAYYVGYLQPRTFLLKYNENGTITDAVDCALDPLSETKCTLKSFTVEKGIYQTSNFRVQPTESIVRFPNITNLCPFGEVFNATRFASVYAWNRKRISNCVADYSVLYNSASFSTFKCYGVSPTKLNDLCFTNVYADSFVIRGDEVRQIAPGQTGKIADYNYKLPDDFTGCVIAWNSNNLDSKVGGNYNYLYRLFRKSNLKPFERDISTEIYQAGSTPCNGVEGFNCYFPLQSYGFQPTNGVGYQPYRVVVLSFELLHAPATVCGPKKSTNLVKNKCVNFNFNGLTGTGVLTESNKKFLPFQQFGRDIADTTDAVRDPQTLEILDITPCSFGGVSVITPGTNTSNQVAVLYQDVNCTEVPVAIHADQLTPTWRVYSTGSNVFQTRAGCLIGAEHVNNSYECDIPIGAGICASYQTQTNSPRRARSVASQSIIAYTMSLGAENSVAYSNNSCAIPTNFTISVTTEILPVSMTKTSVDCTMYICGDSTECSNLLLQYGSFCTQLNRALTGIAVEQDKNTQEVFAQVKQIYKTPPIKDFGGFNFSQILPDPSKPSKRSFIEDLLFNKVTLADAGFIKQYGDCLGDISARDLICAQKFNGLTVLPPLLTDEMIAQYTSALLAGTITSGWTFGAGAALQIPFAMQMAYRFNGIGVTQNVLYENQKLIANQFNSAIGKIQDSLSSTASALGKLQDVVNQNAQALNTLVKQLSSNFGAISSVLNDILSRLDKVEAEVQIDRLITGRLQSLQTYVTQQLIRAAEIRASANLAATKMSECVLGQSKRVDFCGKGYHLMSFPQSAPHGVVFLHVTYVPAQEKNFTCAPAICHDGKAHFPREGVFVSNGTHWFVTQRNFYEPQIITTDNTFVSGNCDVVIGIVNNTVYDPLQPELDSFKEELDKYFKNHTSPDVDLGDISGINASVVNIQKEIDRLNEVAKNLNESLIDLQELGKYEQYIK

SEQ ID NO: 1998 - protein, 1211 aa, Artificial Sequence
  SARS-CoV-2/USA/NY-NYUMC7/2020__EPI_ISL_418192 spike protein (1-1211)(I712C_T1077C)
MFVFLVLLPLVSSQCVNLTTRTQLPPAYTNSFTRGVYYPDKVFRSSVLHSTQDLFLPFFSNVTWFHAIHVSGTNGTKRFDNPVLPFNDGVYFASTEKSNIIRGWIFGTTLDSKTQSLLIVNNATNVVIKVCEFQFCNDPFLGVYHHKNNKSWMESEFRVYSSANNCTFEYVSQPFLMDLEGKQGNFKNLREFVFKNIDGYFKIYSKHTPINLVRDLPQGFSALEPLVDLPIGINITRFQTLLALHRSYLTPGDSSSGWTAGAAAYYVGYLQPRTFLLKYNENGTITDAVDCALDPLSETKCTLKSFTVEKGIYQTSNFRVQPTESIVRFPNITNLCPFGEVFNATRFASVYAWNRKRISNCVADYSVLYNSASFSTFKCYGVSPTKLNDLCFTNVYADSFVIRGDEVRQIAPGQTGKIADYNYKLPDDFTGCVIAWNSNNLDSKVGGNYNYLYRLFRKSNLKPFERDISTEIYQAGSTPCNGVEGFNCYFPLQSYGFQPTNGVGYQPYRVVVLSFELLHAPATVCGPKKSTNLVKNKCVNFNFNGLTGTGVLTESNKKFLPFQQFGRDIADTTDAVRDPQTLEILDITPCSFGGVSVITPGTNTSNQVAVLYQGVNCTEVPVAIHADQLTPTWRVYSTGSNVFQTRAGCLIGAEHVNNSYECDIPIGAGICASYQTQTNSPRRARSVASQSIIAYTMSLGAENSVAYSNNSCAIPTNFTISVTTEILPVSMTKTSVDCTMYICGDSTECSNLLLQYGSFCTQLNRALTGIAVEQDKNTQEVFAQVKQIYKTPPIKDFGGFNFSQILPDPSKPSKRSFIEDLLFNKVTLADAGFIKQYGDCLGDIAARDLICAQKFNGLTVLPPLLTDEMIAQYTSALLAGTITSGWTFGAGAALQIPFAMQMAYRFNGIGVTQNVLYENQKLIANQFNSAIGKIQDSLSSTASALGKLQDVVNQNAQALNTLVKQLSSNFGAISSVLNDILSRLDKVEAEVQIDRLITGRLQSLQTYVTQQLIRAAEIRASANLAATKMSECVLGQSKRVDFCGKGYHLMSFPQSAPHGVVFLHVTYVPAQEKNFTCAPAICHDGKAHFPREGVFVSNGTHWFVTQRNFYEPQIITTDNTFVSGNCDVVIGIVNNTVYDPLQPELDSFKEELDKYFKNHTSPDVDLGDISGINASVVNIQKEIDRLNEVAKNLNESLIDLQELGKYEQYIK

SEQ ID NO: 1999 - protein, 1211 aa, Artificial Sequence
  SARS-CoV-2/Iceland/189/2020__EPI_ISL_417709 spike protein (1-1211)(I712C_T1077C)
MFVFLVLLPLVSSQCVNLTTRTQLPPAYTNSFTRGVYYPDKVFRSSVLHSTQDLFLPFFSNVTWFHAIHVSGTNGTKRFDNPVLPFNDGVYFASTEKSNIIRGWIFGTTLDSKTQSLLIVNNATNVVIKVCEFQFCNDPFLGVYYHKNNKSWMESEFRVYSSANNCTFEYVSQPFLMDLEGKQGNFKNLREFVFKNIDGYFKIYSKHTPINLVRDLPQGFSALEPLVDLPIGINITRFQTLLALHRSYLTPGDSSSGWTAGAAAYYVGYLQPRTFLLKYNENGTITDAVDCALDPLSETKCTLKSFTVEKGIYQTSNFRVQPTESIVRFPNITNLCPFGEVFNATRFASVYAWNRKRISNCVADYSVLYNSASFSTFKCYGVSPTKLNDLCFTNVYADSFVIRGDEVRQIAPGQTGKIADYNYKLPDDFTGCVIAWNSNNLDSKVGGNYNYLYRLFRKSNLKPFERDISTEIYQAGSTPCNGVEGFNCYFPLQSYGFQPTNGVGYQPYRVVVLSFELLHAPATVCGPKKSTNLVKNKCVNFNFNGLTGTGVLTESNKKFLPFQQFGRDIADTTDAVRDPQTLEILDITPCSFGGVSVITPGTNTSNQVAVLYQGVNCTEVPVAIHADQLTPTWRVYSTGSNVFQTRAGCLIGAEHVNNSYECDIPIGAGICASYQTQTNSPRRARSVASQSIIAYTMSLGAENSVAYSNNSCAIPTNFTISVTTEILPVSMTKTSVDCTMYICGDSTECSNLLLQYGSFCTQLNRALTGIAVEQDKNTQEVFAQVKQIYKTPPIKDFGGFNFSQILPDPSKPSKRSFIEDLLFNKVTLADAGFTKQYGDCLGDIAARDLICAQKFNGLTVLPPLLTDEMIAQYTSALLAGTITSGWTFGAGAALQIPFAMQMAYRFNGIGVTQNVLYENQKLIANQFNSAIGKIQDSLSSTASALGKLQDVVNQNAQALNTLVKQLSSNFGAISSVLNDILSRLDKVEAEVQIDRLITGRLQSLQTYVTQQLIRAAEIRASANLAATKMSECVLGQSKRVDFCGKGYHLMSFPQSAPHGVVFLHVTYVPAQEKNFTCAPAICHDGKAHFPREGVFVSNGTHWFVTQRNFYEPQIITTDNTFVSGNCDVVIGIVNNTVYDPLQPELDSFKEELDKYFKNHTSPDVDLGDISGINASVVNIQKEIDRLNEVAKNLNESLIDLQELGKYEQYIK

SEQ ID NO: 2000 - protein, 1211 aa, Artificial Sequence
  SARS-CoV-2/Australia/NSW56/2020__EPI_ISL_417408 spike protein (1-1211)(I712C_T1077C)
MFVFLVLLPLVSSQCVNLTTRTQLPPAYTNSFTRGVYYPDKVFRSSVLHSTQDLFLPFFSNVTWFHAIHVSGTNGTKRFDNPVLPFNDGVYFASTEKSNIIRGWIFGTTLDSKTQSLLIVNNATNVVIKVCEFQFCNDPFLGVYYHKNNKSWMESEFRVYSSANNCTFEYVSQPFLMDLEGKQGNFKNLREFVFKNIDGYFKIYSKHTPINLVRDLPQGFSALEPLVDLPIGINITRFQTLLALHRSYLTPGDSSSGWTAGAAAYYVGYLQPRTFLLKYNENGTITDAVDCALDPLSETKCTLKSFTVEKGIYQTSNFRVQPTESIVRFPNITNLCPFGEVFNATRFASVYAWNRKRISNCVADYSVLYNSASFSTFKCYGVSPTKLNDLCFTNVYADSFVIRGDEVRQIAPGQTGKIADYNYKLPDDFTGCVIAWNSNNLDSKVGGNYNYLYRLFRKSNLKPFERDISTEIYQAGSTPCNGVEGFNCYFPLQSYGFQPTNGVGYQPYRVVVLSFELLHAPATVCGPKKSTNLVKNKCVNFNFNGLTGTGVLTESNKKFLPFQQFGRDIADTTDAVRDPQTLEILDITPCSFGGVSVITPGTNTSNQVAVLYQDVNCTEVPVAIHADQLTPTWRVYSTGSNVFQTRAGCLIGAEHVNNSYECDIPIGAGICASYQTQTNSPRRARSVASQSIIAYTMSLGAENSVAYSNNSCAIPTNFTISVTTEILPVSMTKTSVDCTMYICGDSTECSNLLLQYGSFCTQLNRALTGIAVEQDKNTQEVFAQVKQIYKTPPIKDFGGFNFSQILPDSSKPSKRSFIEDLLFNKVTLADAGFIKQYGDCLGDIAARDLICAQKFNGLTVLPPLLTDEMIAQYTSALLAGTITSGWTFGAGAALQIPFAMQMAYRFNGIGVTQNVLYENQKLIANQFNSAIGKIQDSLSSTASALGKLQDVVNQNAQALNTLVKQLSSNFGAISSVLNDILSRLDKVEAEVQIDRLITGRLQSLQTYVTQQLIRAAEIRASANLAATKMSECVLGQSKRVDFCGKGYHLMSFPQSAPHGVVFLHVTYVPAQEKNFTCAPAICHDGKAHFPREGVFVSNGTHWFVTQRNFYEPQIITTDNTFVSGNCDVVIGIVNNTVYDPLQPELDSFKEELDKYFKNHTSPDVDLGDISGINASVVNIQKEIDRLNEVAKNLNESLIDLQELGKYEQYIK

SEQ ID NO: 2001 - protein, 1211 aa, Artificial Sequence
  SARS-CoV-2/Iceland/280/2020__EPI_ISL_417608 spike protein (1-1211)(I712C_T1077C)
MFVFLVLLPLVSSQCVNLTTRTQLPPAYTNSFTRGVYYPDKVFRSSVLHSTQDLFLPFFSNVTWFHAIHVSGTNGTKRFDNPVLPFNDGVYFASTEKSNIIRGWIFGTTLDSKTQSLLIVNNATNVVIKVCEFQFCNDPFLGVYYHKNNKSWMESEFRVYSSANNCTFEYVSQPFLMDLEGKQGNFKNLREFVFKNIDGYFKIYSKHTPINLVRDLPQGFSALEPLVDLPIGINITRFQTLLALHRSYLTPGDSSSGWTAGAAAYYVGYLQPRTFLLKYNENGTITDAVDCALDPLSETKCTLKSFTVEKGIYQTSNFRVQPTESIVRFPNITNLCPFGEVFNATRFASVYAWNRKRISNCVADYSVLYNSASFSTFKCYGVSPTKLNDLCFTNVYADSFVIRGDEVRQIAPGQTGKIADYNYKLPDDFTGCVIAWNSNNLDSKVGGNYNYLYRLFRKSNLKPFERDISTEIYQAGSTPCNGVEGFNCYFPLQSYGFQPTNGVGYQPYRVVVLSFELLHAPATVCGPKKSTNLVKNKCVNFNFNGLTGTGVLTESNKKFLPFQQFGRDIADTTDAVRDPQTLEILDITPCSFGGVSVITPGTNTSNQVAVLYQGVNCTEVPVAIHADQLTPTWRVYSTGSNVFQTRAGCLIGAEHVNNSYECDIPIGAGICASYHTQTNSPRRARSVASQSIIAYTMSLGAENSVAYSNNSCAIPTNFTISVTTEILPVSMTKTSVDCTMYICGDSTECSNLLLQYGSFCTQLNRALTGIAVEQDKNTQEVFAQVKQIYKTPPIKDFGGFNFSQILPDPSKPSKRSFIEDLLFNKVTLADAGFIKQYGDCLGDIAARDLICAQKFNGLTVLPPLLTDEMIAQYTSALLAGTITSGWTFGAGAALQIPFAMQMAYRFNGIGVTQNVLYENQKLIANQFNSAIGKIQDSLSSTASALGKLQDVVNQNAQALNTLVKQLSSNFGAISSVLNDILSRLDKVEAEVQIDRLITGRLQSLQTYVTQQLIRAAEIRASANLAATKMSECVLGQSKRVDFCGKGYHLMSFPQSAPHGVVFLHVTYVPAQEKNFTCAPAICHDGKAHFPREGVFVSNGTHWFVTQRNFYEPQIITTDNTFVSGNCDVVIGIVNNTVYDPLQPELDSFKEELDKYFKNHTSPDVDLGDISGINASVVNIQKEIDRLNEVAKNLNESLIDLQELGKYEQYIK

SEQ ID NO: 2002 - protein, 1211 aa, Artificial Sequence; identical to SEQ ID NO: 1957
  SARS-CoV-2/Iceland/247/2020__EPI_ISL_417575 spike protein (1-1211)(I712C_T1077C)

SEQ ID NO: 2003 - protein, 1211 aa, Artificial Sequence
  SARS-CoV-2/Iceland/238/2020__EPI_ISL_417566 spike protein (1-1211)(I712C_T1077C)
MFVFLVLLPLVSSQCVNLTTRTQLPPAYTNSFTRGVYYPDKVFRSSVLHSTQDLFLPFFSNVTWFHAIHVSGTNGTKRFDNPVLPFNDGVYFASTEKSNIIRGWIFGTTLDSKTQSLLIVNNATNVVIKVCEFQFCNDPFLGVYYHKNNKSWMESEFRVYSSANNCTFEYVSQPFLMDLEGKQGNFKNLREFVFKNIDGYFKIYSKHTPINLVRDLPQGFSALEPLVDLPIGINITRFQTLLALHRSYLTPGDSSSGWTAGAAAYYVGYLQPRTFLLKYNENGTITDAVDCALDPLSETKCTLKSFTVEKGIYQTSNFRVQPTESIVRFPNITNLCPFGEVFNATRFASVYAWNRKRISNCVADYSVLYNSASFSTFKCYGVSPTKLNDLCFTNVYADSFVIRGDEVRQIAPGQTGKIADYNYKLPDDFTGCVIAWNSNNLDSKVGGNYNYLYRLFRKSNLKPFERDISTEIYQAGSTPCNGVEGFNCYFPLQSYGFQPTNGVGYQPYRVVVLSFELLHAPATVCGPKKSTNLVKNKCVNFNFNGLTGTGVLTESNKKFLPFQQFGRDIADTTDAVRDPQTLEILDITPCSFGGVSVITPGTNTSNQVAVLYQGVNCTEVPVAIHADQLTPTWRVYSTGSNVFQTRAGCLIGAEHVNNSYECDIPIGAGICASYQTQTNSPRRARSVASQSIIAYTMSLGAENSVAYSNNSCAIPTNFTISVTTEILPVSMTKTSVDCTMYICGDSTECSNLLLQYGSFCTQLNRALTGIAVEQDKNTQEVFAQVKQIYKTPPIKDFGGFNFSQILPDPSKPSKRSFIEDLLFNKVTLADVGFIKQYGDCLGDIAARDLICAQKFNGLTVLPPLLTDEMIAQYTSALLAGTITSGWTFGAGAALQIPFAMQMAYRFNGIGVTQNVLYENQKLIANQFNSAIGKIQDSLSSTASALGKLQDVVNQNAQALNTLVKQLSSNFGAISSVLNDILSRLDKVEAEVQIDRLITGRLQSLQTYVTQQLIRAAEIRASANLAATKMSECVLGQSKRVDFCGKGYHLMSFPQSAPHGVVFLHVTYVPAQEKNFTCAPAICHDGKAHFPREGVFVSNGTHWFVTQRNFYEPQIITTDNTFVSGNCDVVIGIVNNTVYDPLQPELDSFKEELDKYFKNHTSPDVDLGDISGINASVVNIQKEIDRLNEVAKNLNESLIDLQELGKYEQYIK

SEQ ID NO: 2004 - protein, 1211 aa, Artificial Sequence
  SARS-CoV-2/Greece/16/2020__EPI_ISL_418265 spike protein (1-1211)(I712C_T1077C)
MFVFLVLLPLVSSQCVNLTTRTQLPPAYTNSFTRGVYYPDKVFRSSVLHSTQDLFLPFFSNVTWFHAIHVSGTNGTKRFDNPVLPFNDGVYFASTEKSNIIRGWIFGTTLDSKTQSLLIVNNATNVVIKVCEFQFCNDPFLGVYYHKNNKSWMESEFRVYSSANNCTFEYVSQPFLMDLEGKQGNFKNLREFVFKNVDGYFKIYSKHTPINLVRDLPQGFSALEPLVDLPIGINITRFQTLLALHRSYLTPGDSSSGWTAGAAAYYVGYLQPRTFLLKYNENGTITDAVDCALDPLSETKCTLKSFTVEKGIYQTSNFRVQPTESIVRFPNITNLCPFGEVFNATRFASVYAWNRKRISNCVADYSVLYNSASFSTFKCYGVSPTKLNDLCFTNVYADSFVIRGDEVRQIAPGQTGKIADYNYKLPDDFTGCVIAWNSNNLDSKVGGNYNYLYRLFRKSNLKPFERDISTEIYQAGSTPCNGVEGFNCYFPLQSYGFQPTNGVGYQPYRVVVLSFELLHAPATVCGPKKSTNLVKNKCVNFNFNGLTGTGVLTESNKKFLPFQQFGRDIADTTDAVRDPQTLEILDITPCSFGGVSVITPGTNTSNQVAVLYQDVNCTEVPVAIHADQLTPTWRVYSTGSNVFQTRAGCLIGAEHVNNSYECDIPIGAGICASYQTQTNSPRRARSVASQSIIAYTMSLGAENSVAYSNNSCAIPTNFTISVTTEILPVSMTKTSVDCTMYICGDSTECSNLLLQYGSFCTQLNRALTGIAVEQDKNTQEVFAQVKQIYKTPPIKDFGGFNFSQILPDPSKPSKRSFIEDLLFNKVTLADAGFIKQYGDCLGDIAARDLICAQKFNGLTVLPPLLTDEMIAQYTSALLAGTITSGWTFGAGAALQIPFAMQMAYRFNGIGVTQNVLYENQKLIANQFNSAIGKIQDSLSSTASALGKLQDVVNQNAQALNTLVKQLSSNFGAISSVLNDILSRLDKVEAEVQIDRLITGRLQSLQTYVTQQLIRAAEIRASANLAATKMSECVLGQSKRVDFCGKGYHLMSFPQSAPHGVVFLHVTYVPAQEKNFTCAPAICHDGKAHFPREGVFVSNGTHWFVTQRNFYEPQIITTDNTFVSGNCDVVIGIVNNTVYDPLQPELDSFKEELDKYFKNHTSPDVDLGDISGINASVVNIQKEIDRLNEVAKNLNESLIDLQELGKYEQYIK

SEQ ID NO: 2005 - protein, 1211 aa, Artificial Sequence
  SARS-CoV-2/Iceland/319/2020__EPI_ISL_417648 spike protein (1-1211)(I712C_T1077C)
MFVFLVLLPLVSSQCVNLTTRTQLPPAYTNSFTRGVYYPDKVFRSSVLHSTQDLFLPFFSNVTWFHAIHVSGTNGTKRFDNPVLPFNDGVYFASTEKSNIIRGWIFGTTLDSKTQSLLIVNNATNVVIKVCEFQFCNDPFLGVYYHKNNKSWMESEFRVYSSANNCTFEYVSQPFLIDLEGKQGNFKNLREFVFKNIDGYFKIYSKHTPINLVRDLPQGFSALEPLVDLPIGINITRFQTLLALHRSYLTPGDSSSGWTAGAAAYYVGYLQPRTFLLKYNENGTITDAVDCALDPLSETKCTLKSFTVEKGIYQTSNFRVQPTESIVRFPNITNLCPFGEVFNATRFASVYAWNRKRISNCVADYSVLYNSASFSTFKCYGVSPTKLNDLCFTNVYADSFVIRGDEVRQIAPGQTGKIADYNYKLPDDFTGCVIAWNSNNLDSKVGGNYNYLYRLFRKSNLKPFERDISTEIYQAGSTPCNGVEGFNCYFPLQSYGFQPTNGVGYQPYRVVVLSFELLHAPATVCGPKKSTNLVKNKCVNFNFNGLTGTGVLTESNKKFLPFQQFGRDIADTTDAVRDPQTLEILDITPCSFGGVSVITPGTNTSNQVAVLYQGVNCTEVPVAIHADQLTPTWRVYSTGSNVFQTRAGCLIGAEHVNNSYECDIPIGAGICASYQTQTNSPRRARSVASQSIIAYTMSLGAENSVAYSNNSCAIPTNFTISVTTEILPVSMTKTSVDCTMYICGDSTECSNLLLQYGSFCTQLNRALTGIAVEQDKNTQEVFAQVKQIYKTPPIKDFGGFNFSQILPDPSKPSKRSFIEDLLFNKVTLADAGFIKQYGDCLGDIAARDLICAQKFNGLTVLPPLLTDEMIAQYTSALLAGTITSGWTFGAGAALQIPFAMQMAYRFNGIGVTQNVLYENQKLIANQFNSAIGKIQDSLSSTASALGKLQDVVNQNAQALNTLVKQLSSNFGAISSVLNDILSRLDKVEAEVQIDRLITGRLQSLQTYVTQQLIRAAEIRASANLAATKMSECVLGQSKRVDFCGKGYHLMSFPQSAPHGVVFLHVTYVPAQEKNFTCAPAICHDGKAHFPREGVFVSNGTHWFVTQRNFYEPQIITTDNTFVSGNCDVVIGIVNNTVYDPLQPELDSFKEELDKYFKNHTSPDVDLGDISGINASVVNIQKEIDRLNEVAKNLNESLIDLQELGKYEQYIK

SEQ ID NO: 2006 - protein, 1211 aa, Artificial Sequence
  SARS-CoV-2/Congo/94/2020__EPI_ISL_417947 spike protein (1-1211)(I712C_T1077C)
MFVFLVLLPLVSSQCVNLTTRTQLPPAYTNSFTRGVYYPDKVFRSSVLHSTQDLFLPFFSNVTWFHAIHVSGTNGTKRFDNPVLPFNDGVYFASTEKSNIIRGWIFGTTLDSKTQSLLIVNNATNVVIKVCEFQFCNDPFLGVYYHKNNKSWMESEFRVYSSANNCTFEYVSQPFLMDLEGKQGNFKNLREFVFKNIDGYFKIYSKHTPINLVRDLPQGFSALEPLVDLPIGINITRFQTLLALHRSYLTPGDSSSGWTAGAAAYYVGYLQPRTFLLKYNENGTITDAVDCALDPLSETKCTLKSFTVEKGIYQTSNFRVQPTESIVRFPNITNLCPFGEVFNATRFASVYAWNRKRISNCVADYSVLYNSASFSTFKCYGVSPTKLNDLCFTNVYADSFVIRGDEVRQIAPGQTGKIADYNYKLPDDFTGCVIAWNSNNLDSKVGGNYNYLYRLFRKSNLKPFERDISTEIYQAGSTPCNGVEGFNCYFPLQSYGFQPTNGVGYQPYRVVVLSFELLHAPATVCGPKKSTNLVKNKCVNFNFNGLTGTGVLTESNKKFLPFQQFGRDIADTTDAVRDPQTLEILDITPCSFGGVSVITPGTNTSNQVAVLYQGVNCTEVPVAIHADQLTPTWRVYSTGSNVFQTRAGCLIGAEHVNNSYECDIPIGAGICASYQTQTNSPRRARSVASQSIIAYTMSLGAENSVAYSNNSCAIPTNFTISVTTEILPVSMTKTSVDCTMYICGDSTECSNLLLQYGSFCTQLNRALTGIAVEQDKNTQEVFAQVKQIYKTPPIKDFGGFNFSQILPDPSKPSKRSFIEDILFNKVTLADAGFIKQYGDCLGDIAARDLICAQKFNGLTVLPPLLTDEMIAQYTSALLAGTITSGWTFGAGAALQIPFAMQMAYRFNGIGVTQNVLYENQKLIANQFNSAIGKIQDSLSSTASALGKLQDVVNQNAQALNTLVKQLSSNFGAISSVLNDILSRLDKVEAEVQIDRLITGRLQSLQTYVTQQLIRAAEIRASANLAATKMSECVLGQSKRVDFCGKGYHLMSFPQSAPHGVVFLHVTYVPAQEKNFTCAPAICHDGKAHFPREGVFVSNGTHWFVTQRNFYEPQIITTDNTFVSGNCDVVIGIVNNTVYDPLQPELDSFKEELDKYFKNHTSPDVDLGDISGINASVVNIQKEIDRLNEVAKNLNESLIDLQELGKYEQYIK

SEQ ID NO: 2007 - protein, 1211 aa, Artificial Sequence
  SARS-CoV-2/Congo/158/2020__EPI_ISL_417950 spike protein (1-1211)(I712C_T1077C)
MFVFLVLLPLVSSQCVNLTTRTQLPPAYTNSFTRGVYYPDKVFRSSVLHSTQDLFLPFFSNVTWFHAIHVSGTNGTKRFDNPVLPFNDGVYFASTEKSNIIRGWIFGTTLDSKTQSLLIVNNATNVVIKVCEFQFCNDPFLGVYYHKNNKSWMESEFRVYSSANNCTFEYVSQPFLMDLEGKQGNFKNLREFVFKNIDGYFKIYSKHTPINLVRDLPQGFSALEPLVDLPIGINITRFQTLLALHRSYLTPGDSSSGWTAGAAAYYVGYLQPRTFLLKYNENGTITDAVDCALDPLSETKCTLKSFTVEKGIYQTSNFRVQPTESIVRFPNITNLCPFGEVFNATRFASVYAWNRKRISNCVADYSVLYNSASFSTFKCYGVSPTKLNDLCFTNVYADSFVIRGDEVRQIAPGQTGKIADYNYKLPDDFTGCVIAWNSNNLDSKVGGNYNYLYRLFRKSNLKPFERDISTEIYQAGSTPCNGVEGFNCYFPLQSYGFQPTNGVGYQPYRVVVLSFELLHAPATVCGPKKSTNLVKNKCVNFNFNGLTGTGVLTESNKKFLPFQQFGRDIADTTDAVRDPQTLEILDITPCSFGGVSVITPGTNTSNQVAVLYQDVNCTEVPVAIHADQLTPTWRVYSTGSNVFQTRAGCLIGAEHVNNSYECDIPIGAGICASYQTQTNSPRRARSVASQSIIAYTMSLGAENSVAYSNNSCAIPTNFTISVTTEILPVSMTKTSVDCTMYICGDSTECSNLLLQYGSFCTQLNRALTGIAVEQDKNTQEVFAQVKQIYKTPPIKDFGGFNFSQILPDPSKPSKRSFIEDLLFNKVTLADAGFIKQYGDCLGDIAARDLICAQKFNGLTVLPPLLTDEMIAQYTSALLAGTITSGWTFGAGAALQIPFAMQMAYRFNGIGVTQNVLYENQKLIANQFNSAIGKIQDSLSSTASALGKLQDVVNQNAQALNTLVKQLSSNFGAISSVLNDILSRLDKVEAEVQIDRLITGRLQSLQTYVTQQLIRAAEIRASANLAATKMSECVLGQSKRVDFCGKGYHLMSFPQSAPHGVVFLHVTYVPAQEKNFTCAPAICHDGKAHFPREGVFVSNGTHWFVTQRNFYEPQIITTDNTFLSGNCDVVIGIVNNTVYDPLQPELDSFKEELDKYFKNHTSPDVDLGDISGINASVVNIQKEIDRLNEVAKNLNESLIDLQELGKYEQYIK

SEQ ID NO: 2008 - protein, 1211 aa, Artificial Sequence
  SARS-CoV-2/USA/UT-00034/2020__EPI_ISL_417977 spike protein (1-1211)(I712C_T1077C)
MFVFLVLLPLVSSQCVNLTTRTQLPPAYTNSFTRGVYYPDKVFRSSVLHSTQDLFLPFFSNVTWFHAIHVSGTNGTKRFDNPVLPFNDGVYFASTEKSNIIRGWIFGTTLDSKTQSLLIVNNATNVVIKVCEFQFCNDPFLGVYYYKNNKSWMESEFRVYSSANNCTFEYVSQPFLMDLEGKQGNFKNLREFVFKNIDGYFKIYSKHTPINLVRDLPQGFSALEPLVDLPIGINITRFQTLLALHRSYLTPGDSSSGWTAGAAAYYVGYLQPRTFLLKYNENGTITDAVDCALDPLSETKCTLKSFTVEKGIYQTSNFRVQPTESIVRFPNITNLCPFGEVFNATRFASVYAWNRKRISNCVADYSVLYNSASFSTFKCYGVSPTKLNDLCFTNVYADSFVIRGDEVRQIAPGQTGKIADYNYKLPDDFTGCVIAWNSNNLDSKVGGNYNYLYRLFRKSNLKPFERDISTEIYQAGSTPCNGVEGFNCYFPLQSYGFQPTNGVGYQPYRVVVLSFELLHAPATVCGPKKSTNLVKNKCVNFNFNGLTGTGVLTESNKKFLPFQQFGRDIADTTDAVRDPQTLEILDITPCSFGGVSVITPGTNTSNQVAVLYQGVNCTEVPVAIHADQLTPTWRVYSTGSNVFQTRAGCLIGAEHVNNSYECDIPIGAGICASYQTQTNSPRRARSVASQSIIAYTMSLGAENSVAYSNNSCAIPTNFTISVTTEILPVSMTKTSVDCTMYICGDSTECSNLLLQYGSFCTQLNRALTGIAVEQDKNTQEVFAQVKQIYKTPPIKDFGGFNFSQILPDPSKPSKRSFIEDLLFNKVTLADAGFIKQYGDCLGDIAARDLICAQKFNGLTVLPPLLTDEMIAQYTSALLAGTITSGWTFGAGAALQIPFAMQMAYRFNGIGVTQNVLYENQKLIANQFNSAIGKIQDSLSSTASALGKLQDVVNQNAQALNTLVKQLSSNFGAISSVLNDILSRLDKVEAEVQIDRLITGRLQSLQTYVTQQLIRAAEIRASANLAATKMSECVLGQSKRVDFCGKGYHLMSFPQSAPHGVVFLHVTYVPAQEKNFTCAPAICHDGKAHFPREGVFVSNGTHWFVTQRNFYEPQIITTDNTFVSGNCDVVIGIVNNTVYDPLQPELDSFKEELDKYFKNHTSPDVDLGDISGINASVVNIQKEIDRLNEVAKNLNESLIDLQELGKYEQYIK

SEQ ID NO: 2009 - protein, 1211 aa, Artificial Sequence
  SARS-CoV-2/USA/UT-00033/2020__EPI_ISL_417976 spike protein (1-1211)(I712C_T1077C)
MFVFLVLLPLVSSQCVNLTTRTQLPPAYTNSFTRGVYYPDKVFRSSVLHSTQDLFLPFFSNVTWFHAIHVSGTNGTKRFDNPVLPFNDGVYFASTEKSNIIRGWIFGTTLDSKTQSLLIVNNATNVVIKVCEFQFCNDPFLGVYYHKNNKSWMESEFRVYSSANNCTFEYVSQPFLMDLEGKQGNFKNLREFVFKNIDGYFKIYSKHTPINLVRDLPQGFSALEPLVDLPIGINITRFQTLLALHRSYLTPGDSSSGLTAGAAAYYVGYLQPRTFLLKYNENGTITDAVDCALDPLSETKCTLKSFTVEKGIYQTSNFRVQPTESIVRFPNITNLCPFGEVFNATRFASVYAWNRKRISNCVADYSVLYNSASFSTFKCYGVSPTKLNDLCFTNVYADSFVIRGDEVRQIAPGQTGKIADYNYKLPDDFTGCVIAWNSNNLDSKVGGNYNYLYRLFRKSNLKPFERDISTEIYQAGSTPCNGVEGFNCYFPLQSYGFQPTNGVGYQPYRVVVLSFELLHAPATVCGPKKSTNLVKNKCVNFNFNGLTGTGVLTESNKKFLPFQQFGRDIADTTDAVRDPQTLEILDITPCSFGGVSVITPGTNTSNQVAVLYQGVNCTEVPVAIHADQLTPTWRVYSTGSNVFQTRAGCLIGAEHVNNSYECDIPIGAGICASYQTQTNSPRRARSVASQSIIAYTMSLGAENSVAYSNNSCAIPTNFTISVTTEILPVSMTKTSVDCTMYICGDSTECSNLLLQYGSFCTQLNRALTGIAVEQDKNTQEVFAQVKQIYKTPPIKDFGGFNFSQILPDPSKPSKRSFIEDLLFNKVTLADAGFIKQYGDCLGDIAARDLICAQKFNGLTVLPPLLTDEMIAQYTSALLAGTITSGWTFGAGAALQIPFAMQMAYRFNGIGVTQNVLYENQKLIANQFNSAIGKIQDSLSSTASALGKLQDVVNQNAQALNTLVKQLSSNFGAISSVLNDILSRLDKVEAEVQIDRLITGRLQSLQTYVTQQLIRAAEIRASANLAATKMSECVLGQSKRVDFCGKGYHLMSFPQSAPHGVVFLHVTYVPAQEKNFTCAPAICHDGKAHFPREGVFVSNGTHWFVTQRNFYEPQIITTDNTFVSGNCDVVIGIVNNTVYDPLQPELDSFKEELDKYFKNHTSPDVDLGDISGINASVVNIQKEIDRLNEVAKNLNESLIDLQELGKYEQYIK

SEQ ID NO: 2010 - protein, 1211 aa, Artificial Sequence
  SARS-CoV-2/USA/WI-13/2020__EPI_ISL_417516 spike protein (1-1211)(I712C_T1077C)
MFVFLVLLPLVSSQCVNLTTRTQLPPAYTNSFTRGVYYPDKVFRSSVLHSTQDLFLPFFSNVTWFHAIHVSGTNGTKRFDNPVLPFNDGVYFASTEKSNIIRGWIFGTTLDSKTQSLLIVNNATNVVIKVCEFQFCNDPFLGVYYHKNNKSWMESEFRVYSSANNCTFEYVSQPFLMDLEGKQGNFKNLREFVFKNIDGYFKIYSKHTPINLVRDLPQGFSALEPLVDLPIGINITRFQTLLALHRSYLTPGDSSSGWTAGAAAYYVGYLQPRTFLLKYNENGTITDAVDCALDPLSETKCTLKSFTVEKGIYQTSNFRVLPTESIVRFPNITNLCPFGEVFNATRFASVYAWNRKRISNCVADYSVLYNSASFSTFKCYGVSPTKLNDLCFTNVYADSFVIRGDEVRQIAPGQTGKIADYNYKLPDDFTGCVIAWNSNNLDSKVGGNYNYLYRLFRKSNLKPFERDISTEIYQAGSTPCNGVEGFNCYFPLQSYGFQPTNGVGYQPYRVVVLSFELLHAPATVCGPKKSTNLVKNKCVNFNFNGLTGTGVLTESNKKFLPFQQFGRDIADTTDAVRDPQTLEILDITPCSFGGVSVITPGTNTSNQVAVLYQGVNCTEVPVAIHADQLTPTWRVYSTGSNVFQTRAGCLIGAEHVNNSYECDIPIGAGICASYQTQTNSPRRARSVASQSIIAYTMSLGAENSVAYSNNSCAIPTNFTISVTTEILPVSMTKTSVDCTMYICGDSTECSNLLLQYGSFCTQLNRALTGIAVEQDKNTQEVFAQVKQIYKTPPIKDFGGFNFSQILPDPSKPSKRSFIEDLLFNKVTLADAGFIKQYGDCLGDIAARDLICAQKFNGLTVLPPLLTDEMIAQYTSALLAGTITSGWTFGAGAALQIPFAMQMAYRFNGIGVTQNVLYENQKLIANQFNSAIGKIQDSLSSTASALGKLQDVVNQNAQALNTLVKQLSSNFGAISSVLNDILSRLDKVEAEVQIDRLITGRLQSLQTYVTQQLIRAAEIRASANLAATKMSECVLGQSKRVDFCGKGYHLMSFPQSAPHGVVFLHVTYVPAQEKNFTCAPAICHDGKAHFPREGVFVSNGTHWFVTQRNFYEPQIITTDNTFVSGNCDVVIGIVNNTVYDPLQPELDSFKEELDKYFKNHTSPDVDLGDISGINASVVNIQKEIDRLNEVAKNLNESLIDLQELGKYEQYIK

SEQ ID NO: 2011 - protein, 1210 aa, Artificial Sequence
  SARS-CoV-2/India/1-27/2020__EPI_ISL_413522 spike protein (1-1210)(I711C_T1076C)
MFVFLVLLPLVSSQCVNLTTRTQLPPAYTNSFTRGVYYPDKVFRSSVLHSTQDLFLPFFSNVTWFHAIHVSGTNGTKRFDNPVLPFNDGVYFASTEKSNIIRGWIFGTTLDSKTQSLLIVNNATNVVIKVCEFQFCNDPFLGVYHKNNKSWMESEFRVYSSANNCTFEYVSQPFLMDLEGKQGNFKNLREFVFKNIDGYFKIYSKHTPINLVRDLPQGFSALEPLVDLPIGINITRFQTLLALHRSYLTPGDSSSGWTAGAAAYYVGYLQPRTFLLKYNENGTITDAVDCALDPLSETKCTLKSFTVEKGIYQTSNFRVQPTESIVRFPNITNLCPFGEVFNATRFASVYAWNRKRISNCVADYSVLYNSASFSTFKCYGVSPTKLNDLCFTNVYADSFVIRGDEVIQIAPGQTGKIADYNYKLPDDFTGCVIAWNSNNLDSKVGGNYNYLYRLFRKSNLKPFERDISTEIYQAGSTPCNGVEGFNCYFPLQSYGFQPTNGVGYQPYRVVVLSFELLHAPATVCGPKKSTNLVKNKCVNFNFNGLTGTGVLTESNKKFLPFQQFGRDIADTTDAVRDPQTLEILDITPCSFGGVSVITPGTNTSNQVAVLYQDVNCTEVPVAIHADQLTPTWRVYSTGSNVFQTRAGCLIGAEHVNNSYECDIPIGAGICASYQTQTNSPRRARSVASQSIIAYTMSLGAENSVAYSNNSCAIPTNFTISVTTEILPVSMTKTSVDCTMYICGDSTECSNLLLQYGSFCTQLNRALTGIAVEQDKNTQEVFAQVKQIYKTPPIKDFGGFNFSQILPDPSKPSKRSFIEDLLFNKVTLADAGFIKQYGDCLGDIAARDLICAQKFNGLTVLPPLLTDEMIAQYTSALLAGTITSGWTFGAGAALQIPFAMQMAYRFNGIGVTQNVLYENQKLIANQFNSAIGKIQDSLSSTASALGKLQDVVNQNAQALNTLVKQLSSNFGAISSVLNDILSRLDKVEAEVQIDRLITGRLQSLQTYVTQQLIRAAEIRASANLAATKMSECVLGQSKRVDFCGKGYHLMSFPQSAPHGVVFLHVTYVPAQEKNFTCAPAICHDGKAHFPREGVFVSNGTHWFVTQRNFYEPQIITTDNTFVSGNCDVVIGIVNNTVYDPLQPELDSFKEELDKYFKNHTSPDVDLGDISGINASVVNIQKEIDRLNEVAKNLNESLIDLQELGKYEQYIK

SEQ ID NO: 2012 - protein, 1205 aa, Artificial Sequence
  SARS-CoV-2/pangolin/Guangxi/P4L/2017__EPI_ISL_410538 spike protein (1-1205)(I706C_T1071C)
MFVFLFVLPLVSSQCVNLTTRTGIPPGYTNSSTRGVYYPDKVFRSSILHLTQDLFLPFFSNVTWFNTINYQGGFKKFDNPVLPFNDGVYFASTEKSNIIRGWIFGTTLDARTQSLLIVNNATNVVIKVCEFQFCTDPFLGVYYHNNNKTWVENEFRVYSSANNCTFEYISQPFLMDLEGKQGNFKNLREFVFKNVDGYFKIYSKHTPIDLVRDLPRGFAALEPLVDLPIGINITRFQTLLALHRSYLTPGNLESGWTTGAAAYYVGYLQQRTFLLSYNQNGTITDAVDCSLDPLSETKCTLKSLTVEKGIYQTSNFRVQPTISIVRFPNITNLCPFGEVFNASKFASVYAWNRKRISNCVADYSVLYNSTSFSTFKCYGVSPTKLNDLCFTNVYADSFVVKGDEVRQIAPGQTGVIADYNYKLPDDFTGCVIAWNSVKQDALTGGNYGYLYRLFRKSKLKPFERDISTEIYQAGSTPCNGQVGLNCYYPLERYGFHPTTGVNYQPFRVVVLSFELLNGPATVCGPKLSTTLVKDKCVNFNFNGLTGTGVLTTSKKQFLPFQQFGRDISDTTDAVRDPQTLEILDITPCSFGGVSVITPGTNTSNQVAVLYQDVNCTEVPMAIHAEQLTPAWRVYSAGANVFQTRAGCLVGAEHVNNSYECDIPVGAGICASYHSMSSLRSVNQRSIIAYTMSLGAENSVAYSNNSCAIPTNFTISVTTEILPVSMTKTSVDCTMYICGDSIECSNLLLQYGSFCTQLNRALTGIAVEQDKNTQEVFAQVKQIYKTPPIKDFGGFNFSQILPDPSKPSKRSFIEDLLFNKVTLADAGFIKQYGDCLGDIAARDLICAQKFNGLTVLPPLLTDEMIAQYTSALLAGTITSGWTFGAGAALQIPFAMQMAYRFNGIGVTQNVLYENQKLIANQFNSAIGKIQDSLSSTASALGKLQDVVNQNAQALNTLVKQLSSNFGAISSVLNDILSRLDKVEAEVQIDRLITGRLQSLQTYVTQQLIRAAEIRASANLAATKMSECVLGQSKRVDFCGKGYHLMSFPQSAPHGVVFLHVTYVPAQEKNFTCAPAICHEGKAHFPREGVFVSNGTHWFITQRNFYEPQIITTDNTFVSGSCDVVIGIVNNTVYDPLQPELDSFKEELDKYFKNHTSPDVDLGDISGINASVVNIQKEIDRLNEVAKNLNESPIDLQELGKYEQYIK

SEQ ID NO: 2013 - protein, 1205 aa, Artificial Sequence
  SARS-CoV-2/pangolin/Guangxi/P5L/2017__EPI_ISL_410540 spike protein (1-1205)(I706C_T1071C)
MFVFLFVLPLVSSQCVNLTTRTGIPPGYTNSSTRGVYYPDKVFRSSILHLTQDLFLPFFSNVTWFNTINYQGGFKKFDNPVLPFNDGVYFASTEKSNIIRGWIFGTTLDARTQSLLIVNNATNVVIKVCEFQFCTDPFLGVYYHNNNKTWVENEFRVYSSANNCTFEYISQPFLMDLEGKQGNFKNLREFVFKNVDGYFKIYSKHTPIDLVRDLPRGFAALEPLVDLPIGINITRFQTLLALHRSYLTPGKLESGWTTGAAAYYVGYLQQRTFLLSYNQNGTITDAVDCSLDPLSETKCTLKSLTVEKGIYQTSNFRVQPTISIVRFPNITNLCPFGEVFNASKFASVYAWNRKRISNCVADYSVLYNSTSFSTFKCYGVSPTKLNDLCFTNVYADSFVVKGDEVRQIAPGQTGVIADYNYKLPDDFTGCVIAWNSVKQDALTGGNYGYLYRLFRKSKLKPFERDISTEIYQAGSTPCNGQVGLNCYYPLERYGFHPTTGVNYQPFRVVVLSFELLNGPATVCGPKLSTTLVKDKCVNFNFNGLTGTGVLTTSKKQFLPFQQFGRDISDTTDAVRDPQTLEILDITPCSFGGVSVITPGTNTSNQVAVLYQDVNCTEVPMAIHAEQLTPAWRVYSAGANVFQTRAGCLVGAEHVNNSYECDIPVGAGICASYHSMSSFRSVNQRSIIAYTMSLGAENSVAYSNNSCAIPTNFTISVTTEILPVSMTKTSVDCTMYICGDSIECSNLLLQYGSFCTQLNRALTGIAVEQDKNTQEVFAQVKQIYKTPPIKDFGGFNFSQILPDPSKPSKRSFIEDLLFNKVTLADAGFIKQYGDCLGDIAARDLICAQKFNGLTVLPPLLTDEMIAQYTSALLAGTITSGWTFGAGAALQIPFAMQMAYRFNGIGVTQNVLYENQKLIANQFNSAIGKIQDSLSSTASALGKLQDVVNQNAQALNTLVKQLSSNFGAISSVLNDILSRLDKVEAEVQIDRLITGRLQSLQTYVTQQLIRAAEIRASANLAATKMSECVLGQSKRVDFCGKGYHLMSFPQSAPHGVVFLHVTYVPAQEKNFTCAPAICHEGKAHFPREGVFVSNGTHWFITQRNFYEPQIITTDNTFVSGSCDVVIGIVNNTVYDPLQPELDSFKEELDKYFKNHTSPDVDLGDISGINASVVNIQKEIDRLNEVAKNLNESLIDLQELGKYEQYIK

SEQ ID NO: 2014 - protein, 1205 aa, Artificial Sequence
  SARS-CoV-2/pangolin/Guangxi/P5E/2017__EPI_ISL_410541 spike protein (1-1205)(I706C_T1071C)
MFVFLFVLPLVSSQCVNLTTRTGIPPGYTNSSTRGVYYPDKVFRSSILHLTQDLFLPFFSNVTWFNTITYQGGSKKFDNPVLPFNDGVYFASTEKSNIIRGWIFGTTLDARTQSLLIVNNATNVVIKVCEFQFCTDPFLGVYYHNNNKTWVENEFRVYSSANNCTFEYISQPFLMDLEGKQGNFKNLREFVFKNVDGYFKIYSKHTPIDLVRDLPRGFAALEPLVDLPIGINITRFQTLLALHRSYLTPGKLESGWTTGAAAYYVGYLQQRTFLLSYNQNGTITDAVDCSLDPLSETKCTLKSLTVEKGIYQTSNFRVQPTISIVRFPNITNLCPFGEVFNASKFASVYAWNRKRISNCVADYSVLYNSTSFSTFKCYGVSPTKLNDLCFTNVYADSFVVKGDEVRQIAPGQTGVIADYNYKLPDDFTGCVIAWNSVKQDALTGDNYGYLYRLFRKSKLKPFERDISTEIYQAGSTPCNGQVGLNCYYPLERYGFHPTTGVNYQPFRVVVLSFELLNGPATVCGPKLSTTLVKDKCVNFNFNGLTGTGVLTTSKKQFLPFQQFGRDISDTTDAVRDPQTLEILDITPCSFGGVSVITPGTNTSNQVAVLYQDVNCTEVPMAIHAEQLTPAWRVYSAGANVFQTRAGCLVGAEHVNNSYECDIPVGAGICASYHSMSSFRSVNQRSIIAYTMSLGAENSVAYSNNSCAIPTNFTISVTTEILPVSMTKTSVDCTMYICGDSIECSNLLLQYGSFCTQLNRALTGIAVEQDKNTQEVFAQVKQIYKTPPIKDFGGFNFSQILPDPSKPSKRSFIEDLLFNKVTLADAGFIKQYGDCLGDIAARDLICAQKFNGLTVLPPLLTDEMIAQYTSALLAGTITSGWTFGAGAALQIPFAMQMAYRFNGIGVTQNVLYENQKLIANQFNSAIGKIQDSLSSTASALGKLQDVVNQNAQALNTLVKQLSSNFGAISSVLNDILSRLDKVEAEVQIDRLITGRLQSLQTYVTQQLIRAAEIRASANLAATKMSECVLGQSKRVDFCGKGYHLMSFPQSAPHGVVFLHVTYVPAQEKNFTCAPAICHEGKAHFPREGVFVSNGTHWFITQRNFYEPQIITTDNTFVSGSCDVVIGIVNNTVYDPLQPELDSFKEELDKYFKNHTSPDVDLGDISGINASVVNIQKEIDRLNEVAKNLNESLIDLQELGKYEQYIK

SEQ ID NO: 2015 - protein, 1203 aa, Artificial Sequence
  SARS-CoV-2/pangolin/Guangxi/P1E/2017__EPI_ISL_410539 spike protein (1-1203)(I704C_T1069C)
MFVFLFVLPLVSSQCVNLTTRTGIQPGYTNSSTRGVYYPDKVFRSSILHLTQDLFLPFFSNVTWFNTINYQGGFKKFDNPVLPFNDGVYFASTEKSNIIRGWIFGTTLDARTQSLLIVNNATNVVIKVCEFQFCTDPFLGVYYHNNNKTWVENEFRVYSSANNCTFEYISQPFLMDLEGKQGNFKNLREFVFKNVDGYFKIYSKHTPIDLVRDLPRGFAALEPLVDLPIGINITRFQTLLALHRSYLTPGKLESGWTTGAAAYYVGYLQQRTFLLSYNQNGTITDAVDCSLDPLSETKCTLKSLTVEKGIYQTSNFRVQPTISIVRFPNITNLCPFGEVFNASKFASVYAWNRKRISNCVADYSVLYNSTSFSTFKCYGVSPTKLNDLCFTNVYADSFVVKGDEVRQIAPGQTGVIADYNYKLPDDFTGCVIAWNSVKQDALTGGNYLYRLFRKSKLKPFERDISTEIYQAGSTPCNGQVGLNCYYPLERYGFHPTTGVNYQPFRVVVLSFELLNGPATVCGPKLSTTLVKDKCVNFNFNGLTGTGVLTTSKKQFLPFQQFGRDISDTTDAVRDPQTLEILDITPCSFGGVSVITPGTNTSNQVAVLYQDVNCTEVPMAIHAEQLTPAWRVYSAGANVFQTRAGCLVGAEHVNNSYECDIPVGAGICASYHSMSSLRSVNQRSIIAYTMSLGAENSVAYSNNSCAIPTNFTISVTTEILPVSMTKTSVDCTMYICGDSIECSNLLLQYGSFCTQLNRALTGIAVEQDKNTQEVFAQVKQIYKTPPIKDFGGFNFSQILPDPSKPSKRSFIEDLLFNKVTLADAGFIKQYGDCLGDIAARDLICAQKFNGLTVLPPLLTDEMIAQYTSALLAGTITSGWTFGAGAALQIPFAMQMAYRFNGIGVTQNVLYENQKLIANQFNSAIGKIQDSLSSTASALGKLQDVVNQNAQALNTLVKQLSSNFGAISSVLNDILSRLDKVEAEVQIDRLITGRLQSLQTYVTQQLIRAAEIRASANLAATKMSECVLGQSKRVDFCGKGYHLMSFPQSAPHGVVFLHVTYVPAQEKNFTCAPAICHEGKAHFPREGVFVSNGTHWFITQRNFYEPQIITTDNTFVSGSCDVVIGIVNNTVYDPLQPELDSFKEELDKYFKNHTSPDVDLGDISGINASVVNIQKEIDRLNEVAKNLNESLIDLQELGKYEQYIK

SEQ ID NO: 2016 - protein, 1211 aa, Artificial Sequence
  SARS-CoV-2/Wuhan/WIV05/2019__EPI_ISL_402128 spike protein (1-1211)(I714C_Y1110C)
MFVFLVLLPLVSSQCVNLTTRTQLPPAYTNSFTRGVYYPDKVFRSSVLHSTQDLFLPFFSNVTWFHAIHVSGTNGTKRFDNPVLPFNDGVYFASTEKSNIIRGWIFGTTLDSKTQSLLIVNNATNVVIKVCEFQFCNDPFLGVYYHKNNKSWMESEFRVYSSANNCTFEYVSQPFLMDLEGKQGNFKNLREFVFKNIDGYFKIYSKHTPINLVRDLPQGFSALEPLVDLPIGINITRFQTLLALHRSYLTPGDSSSGWTAGAAAYYVGYLQPRTFLLKYNENGTITDAVDCALDPLSETKCTLKSFTVEKGIYQTSNFRVQPTESIVRFPNITNLCPFGEVFNATRFASVYAWNRKRISNCVADYSVLYNSASFSTFKCYGVSPTKLNDLCFTNVYADSFVIRGDEVRQIAPGQTGKIADYNYKLPDDFTGCVIAWNSNNLDSKVGGNYNYLYRLFRKSNLKPFERDISTEIYQAGSTPCNGVEGFNCYFPLQSYGFQPTNGVGYQPYRVVVLSFELLHAPATVCGPKKSTNLVKNKCVNFNFNGLTGTGVLTESNKKFLPFQQFGRDIADTTDAVRDPQTLEILDITPCSFGGVSVITPGTNTSNQVAVLYQDVNCTEVPVAIHADQLTPTWRVYSTGSNVFQTRAGCLIGAEHVNNSYECDIPIGAGICASYQTQTNSPRRARSVASQSIIAYTMSLGAENSVAYSNNSIACPTNFTISVTTEILPVSMTKTSVDCTMYICGDSTECSNLLLQYGSFCTQLNRALTGIAVEQDKNTQEVFAQVKQIYKTPPIKDFGGFNFSQILPDPSKPSKRSFIEDLLFNKVTLADAGFIKQYGDCLGDIAARDLICAQKFNGLTVLPPLLTDEMIAQYTSALLAGTITSGWTFGAGAALQIPFAMQMAYRFNGIGVTQNVLYENQKLIANQFNSAIGKIQDSLSSTASALGKLQDVVNQNAQALNTLVKQLSSNFGAISSVLNDILSRLDKVEAEVQIDRLITGRLQSLQTYVTQQLIRAAEIRASANLAATKMSECVLGQSKRVDFCGKGYHLMSFPQSAPHGVVFLHVTYVPAQEKNFTTAPAICHDGKAHFPREGVFVSNGTHWFVTQRNFCEPQIITTDNTFVSGNCDVVIGIVNNTVYDPLQPELDSFKEELDKYFKNHTSPDVDLGDISGINASVVNIQKEIDRLNEVAKNLNESLIDLQELGKYEQYIK

SEQ ID NO: 2017 - protein, 1207 aa, Artificial Sequence
  SARS-CoV-2/bat/Yunnan/RaTG13/2013__EPI_ISL_402131 spike protein (1-1207)(I710C_Y1106C)
MFVFLVLLPLVSSQCVNLTTRTQLPPAYTNSSTRGVYYPDKVFRSSVLHLTQDLFLPFFSNVTWFHAIHVSGTNGIKRFDNPVLPFNDGVYFASTEKSNIIRGWIFGTTLDSKTQSLLIVNNATNVVIKVCEFQFCNDPFLGVYYHKNNKSWMESEFRVYSSANNCTFEYVSQPFLMDLEGKQGNFKNLREFVFKNIDGYFKIYSKHTPINLVRDLPPGFSALEPLVDLPIGINITRFQTLLALHRSYLTPGDSSSGWTAGAAAYYVGYLQPRTFLLKYNENGTITDAVDCALDPLSETKCTLKSFTVEKGIYQTSNFRVQPTDSIVRFPNITNLCPFGEVFNATTFASVYAWNRKRISNCVADYSVLYNSTSFSTFKCYGVSPTKLNDLCFTNVYADSFVITGDEVRQIAPGQTGKIADYNYKLPDDFTGCVIAWNSKHIDAKEGGNFNYLYRLFRKANLKPFERDISTEIYQAGSKPCNGQTGLNCYYPLYRYGFYPTDGVGHQPYRVVVLSFELLNAPATVCGPKKSTNLVKNKCVNFNFNGLTGTGVLTESNKKFLPFQQFGRDIADTTDAVRDPQTLEILDITPCSFGGVSVITPGTNASNQVAVLYQDVNCTEVPVAIHADQLTPTWRVYSTGSNVFQTRAGCLIGAEHVNNSYECDIPIGAGICASYQTQTNSRSVASQSIIAYTMSLGAENSVAYSNNSIACPTNFTISVTTEILPVSMTKTSVDCTMYICGDSTECSNLLLQYGSFCTQLNRALTGIAVEQDKNTQEVFAQVKQIYKTPPIKDFGGFNFSQILPDPSKPSKRSFIEDLLFNKVTLADAGFIKQYGDCLGDIAARDLICAQKFNGLTVLPPLLTDEMIAQYTSALLAGTITSGWTFGAGAALQIPFAMQMAYRFNGIGVTQNVLYENQKLIANQFNSAIGKIQDSLSSTASALGKLQDVVNQNAQALNTLVKQLSSNFGAISSVLNDILSRLDKVEAEVQIDRLITGRLQSLQTYVTQQLIRAAEIRASANLAATKMSECVLGQSKRVDFCGKGYHLMSFPQSAPHGVVFLHVTYVPAQEKNFTTAPAICHDGKAHFPREGVFVSNGTHWFVTQRNFCEPQIITTDNTFVSGSCDVVIGIVNNTVYDPLQPELDSFKEELDKYFKNHTSPDVDLGDISGINASVVNIQKEIDRLNEVAKNLNESLIDLQELGKYEQYIK

SEQ ID NO: 2018 - protein, 1211 aa, Artificial Sequence
  SARS-CoV-2/Wuhan/HBCDC-HB-01/2019__EPI_ISL_402132 spike protein (1-1211)(I714C_Y1110C)
MFVFLVLLPLVSSQCVNLTTRTQLPPAYTNSITRGVYYPDKVFRSSVLHSTQDLFLPFFSNVTWFHAIHVSGTNGTKRFDNPVLPFNDGVYFASTEKSNIIRGWIFGTTLDSKTQSLLIVNNATNVVIKVCEFQFCNDPFLGVYYHKNNKSWMESEFRVYSSANNCTFEYVSQPFLMDLEGKQGNFKNLREFVFKNIDGYFKIYSKHTPINLVRDLPQGFSALEPLVDLPIGINITRFQTLLALHRSYLTPGDSSSGWTAGAAAYYVGYLQPRTFLLKYNENGTITDAVDCALDPLSETKCTLKSFTVEKGIYQTSNFRVQPTESIVRFPNITNLCPFGEVFNATRFASVYAWNRKRISNCVADYSVLYNSASFSTFKCYGVSPTKLNDLCFTNVYADSFVIRGDEVRQIAPGQTGKIADYNYKLPDDFTGCVIAWNSNNLDSKVGGNYNYLYRLFRKSNLKPFERDISTEIYQAGSTPCNGVEGFNCYFPLQSYGFQPTNGVGYQPYRVVVLSFELLHAPATVCGPKKSTNLVKNKCVNFNFNGLTGTGVLTESNKKFLPFQQFGRDIADTTDAVRDPQTLEILDITPCSFGGVSVITPGTNTSNQVAVLYQDVNCTEVPVAIHADQLTPTWRVYSTGSNVFQTRAGCLIGAEHVNNSYECDIPIGAGICASYQTQTNSPRRARSVASQSIIAYTMSLGAENSVAYSNNSIACPTNFTISVTTEILPVSMTKTSVDCTMYICGDSTECSNLLLQYGSFCTQLNRALTGIAVEQDKNTQEVFAQVKQIYKTPPIKDFGGFNFSQILPDPSKPSKRSFIEDLLFNKVTLADAGFIKQYGDCLGDIAARDLICAQKFNGLTVLPPLLTDEMIAQYTSALLAGTITSGWTFGAGAALQIPFAMQMAYRFNGIGVTQNVLYENQKLIANQFNSAIGKIQDSLSSTASALGKLQDVVNQNAQALNTLVKQLSSNFGAISSVLNDILSRLDKVEAEVQIDRLITGRLQSLQTYVTQQLIRAAEIRASANLAATKMSECVLGQSKRVDFCGKGYHLMSFPQSAPHGVVFLHVTYVPAQEKNFTTAPAICHDGKAHFPREGVFVSNGTHWFVTQRNFCEPQIITTDNTFVSGNCDVVIGIVNNTVYDPLQPELDSFKEELDKYFKNHTSPDVDLGDISGINASVVNIQKEIDRLNEVAKNLNESLIDLQELGKYEQYIK

SEQ ID NO: 2019 - protein, 1211 aa, Artificial Sequence
  SARS-CoV-2/Guangdong/20SF028/2020__EPI_ISL_403936 spike protein (1-1211)(I714C_Y1110C)
MFVFLVLLPLVSSQCVNLTTRTQLPPAYTNSFTRGVYYPDKVFRSSVLYSTQDLFLPFFSNVTWFHAIHVSGTNGTKRFDNPVLPFNDGVYFASTEKSNIIRGWIFGTTLDSKTQSLLIVNNATNVVIKVCEFQFCNDPFLGVYYHKNNKSWMESEFRVYSSANNCTFEYVSQPFLMDLEGKQGNFKNLREFVFKNIDGYFKIYSKHTPINLVRDLPQGFSALEPLVDLPIGINITRFQTLLALHRSYLTPGDSSSGWTAGAAAYYVGYLQPRTFLLKYNENGTITDAVDCALDPLSETKCTLKSFTVEKGIYQTSNFRVQPTESIVRFPNITNLCPFGEVFNATRFASVYAWNRKRISNCVADYSVLYNSASFSTFKCYGVSPTKLNDLCFTNVYADSFVIRGDEVRQIAPGQTGKIADYNYKLPDDFTGCVIAWNSNNLDSKVGGNYNYLYRLFRKSNLKPFERDISTEIYQAGSTPCNGVEGFNCYFPLQSYGFQPTNGVGYQPYRVVVLSFELLHAPATVCGPKKSTNLVKNKCVNFNFNGLTGTGVLTESNKKFLPFQQFGRDIADTTDAVRDPQTLEILDITPCSFGGVSVITPGTNTSNQVAVLYQDVNCTEVPVAIHADQLTPTWRVYSTGSNVFQTRAGCLIGAEHVNNSYECDIPIGAGICASYQTQTNSPRRARSVASQSIIAYTMSLGAENSVAYSNNSIACPTNFTISVTTEILPVSMTKTSVDCTMYICGDSTECSNLLLQYGSFCTQLNRALTGIAVEQDKNTQEVFAQVKQIYKTPPIKDFGGFNFSQILPDPSKPSKRSFIEDLLFNKVTLADAGFIKQYGDCLGDIAARDLICAQKFNGLTVLPPLLTDEMIAQYTSALLAGTITSGWTFGAGAALQIPFAMQMAYRFNGIGVTQNVLYENQKLIANQFNSAIGKIQDSLSSTASALGKLQDVVNQNAQALNTLVKQLSSNFGAISSVLNDILSRLDKVEAEVQIDRLITGRLQSLQTYVTQQLIRAAEIRASANLAATKMSECVLGQSKRVDFCGKGYHLMSFPQSAPHGVVFLHVTYVPAQEKNFTTAPAICHDGKAHFPREGVFVSNGTHWFVTQRNFCEPQIITTDNTFVSGNCDVVIGIVNNTVYDPLQPELDSFKEELDKYFKNHTSPDVDLGDISGINASVVNIQKEIDRLNEVAKNLNESLIDLQELGKYEQYIK

SEQ ID NO: 2020 - protein, 1211 aa, Artificial Sequence
  SARS-CoV-2/Shenzhen/SZTH-001/2020__EPI_ISL_406592 spike protein (1-1211)(I714C_Y1110C)
MFVFLVLLPLVSSQCVNLTTRTQLPPAYTNSFTRGVYYPDKVFRSSVLHSTQDLFLPFFSNVTWFHAIHVSGTNGTKRFDNPVLPFNDGVYFASTEKSNIIRGWIFGTTLDSKTQSLLIVNNATNVVIKVCEFQFCNDPFLGVYYHKNNKSWMESEFRVYSSANNCTFEYVSQPFLMDLEGKQGNFKNLREFVFKNIDGYFKIYSKHTPINLVRDLPQGFSALEPLVDLPIGINITRFQTLLALHRSYLTPGDSSSGWTAGAAAYYVGYLQPRTFLLKYNENGTITDAVDCALDPLSETKCTLKSFTVEKGIYQTSNFRVQPTESIVRFPNITNLCPFGEVFNATRFASVYAWNRKRISNCVADYSVLYNSASFSTFKCYGVSPTKLNDLCFTNVYADSFVIRGDEVRQIAPGQTGKIADYNYKLPDDFTGCVIAWNSNNLDSKVGGNYNYLYRLFRKSNLKPFERDISTEIYQAGSTPCNGVEGFNCYFPLQSYGFQPTNGVGYQPYRVVVLSFELLHAPATVCGPKKSTNLVKNKCVNFNFNGLTGTGVLTESNKKFLPFQQFGRDIADTTDAVRDPQTLEILDITPCSFGGVSVITPGTNTSNQVAVLYQDVNCTEVPVAIHADQLTPTWRVYSTGSNVFQTRAGCLIGAEHVNNSYECDIPIGAGICASYQTQTNSPRRARSVASQSIIAYTMSLGAENSVAYSNNSIACPTNFTISVTTEILPVSMTKTSVDCTMYICGDSTECSNLLLQYGSFCTQLNRALTGIAVEQDKNTQEVFAQVKQIYKTPPIKDFGGFNFSQILPDPSKPSKRSFIEDLLFNKVTLADAGFIKQYGDCLGDIAARDLICAQKFNGLTVLPPLLTDEMIAQYTSALLAGTITSGWTFGAGAALQIPFAMQMAYRFNGIGVTQNVLYENQKLIANQFNSAIGKIQDSLSSTASALGKLQDVVNQNAQALNTLVKQLSSNFGAISSVLNDILSRLDKVEAEVQIDRLITGRLQSLQTYVTQQLIRAAEIRASANLAATKMSECVLGQSKRVDFCGKGYHLMSFPQSAPHGVVFLHVTYVPAQEKNFTTAPAICHDGKAHFPREGVFVSNGTHWFVTQRNFCEPQIITTDNTFVSGNCDVLIGIVNNTVYDPLQPELDSFKEELDKYFKNHTSPDVDLGDISGINASVVNIQKEIDRLNEVAKNLNESLIDLQELGKYEQYIK

SEQ ID NO: 2021 - protein, 1211 aa, Artificial Sequence
  SARS-CoV-2/Shenzhen/SZTH-004/2020__EPI_ISL_406595 spike protein (1-1211)(I714C_Y1110C)
MFVFLVLLPLVSSQCVNLTTRTQLPPAYTNSFTRGVYYPDKVFRSSVLHSTQDLFLPFFSNVTWFHAIHVSGTNGTKRFDNPVLPFNDGVYFASTEKSNIIRGWIFGTTLDSKTQSLLIVNNATNVVIKVCEFQFCNDPFLGVYYHKNNKSWMESEFRVYSSANNCTFEYVSQPFLMDLEGKQGNFKNLREFVFKNIDGYFKIYSKHTPINLVRDLPQGFSALEPLVDLPIGINITRFQTLLALHRSYLTPGDSSSGWTAGAAAYYVGYLQPRTFLLKYNENGTITDAVDCALDPLSETKCTLKSFTVEKGIYQTSNFRVQPTESIVRFPNITNLCPFGEVFNATRFASVYAWDRKRISNCVAYYSVLYNSASFSTFKCYGVSPTKLNDLCFTNVYADSFVIRGDEVRQIAPGQTGKIADYNYKLPDDFTGCVIAWNSNNLDSKVGGNYNYLYRLFRKSNLKPFERDISTEIYQAGSTPCNGVEGFNCYFPLQSYGFQPTNGVGYQPYRVVVLSFELLHAPATVCGPKKSTNLVKNKCVNFNFNGLTGTGVLTESNKKFLPFQQFGRDIADTTDAVRDPQTLEILDITPCSFGGVSVITPGTNTSNQVAVLYQDVNCTEVPVAIHADQLTPTWRVYSTGSNVFQTRAGCLIGAEHVNNSYECDIPIGAGICASYQTQTNSPRRARSVASQSIIAYTMSLGAENSVAYSNNSIACPTNFTISVTTEILPVSMTKTSVDCTMYICGDSTECSNLLLQYGSFCTQLNRALTGIAVEQDKNTQEVFAQVKQIYKTPPIKDFGGFNFSQILPDPSKPSKRSFIEDLLFNKVTLADAGFIKQYGDCLGDIAARDLICAQKFNGLTVLPPLLTDEMIAQYTSALLAGTITSGWTFGAGAALQIPFAMQMAYRFNGIGVTQNVLYENQKLIANQFNSAIGKIQDSLSSTASALGKLQDVVNQNAQALNTLVKQLSSNFGAISSVLNDILSRLDKVEAEVQIDRLITGRLQSLQTYVTQQLIRAAEIRASANLAATKMSECVLGQSKRVDFCGKGYHLMSFPQSAPHGVVFLHVTYVPAQEKNFTTAPAICHDGKAHFPREGVFVSNGTHWFVTQRNFCEPQIITTDNTFVSGNCDVVIGIVNNTVYDPLQPELDSFKEELDKYFKNHTSPDVDLGDISGINASVVNIQKEIDRLNEVAKNLNESLIDLQELGKYEQYIK

SEQ ID NO: 2022 - protein, 1211 aa, Artificial Sequence
  SARS-CoV-2/France/IDF0372/2020__EPI_ISL_406596 spike protein (1-1211)(I714C_Y1110C)
MFVFLVLLPLVSSQCVNLTTRTQLPPAYTNSFTRGVYYPDKVFRSSVLHSTQDLFLPFFSNVTWFHAIHVSGTNGTKRFDNPVLPFNDGVYFASTEKSNIIRGWIFGTTLDSKTQSLLIVNNATNVVIKVCEFQFCNDPFLGVYYHKNNKSWMESEFRVYSSANNCTFEYVSQPFLMDLEGKQGNFKNLREFVFKNIDGYFKIYSKHTPINLVRDLPQGFSALEPLVDLPIGINITRFQTLLALHRSYLTPGDSSSGWTAGAAAYYVGYLQPRTFLLKYNENGTITDAVDCALDPLSETKCTLKSFTVEKGIYQTSNFRVQPTESIVRFPNITNLCPFGEVFNATRFASVYAWNRKRISNCVADYSFLYNSASFSTFKCYGVSPTKLNDLCFTNVYADSFVIRGDEVRQIAPGQTGKIADYNYKLPDDFTGCVIAWNSNNLDSKVGGNYNYLYRLFRKSNLKPFERDISTEIYQAGSTPCNGVEGFNCYFPLQSYGFQPTNGVGYQPYRVVVLSFELLHAPATVCGPKKSTNLVKNKCVNFNFNGLTGTGVLTESNKKFLPFQQFGRDIADTTDAVRDPQTLEILDITPCSFGGVSVITPGTNTSNQVAVLYQDVNCTEVPVAIHADQLTPTWRVYSTGSNVFQTRAGCLIGAEHVNNSYECDIPIGAGICASYQTQTNSPRRARSVASQSIIAYTMSLGAENSVAYSNNSIACPTNFTISVTTEILPVSMTKTSVDCTMYICGDSTECSNLLLQYGSFCTQLNRALTGIAVEQDKNTQEVFAQVKQIYKTPPIKDFGGFNFSQILPDPSKPSKRSFIEDLLFNKVTLADAGFIKQYGDCLGDIAARDLICAQKFNGLTVLPPLLTDEMIAQYTSALLAGTITSGWTFGAGAALQIPFAMQMAYRFNGIGVTQNVLYENQKLIANQFNSAIGKIQDSLSSTASALGKLQDVVNQNAQALNTLVKQLSSNFGAISSVLNDILSRLDKVEAEVQIDRLITGRLQSLQTYVTQQLIRAAEIRASANLAATKMSECVLGQSKRVDFCGKGYHLMSFPQSAPHGVVFLHVTYVPAQEKNFTTAPAICHDGKAHFPREGVFVSNGTHWFVTQRNFCEPQIITTDNTFVSGNCDVVIGIVNNTVYDPLQPELDSFKEELDKYFKNHTSPDVDLGDISGINASVVNIQKEIDRLNEVAKNLNESLIDLQELGKYEQYIK

SEQ ID NO: 2023 - protein, 1211 aa, Artificial Sequence
  SARS-CoV-2/Australia/VIC01/2020__EPI_ISL_406844 spike protein (1-1211)(I714C_Y1110C)
MFVFLVLLPLVSSQCVNLTTRTQLPPAYTNSFTRGVYYPDKVFRSSVLHSTQDLFLPFFSNVTWFHAIHVSGTNGTKRFDNPVLPFNDGVYFASTEKSNIIRGWIFGTTLDSKTQSLLIVNNATNVVIKVCEFQFCNDPFLGVYYHKNNKSWMESEFRVYSSANNCTFEYVSQPFLMDLEGKQGNFKNLREFVFKNIDGYFKIYSKHTPINLVRDLPQGFSALEPLVDLPIGINITRFQTLLALHRRYLTPGDSSSGWTAGAAAYYVGYLQPRTFLLKYNENGTITDAVDCALDPLSETKCTLKSFTVEKGIYQTSNFRVQPTESIVRFPNITNLCPFGEVFNATRFASVYAWNRKRISNCVADYSVLYNSASFSTFKCYGVSPTKLNDLCFTNVYADSFVIRGDEVRQIAPGQTGKIADYNYKLPDDFTGCVIAWNSNNLDSKVGGNYNYLYRLFRKSNLKPFERDISTEIYQAGSTPCNGVEGFNCYFPLQSYGFQPTNGVGYQPYRVVVLSFELLHAPATVCGPKKSTNLVKNKCVNFNFNGLTGTGVLTESNKKFLPFQQFGRDIADTTDAVRDPQTLEILDITPCSFGGVSVITPGTNTSNQVAVLYQDVNCTEVPVAIHADQLTPTWRVYSTGSNVFQTRAGCLIGAEHVNNSYECDIPIGAGICASYQTQTNSPRRARSVASQSIIAYTMSLGAENSVAYSNNSIACPTNFTISVTTEILPVSMTKTSVDCTMYICGDSTECSNLLLQYGSFCTQLNRALTGIAVEQDKNTQEVFAQVKQIYKTPPIKDFGGFNFSQILPDPSKPSKRSFIEDLLFNKVTLADAGFIKQYGDCLGDIAARDLICAQKFNGLTVLPPLLTDEMIAQYTSALLAGTITSGWTFGAGAALQIPFAMQMAYRFNGIGVTQNVLYENQKLIANQFNSAIGKIQDSLSSTASALGKLQDVVNQNAQALNTLVKQLSSNFGAISSVLNDILSRLDKVEAEVQIDRLITGRLQSLQTYVTQQLIRAAEIRASANLAATKMSECVLGQSKRVDFCGKGYHLMSFPQSAPHGVVFLHVTYVPAQEKNFTTAPAICHDGKAHFPREGVFVSNGTHWFVTQRNFCEPQIITTDNTFVSGNCDVVIGIVNNTVYDPLQPELDSFKEELDKYFKNHTSPDVDLGDISGINASVVNIQKEIDRLNEVAKNLNESLIDLQELGKYEQYIK

SEQ ID NO: 2024 - protein, 1211 aa, Artificial Sequence
  SARS-CoV-2/Germany/BavPat1/2020__EPI_ISL_406862 spike protein (1-1211)(I714C_Y1110C)
MFVFLVLLPLVSSQCVNLTTRTQLPPAYTNSFTRGVYYPDKVFRSSVLHSTQDLFLPFFSNVTWFHAIHVSGTNGTKRFDNPVLPFNDGVYFASTEKSNIIRGWIFGTTLDSKTQSLLIVNNATNVVIKVCEFQFCNDPFLGVYYHKNNKSWMESEFRVYSSANNCTFEYVSQPFLMDLEGKQGNFKNLREFVFKNIDGYFKIYSKHTPINLVRDLPQGFSALEPLVDLPIGINITRFQTLLALHRSYLTPGDSSSGWTAGAAAYYVGYLQPRTFLLKYNENGTITDAVDCALDPLSETKCTLKSFTVEKGIYQTSNFRVQPTESIVRFPNITNLCPFGEVFNATRFASVYAWNRKRISNCVADYSVLYNSASFSTFKCYGVSPTKLNDLCFTNVYADSFVIRGDEVRQIAPGQTGKIADYNYKLPDDFTGCVIAWNSNNLDSKVGGNYNYLYRLFRKSNLKPFERDISTEIYQAGSTPCNGVEGFNCYFPLQSYGFQPTNGVGYQPYRVVVLSFELLHAPATVCGPKKSTNLVKNKCVNFNFNGLTGTGVLTESNKKFLPFQQFGRDIADTTDAVRDPQTLEILDITPCSFGGVSVITPGTNTSNQVAVLYQGVNCTEVPVAIHADQLTPTWRVYSTGSNVFQTRAGCLIGAEHVNNSYECDIPIGAGICASYQTQTNSPRRARSVASQSIIAYTMSLGAENSVAYSNNSIACPTNFTISVTTEILPVSMTKTSVDCTMYICGDSTECSNLLLQYGSFCTQLNRALTGIAVEQDKNTQEVFAQVKQIYKTPPIKDFGGFNFSQILPDPSKPSKRSFIEDLLFNKVTLADAGFIKQYGDCLGDIAARDLICAQKFNGLTVLPPLLTDEMIAQYTSALLAGTITSGWTFGAGAALQIPFAMQMAYRFNGIGVTQNVLYENQKLIANQFNSAIGKIQDSLSSTASALGKLQDVVNQNAQALNTLVKQLSSNFGAISSVLNDILSRLDKVEAEVQIDRLITGRLQSLQTYVTQQLIRAAEIRASANLAATKMSECVLGQSKRVDFCGKGYHLMSFPQSAPHGVVFLHVTYVPAQEKNFTTAPAICHDGKAHFPREGVFVSNGTHWFVTQRNFCEPQIITTDNTFVSGNCDVVIGIVNNTVYDPLQPELDSFKEELDKYFKNHTSPDVDLGDISGINASVVNIQKEIDRLNEVAKNLNESLIDLQELGKYEQYIK

SEQ ID NO: 2025 - protein, 1211 aa, Artificial Sequence
  SARS-CoV-2/Wuhan/HBCDC-HB-02/2020__EPI_ISL_412978 spike protein (1-1211)(I714C_Y1110C)
MFVFLVLLPLVSSQCVNLTTRTQLPPAYTNSFTRGVYYPDKVFRSSVLHSTQDLFLPFFSNVTWFHAIHVSGTNGTKRFDNPVLPFNDGVYFASTEKSNIIRGWIFGTTLDSKTQSLLIVNNATNVVIKVCEFQFCNDPFLGVYYHKNNKSWMESEFRVYSSANNCTFEYVSQPFLMDLEGKQGNFKNLREFVFKNIDGYFKIYSKHTPINLVRDLPQGFSALEPLVDLPIGINITRFQTLLALHRSYLTPGDSSSGWTAGAAAYYVGYLQPRTFLLKYNENGTITDAVDCALDPLSETKCTLKSFTVEKGIYQTSNFRVQPTESIVRFPNITNLCPFGEVFNATRFASVYAWNRKRISNCVADYSVLYNSASFSTFKCYGVSPTKLNDLCFTNVYADSFVIRGDEVRQIAPGQTGKIADYNYKLPDDFTGCVIAWNSNNLDSKVGGNYNYLYRLFRKSNLKPFERDISTEIYQAGSTPCNGVEGFNCYFPLQSYGFQPTNGVGYQPYRVVVLSFELLHAPATVCGPKKSTNLVKNKCVNFNFNGLTGTGVLTESNKKFLPFQQFGRDIADTTDAVRDPQTLEILDITPCSFGGVSVITPGTNTSNQVAVLYQDVNCTEVPVAIHADQLTPTWRVYSTGSNVFQTRAGCLIGAEHVNNSYECDIPIGAGICASYQTQTNSPRRARSVASQSIIAYTMSLGAENSVAYSNNSIACPTNFTISVTTEILPVSMTKTSVDCTMYICGDSTECSNFLLQYGSFCTQLNRALTGIAVEQDKNTQEVFAQVKQIYKTPPIKDFGGFNFSQILPDPSKPSKRSFIEDLLFNKVTLADAGFIKQYGDCLGDIAARDLICAQKFNGLTVLPPLLTDEMIAQYTSALLAGTITSGWTFGAGAALQIPFAMQMAYRFNGIGVTQNVLYENQKLIANQFNSAIGKIQDSLSSTASALGKLQDVVNQNAQALNTLVKQLSSNFGAISSVLNDILSRLDKVEAEVQIDRLITGRLQSLQTYVTQQLIRAAEIRASANLAATKMSECVLGQSKRVDFCGKGYHLMSFPQSAPHGVVFLHVTYVPAQEKNFTTAPAICHDGKAHFPREGVFVSNGTHWFVTQRNFCEPQIITTDNTFVSGNCDVVIGIVNNTVYDPLQPELDSFKEELDKYFKNHTSPDVDLGDISGINASVVNIQKEIDRLNEVAKNLNESLIDLQELGKYEQYIK

SEQ ID NO: 2026 - protein, 1211 aa, Artificial Sequence
  SARS-CoV-2/Australia/QLD02/2020__EPI_ISL_407896 spike protein (1-1211)(I714C_Y1110C)
MFVFLVLLPLVSSQCVNLTTRTQLPPAYTNSFTRGVYYPDKVFRSSVLHSTQDLFLPFFSNVTWFHAIHVSGTNGTKRFDNPVLPFNDGVYFASTEKSNIIRGWIFGTTLDSKTQSLLIVNNATNVVIKVCEFQFCNDPFLGVYYHKNNKSWMESEFRVYSSANNCTFEYVSQPFLMDLEGKQGNFKNLREFVFKNIDGYFKIYSKHTPINLVRDLPQGFSALEPLVDLPIGINITRFQTLLALHRSYLTPGDSSSGWTAGAAAYYVGYLQPRTFLLKYNENGTITDAVDCALDPLSETKCTLKSFTVEKGIYQTSNFRVQPTESIVRFPNITNLCPFGEVFNATRFASVYAWNRKRISNCVADYSVLYNSASFSTFKCYGVSPTKLNDLCFTNVYADSFVIRGDEVRQIAPGQTGKIADYNYKLPDDFTGCVIAWNSNNLDSKVGGNYNYLYRLFRKSNLKPFERDISTEIYQAGSTPCNGVEGFNCYFPLQSYGFQPTNGVGYQPYRVVVLSFELLHAPATVCGPKKSTNLVKNKCVNFNFNGLTGTGVLTESNKKFLPFQQFGRDIADTTDAVRDPQTLEILDITPCSFGGVSVITPGTNTSNQVAVLYQDVNCTEVPVAIHADQLTPTWRVYSTGSNVFQTRAGCLIGAEHVNNSYECDIPIGAGICASYQTQTNSPRRARSVASQSIIAYTMSLGAENSVAYSNNSIACPTNFTISVTTEILPVSMTKTSVDCTMYICGDSTECSNLLLQYGSFCTQLNRALTGIAVEQDKNTQEVFAQVKQIYKTPPIKDFGGFNFSQILPDPSKPSKRSFIEDLLFNKVTLADAGFIKQYGDCLGDIAARDLICAQKFNGLTVLPPLLTDEMIAQYTSALLAGTITSGWTFGAGAALQIPFAMQMAYRFNGIGVTQNVLYENQKLIANQFNSAIGKIQDSLSSTASALGKLQDVVNQNAQALNTLVKQLSSNFGAISSVLNDILSRLDKVEAEVQIDRLITGRLQSLQTYVTQQLIRAAEIRASANLAATKMSECVLGQSKRVDFCGKGYHLMSFPQSAPHGVVFLHVTYVPAQEKNFTTAPAICHDGKAHFPREGVFVSNGTHWFVTQRNFCEPQIITTDNTFVSGNCDVVIGIVNNTVYDPLQLELDSFKEELDKYFKNHTSPDVDLGDISGINASVVNIQKEIDRLNEVAKNLNESLIDLQELGKYEQYIK

SEQ ID NO: 2027 - protein, 1211 aa, Artificial Sequence
  SARS-CoV-2/India/1-31/2020__EPI_ISL_413523 spike protein (1-1211)(I714C_Y1110C)
MFVFLVLLPLVSSQCVNLTTRTQLPPAYTNSFTRGVYYPDKVFRSSVLHSTQDLFLPFFSNVTWFHAIHVSGTNGTKRFDNPVLPFNDGVYFASTEKSNIIRGWIFGTTLDSKTQSLLIVNNATNVVIKVCEFQFCNDPFLGVYYHKNNKSWMESEFRVYSSANNCTFEYVSQPFLMDLEGKQGNFKNLREFVFKNIDGYFKIYSKHTPINLVRDLPQGFSALEPLVDLPIGINITRFQTLLALHRSYLTPGDSSSGWTAGAAAYYVGYLQPRTFLLKYNENGTITDAVDCALDPLSETKCTLKSFTVEKGIYQTSNFRVQPTESIVRFPNITNLCPFGEVFNATRFASVYAWNRKRISNCVADYSVLYNSASFSTFKCYGVSPTKLNDLCFTNVYADSFVIRGDEVRQIAPGQTGKIADYNYKLPDDFTGCVIAWNSNNLDSKVGGNYNYLYRLFRKSNLKPFERDISTEIYQAGSTPCNGVEGFNCYFPLQSYGFQPTNGVGYQPYRVVVLSFELLHAPATVCGPKKSTNLVKNKCVNFNFNGLTGTGVLTESNKKFLPFQQFGRDIADTTDAVRDPQTLEILDITPCSFGGVSVITPGTNTSNQVAVLYQDVNCTEVPVAIHADQLTPTWRVYSTGSNVFQTRAGCLIGAEHVNNSYECDIPIGAGICASYQTQTNSPRRARSVASQSIIAYTMSLGAENSVAYSNNSIACPTNFTISVTTEILPVSMTKTSVDCTMYICGDSTECSNLLLQYGSFCTQLNRALTGIAVEQDKNTQEVFAQVKQIYKTPPIKDFGGFNFSQILPDPSKPSKRSFIEDLLFNKVTLADAGFIKQYGDCLGDIAARDLICAQKFNGLTVLPPLLTDEMIAQYTSALLAGTITSGWTFGAGAALQIPFAMQMAYRFNGIGVTQNVLYENQKLIANQFNSVIGKIQDSLSSTASALGKLQDVVNQNAQALNTLVKQLSSNFGAISSVLNDILSRLDKVEAEVQIDRLITGRLQSLQTYVTQQLIRAAEIRASANLAATKMSECVLGQSKRVDFCGKGYHLMSFPQSAPHGVVFLHVTYVPAQEKNFTTAPAICHDGKAHFPREGVFVSNGTHWFVTQRNFCEPQIITTDNTFVSGNCDVVIGIVNNTVYDPLQPELDSFKEELDKYFKNHTSPDVDLGDISGINASVVNIQKEIDRLNEVAKNLNESLIDLQELGKYEQYIK

SEQ ID NO: 2028 - protein, 1211 aa, Artificial Sequence
  SARS-CoV-2/Guangdong/GD2020087-P0008/2020__EPI_ISL_413863 spike protein (1-1211)(I714C_Y1110C)
MFVFLVLLPLVSSQCVNLTTRTQLPPAYTNSFTRGVYYPDKVFRSSVLHSTQDLFLPFFSNVTWFHAIHVSGTNGTKRFDNPVLPFNDGVYFASTEKSNIIRGWIFGTTLDSKTQSLLIVNNATNVVIKVCEFQFCNDPFLGVYYHKNNKSWMESEFRVYSSANNCTFEYVSQPFLMDLEGKQGNFKNLREFVFKNIDGYFKIYSKHTPINLVRDLPQGFSALEPLVDLPIGINITRFQTLLALHRSYLTPGDSSSGWTAGAAAYYVGYLQPRTFLLKYNENGTITDAVDCALDPLSETKCTLKSFTVEKGIYQTSNFRVQPTESIVRFPNITNLCPFGEVFNATRFASVYAWNRKRISNCVADYSVLYNSASFSTFKCYGVSPTKLNDLCFTNVYADSFVIRGDEVREIAPGQTGKIADYNYKLPDDFTGCVIAWNSNNLDSKVGGNYNYLYRLFRKSNLKPFERDISTEIYQAGSTPCNGVEGFNCYFPLQSYGFQPTNGVGYQPYRVVVLSFELLHAPATVCGPKKSTNLVKNKCVNFNFNGLTGTGVLTESNKKFLPFQQFGRDIADTTDAVRDPQTLEILDITPCSFGGVSVITPGTNTSNQVAVLYQDVNCTEVPVAIHADQLTPTWRVYSTGSNVFQTRAGCLIGAEHVNNSYECDIPIGAGICASYQTQTNSPRRARSVASQSIIAYTMSLGAENSVAYSNNSIACPTNFTISVTTEILPVSMTKTSVDCTMYICGDSTECSNLLLQYGSFCTQLNRALTGIAVEQDKNTQEVFAQVKQIYKTPPIKDFGGFNFSQILPDPSKPSKRSFIEDLLFNKVTLADAGFIKQYGDCLGDIAARDLICAQKFNGLTVLPPLLTDEMIAQYTSALLAGTITSGWTFGAGAALQIPFAMQMAYRFNGIGVTQNVLYENQKLIANQFNSAIGKIQDSLSSTASALGKLQDVVNQNAQALNTLVKQLSSNFGAISSVLNDILSRLDKVEAEVQIDRLITGRLQSLQTYVTQQLIRAAEIRASANLAATKMSECVLGQSKRVDFCGKGYHLMSFPQSAPHGVVFLHVTYVPAQEKNFTTAPAICHDGKAHFPREGVFVSNGTHWFVTQRNFCEPQIITTDNTFVSGNCDVVIGIVNNTVYDPLQPELDSFKEELDKYFKNHTSPDVDLGDISGINASVVNIQKEIDRLNEVAKNLNESLIDLQELGKYEQYIK

SEQ ID NO: 2029 - protein, 1211 aa, Artificial Sequence
  SARS-CoV-2/Sweden/01/2020__EPI_ISL_411951 spike protein (1-1211)(I714C_Y1110C)
MFVFLVLLPLVSSQCVNLTTRTQLPPAYTNSFTRGVYYPDKVFRSSVLHSTQDLFLPFFSNVTWFHAIHVSGTNGTKRFDNPVLPFNDGVYFASTEKSNIIRGWIFGTTLDSKTQSLLIVNNATNVVIKVCEFQFCNDPFLGVYYHKNNKSWMESEFRVYSSANNCTFEYVSQPFLMDLEGKQGNFKNLREFVFKNIDGYFKIYSKHTPINLVRDLPQGFSALEPLVDLPIGINITRFQTLLALHRSYLTPGDSSSGWTAGAAAYYVGYLQPRTFLLKYNENGTITDAVDCALDPLSETKCTLKSFTVEKGIYQTSNFRVQPTESIVRFPNITNLCPFGEVFNATRFASVYAWNRKRISNCVADYSVLYNSASFSTFKCYGVSPTKLNDLCFTNVYADSFVIRGDEVRQIAPGQTGKIADYNYKLPDDFTGCVIAWNSNNLDSKVGGNYNYLYRLFRKSNLKPFERDISTEIYQAGSTPCNGVEGFNCYFPLQSYGFQPTNGVGYQPYRVVVLSFELLHAPATVCGPKKSTNLVKNKCVNFNFNGLTGTGVLTESNKKFLPFQQFGRDIADTTDAVRDPQTLEILDITPCSFGGVSVITPGTNTSNQVAVLYQDVNCTEVPVAIHADQLTPTWRVYSTGSNVFQTRAGCLIGAEHVNNSYECDIPIGAGICASYQTQTNSPRRARSVASQSIIAYTMSLGAENSVAYSNNSIACPTNFTISVTTEILPVSMTKTSVDCTMYICGDSTECSNLLLQYGSFCTQLNRALTGIAVEQDKNTQEVFAQVKQIYKTPPIKDCGGFNFSQILPDPSKPSKRSFIEDLLFNKVTLADAGFIKQYGDCLGDIAARDLICAQKFNGLTVLPPLLTDEMIAQYTSALLAGTITSGWTFGAGAALQIPFAMQMAYRFNGIGVTQNVLYENQKLIANQFNSAIGKIQDSLSSTASALGKLQDVVNQNAQALNTLVKQLSSNFGAISSVLNDILSRLDKVEAEVQIDRLITGRLQSLQTYVTQQLIRAAEIRASANLAATKMSECVLGQSKRVDFCGKGYHLMSFPQSAPHGVVFLHVTYVPAQEKNFTTAPAICHDGKAHFPREGVFVSNGTHWFVTQRNFCEPQIITTDNTFVSGNCDVVIGIVNNTVYDPLQPELDSFKEELDKYFKNHTSPDVDLGDISGINASVVNIQKEIDRLNEVAKNLNESLIDLQELGKYEQYIK

SEQ ID NO: 2030 - protein, 1211 aa, Artificial Sequence
  SARS-CoV-2/Tianmen/HBCDC-HB-07/2020__EPI_ISL_412983 spike protein (1-1211)(I714C_Y1110C)
MFVFLVLLPLVSSQCVNLTTRTQLPPAYTNSFTRGVYYPDKVFRSSVLHSTQDLFLPFFSNVTWFHAIHVSGTNGTKRFDNPVLPFNDGVYFASTEKSNIIRGWIFGTTLDSKTQSLLIVNNATNVVIKVCEFQFCNDPFLGVYYHKNNKSWMESEFRVYSSANNCTFEYVSQPFLMDLEGKQGNFKNLREFVFKNIDGYFKIYSKHTPINLVRDLPQGFSALEPLVDLPIGINITRFQTLLALHRSYLTPGDSSSGWTAGAAAYYVGYLQPRTFLLKYNENGTITDAVDCALDPLSETKCTLKSFTVEKGIYQTSNFRVQPTESIVRFPNITNLCPFGEVFNATRFASVYAWNRKRISNCVADYSVLYNSASFSTFKCYGVSPTKLNDLCFTNVYADSFVIRGDEVRQIAPGQTGKIADYNYKLPDDFTGCVIAWNSNNLDSKVGGNYNYLYRLFRKSNLKPFERDISTEIYQAGSTPCNGVEGFNCYFPLQSYGFQPTNGVGYQPYRVVVLSFELLHAPATVCGPKKSTNLVKNKCVNFNFNGLTGTGVLTESNKKFLPFQQFGRDIADTTDAVRDPQTLEILDITPCSFGGVSVITPGTNTSNQVAVLYQDLNCTEVPVAIHADQLTPTWRVYSTGSNVFQTRAGCLIGAEHVNNSYECDIPIGAGICASYQTQTNSPRRARSVASQSIIAYTMSLGAENSVAYSNNSIACPTNFTISVTTEILPVSMTKTSVDCTMYICGDSTECSNLLLQYGSFCTQLNRALTGIAVEQDKNTQEVFAQVKQIYKTPPIKDFGGFNFSQILPDPSKPSKRSFIEDLLFNKVTLADAGFIKQYGDCLGDIAARDLICAQKFNGLTVLPPLLTDEMIAQYTSALLAGTITSGWTFGAGAALQIPFAMQMAYRFNGIGVTQNVLYENQKLIANQFNSAIGKIQDSLSSTASALGKLQDVVNQNAQALNTLVKQLSSNFGAISSVLNDILSRLDKVEAEVQIDRLITGRLQSLQTYVTQQLIRAAEIRASANLAATKMSECVLGQSKRVDFCGKGYHLMSFPQSAPHGVVFLHVTYVPAQEKNFTTAPAICHDGKAHFPREGVFVSNGTHWFVTQRNFCEPQIITTDNTFVSGNCDVVIGIVNNTVYDPLQPELDSFKEELDKYFKNHTSPDVDLGDISGINASVVNIQKEIDRLNEVAKNLNESLIDLQELGKYEQYIK

SEQ ID NO: 2031 - protein, 1211 aa, Artificial Sequence
  SARS-CoV-2/Hong Kong/case42_VM20002493/2020__EPI_ISL_414527 spike protein (1-1211)(I714C_Y1110C)
MFVFLVLLPLVSSQCVNLTTRTQLPPAYTNSFTRGVYYPDKVFRSSVLHSTQDLFLPFFSNVTWFHAIHVSGTNGTKRFDNPVLPFNDGVYFASTEKSNIIRGWIFGTTLDSKTQSLLIVNNATNVVIKVCEFQFCNDPFLGVYYHKNNKSWMESEFRVYSSANNCTFEYVSQPFLMDLEGKQGNFKNLREFVFKNIDGYFKIYSKHTPINLVRDLPQGFSALEPLVDLPIGINITRFQTLLALHRSYLTPGDSSSGWTAGAAAYYVGYLQPRTFLLKYNENGTITDAVDCALDPLSETKCTLKSFTVEKGIYQTSNFRVQPTESIVRFPNITNLCPFGEVFNATRFASVYAWNRKRISNCVADYSVLYNSASFSTFKCYGVSPTKLNDLCFTNVYADSFVIRGDEVRQIAPGQTGKIADYNYKLPDDFTGCVIAWNSNNLDSKVGGNYNYLYRLFRKSNLKPFERDISTEIYQAGSTPCNGVEGFNCYFPLQSYGFQPTNGVGYQPYRVVVLSFELLHAPATVCGPKKSTNLVKNKCVNFNFNGLTGTGVLTESNKKFLPFQQFGRDIADTTDAVRDPQTLEILDITPCSFGGVSVITPGTNTSNQVAVLYQDVNCTEVPVAIHADQLTPTWRVYSTGSNVFQTRAGCLIGAEHVNNSYECDIPIGAGICASYQTQTNSPRRARSVASQSIIAYTMSLGAENSVAYSNNSIACPTNFAISVTTEILPVSMTKTSVDCTMYICGDSTECSNLLLQYGSFCTQLNRALTGIAVEQDKNTQEVFAQVKQIYKTPPIKDFGGFNFSQILPDPSKPSKRSFIEDLLFNKVTLADAGFIKQYGDCLGDIAARDLICAQKFNGLTVLPPLLTDEMIAQYTSALLAGTITSGWTFGAGAALQIPFAMQMAYRFNGIGVTQNVLYENQKLIANQFNSAIGKIQDSLSSTASALGKLQDVVNQNAQALNTLVKQLSSNFGAISSVLNDILSRLDKVEAEVQIDRLITGRLQSLQTYVTQQLIRAAEIRASANLAATKMSECVLGQSKRVDFCGKGYHLMSFPQSAPHGVVFLHVTYVPAQEKNFTTAPAICHDGKAHFPREGVFVSNGTHWFVTQRNFCEPQIITTDNTFVSGNCDVVIGIVNNTVYDPLQPELDSFKEELDKYFKNHTSPDVDLGDISGINASVVNIQKEIDRLNEVAKNLNESLIDLQELGKYEQYIK

SEQ ID NO: 2032 - protein, 1211 aa, Artificial Sequence
  SARS-CoV-2/USA/CruiseA-23/2020__EPI_ISL_414482 spike protein (1-1211)(I714C_Y1110C)
MFVFLVLLPLVSSQCVNLTTRTQLPPAYTNSFTRGVYYPDKVFRSSVLHSTQDLFLPFFSNVTWFHAIHVSGTNGTKRFDNPVLPFNDGVYFASTEKSNIIRGWIFGTTLDSKTQSLLIVNNATNVVIKVCEFQFCNDPFLGVYYHKNNKSWMESEFRVYSSANNCTFEYVSQPFLMDLEVKQGNFKNLREFVFKNIDGYFKIYSKHTPINLVRDLPQGFSALEPLVDLPIGINITRFQTLLALHRSYLTPGDSSSGWTAGAAAYYVGYLQPRTFLLKYNENGTITDAVDCALDPLSETKCTLKSFTVEKGIYQTSNFRVQPTESIVRFPNITNLCPFGEVFNATRFASVYAWNRKRISNCVADYSVLYNSASFSTFKCYGVSPTKLNDLCFTNVYADSFVIRGDEVRQIAPGQTGKIADYNYKLPDDFTGCVIAWNSNNLDSKVGGNYNYLYRLFRKSNLKPFERDISTEIYQAGSTPCNGVEGFNCYFPLQSYGFQPTNGVGYQPYRVVVLSFELLHAPATVCGPKKSTNLVKNKCVNFNFNGLTGTGVLTESNKKFLPFQQFGRDIADTTDAVRDPQTLEILDITPCSFGGVSVITPGTNTSNQVAVLYQDVNCTEVPVAIHADQLTPTWRVYSTGSNVFQTRAGCLIGAEHVNNSYECDIPIGAGICASYQTQTNSPRRARSVASQSIIAYTMSLGAENSVAYSNNSIACPTNFTISVTTEILPVSMTKTSVDCTMYICGDSTECSNLLLQYGSFCTQLNRALTGIAVEQDKNTQEVFAQVKQIYKTPPIKDFGGFNFSQILPDPSKPSKRSFIEDLLFNKVTLADAGFIKQYGDCLGDIAARDLICAQKFNGLTVLPPLLTDEMIAQYTSALLAGTITSGWTFGAGAALQIPFAMQMAYRFNGIGVTQNVLYENQKLIANQFNSAIGKIQDSLSSTASALGKLQDVVNQNAQALNTLVKQLSSNFGAISSVLNDILSRLDKVEAEVQIDRLITGRLQSLQTYVTQQLIRAAEIRASANLAATKMSECVLGQSKRVDFCGKGYHLMSFPQSAPHGVVFLHVTYVPAQEKNFTTAPAICHDGKAHFPREGVFVSNGTHWFVTQRNFCEPQIITTDNTFVSGNCDVVIGIVNNTVYDPLQPELDSFKEELDKYFKNHTSPDVDLGDISGINASVVNIQKEIDRLNEVAKNLNESLIDLQELGKYEQYIK

SEQ ID NO: 2033 - protein, 1211 aa, Artificial Sequence
  SARS-CoV-2/Hong Kong/case85_VM20002868/2020__EPI_ISL_414519 spike protein (1-1211)(I714C_Y1110C)
MFVFLVLVPLVSSQCVNLTTRTQLPPAYTNSFTRGVYYPDKVFRSSVLHSTQDLFLPFFSNVTWFHAIHVSGTNGTKRFDNPVLPFNDGVYFASTEKSNIIRGWIFGTTLDSKTQSLLIVNNATNVVIKVCEFQFCNDPFLGVYYHKNNKSWMESEFRVYSSANNCTFEYVSQPFLMDLEGKQGNFKNLREFVFKNIDGYFKIYSKHTPINLVRDLPQGFSALEPLVDLPIGINITRFQTLLALHRSYLTPGDSSSGWTAGAAAYYVGYLQPRTFLLKYNENGTITDAVDCALDPLSETKCTLKSFTVEKGIYQTSNFRVQPTESIVRFPNITNLCPFGEVFNATRFASVYAWNRKRISNCVADYSVLYNSASFSTFKCYGVSPTKLNDLCFTNVYADSFVIRGDEVRQIAPGQTGKIADYNYKLPDDFTGCVIAWNSNNLDSKVGGNYNYLYRLFRKSNLKPFERDISTEIYQAGSTPCNGVEGFNCYFPLQSYGFQPTNGVGYQPYRVVVLSFELLHAPATVCGPKKSTNLVKNKCVNFNFNGLTGTGVLTESNKKFLPFQQFGRDIADTTDAVRDPQTLEILDITPCSFGGVSVITPGTNTSNQVAVLYQDVNCTEVPVAIHADQLTPTWRVYSTGSNVFQTRAGCLIGAEHVNNSYECDIPIGAGICASYQTQTNSPRRARSVASQSIIAYTMSLGAENSVAYSNNSIACPTNFTISVTTEILPVSMTKTSVDCTMYICGDSTECSNLLLQYGSFCTQLNRALTGIAVEQDKNTQEVFAQVKQIYKTPPIKDFGGFNFSQILPDPSKPSKRSFIEDLLFNKVTLADAGFIKQYGDCLGDIAARDLICAQKFNGLTVLPPLLTDEMIAQYTSALLAGTITSGWTFGAGAALQIPFAMQMAYRFNGIGVTQNVLYENQKLIANQFNSAIGKIQDSLSSTASALGKLQDVVNQNAQALNTLVKQLSSNFGAISSVLNDILSRLDKVEAEVQIDRLITGRLQSLQTYVTQQLIRAAEIRASANLAATKMSECVLGQSKRVDFCGKGYHLMSFPQSAPHGVVFLHVTYVPAQEKNFTTAPAICHDGKAHFPREGVFVSNGTHWFVTQRNFCEPQIITTDNTFVSGNCDVVIGIVNNTVYDPLQPELDSFKEELDKYFKNHTSPDVDLGDISGINASVVNIQKEIDRLNEVAKNLNESLIDLQELGKYEQYIK

SEQ ID NO: 2034 - protein, 1211 aa, Artificial Sequence; identical to SEQ ID NO: 2024
  SARS-CoV-2/England/200990660/2020__EPI_ISL_414523 spike protein (1-1211)(I714C_Y1110C)

SEQ ID NO: 2035 - protein, 1211 aa, Artificial Sequence
  SARS-CoV-2/Australia/NSW09/2020__EPI_ISL_413595 spike protein (1-1211)(I714C_Y1110C)
MFVFLVLLPLVSSQCVNLTTRTQLPPAYTNSFTRGVYYPDKVFRSSVLHSTQDLFLPFFSNVTWFHAIHVSGTNGTKRFDNPVLPFNDGVYFASTEKSNIIRGWIFGTTLDSKTQSLLIVNNATNVVIKVCEFQFCNDPFLGVYYHKNNKSWMESEFRVYSSANNCTFEYVSQPFLMDLEGKQGNFKNLREFVFKNIDGYFKIYSKHTPINLVRDLPQGFSALEPLVDLPIGINITRFQTLLALHRSYLTPGDSSSGWTAGAAAYYVGYLQPRTFLLKYNENGTITDAVDCALDPLSETKCTLKSFTVEKGIYQTSNFRVQPTESIVRFPNITNLCPFGEVFNATRFASVYAWNRKRISNCVADYSVLYNSASFSTFKCYGVSPTKLNDLCFTNVYADSFVIRGDEVRQIAPGQTGKIADYNYKLPDDFTGCVIAWNSNNLDSKVGGNYNYLYRLFRKSNLKPFERDISTEIYQAGSTPCNGVEGFNCYFPLQSYGFQPTNGVGYQPYRVVVLSFELLHAPATVCGPKKSTNLVKNKCVNFNFNGLTGTGVLTESNKKFLPFQQFGRDIADTTDAVRDPQTLEILDITPCSFGGVSVITPGTNTSNQVAVLYQDVNCTEVPVAIHADQLTPTWRVYSTGSNVFQTRAGCLIGAEHVNNSYECDIPIGAGICASYQTQTNSPRRARSVASQSIIAYTMSLGAENSVAYSNNSIACPTNFTISVTTEILPVSMTKTSVDCTMYICGDSTECSNLLLQYGSFCTQLNRALTGIAVEQDKNTQEVFAQVKQIYKTPPIKDFGGFNFSQILPDPSKPSKRSFIEDLLFNKVTLADAGFIKQYGDCLGDIAARDLICAQKFNGLTVLPPLLTDEMIAQYTSALLAGTITSGWTFGAGAALQIPFAMQMAYRFNGIGVTQNVLYENQKLIANQFNSAIGKIQDSLSFTASALGKLQDVVNQNAQALNTLVKQLSSNFGAISSVLNDILSRLDKVEAEVQIDRLITGRLQSLQTYVTQQLIRAAEIRASANLAATKMSECVLGQSKRVDFCGKGYHLMSFPQSAPHGVVFLHVTYVPAQEKNFTTAPAICHDGKAHFPREGVFVSNGTHWFVTQRNFCEPQIITTDNTFVSGNCDVVIGIVNNTVYDPLQPELDSFKEELDKYFKNHTSPDVDLGDISGINASVVNIQKEIDRLNEVAKNLNESLIDLQELGKYEQYIK

SEQ ID NO: 2036 - protein, 1211 aa, Artificial Sequence; identical to SEQ ID NO: 2016
  SARS-CoV-2/Australia/NSW10/2020__EPI_ISL_413596 spike protein (1-1211)(I714C_Y1110C)

SEQ ID NO: 2037 - protein, 1211 aa, Artificial Sequence
  SARS-CoV-2/Switzerland/1000477797/2020__EPI_ISL_413023 spike protein (1-1211)(I714C_Y1110C)
MFVFLVLLPLVSSQCVNLTTRTQLPPAYTNSFTRGVYYPDKVFRSSVLHSTQDLFLPFFSNVTWFHAIHVSGTNGTKRFDNPVLPFNDGVYFASTEKSNIIRGWIFGTTLDSKTQSLLIVNNATNVVIKVCEFQFCNDPFLGVYYHKNNKSWMESEFRVYSSANNCTFEYVSQPFLMDLEGKQGNFKNLREFVFKNIDGYFNIYSKHTPINLVRDLPQGFSALEPLVDLPIGINITRFQTLLALHRSYLTPGDSSSGWTAGAAAYYVGYLQPRTFLLKYNENGTITDAVDCALDPLSETKCTLKSFTVEKGIYQTSNFRVQPTESIVRFPNITNLCPFGEVFNATRFASVYAWNRKRISNCVADYSVLYNSASFSTFKCYGVSPTKLNDLCFTNVYADSFVIRGDEVRQIAPGQTGKIADYNYKLPDDFTGCVIAWNSNNLDSKVGGNYNYLYRLFRKSNLKPFERDISTEIYQAGSTPCNGVEGFNCYFPLQSYGFQPTNGVGYQPYRVVVLSFELLHAPATVCGPKKSTNLVKNKCVNFNFNGLTGTGVLTESNKKFLPFQQFGRDIADTTDAVRDPQTLEILDITPCSFGGVSVITPGTNTSNQVAVLYQGVNCTEVPVAIHADQLTPTWRVYSTGSNVFQTRAGCLIGAEHVNNSYECDIPIGAGICASYQTQTNSPRRARSVASQSIIAYTMSLGAENSVAYSNNSIACPTNFTISVTTEILPVSMTKTSVDCTMYICGDSTECSNLLLQYGSFCTQLNRALTGIAVEQDKNTQEVFAQVKQIYKTPPIKDFGGFNFSQILPDPSKPSKRSFIEDLLFNKVTLADAGFIKQYGDCLGDIAARDLICAQKFNGLTVLPPLLTDEMIAQYTSALLAGTITSGWTFGAGAALQIPFAMQMAYRFNGIGVTQNVLYENQKLIANQFNSAIGKIQDSLSSTASALGKLQDVVNQNAQALNTLVKQLSSNFGAISSVLNDILSRLDKVEAEVQIDRLITGRLQSLQTYVTQQLIRAAEIRASANLAATKMSECVLGQSKRVDFCGKGYHLMSFPQSAPHGVVFLHVTYVPAQEKNFTTAPAICHDGKAHFPREGVFVSNGTHWFVTQRNFCEPQIITTDNTFVSGNCDVVIGIVNNTVYDPLQPELDSFKEELDKYFKNHTSPDVDLGDISGINASVVNIQKEIDRLNEVAKNLNESLIDLQELGKYEQYIK

SEQ ID NO: 2038 - protein, 1211 aa, Artificial Sequence
  SARS-CoV-2/Belgium/BA-02291/2020__EPI_ISL_415159 spike protein (1-1211)(I714C_Y1110C)
MFVFLVLLPLVSSQCVNLTTRTQLPPAYTNSFTRGVYYPDKVFRSSVLHSTQDLFLPFFSNVTWFHAIHVSGTNGTKRFDNPVLPFNDGVYFASTEKSNIIRGWIFGTTLDSKTQSLLIVNNATNVVIKVCEFQFCNDPFLGVYYHKNNKSWMESEFRVYSSANNCTFEYVSQPFLMDLEGKQGNFKNLREFVFKNIDGYFKIYSKHTPINLVRDLPQGFSALEPLVDLPIGINITRFQTLLALHRSYLTPGDSSSGWTAGAAAYYVGYLQPRTFLLKYNENGTITDAVDCALDPLSETKCTLKSFTVEKGIYQTSNFRVQPTESIVRFPNITNLCPFGEVFNATRFASVYAWNRKRISNCVADYSVLYNSASFSTFKCYGVSPTKLNDLCFTNVYADSFVIRGDEVRQIAPGQTGKIADYNYKLPDDFTGCVIAWNSNNLDSKVGGNYNYLYRLFRRSNLKPFERDISTEIYQAGSTPCNGVEGFNCYFPLQSYGFQPTNGVGYQPYRVVVLSFELLPAPATVCGPKKSTNLVKNKCVNFNFNGLTGTGVLTESNKKFLPFQQFGRDIADTTDAVRDPQTLEILDITPCSFGGVSVITPGTNTSNQVAVLYQGVNCTEVPVAIHADQLTPTWRVYSTGSNVFQTRAGCLIGAEHVNNSYECDIPIGAGICASYQTQTNSPRRARSVASQSIIAYTMSLGAENSVAYSNNSIACPTNFTISVTTEILPVSMTKTSVDCTMYICGDSTECSNLLLQYGSFCTQLNRALTGIAVEQDKNTQEVFAQVKQIYKTPPIKDFGGFNFSQILPDPSKPSKRSFIEDLLFNKVTLADAGFIKQYGDCLGDIAARDLICAQKFNGLTVLPPLLTDEMIAQYTSALLAGTITSGWTFGAGAALQIPFAMQMAYRFNGIGVTQNVLYENQKLIANQFNSAIGKIQDSLSSAAPALGKLQDVVNQNAQALNTLVKQLSSNFGAISSVLNDILSRLDKVEAEVQIDRLITGRLQSLQTYVTQQLIRAAEIRASANLAATKMSECVLGQSKRVDFCGKGYHLMSFPQSAPHGVVFLHVTYVPAQEKNFTTAPAICHDGKAHFPREGVFVSNGTHWFVTQRNFCEPQIITTDNTFVSGNCDVVIGIVNNTVYDPLQPELDSFKEELDKYFKNHTSPDVDLGDISGINASVVNIQKEIDRLNEVAKNLNESLIDLQELGKYEQYIK

SEQ ID NO: 2039 - protein, 1211 aa, Artificial Sequence
  SARS-CoV-2/USA/WA8-UW5/2020__EPI_ISL_413486 spike protein (1-1211)(I714C_Y1110C)
MFVFLVLLPLVSSQCVNLTTRTQLPPAYTNSFTRGVYYPDKVFRSSVLHSTQDLFLPFFSNVTWFHAIHVSGTNGTKRFDNPVLPFNDGVYFASTEKSNIIRGWIFGTTLDSKTQSLLIVNNATNVVIKVCEFQFCNDPFLGVYYHKNNKSWMESEFRVYSSANNCTFEYVSQPFLMDLEGKQGNFKNLREFVFKNIDGYFKIYSKHTPINLVRDLPQGFSALEPLVDLPIGINITRFQTLLALHRSYLTPGDSSSGWTAGAAAYYVGYLQPRTFLLKYNENGTITDAVDCALDPLSETKCTLKSFTVEKGIYQTSNFRVQPTESIVRFPNITNLCPFGEVFNATRFASVYAWNRKRISNCVADYSVLYNSASFSTFKCYGVSPTKLNDLCFTNVYADSFVIRGDEVRQIAPGQTGKIADYNYKLPDDFTGCVIAWNSNNLDSKVGGNYNYLYRLFRKSNLKPFERDISTEIYQAGSTPCNGVEGFNCYFPLQSYGFQPTNGVGYQPYRVVVLSFELLHAPATVCGPKKSTNLVKNKCVNFNFNGLTGTGVLTESNKKFLPFQQFGRDIADTTDAVRDPQTLEILDITPCSFGGVSVITPGTNTSNQVAVLYQDVNCTEVPVAIHADQLTPTWRVYSTGSNVFQTRAGCLIGAEYVNNSYECDIPIGAGICASYQTQTNSPRRARSVASQSIIAYTMSLGAENSVAYSNNSIACPTNFTISVTTEILPVSMTKTSVDCTMYICGDSTECSNLLLQYGSFCTQLNRALTGIAVEQDKNTQEVFAQVKQIYKTPPIKDFGGFNFSQILPDPSKPSKRSFIEDLLFNKVTLADAGFIKQYGDCLGDIAARDLICAQKFNGLTVLPPLLTDEMIAQYTSALLAGTITSGWTFGAGAALQIPFAMQMAYRFNGIGVTQNVLYENQKLIANQFNSAIGKIQDSLSSTASALGKLQDVVNQNAQALNTLVKQLSSNFGAISSVLNDILSRLDKVEAEVQIDRLITGRLQSLQTYVTQQLIRAAEIRASANLAATKMSECVLGQSKRVDFCGKGYHLMSFPQSAPHGVVFLHVTYVPAQEKNFTTAPAICHDGKAHFPREGVFVSNGTHWFVTQRNFCEPQIITTDNTFVSGNCDVVIGIVNNTVYDPLQPELDSFKEELDKYFKNHTSPDVDLGDISGINASVVNIQKEIDRLNEVAKNLNESLIDLQELGKYEQYIK

SEQ ID NO: 2040 - protein, 1211 aa, Artificial Sequence
  SARS-CoV-2/England/20102000506/2020__EPI_ISL_415147 spike protein (1-1211)(I714C_Y1110C)
MFVFLVLLPLVSSQCVNLTTRTQLPPAYTNSFTRGVYYPDKVFRSSVLHSTQDLFLPFFSNVTWFHAIHVSGTNGTKRFDNPVLPFNDGVYFASTEKSNIIRGWIFGTTLDSKTQSLLIVNNATNVVIKVCEFQFCNDPFLGVYYHKNNKSWMESEFRVYSSANNCTFEYVSQPFLMDLEGKQGNFKNLREFVFKNIDGYFKIYSKHTPINLVRDLPQGFSALEPLVDLPIGINITRFQTLLALHRSYLTPGDSSSGWTAGAAAYYVGYLQPRTFLLKYNENGTITDAVDCALDPLSETKCTLKSFTVEKGIYQTSNFRVQPTESIVRFPNITNLCPFGEVFNATRFASVYAWNRKRISNCVADYSVLYNSASFSTFKCYGVSPTKLNDLCFTNVYADSFVIRGDEVRQIAPGQTGKIADYNYKLPDDFTGCVIAWNSNNLDSKVGGNYNYLYRLFRKSNLKPFERDISTEIYQAGSTPCNGVEGFNCYFPLQSYGFQPTNGVGYQPYRVVVLSFELLHAPATVCGPKKSTNLVKNKCVNFNFNGLTGTGVLTESNKKFLPFQQFGRDIADTTDAVRDPQTLEILDITPCSFGGVSVITPGTNTSNQVAVLYQGVNCTEVPVAIHADQLTPTWRVYSTGSNVFQTRAGCLIGAEHVNNSYECDIPIGAGICASYQTQTNSPRRARSVASQSIIAYTMSLGAENSVAYSNNSIACPTNFTISVTTEILPVSMTKTSVDCTMYICGDSTECSNLLLQYGSFCTQLNRALTGIAVEQDKNTQEVFAQVKQIYKTPPIKDFGGFNFSQILPDPSKPSKRSFIEDLLFNKVTLADAGFIKQYGYCLGDIAARDLICAQKFNGLTVLPPLLTDEMIAQYTSALLAGTITSGWTFGAGAALQIPFAMQMAYRFNGIGVTQNVLYENQKLIANQFNSAIGKIQDSLSSTASALGKLQDVVNQNAQALNTLVKQLSSNFGAISSVLNDILSRLDKVEAEVQIDRLITGRLQSLQTYVTQQLIRAAEIRASANLAATKMSECVLGQSKRVDFCGKGYHLMSFPQSAPHGVVFLHVTYVPAQEKNFTTAPAICHDGKAHFPREGVFVSNGTHWFVTQRNFCEPQIITTDNTFVSGNCDVVIGIVNNTVYDPLQPELDSFKEELDKYFKNHTSPDVDLGDISGINASVVNIQKEIDRLNEVAKNLNESLIDLQELGKYEQYIK

SEQ ID NO: 2041 - protein, 1211 aa, Artificial Sequence
  SARS-CoV-2/Belgium/VAG-03013/2020__EPI_ISL_415155 spike protein (1-1211)(I714C_Y1110C)
MFVFLVLLPLVSSQCVNLTTRTQLPPAYTNSFTRGVYYPDKVFRSSVLHSTQDLFLPFFSNVTWFHAIHVSGTNGTKRFDNPVLPFNDGVYFASTEKSNIIRGWIFGTTLDSKTQSLLIVNNATNVVIKVCEFQFCNDPFLGVYYHKNNKSWMESEFRVYSSANNCTFEYVSQPFLMDLEGKQGNFKNLREFVFKNIDGYFKIYSKHTPINLVRDLPQGFSALEPLVDLPIGINITRFQTLLALHRSYLTPGDSSSGWTAGAAAYYVGYLQPRTFLLKYNENGTITDAVDCALDPLSETKCTLKSFTVEKGIYQTSNFRVQPTESIVRFPNITNLCPFGEVFNATRFASVYAWNRKRISNCVADYSVLYNSASFSTFKCYGVSPTKLNDLCFTNVYADSFVIRGDEVRQIAPGQTGKIADYNYKLPDDFTGCVIAWNSNNLDSKVGGNYNYLYRLFRKSNLKPFERDISTEIYQAGSTPCNGVEGFNCYFPLQSYGFQPTNGVGYQPYRVVVLSFELLHAPATVCGPKKSTNLVKNKCVNFNFNGLTGTGVLTESNKKFLPFQQFGRDIADTTDAVRDPQTLEILDITPCSFGGVSVITPGTNTSNQVAVLYQGVNCTEVPVAIHADQLTPTWRVYSTGSNVFQTRAGCLIGAEHVNNSYECDIPIGAGICASYQTQTNSPRRARSVASQSIIAYTMSLGAENSVAYSNNSIACPTNFTISVTTEILPVSMTKTSVDCTMYICGDSTECSNLLLQYGSFCTQLNRALTGIAVEQDKNTQEVFAQVKQIYKTPPIKDFGGFNFSQILPDPSKPSKRSFIEDLLFNKVTLADAGFIKQYGDCLGDIAARDLICAQKFNGLTVLPPLLTDEMIAQYTSALLAGTITSGWTFGAGAALQIPFAMQMAYRFNGIGVTQNVLYENQKLIANQFNSAIGKIQDSLSSTATALGKLQDVVNQNAQALNTLVKQLSSNFGAISSVLNDILSRLDKVEAEVQIDRLITGRLQSLQTYVTQQLIRAAEIRASANLAATKMSECVLGQSKRVDFCGKGYHLMSFPQSAPHGVVFLHVTYVPAQEKNFTTAPAICHDGKAHFPREGVFVSNGTHWFVTQRNFCEPQIITTDNTFVSGNCDVVIGIVNNTVYDPLQPELDSFKEELDKYFKNHTSPDVDLGDISGINASVVNIQKEIDRLNEVAKNLNESLIDLQELGKYEQYIK

SEQ ID NO: 2042 - protein, 1211 aa, Artificial Sequence
  SARS-CoV-2/Belgium/BC-03016/2020__EPI_ISL_415157 spike protein (1-1211)(I714C_Y1110C)
MFVFLVLLPLVSSQCVNLTTRTQLPPAYTNSFTRGVYYPDKVFRSSVLHSTQDLFLPFFSNVTWFHAIHVSGTNGTKRFDNPVLPFNDGVYFASTEKSNIIRGWIFGTTLDSKTQSLLIVNNATNVVIKVCEFQFCNDPFLGVYYHKNNKSWMESEFRVYSSANNCTFEYVSQPFLMDLEGKQGNFKNLREFVFKNIDGYFKIYSKHTPINLVRDLPQGFSALEPLVDLPIGINITRFQTLLALHRSYLTPGDSSSGWTAGAAAYYVGYLQPRTFLLKYNENGTITDAVDCALDPLSETKCTLKSFTVEKGIYQTSNFRVQPTESIVRFPNITNLCPFGEVFNATRFASVYAWNRKRISNCVADYSVLYNSASFSTFKCYGVSPTKLNDLCFTNVYADSFVIRGDEVRQIAPGQTGKIADYNYKLPDDFTGCVIAWNSNNLDSKVGGNYNYLYRLFRKSNLKPFERDISTEIYQAGSTPCNGVEGFNCYFPLQSYGFQPTNGVGYQPYRVVVLSFELLHAPATVCGPKKSTNLVKNKCVNFNFNGLTGTGVLTESNKKFLPFQQFGRDIADTTDAVRDPQTLEILDITPCSFGGVSVITPGTNTSNQVAVLYQGVNCTEVPVAIHADQLTPTWRVYSTGSNVFQTRAGCLIGAEHVNNSYECDIPIGAGICASYQTQTNSPRRARSVASQSIIAYTMSLGAENSVAYSNNSIACPTNFTISVTTEILPVSMTKTSVDCTMYICGDSTECSNLLLQYGSFCTQLNRALTGIAVEQDKNTQEVFAQVKQIYKTPPIKDFGGFNFSQILPDPSKPSKRSFIEDLLFNKVTLADAGFIKQYGDCLGDIAARDLICAQKFNGLTVLPPLLTDEMIAQYTSALLAGTITSGWTFGAGAALQIPFAMQMAYRFNGIGVTQNVLYENQKLIANQFNSAIGKIQDSLSSTAPALGKLQDVVNQNAQALNTLVKQLSSNFGAISSVLNDILSRLDKVEAEVQIDRLITGRLQSLQTYVTQQLIRAAEIRASANLAATKMSECVLGQSKRVDFCGKGYHLMSFPQSAPHGVVFLHVTYVPAQEKNFTTAPAICHDGKAHFPREGVFVSNGTHWFVTQRNFCEPQIITTDNTFVSGNCDVVIGIVNNTVYDPLQPELDSFKEELDKYFKNHTSPDVDLGDISGINASVVNIQKEIDRLNEVAKNLNESLIDLQELGKYEQYIK

SEQ ID NO: 2043 - protein, 1211 aa, Artificial Sequence
  SARS-CoV-2/Germany/BavPat3/2020__EPI_ISL_414521 spike protein (1-1211)(I714C_Y1110C)
MFVFLVLLPLVSSQCVNLTTRTQLPPAYTNSFTRGVYYPDKVFRSSVLHSTQDLFLPFFSNVTWFHAIHVSGTNGTKRFDNPVLPFNDGVYFASTEKSNIIRGWIFGTTLDSKTQSLLIVNNATNVVIKVCEFQFCNDPFLGVYYHKNNKSWMESEFRVYSSANNCTFEYVSQPFLMDLEGKQGNFKNLREFVFKNIDGYFKIYSKHTPINLVRDLPQGFSALEPLVDLPIGINITRFQTLLALHRSYLTPGDSSSGWTAGAAAYYVGYLQPRTFLLKYNENGTITDAVDCALDPLSETKCTLKSFTVEKGIYQTSNFRVQPTESIVRFPNITNLCPFGEVFNATRFASVYAWNRKRISNCVADYSVLYNSASFSTFKCYGVSPTKLNDLCFTNVYADSFVIRGDEVRQIAPGQTGKIADYNYKLPDDFTGCVIAWNSNNLDSKVGGNYNYLYRLFRKSNLKPFERDISTEIYQAGSTPCNGVEGFNCYFPLQSYGFQPTNGVGYQPYRVVVLSFELLHAPATVCGPKKSTNLVKNKCVNFNFNGLTGTGVLTESNKKFLPFQQFGRDIADTTDAVRDPQTLEILDITPCSFGGVSVITPGTNTSNQVAVLYQDVNCTEVPVAIHADQLTPTWRVYSTGSNVFQTRAGCLIGAEHVNNSYECDIPIGAGICASYQTQTNSPRRARSVASQSIIAYTMSLGAENSVAYSNNSIACPTNFTISVTTEILPVSMTKTSVDCTMYICGDSTECSNLLLQYGSFCTQLNRALTGIAVEQDKNTQQVFAQVKQIYKTPPIKDFGGFNFSQILPDPSKPSKRSFIEDLLFNKVTLADAGFIKQYGDCLGDIAARDLICAQKFNGLTVLPPLLTDEMIAQYTSALLAGTITSGWTFGAGAALQIPFAMQMAYRFNGIGVTQNVLYENQKLIANQFNSAIGKIQDSLSSTASALGKLQDVVNQNAQALNTLVKQLSSNFGAISSVLNDILSRLDKVEAEVQIDRLITGRLQSLQTYVTQQLIRAAEIRASANLAATKMSECVLGQSKRVDFCGKGYHLMSFPQSAPHGVVFLHVTYVPAQEKNFTTAPAICHDGKAHFPREGVFVSNGTHWFVTQRNFCEPQIITTDNTFVSGNCDVVIGIVNNTVYDPLQPELDSFKEELDKYFKNHTSPDVDLGDISGINASVVNIQKEIDRLNEVAKNLNESLIDLQELGKYEQYIK

SEQ ID NO: 2044 - protein, 1211 aa, Artificial Sequence
  SARS-CoV-2/France/HF1805/2020__EPI_ISL_414628 spike protein (1-1211)(I714C_Y1110C)
MFVFLVLLPLVSSQCVNLTTRTQLPPAYTNSFTRGVYYPDKVFRSSVLHSTQDLFLPFFSNVTWFHAIHVSGTNGTKRFDNPVLPFNDGVYFASTEKSNIIRGWIFGTTLDSKTQSLLIVNNATNVVIKVCEFQFCNDPFLGVYYHKNNKSWMESEFRVYSSANNCTFEYVSQPFLMDLEGKQGNFKNLREFVFKNIDGYFKIYSKHTPINLVRDLPQGFSALEPLVDLPIGINITRFQTLLALHRSYLTPGDSSSGWTAGAAAYYVGYLQPRTFLLKYNENGTITDAVDCALDPLSETKCTLKSFTVEKGIYQTSNFRVQPTESIVRFPNITNLCPFGEVFNATRFASVYAWNRKRISNCVADYSVLYNSASFSTFKCYGVSPTKLNDLCFTNVYADSFVIRGDEVRQIAPGQTGKIADYNYKLPDDFTGCVIAWNSNNLDSKVGGNYNYLYRLFRKSNLKPFERDISTEIYQAGSTPCNGVEGFNCYFPLQSYGFQPTNGVGYQPYRVVVLSFELLHAPATVCGPKKSTNLVKNKCVNFNFNGLTGTGVLTESNKKFLPFQQFGRDIADTTDAVRDPQTLEILDITPCSFGGVSVITPGTNTSNQVAVLYQGVNCTEVPVAIHADQLTPTWRVYSTGSNVFQTRAGCLIGAEHVNNSYECDIPIGAGICASYQTQTNSPRRARSVASQSIIAYTMSLGAENSVAYSNNSIACPTNFTISVTTEILPVSMTKTSVDCTMYICGDSTECSNLLLQYGSFCTQLNRALTGIAVEQDKNTQEVFAQVKQIYKTPPIKDFGGFNFSQILPDPSKPSKRSFIEDLLFNKVTLADAGFIKQYGDCLGDIAARDLICAQKFNGLTVLPPLLTDEMIAQYTSALLAGTITSGWTFGAGAALQIPFAMQMAYRFNGIGVTQNVLYENQKLIANQFNSAIGKIQDSLSSTASALGKLQDVVNQNAQALNTLVKQLSSNFGAISSVLNDILSRLDKVEAEVQIDRLITGRLQSLQTYVTQQLIRAAEIRASANLAATKMSECVLGQSKRVDFCGKGYHLMSFPQSAPHGVVFLHVTYVPAQEKNFTTAPAICHDGKAHFPREGVFVSNGTHWFVTQRNFCEPQIITTDNTFVSGNCDVVIGVVNNTVYDPLQPELDSFKEELDKYFKNHTSPDVDLGDISGINASVVNIQKEIDRLNEVAKNLNESLIDLQELGKYEQYIK

SEQ ID NO: 2045 - protein, 1211 aa, Artificial Sequence
  SARS-CoV-2/Netherlands/ZuidHolland_9/2020__EPI_ISL_414445 spike protein (1-1211)(I714C_Y1110C)
MFVFLVLLPLVSSQCVNLTTRTQLPPAYTNSFTRGVYYPDKVFRSSVLHSTQDLFLPFFSNVTWFHAIHVSGTNGTKRFDNPVLPFNDGVYFASTEKSNIIRGWIFGTTLDSKTQSLLIVNNATNVVIKVCEFQFCNDPFLGVYYHKNNKSWMESEFRVYSSANNCTFEYVSQPFLMDLEGKQGNFKNLREFVFKNIDGYFKIYSKHTPINLVRDLPQGFSALEPLVDLPIGINITRFQTLLALHRSYLTPGDSSSGWTAGAAAYYVGYLQPRTFLLKYNENGTITDAVDCALDPLSETKCTLKSFTVEKGIYQTSNFRVQPTESIVRFPNITNLCPFGEVFNATRFASVYAWNRKRISNCVADYSVLYNSASFSTFKCYGVSPTKLNDLCFTNVYADSFVIRGDEVRQIAPGQTGKIADYNYKLPDDFTGCVIAWNSNNLDSKVGGNYNYLYRLFRKSNLKPFERDISTEIYQAGSTPCNGVEGFNCYFPLQSYGFQPTNGVGYQPYRVVVLSFELLHAPATVCGPKKSTNLVKNKCVNFNFNGLTGTGVLTESNKKFLPFQQFGRDIADTTDAVRDPQTLEILDITPCSFGGVSVITPGTNTSNQVAVLYQGVNCTEVPVAIHADQLTPTWRVYSTGSNVFQTRAGCLIGAEHVNNSYECDIPIGAGICASYQTQTNSPRRARSVASQSIIAYTMSLGAENSVAYSNNSIACPTNFTISVTTEILPVSMTKTSVDCTMYICGDSTECSNLLLQYGSFCTQLNRALTGIAVEQDKNTQEVFAQVKQIYKTPPIKDFGGFNFSQILPDPSKPSKRSFIEDLLFNKVTLADAGFIKQYGDCLGDIAARDLICVQKFNGLTVLPPLLTDEMIAQYTSALLAGTITSGWTFGAGAALQIPFAMQMAYRFNGIGVTQNVLYENQKLIANQFNSAIGKIQDSLSSTASALGKLQDVVNQNAQALNTLVKQLSSNFGAISSVLNDILSRLDKVEAEVQIDRLITGRLQSLQTYVTQQLIRAAEIRASANLAATKMSECVLGQSKRVDFCGKGYHLMSFPQSAPHGVVFLHVTYVPAQEKNFTTAPAICHDGKAHFPREGVFVSNGTHWFVTQRNFCEPQIITTDNTFVSGNCDVVIGIVNNTVYDPLQPELDSFKEELDKYFKNHTSPDVDLGDISGINASVVNIQKEIDRLNEVAKNLNESLIDLQELGKYEQYIK

SEQ ID NO: 2046 - protein, 1211 aa, Artificial Sequence
  SARS-CoV-2/Finland/FIN03032020A/2020__EPI_ISL_413602 spike protein (1-1211)(I714C_Y1110C)
MFVFLVLLPLVSSQCVNLTTRTQLPPAYTNSFTRGVYYPDKVFRSSVLHSTQDLFLPFFSNVTWFHAIHVSGTNGTKRFDNPVLPFNDGVYFASTEKSNIIRGWIFGTTLDSKTQSLLIVNNATNVVIKVCEFQFCNDPFLGVYYHKNNKSWMESEFRVYSSANNCTFEYVSQPFLMDLEGKQGNFKNLREFVFKNIDGYFKIYSKHTPINLVRDLPQGFSALEPLVDLPIGINITRFQTLLALHRSYLTPGDSSSGWTAGAAAYYVGYLQPRTFLLKYNENGTITDAVDCALDPLSETKCTLKSFTVEKGIYQTSNFRVQPTESIVRFPNITNLCPFGEVFNATRFASVYAWNRKRISNCVADYSVLYNSASFSTFKCYGVSPTKLNDLCFTNVYADSFVIRGDEVRQIAPGQTGKIADYNYKLPDDFTGCVISWNSNNLDSKVGGNYNYLYRLFRKSNLKPFERDISTEIYQAGSTPCNGVEGFNCYFPLQSYGFQPTNGVGYQPYRVVVLSFELLHAPATVCGPKKSTNLVKNKCVNFNFNGLTGTGVLTESNKKFLPFQQFGRDIADTTDAVRDPQTLEILDITPCSFGGVSVITPGTNTSNQVAVLYQGVNCTEVPVAIHADQLTPTWRVYSTGSNVFQTRAGCLIGAEHVNNSYECDIPIGAGICASYQTQTNSPRRARSVASQSIIAYTMSLGAENSVAYSNNSIACPTNFTISVTTEILPVSMTKTSVDCTMYICGDSTECSNLLLQYGSFCTQLNRALTGIAVEQDKNTQEVFAQVKQIYKTPPIKDFGGFNFSQILPDPSKPSKRSFIEDLLFNKVTLADAGFIKQYGDCLGDIAARDLICAQKFNGLTVLPPLLTDEMIAQYTSALLAGTITSGWTFGAGAALQIPFAMQMAYRFNGIGVTQNVLYENQKLIANQFNSAIGKIQDSLSSTASALGKLQDVVNQNAQALNTLVKQLSSNFGAISSVLNDILSRLDKVEAEVQIDRLITGRLQSLQTYVTQQLIRAAEIRASANLAATKMSECVLGQSKRVDFCGKGYHLMSFPQSAPHGVVFLHVTYVPAQEKNFTTAPAICHDGKAHFPREGVFVSNGTHWFVTQRNFCEPQIITTDNTFVSGNCDVVIGIVNNTVYDPLQPELDSFKEELDKYFKNHTSPDVDLGDISGINASVVNIQKEIDRLNEVAKNLNESLIDLQELGKYEQYIK

SEQ ID NO: 2047 - protein, 1211 aa, Artificial Sequence
  SARS-CoV-2/France/GE1977/2020__EPI_ISL_414632 spike protein (1-1211)(I714C_Y1110C)
MFVFLVLLPLVSSQCVNLTTRTQLPPAYTNSFTRGVYYPDKVFRSSVLHSTQDLFLPFFSNVTWFHAIHVSGTNGTKRFDNPVLPFNDGVYFASTEKSNIIRGWIFGTTLDSKTQSLLIVNNATNVVIKVCEFQFCNDPFLGVYYHKNNKSWMESEFRVYSSANNCTFEYVSQPFLMDLEGKQGNFKNLREFVFKNIDGYFKIYSKHTPINLVRDLPQGFSALEPLVDLPIGINITRFQTLLALHRSYLTPGDSSSGWTAGAAAYYVGYLQPRTFLLKYNENGTITDAVDCALDPLSETKCTLKSFTVEKGIYQTSNFRVQPTESIVRFPNITNLCPFGEVFNATRFASVYAWNRKRISNCVADYSVLYNSASFSTFKCYGVSPTKLNDLCFTNVYADSFVIRGDEVRQIAPGQTGKIADYNYKLPDDFTGCVIAWNSNNLDSKVGGNYNYLYRLFRKSNLKPFERDISTEIYQAGSTPCNGVEGFNCYFPLQSYGFQPTNGVGYQPYRVVVLSFELLHAPATVCGPKKSTNLVKNKCVNFNFNGLTGTGVLTESNKKFLPFQQFGRDIADTTDAVRDPQTLEILDITPCSFGGVSVITPGTNTSNQVAVLYQGVNCTEVPVAIHADQLTPTWRVYSTGSNVFQTRAGCLIGAEHVNNSYECDIPIGAGICASYQTQTNSPRRARSVASQSIIAYTMSLGAENSVAYSNNSIACPTNFTISVTTEILPVSMTKTSVDCTMYICGDSTECSNLLLQYGSFCTQLNRALTGIAVEQDKNTQEVFAQVKQIYKTPPIKDFGGFNFSQILPDPSKPSKRSFIEDLLFNKVTLADAGFIKQYGDCLGDIAARDLICAQKFNGLTVLPPLLTDEMIAQYTSALLAGTITSGWTFGAGAALQIPFAMQMAYRFNGIGVTQNVLYENQKLIANQFNSAIGKIQDSLFSTASALGKLQDVVNQNAQALNTLVKQLSSNFGAISSVLNDILSRLDKVEAEVQIDRLITGRLQSLQTYVTQQLIRAAEIRASANLAATKMSECVLGQSKRVDFCGKGYHLMSFPQSAPHGVVFLHVTYVPAQEKNFTTAPAICHDGKAHFPREGVFVSNGTHWFVTQRNFCEPQIITTDNTFVSGNCDVVIGIVNNTVYDPLQPELDSFKEELDKYFKNHTSPDVDLGDISGINASVVNIQKEIDRLNEVAKNLNESLIDLQELGKYEQYIK

SEQ ID NO: 2048 - protein, 1211 aa, Artificial Sequence
  SARS-CoV-2/Finland/FIN-313/2020__EPI_ISL_414641 spike protein (1-1211)(I714C_Y1110C)
MFVFLVLLPLVSSQCVNLTTRTQLPPAYTNSFTRGVYYPDKVFRSSVLHSTQDLFLPFFSNVTWFHAIHVSGTNGTKRFDNPVLPFNDGVYFASTEKSNIIRGWIFGTTLDSKTQSLLIVNNATNVVIKVCEFQFCNDPFLGVYYHKNNKSWMESEFRVYSSANNCTFEYVSQPFLMDLEGKQGNFKNLREFVFKNIDGYFKIYSKHTPINLVRDLPQGFSALEPLVDLPIGINITRFKTLLALHRSYLTPGDSSSGWTAGAAAYYVGYLQPRTFLLKYNENGTITDAVDCALDPLSETKCTLKSFTVEKGIYQTSNFRVQPTESIVRFPNITNLCPFGEVFNATRFASVYAWNRKRISNCVADYSVLYNSASFSTFKCYGVSPTKLNDLCFTNVYADSFVIRGDEVRQIAPGQTGKIADYNYKLPDDFTGCVIAWNSNNLDSKVGGNYNYLYRLFRKSNLKPFERDISTEIYQAGSTPCNGVEGFNCYFPLQSYGFQPTNGVGYQPYRVVVLSFELLHAPATVCGPKKSTNLVKNKCVNFNFNGLTGTGVLTESNKKFLPFQQFGRDIADTTDAVRDPQTLEILDITPCSFGGVSVITPGTNTSNQVAVLYQGVNCTEVPVAIHADQLTPTWRVYSTGSNVFQTRAGCLIGAEHVNNSYECDIPIGAGICASYQTQTNSPRRARSVASQSIIAYTMSLGAENSVAYSNNSIACPTNFTISVTTEILPVSMTKTSVDCTMYICGDSTECSNLLLQYGSFCTQLNRALTGIAVEQDKNTQEVFAQVKQIYKTPPIKDFGGFNFSQILPDPSKPSKRSFIEDLLFNKVTLADAGFIKQYGDCLGDIAARDLICAQKFNGLTVLPPLLTDEMIAQYTSALLAGTITSGWTFGAGAALQIPFAMQMAYRFNGIGVTQNVLYENQKLIANQFNSAIGKIQDSLSSTASALGKLQDVVNQNAQALNTLVKQLSSNFGAISSVLNDILSRLDKVEAEVQIDRLITGRLQSLQTYVTQQLIRAAEIRASANLAATKMSECVLGQSKRVDFCGKGYHLMSFPQSAPHGVVFLHVTYVPAQEKNFTTAPAICHDGKAHFPREGVFVSNGTHWFVTQRNFCEPQIITTDNTFVSGNCDVVIGIVNNTVYDPLQPELDSFKEELDKYFKNHTSPDVDLGDISGINASVVNIQKEIDRLNEVAKNLNESLIDLQELGKYEQYIK

SEQ ID NO: 2049 - protein, 1211 aa, Artificial Sequence
  SARS-CoV-2/Netherlands/ZuidHolland_2/2020__EPI_ISL_414556 spike protein (1-1211)(I714C_Y1110C)
MFVFLVLLPLVSSQCVNLTTRTQLPPAYTNSFTRGVYYPDKVFRSSVLHSTQDLFLPFFSNVTWFHAIHVSGTNGTKRFDNPVLPFNDGVYFASTEKSNIIRGWIFGTTLDSKTQSLLIVNNATNVVIKVCEFQFCNDPFLGVYYHKNNKSWMESEFRVYSSANNCTFEYVSQPFLMDLEGKQGNFKNLREFVFKNIDGYFKIYSKHTPINLVRDLPQGFSALEPLVDLPIGINITRFQTLLALHRSYLTPGDSSSGWTAGAAAYYVGYLQPRTFLLKYNENGTITDAVDCALDPLSETKCTLKSFTVEKGIYQTSNFRVQPTESIVRFPNITNLCPFGEVFNATRFASVYAWNRKRISNCVADYSVLYNSASFSTFKCYGVSPTKLNDLCFTNVYADSFVIRGDEVRQIAPGQTGKIADYNYKLPDDFTGCVIAWNSNNLDSKVGGNYNYLYRLFRKSNLKPFERDISTEIYQAGSTPCNGVEGFNCYFPLQSYGFQPTNGVGYQPYRVVVLSFELLHAPATVCGPKKSTNLVKNKCVNFNFNGLTGTGVLTESNKKFLPFQQFGRDIADTTDAVRDPQTLEILDITPCSFGGVSVITPGTNTSNQVAVLYQGVNCTEVPVAIHADQLTPTWRVYSTGSNVFQTRAGCLIGAEHVNNSYECDIPIGAGICASYQTQTNSPRRARSVASQSIIAYTMSLGAENSVAYSNNSIACPTNFTISVTTEILPVSMTKTSVDCTMYICGDSTECSNLLLQYGSFCTQLNRALTGIALEQDKNTQEVFAQVKQIYKTPPIKDFGGFNFSQILPDPSKPSKRSFIEDLLFNKVTLADAGFIKQYGDCLGDIAARDLICAQKFNGLTVLPPLLTDEMIAQYTSALLAGTITSGWTFGAGAALQIPFAMQMAYRFNGIGVTQNVLYENQKLIANQFNSAIGKIQDSLSSTASALGKLQDVVNQNAQALNTLVKQLSSNFGAISSVLNDILSRLDKVEAEVQIDRLITGRLQSLQTYVTQQLIRAAEIRASANLAATKMSECVLGQSKRVDFCGKGYHLMSFPQSAPHGVVFLHVTYVPAQEKNFTTAPAICHDGKAHFPREGVFVSNGTHWFVTQRNFCEPQIITTDNTFVSGNCDVVIGIVNNTVYDPLQPELDSFKEELDKYFKNHTSPDVDLGDISGINASVVNIQKEIDRLNEVAKNLNESLIDLQELGKYEQYIK

SEQ ID NO: 2050 - protein, 1211 aa, Artificial Sequence
  SARS-CoV-2/USA/WA-UW31/2020__EPI_ISL_414618 spike protein (1-1211)(I714C_Y1110C)
MFVFLVLLPLVSSQCVNLTTRTQLPPAYTNSFTRGVYYPDKVFRSSVLHSTQDLFLPFFSNVTWFHAIHVSGTNGTKRFDNPVLPFNDGVYFASTEKSNIIRGWIFGTTLDSKTQSLLIVNNATNVVIKVCEFQFCNDPFLGVYYHKNNKSWMESEFRVYSSANNCTFEYVSQPFLMDLEGKQGNFKNLREFVFKNIDGYFKIYSKHTPINLVRDLPQGFSALEPLVDLPIGINITRFQTLLALHRSYLTPGDSSSGWTAGAAAYYVGYLQPRTFLLKYNENGTITDAVDCALDPLSETKCTLKSFTVEKGIYQTSNFRVQPTESIVRFPNITNLCPFGEVFNATRFASVYAWNRKRISNCVADYSVLYNSASFSTFKCYGVSPTKLNDLCFTNVYADSFVIRGDEVRQIAPGQTGKIADYNYKLPDDFTGCVIAWNSNNLDSKVGGNYNYLYRLFRKSNLKPFERDISTEIYQAGSTPCNGAEGFNCYFPLQSYGFQPTNGVGYQPYRVVVLSFELLHAPATVCGPKKSTNLVKNKCVNFNFNGLTGTGVLTESNKKFLPFQQFGRDIADTTDAVRDPQTLEILDITPCSFGGVSVITPGTNTSNQVAVLYQDVNCTEVPVAIHADQLTPTWRVYSTGSNVFQTRAGCLIGAEHVNNSYECDIPIGAGICASYQTQTNSPRRARSVASQSIIAYTMSLGAENSVAYSNNSIACPTNFTISVTTEILPVSMTKTSVDCTMYICGDSTECSNLLLQYGSFCTQLNRALTGIAVEQDKNTQEVFAQVKQIYKTPPIKDFGGFNFSQILPDPSKPSKRSFIEDLLFNKVTLADAGFIKQYGDCLGDIAARDLICAQKFNGLTVLPPLLTDEMIAQYTSALLAGTITSGWTFGAGAALQIPFAMQMAYRFNGIGVTQNVLYENQKLIANQFNSAIGKIQDSLSSTASALGKLQDVVNQNAQALNTLVKQLSSNFGAISSVLNDILSRLDKVEAEVQIDRLITGRLQSLQTYVTQQLIRAAEIRASANLAATKMSECVLGQSKRVDFCGKGYHLMSFPQSAPHGVVFLHVTYVPAQEKNFTTAPAICHDGKAHFPREGVFVSNGTHWFVTQRNFCEPQIITTDNTFVSGNCDVVIGIVNNTVYDPLQPELDSFKEELDKYFKNHTSPDVDLGDISGINASVVNIQKEIDRLNEVAKNLNESLIDLQELGKYEQYIK

SEQ ID NO: 2051 - protein, 1211 aa, Artificial Sequence
  SARS-CoV-2/South Korea/SNU01/2020__EPI_ISL_411929 spike protein (1-1211)(I714C_Y1110C)
MFVFLVLLPLVSSQCVNLTTRTQLPPAYTNSFTRGVYYPDKVFRSSVLHSTQDLFLPFFSNVTWFHAIHVSGTNGTKRFDNPVLPFNDGVYFASTEKSNIIRGWIFGTTLDSKTQSLLIVNNATNVVIKVCEFQFCNDPFLGVYYHKNNKSWMESEFRVYSSANNCTFEYVSQPFLMDLEGKQGNFKNLREFVFKNIDGYFKIYSKHTPINLVRDLPQGFWALEPLVDLPIGINITRFQTLLALHRSYLTPGDSSSGWTAGAAAYYVGYLQPRTFLLKYNENGTITDAVDCALDPLSETKCTLKSFTVEKGIYQTSNFRVQPTESIVRFPNITNLCPFGEVFNATRFASVYAWNRKRISNCVADYSVLYNSASFSTFKCYGVSPTKLNDLCFTNVYADSFVIRGDEVRQIAPGQTGKIADYNYKLPDDFTGCVIAWNSNNLDSKVGGNYNYLYRLFRKSNLKPFERDISTEIYQAGSTPCNGVEGFNCYFPLQSYGFQPTNGVGYQPYRVVVLSFELLHAPATVCGPKKSTNLVKNKCVNFNFNGLTGTGVLTESNKKFLPFQQFGRDIADTTDAVRDPQTLEILDITPCSFGGVSVITPGTNTSNQVAVLYQDVNCTEVPVAIHADQLTPTWRVYSTGSNVFQTRAGCLIGAEHVNNSYECDIPIGAGICASYQTQTNSPRRARSVASQSIIAYTMSLGAENSVAYSNNSIACPTNFTISVTTEILPVSMTKTSVDCTMYICGDSTECSNLLLQYGSFCTQLNRALTGIAVEQDKNTQEVFAQVKQIYKTPPIKDFGGFNFSQILPDPSKPSKRSFIEDLLFNKVTLADAGFIKQYGDCLGDIAARDLICAQKFNGLTVLPPLLTDEMIAQYTSALLAGTITSGWTFGAGAALQIPFAMQMAYRFNGIGVTQNVLYENQKLIANQFNSAIGKIQDSLSSTASALGKLQDVVNQNAQALNTLVKQLSSNFGAISSVLNDILSRLDKVEAEVQIDRLITGRLQSLQTYVTQQLIRAAEIRASANLAATKMSECVLGQSKRVDFCGKGYHLMSFPQSAPHGVVFLHVTYVPAQEKNFTTAPAICHDGKAHFPREGVFVSNGTHWFVTQRNFCEPQIITTDNTFVSGNCDVVIGIVNNTVYDPLQPELDSFKEELDKYFKNHTSPDVDLGDISGINASVVNIQKEIDRLNEVAKNLNESLIDLQELGKYEQYIK

SEQ ID NO: 2052 - protein, 1211 aa, Artificial Sequence
  SARS-CoV-2/China/WF0004/2020__EPI_ISL_413694 spike protein (1-1211)(I714C_Y1110C)
MFVFLVLLPLVSSQCVNLTTRTQLPPAYTNSFTRGVYYPDKVFRSSVLHSTQDLFLPFFSNVTWFHAIHVSGTNGTKRFDNPVLPFNDGVYFASTEKSNIIRGWIFGTTLDSKTQSLLIVNNATNVVIKVCEFQFCNDPFLGVYYHKNNKSWTESEFRVYSSANNCTFEYVSQPFLMDLEGKQGNFKNLREFVFKNIDGYFKIYSKHTPINLVRDLPQGFSALEPLVDLPIGINITRFQTLLALHRSYLTPGDSSSGWTAGAAAYYVGYLQPRTFLLKYNENGTITDAVDCALDPLSETKCTLKSFTVEKGIYQTSNFRVQPTESIVRFPNITNLCPFGEVFNATRFASVYAWNRKRISNCVADYSVLYNSASFSTFKCYGVSPTKLNDLCFTNVYADSFVIRGDEVRQIAPGQTGKIADYNYKLPDDFTGCVIAWNSNNLDSKVGGNYNYLYRLFRKSNLKPFERDISTEIYQAGSTPCNGVEGFNCYFPLQSYGFQPTNGVGYQPYRVVVLSFELLHAPATVCGPKKSTNLVKNKCVNFNFNGLTGTGVLTESNKKFLPFQQFGRDIADTTDAVRDPQTLEILDITPCSFGGVSVITPGTNTSNQVAVLYQDVNCTEVPVAIHADQLTPTWRVYSTGSNVFQTRAGCLIGAEHVNNSYECDIPIGAGICASYQTQTNSPRRARSVASQSIIAYTMSLGAENSVAYSNNSIACPTNFTISVTTEILPVSMTKTSVDCTMYICGDSTECSNLLLQYGSFCTQLNRALTGIAVEQDKNTQEVFAQVKQIYKTPPIKDFGGFNFSQILPDPSKPSKRSFIEDLLFNKVTLADAGFIKQYGDCLGDIAARDLICAQKFNGLTVLPPLLTDEMIAQYTSALLAGTITSGWTFGAGAALQIPFAMQMAYRFNGIGVTQNVLYENQKLIANQFNSAIGKIQDSLSSTASALGKLQDVVNQNAQALNTLVKQLSSNFGAISSVLNDILSRLDKVEAEVQIDRLITGRLQSLQTYVTQQLIRAAEIRASANLAATKMSECVLGQSKRFDFCGKGYHLMSFPQSAPHGVVFLHVTYVPAQEKNFTTAPAICHDGKAHFPREGVFVSNGTHWFVTQRNFCEPQIITTDNTFVSGNCDVVIGIVNNTVYDPLQPELDSFKEELDKYFKNHTSPDVDLGDISGINASVVNIQKEIDRLNEVAKNLNESLIDLQELGKYEQYIK

SEQ ID NO: 2053 - protein, 1211 aa, Artificial Sequence
  SARS-CoV-2/China/WF0028/2020__EPI_ISL_413791 spike protein (1-1211)(I714C_Y1110C)
MFVFLVLLPLVSSQCVNLTTRTQLPPAYTNSFTRGVYYPDKVFRSSVLHSTQDLFLPFFSNVTWFHAIHVSGTNGTKRFDNPVLPFNDGVYFASTEKSNIIRGWIFGTTLDSKTQSLLIVNNATNVVIKVCEFQFCNDPFLGVYYHKNNKSWMESEFRVYSSANNCTFEYVSQPFLMDLEGKQGNFKNLREFVFKNIDGYFKIYSKHTPINLVRDLPQGFSALEPLVDLPIGINITRFQTLLALHRSYLTPGDSSSGWTAGAAAYYVGYLQPRTFLLKYNENGTITDAVDCALDPLSETKCTLKSFTVEKGIYQTSNFRVQPTESIVRFPNITNLCPFGEVFNATRFASVYAWNRKRISNCVADYSVLYNSASFSTFKCYGVSPTKLNDLCFTNVYADSFVIRGDEVRQIAPGQTGKIADYNYKLPDDFTGCVIAWNSNNLDSKVGGNYNYLYRLFRKSNLKPFERDISTEIYQAGSTPCNGVEGFNCYFPLQSYGFQPTNGVGYQPYRVVVLSFELLHAPATVCGPKKSTNLVKNKCVNFNFNGLTGTGVLTESNKKFLPFQQFGRDIADTTDAVRDPQTLEILDITPCSFGGVSVITPGTNTSNQVAVLYQDVNCTEVPVAIHADQLTPTWRVYSTGSNVFQTRAGCLIGAEHVNNSYECDIPIGAGICASYQTQTNSPRRARSVASQSIIAYTMSLGAENSVAYSNNSIACPTNFTISVTTEILPVSMTKTSVDCTMYICGDSTECSNLLLQYGSFCTQLNRALTGIAVEQDKNTQEVFAQVKQIYKTPPIKDFGGFNFSQILPDPSKPSKRSFIEDLLFNKVTLADAGFIKQYGDCLGDIAARDLICAQKFNGLTVLPPLLTDEMIAQYTSALLAGTITSGWTFGAGAALQIPFAMQMAYRFNGIGVTQNVLYENQKLIANQFNSAIGKIQDSLSSTASALGKLQDVVNQNAQALNTLVKQLSSNFGAISSVLNDILSRLDKVEAEVQIDRLITGRLQSLQTYVTQQLIRAAEIRASANLAATKMSECVLGQSKRVDFCGKGYHLMSFPQSAPHGVVFLHVTYVPAQEKNFTTAPAICHDGKAHFPREGVFVSNGTHWFVTQRNFCEPQIITTDNTFVSGNCDVVIGIVNNTVYDPLQPELESFKEELDKYFKNHTSPDVDLGDISGINASVVNIQKEIDRLNEVAKNLNESLIDLQELGKYEQYIK

SEQ ID NO: 2054 - protein, 1211 aa, Artificial Sequence
  SARS-CoV-2/2019-nCoV/USA-CruiseA-18/2020__MT159716.1 spike protein (1-1211)(I714C_Y1110C)
MFVFLVLLPLVSSQCVNLTTRTQLPPAYTNSFTRGVYYPDKVFRSSVLHSTQDLFLPFFSNVTWFHAIHVSGTNGTKRFDNPVLPFNDGVYFASTEKSNIIRGWIFGTTLDSKTQSLLIVNNATNVVIKVCEFQFCNDPFLGVYYHKNNKSWMESELRVYSSANNCTFEYVSQPFLMDLEGKQGNFKNLREFVFKNIDGYFKIYSKHTPINLVRDLPQGFSALEPLVDLPIGINITRFQTLLALHRSYLTPGDSSSGWTAGAAAYYVGYLQPRTFLLKYNENGTITDAVDCALDPLSETKCTLKSFTVEKGIYQTSNFRVQPTESIVRFPNITNLCPFGEVFNATRFASVYAWNRKRISNCVADYSVLYNSASFSTFKCYGVSPTKLNDLCFTNVYADSFVIRGDEVRQIAPGQTGKIADYNYKLPDDFTGCVIAWNSNNLDSKVGGNYNYLYRLFRKSNLKPFERDISTEIYQAGSTPCNGVEGFNCYFPLQSYGFQPTNGVGYQPYRVVVLSFELLHAPATVCGPKKSTNLVKNKCVNFNFNGLTGTGVLTESNKKFLPFQQFGRDIADTTDAVRDPQTLEILDITPCSFGGVSVITPGTNTSNQVAVLYQDVNCTEVPVAIHADQLTPTWRVYSTGSNVFQTRAGCLIGAEHVNNSYECDIPIGAGICASYQTQTNSPRRARSVASQSIIAYTMSLGAENSVAYSNNSIACPTNFTISVTTEILPVSMTKTSVDCTMYICGDSTECSNLLLQYGSFCTQLNRALTGIAVEQDKNTQEVFAQVKQIYKTPPIKDFGGFNFSQILPDPSKPSKRSFIEDLLFNKVTLADAGFIKQYGDCLGDIAARDLICAQKFNGLTVLPPLLTDEMIAQYTSALLAGTITSGWTFGAGAALQIPFAMQMAYRFNGIGVTQNVLYENQKLIANQFNSAIGKIQDSLSSTASALGKLQDVVNQNAQALNTLVKQLSSNFGAISSVLNDILSRLDKVEAEVQIDRLITGRLQSLQTYVTQQLIRAAEIRASANLAATKMSECVLGQSKRVDFCGKGYHLMSFPQSAPHGVVFLHVTYVPAQEKNFTTAPAICHDGKAHFPREGVFVSNGTHWFVTQRNFCEPQIITTDNTFVSGNCDVVIGIVNNTVYDPLQPELDSFKEELDKYFKNHTSPDVDLGDISGINASVVNIQKEIDRLNEVAKNLNESLIDLQELGKYEQYIK

SEQ ID NO: 2055 - protein, 1211 aa, Artificial Sequence
  SARS-CoV-2/SARS-CoV-2/Yunnan-01/human/2020/CHN__MT049951.1 spike protein (1-1211)(I714C_Y1110C)
MFVFLVLLPLVSSQCVNLTTRTQLPPANTNSFTRGVYYPDKVFRSSVLHSTQDLFLPFFSNVTWFHAIHVSGTNGTKRFDNPVLPFNDGVYFASTEKSNIIRGWIFGTTLDSKTQSLLIVNNATNVVIKVCEFQFCNDPFLGVYYHKNNKSWMESEFRVYSSANNCTFEYVSQPFLMDLEGKQGNFKNLREFVFKNIDGYFKIYSKHTPINLVRDLPQGFSALEPLVDLPIGINITRFQTLLALHRSYLTPGDSSSGWTAGAAAYYVGYLQPRTFLLKYNENGTITDAVDCALDPLSETKCTLKSFTVEKGIYQTSNFRVQPTESIVRFPNITNLCPFGEVFNATRFASVYAWNRKRISNCVADYSVLYNSASFSTFKCYGVSPTKLNDLCFTNVYADSFVIRGDEVRQIAPGQTGKIADYNYKLPDDFTGCVIAWNSNNLDSKVGGNYNYLYRLFRKSNLKPFERDISTEIYQAGSTPCNGVEGFNCYFPLQSYGFQPTNGVGYQPYRVVVLSFELLHAPATVCGPKKSTNLVKNKCVNFNFNGLTGTGVLTESNKKFLPFQQFGRDIADTTDAVRDPQTLEILDITPCSFGGVSVITPGTNTSNQVAVLYQDVNCTEVPVAIHADQLTPTWRVYSTGSNVFQTRAGCLIGAEHVNNSYECDIPIGAGICASYQTQTNSPRRARSVASQSIIAYTMSLGAENSVAYSNNSIACPTNFTISVTTEILPVSMTKTSVDCTMYICGDSTECSNLLLQYGSFCTQLNRALTGIAVEQDKNTQEVFAQVKQIYKTPPIKDFGGFNFSQILPDPSKPSKRSFIEDLLFNKVTLADAGFIKQYGDCLGDIAARDLICAQKFNGLTVLPPLLTDEMIAQYTSALLAGTITSGWTFGAGAALQIPFAMQMAYRFNGIGVTQNVLYENQKLIANQFNSAIGKIQDSLSSTASALGKLQDVVNQNAQALNTLVKQLSSNFGAISSVLNDILSRLDKVEAEVQIDRLITGRLQSLQTYVTQQLIRAAEIRASANLAATKMSECVLGQSKRVDFCGKGYHLMSFPQSAPHGVVFLHVTYVPAQEKNFTTAPAICHDGKAHFPREGVFVSNGTHWFVTQRNFCEPQIITTDNTFVSGNCDVVIGIVNNTVYDPLQPELDSFKEELDKYFKNHTSPDVDLGDISGINASVVNIQKEIDRLNEVAKNLNESLIDLQELGKYEQYIK

SEQ ID NO: 2056 - protein, 1211 aa, Artificial Sequence
  SARS-CoV-2/USA/WA-UW292/2020__EPI_ISL_418077 spike protein (1-1211)(I714C_Y1110C)
MFVFLVLLPLVSSQCVNLTTRTQLPPAYTNSFTRGVYYPDKVFRSSVLHSTQDLFLPFFSNVTWFHAIHVSGTNGTKRFDNPVLPFNDGVYFASTEKSNIIRGWIFGTTLDSKTQSLLIVNNATNVVIKVCEFQFCNDPFLGVYYHKNNKSWMESEFRVYSSANNCTFEYVSQPFLMDLEGKQGNFKNLREFVFKNIDGYFKIYSKHTPINLVRDLPQGFSALEPLVDLPIGINITRFQTLLALHRSYLTPGDSSSGWTAGAAAYYVGYLQPRTFLLKYNENGTITDAVDCALDPLSETKCTLKSFTVEKGIYQTSNFRVQPTESIVRFPNITNLCPFGEVFNATRFASVYAWNRKRISNCVADYSVLYNSASFSTFKCYGVSPTKLNDLCFTNVYADSFVIRGDEVRQIAPGQTGKIADYNYKLPDDFTGCVIAWNSNNLDSKVGGNYNYLYRLFRKSNLKPFERDISTEIYQASSTPCNGVEGFNCYFPLQSYGFQPTNGVGYQPYRVVVLSFELLHAPATVCGPKKSTNLVKNKCVNFNFNGLTGTGVLTESNKKFLPFQQFGRDIADTTDAVRDPQTLEILDITPCSFGGVSVITPGTNTSNQVAVLYQDVNCTEVPVAIHADQLTPTWRVYSTGSNVFQTRAGCLIGAEHVNNSYECDIPIGAGICASYQTQTNSPRRARSVASQSIIAYTMSLGAENSVAYSNNSIACPTNFTISVTTEILPVSMTKTSVDCTMYICGDSTECSNLLLQYGSFCTQLNRALTGIAVEQDKNTQEVFAQVKQIYKTPPIKDFGGFNFSQILPDPSKPSKRSFIEDLLFNKVTLADAGFIKQYGDCLGDIAARDLICAQKFNGLTVLPPLLTDEMIAQYTSALLAGTITSGWTFGAGAALQIPFAMQMAYRFNGIGVTQNVLYENQKLIANQFNSAIGKIQDSLSSTASALGKLQDVVNQNAQALNTLVKQLSSNFGAISSVLNDILSRLDKVEAEVQIDRLITGRLQSLQTYVTQQLIRAAEIRASANLAATKMSECVLGQSKRVDFCGKGYHLMSFPQSAPHGVVFLHVTYVPAQEKNFTTAPAICHDGKAHFPREGVFVSNGTHWFVTQRNFCEPQIITTDNTFVSGNCDVVIGIVNNTVYDPLQPELDSFKEELDKYFKNHTSPDVDLGDISGINASVVNIQKEIDRLNEVAKNLNESLIDLQELGKYEQYIK

SEQ ID NO: 2057 - protein, 1211 aa, Artificial Sequence
  SARS-CoV-2/Iceland/192/2020__EPI_ISL_417819 spike protein (1-1211)(I714C_Y1110C)
MFVFFVLLPLVSSQCVNLTTRTQLPPAYTNSFTRGVYYPDKVFRSSVLHSTQDLFLPFFSNVTWFHAIHVSGTNGTKRFDNPVLPFNDGVYFASTEKSNIIRGWIFGTTLDSKTQSLLIVNNATNVVIKVCEFQFCNDPFLGVYYHKNNKSWMESEFRVYSSANNCTFEYVSQPFLMDLEGKQGNFKNLREFVFKNIDGYFKIYSKHTPINLVRDLPQGFSALEPLVDLPIGINITRFQTLLALHRSYLTPGDSSSGWTAGAAAYYVGYLQPRTFLLKYNENGTITDAVDCALDPLSETKCTLKSFTVEKGIYQTSNFRVQPTESIVRFPNITNLCPFGEVFNATRFASVYAWNRKRISNCVADYSVLYNSASFSTFKCYGVSPTKLNDLCFTNVYADSFVIRGDEVRQIAPGQTGKIADYNYKLPDDFTGCVIAWNSNNLDSKVGGNYNYLYRLFRKSNLKPFERDISTEIYQAGSTPCNGVEGFNCYFPLQSYGFQPTNGVGYQPYRVVVLSFELLHAPATVCGPKKSTNLVKNKCVNFNFNGLTGTGVLTESNKKFLPFQQFGRDIADTTDAVRDPQTLEILDITPCSFGGVSVITPGTNTSNQVAVLYQGVNCTEVPVAIHADQLTPTWRVYSTGSNVFQTRAGCLIGAEHVNNSYECDIPIGAGICASYQTQTNSPRRARSVASQSIIAYTMSLGAENSVAYSNNSIACPTNFTISVTTEILPVSMTKTSVDCTMYICGDSTECSNLLLQYGSFCTQLNRALTGIAVEQDKNTQEVFAQVKQIYKTPPIKDFGGFNFSQILPDPSKPSKRSFIEDLLFNKVTLADAGFIKQYGDCLGDIAARDLICAQKFNGLTVLPPLLTDEMIAQYTSALLAGTITSGWTFGAGAALQIPFAMQMAYRFNGIGVTQNVLYENQKLIANQFNSAIGKIQDSLSSTASALGKLQDVVNQNAQALNTLVKQLSSNFGAISSVLNDILSRLDKVEAEVQIDRLITGRLQSLQTYVTQQLIRAAEIRASANLAATKMSECVLGQSKRVDFCGKGYHLMSFPQSAPHGVVFLHVTYVPAQEKNFTTAPAICHDGKAHFPREGVFVSNGTHWFVTQRNFCEPQIITTDNTFVSGNCDVVIGIVNNTVYDPLQPELDSFKEELDKYFKNHTSPDVDLGDISGINASVVNIQKEIDRLNEVAKNLNESLIDLQELGKYEQYIK

SEQ ID NO: 2058 - protein, 1211 aa, Artificial Sequence
  SARS-CoV-2/Belgium/ULG-6939/2020__EPI_ISL_417020 spike protein (1-1211)(I714C_Y1110C)
MFVFLVLLPLVSSQCVNLTTRTQLPPAYTNSFTRGVYYPDKVFRSSVLHSTQDLFLPFFSNVTWFHAIHVSGTNGTKRFDNPVLPFNDGVYFASTEKSNIIRGWIFGTTLDSKTQSLLIVNNATNVVIKVCEFQFCNDPFLGVYYHKNNKSWMESEFRVYSSANNCTFEYVSQPFLMDLEGKQGNFKNLREFVFKNIDGYFKIYSKHTPINLVRDLPQGFSALEPLVDLPIGINITRFQTLLALHRSYLTPGDSSSGWTAGAAAYYVGYLQPRTFLLKYNENGTITDAVDCALDPLSETKCTLKSFTVEKGIYQTSNFRVQPTESIVRFPNITNLCPFGEVFNATRFASVYAWNRKRISNCVADYSVLYNSASFSTFKCYGVSPTKLNDLCFTNVYADSFVIRGDEVRQIAPGQTGKIADYNYKLPDDFTGCVIAWNSNNLDSKVGGNYNYLYRLFRKSNLKPFERDISTEIYQAGSTPCNGVEGFNCYFPLQSYGFQPTNGVGYQPYRVVVLSFELLHAPATVCGPKKSTNLVKNKCVNFNFNGLTGTGVLTESNKKFLPFQQFGRDIADTTDAVRDPQTLEILDITPCSFGGVSVITPGTNTSNQVAVLYQGVNCTEVPVAIHADQLTPTWRVYSTGSNVFQTRAGCLIGAEHVNNSYECDIPIGAGICASYQTQTNSPRRARSVASQSIIAYTMSLGAENSVVYSNNSIACPTNFTISVTTEILPVSMTKTSVDCTMYICGDSTECSNLLLQYGSFCTQLNRALTGIAVEQDKNTQEVFAQVKQIYKTPPIKDFGGFNFSQILPDPSKPSKRSFIEDLLFNKVTLADAGFIKQYGDCLGDIAARDLICAQKFNGLTVLPPLLTDEMIAQYTSALLAGTITSGWTFGAGAALQIPFAMQMAYRFNGIGVTQNVLYENQKLIANQFNSAIGKIQDSLSSTASALGKLQDVVNQNAQALNTLVKQLSSNFGAISSVLNDILSRLDKVEAEVQIDRLITGRLQSLQTYVTQQLIRAAEIRASANLAATKMSECVLGQSKRVDFCGKGYHLMSFPQSAPHGVVFLHVTYVPAQEKNFTTAPAICHDGKAHFPREGVFVSNGTHWFVTQRNFCEPQIITTDNTFVSGNCDVVIGIVNNTVYDPLQPELDSFKEELDKYFKNHTSPDVDLGDISGINASVVNIQKEIDRLNEVAKNLNESLIDLQELGKYEQYIK

SEQ ID NO: 2059 - protein, 1211 aa, Artificial Sequence
  SARS-CoV-2/France/HF2496/2020__EPI_ISL_418231 spike protein (1-1211)(I714C_Y1110C)
MFVFLVLLPLVSSQCVNLTTRTQLPPAYTNSFTRGVYYPDKVFRSSVLHSTQDLFLPFFSNVTWFHAIHVSGTNGTKRFDNPVLPFNDGVYFASTEKSNIIRGWIFGTTLDSKTQSLLIVNNATNVVIKVCEFQFCNDPFLGVYYHKNNKSWMESEFRVYSSANNCTFEYVSQPFLMDLEGKQGNFKNLREFVFKNIDGYFKIYSKHTPINLVRDLPQGFSALEPLVDLPIGINITRFQTLLALHRSYLTPGDSSSGWTAGAAAYYVGYLQPRTFLLKYNENGTITDAVDCALDPLSETKCTLKSFTVEKGIYQTSNFRVQPTESIVRFPNITNLCPFGEVFNATRFASVYAWNRKRISNCVADYSVLYNSASFSTFKCYGVSPTKLNDLCFTNVYADSFVIRGDEVRQIAPGQTGKIADYNYKLPDDFTGCVIAWNSNNLDSKVGGNYNYLYRLFRKSNLKPFERDISTEIYQAGSTPCNGVEGFNCYFPLQSYGFQPTNGVGYQPYRVVVLSFELLHAPATVCGPKKSTNLVKNKCVNFNFNGLTGTGVLTESNKKFLPFQQFGRDIADTTDAVRDPQTLEILDITPCSFGGVSVITPGTNTSNQVAVLYQGVNCTEVPVAIHADQLTPTWRVYSTGSNVFQTRAGCLIGAEHVNNSYECDIPIGAGICASYQTQTNSPRRARSVASQSIIAYTMSLGAENSVAYSNNSIACPTNFTISVTTEILPVSMTKTSVDCTMYICGDSTECSNLLLQYGSFCTQLNRALTGIAVEQDKNTQEVFAQVKQIYKTPPIKDFGGFNFSQILPDPSKPSKRSFIEDLLFNKVTLADAGFIKQYGDCLGDIVARDLICAQKFNGLTVLPPLLTDEMIAQYTSALLAGTITSGWTFGAGAALQIPFAMQMAYRFNGIGVTQNVLYENQKLIANQFNSAIGKIQDSLSSTASALGKLQDVVNQNAQALNTLVKQLSSNFGAISSVLNDILSRLDKVEAEVQIDRLITGRLQSLQTYVTQQLIRAAEIRASANLAATKMSECVLGQSKRVDFCGKGYHLMSFPQSAPHGVVFLHVTYVPAQEKNFTTAPAICHDGKAHFPREGVFVSNGTHWFVTQRNFCEPQIITTDNTFVSGNCDVVIGIVNNTVYDPLQPELDSFKEELDKYFKNHTSPDVDLGDISGINASVVNIQKEIDRLNEVAKNLNESLIDLQELGKYEQYIK

SEQ ID NO: 2060 - protein, 1211 aa, Artificial Sequence
  SARS-CoV-2/USA/WA-UW291/2020__EPI_ISL_418076 spike protein (1-1211)(I714C_Y1110C)
MFVFLVLLPLVSSQCVNLTTRTQLPPAYTNSFTRGVYYPDKVFRSSVLHSTQDLFLPFFSNVTWFHAIHVSGTNGTKRFDNPVLPFNDGVYFASTEKSNIIRGWIFGTTLDSKTQSLLIVNNATNVVIKVCEFQFCNDPFLGVYYHKNNKSWMESEFRVYSSANNCTFEYVSQPFLMDLEGKQGNFKNLREFVFKNIDGYFKIYSKHTPINLVRDLPQGFSALEPLVDLPIGINITRFQTLLALHRSYLTPGDSSSGWTAGAAAYYVGYLQPRTFLLKYNENGTITDAVDCALDPLSETKCTLKSFTVEKGIYQTSNFRVQPTESIVRFPNITNLCPFGEVFNATRFASVYAWNRKRISNCVADYSVLYNSASFSTFKCYGVSPTKLNDLCFTNVYADSFVIRGDEVRQIAPGQTGKIADYNYKLPDDFTGCVIAWNSNNLDSKVGGNYNYLYRLFRKSNLKPFERDISTEIYQAGSTPCNGVEGFNCYFPLQSYGFQPTNGVGYQPYRVVVLSFELLHAPATVCGPKKSTNLVKNKCVNFNFNGLTGTGVLTESNKKFLPFQQFGRDIADTTDAVRDPQTLEILDITPCSFGGVSVITPGTNTSNQVAVLYQGVNCTEVPVAIHADQLTPTWRVYSTGSNVFQTRAGCLIGAEHVNNSYECDIPIGAGICASYQTQTNSPRRARSVASQSIIAYTMSLGAENSVAYSNNSIACPTNFTISVTTEILPVSMTKTSVDCTMYICGDSTECSNLLLQYGSFCTQLNRALTGIAVEQDKNTQEVFAQVKQIYKTPPIKDFGGFNFSQILPDPSKPSKRSFIEDLLFNKVTLADAGFIKQYGDCLGDIAARDLICAQKFNGLTVLPPLLTDEMIAQYTSALLAGTITSGWTFGAGAALQIPFAMQMAYRFNGIGVTQNVLYENQKLIANQFNSAIGKIQYSLSSTASALGKLQDVVNQNAQALNTLVKQLSSNFGAISSVLNDILSRLDKVEAEVQIDRLITGRLQSLQTYVTQQLIRAAEIRASANLAATKMSECVLGQSKRVDFCGKGYHLMSFPQSAPHGVVFLHVTYVPAQEKNFTTAPAICHDGKAHFPREGVFVSNGTHWFVTQRNFCEPQIITTDNTFVSGNCDVVIGIVNNTVYDPLQPELDSFKEELDKYFKNHTSPDVDLGDISGINASVVNIQKEIDRLNEVAKNLNESLIDLQELGKYEQYIK

SEQ ID NO: 2061 - protein, 1211 aa, Artificial Sequence; identical to SEQ ID NO: 2024
  SARS-CoV-2/Portugal/PT0034/2020__EPI_ISL_418019 spike protein (1-1211)(I714C_Y1110C)

SEQ ID NO: 2062 - protein, 1211 aa, Artificial Sequence
  SARS-CoV-2/Iceland/202/2020__EPI_ISL_417750 spike protein (1-1211)(I714C_Y1110C)
MFVFLVLLPLVSSQCVNLTTRTQLPPAYTNSFTRGVYYPDKVFRSSVLHSTQDLFLPFFSNVTWFHAIHVSGTNGTKRFDNPVLPFNDGVYFASTEKSNIIRGWIFGTTLDSKTQSLLIVNNATNVVIKVCEFQFCNDPFLGVYYHKNNKSWMESEFRVYSSANNCTFEYVSQPFLMDLEGKQGNFKNLREFVFKNIDGYFKIYSKHTPINLVRDLPQGFSALEPLVDLPIGINITRFQTLLALHRSYLTPGDSSSGWTAGAAAYYVGYLQPRTFLLKYNENGTITDAVDCALDPLSETKCTLKSFTVEKGIYQTSNFRVQPTESIVRFPNITNLCPFGEVFNATRFASVYAWNRKRISNCVADYSVLYNSASFSTFKCYGVSPTKLNDLCFTNVYADSFVIRGDEVRQIAPGQTGKIADYNYKLPDDFTGCVIAWNSNNLDSKVGGNYNYLYRLFRKSNLKPFERDISTEIYQAGSTPCNGVEGFNCYFPLQSYGFQPTNGVGYQPYRVVVLSFELLHAPATVCGPKKSTNLVKNKCVNFNFNGLTGTGVLTESNKKFLPFQQFGRDIADTTDAVRDPQTLEILDITPCSFGGVSVITPGTNTSNQVAVLYQDVNCTEVPVAIHADQLTPTWRVYSTGSNVFQTRAGCLIGAEHVNNSYECDIPIGAGICASYQTQTNSPRRARSVASQSIIAYTMSLGAENSVAYSNNSIACPTNFTISVTTEILPVSMTKTSVDCTMYICGDSTECSNLLLQYGSFCTQLNRALTGIAVEQDKNTQEVFAQVKQIYKTPPIKDFGGFNFSQILPDPSKPSKRSFIEDLLFNKVTLADAGFIKQYGDCLGDIAARDLICAQKFNGLTVLPPLLTDEMIAQYTSALLAGTITSGWTFGAGAALQIPFAMQMAYRFNGIGVTQNVLYENQKLIANQFNSAIGKIQDSLSSTASALGKLQDVVNQNAQALNTLVKQLSSNFGAISSVLNDILSRLDKVEAEVQIDRLITGRLQSLQTYVTQQLIRAAEIRASANLAATKMSECVLGQSKRVDFCGKGYHLMSFPQSAPHGVVFLHVTYVPAQEKNFTTAPAICHDGKAHFPREGVFVSNGTHWFVTQRNFCEPQIITTDNTFVSGNCDVVIGIVNNTVYDPLQPELDSFKEELDKYFKNHTSPDVDLGDIPGINASVVNIQKEIDRLNEVAKNLNESLIDLQELGKYEQYIK

SEQ ID NO: 2063 - protein, 1211 aa, Artificial Sequence
  SARS-CoV-2/USA/WA-UW261/2020__EPI_ISL_418046 spike protein (1-1211)(I714C_Y1110C)
MFVFLVLLPLVSSQCVNLTTRTQLPPAYTNSFTRGVYYPDKVFRSSVLHSTQDLFLPFFSNVTWFHAIHVSGTNGTKRFDNPVLPFNDGVYFASTEKSNIIRGWIFGTTLDSKTQSLLIVNNATNVVIKVCEFQFCNDPFLGVYYHKNNKSWMESEFRVYSSANNCTFEYVSQPFLMDLEGKQGNFKNLREFVFKNIDGYFKIYSKHTPINLVRDLPQGFSALEPLVDLPIGINITRFQTLLALHRSYLTPGDSSSGWTAGAAAYYVGYLQPRTFLLKYNENGTITDAVDCALDPLSETKCTLKSFTVEKGIYQTSNFRVQPTESIVRFPNITNLCPFGEVFNATRFTSVYAWNRKRISNCVADYSVLYNSASFSTFKCYGVSPTKLNDLCFTNVYADSFVIRGDEVRQIAPGQTGKIADYNYKLPDDFTGCVIAWNSNNLDSKVGGNYNYLYRLFRKSNLKPFERDISTEIYQAGSTPCNGVEGFNCYFPLQSYGFQPTNGVGYQPYRVVVLSFELLHAPATVCGPKKSTNLVKNKCVNFNFNGLTGTGVLTESNKKFLPFQQFGRDIADTTDAVRDPQTLEILDITPCSFGGVSVITPGTNTSNQVAVLYQDVNCTEVPVAIHADQLTPTWRVYSTGSNVFQTRAGCLIGAEHVNNSYECDIPIGAGICASYQTQTNSPRRARSVASQSIIAYTMSLGAENSVAYSNNSIACPTNFTISVTTEILPVSMTKTSVDCTMYICGDSTECSNLLLQYGSFCTQLNRALTGIAVEQDKNTQEVFAQVKQIYKTPPIKDFGGFNFSQILPDPSKPSKRSFIEDLLFNKVTLADAGFIKQYGDCLGDIAARDLICAQKFNGLTVLPPLLTDEMIAQYTSALLAGTITSGWTFGAGAALQIPFAMQMAYRFNGIGVTQNVLYENQKLIANQFNSAIGKIQDSLSSTASALGKLQDVVNQNAQALNTLVKQLSSNFGAISSVLNDILSRLDKVEAEVQIDRLITGRLQSLQTYVTQQLIRAAEIRASANLAATKMSECVLGQSKRVDFCGKGYHLMSFPQSAPHGVVFLHVTYVPAQEKNFTTAPAICHDGKAHFPREGVFVSNGTHWFVTQRNFCEPQIITTDNTFVSGNCDVVIGIVNNTVYDPLQPELDSFKEELDKYFKNHTSPDVDLGDISGINASVVNIQKEIDRLNEVAKNLNESLIDLQELGKYEQYIK

SEQ ID NO: 2064 - protein, 1211 aa, Artificial Sequence
  SARS-CoV-2/Portugal/PT0035/2020__EPI_ISL_418020 spike protein (1-1211)(I714C_Y1110C)
MFVFLVLLPLVSSQCVNLTTRTQLPPAYTNSFTRGVYYPDKVFRSSVLHSTQDLFLPFFSNVTWFHAIHVSGTNGTKRFDNPVLPFNDGVYFASTEKSNIIRGWIFGTTLDSKTQSLLIVNNATNVVIKVCEFQFCNDPFLGVYYHKNNKSWMESEFRVYSSANNCTFEYVSQPFLMDLEGKQGNFKNLREFVFKNIDGYFKIYSKHTPINLVRDLPQGFSALEPLVDLPIGINITRFQTLLALHRSYLTPGDSSSGWTAGAAAYYVGYLQPRTFLLKYNENGTITDAVDCALDPLSETKCTLKSFTVEKGIYQTSNFRVQPTESIVRFPNITNLCPFGEVFNATRFASVYAWNRKRISNCVADYSVLYNSASFSTFKCYGVSPTKLNDLCFTNVYADSFVIRGDEVRQIAPGQTGKIADYNYKLPDDFTGCVIAWNSNNLDSKVGGNYNYLYRLFRKSNLKPFERDISTEIYQAGSTPCNGVEGFNCYFPLQSYGFQPTNGVGYQPYRVVVLSFELLHAPATVCGPKKSTNLVKNKCVNFNFNGLTGTGVLTESNKKFLPFQQFGRDIADTTDAVRDPQTLEILDITPCSFGGVSVITPGTNTSNQVAVLYQDVNCTEVPVAIHADQLTPTWRVYSTGSNVFQTRAGCLIGAEHVNNSYECDIPIGAGICASYQTQTNSPRRARSVASQSIIAYTMSLGAENSVAYSNNSIACPTNFTISVTTEILPVSMTKTSVDCTMYICGDSTECSNLLLQYGSFCTQLNRALTGIAVEQDKNTQEVFAQVKQIYKTPPIKDFGGFNFSQILPDPSKPSKRSFIEDLLFNKVTLADAGFIKQYGDCLGDISARDLICAQKFNGLTVLPPLLTDEMIAQYTSALLAGTITSGWTFGAGAALQIPFAMQMAYRFNGIGVTQNVLYENQKLIANQFNSAIGKIQDSLSSTASALGKLQDVVNQNAQALNTLVKQLSSNFGAISSVLNDILSRLDKVEAEVQIDRLITGRLQSLQTYVTQQLIRAAEIRASANLAATKMSECVLGQSKRVDFCGKGYHLMSFPQSAPHGVVFLHVTYVPAQEKNFTTAPAICHDGKAHFPREGVFVSNGTHWFVTQRNFCEPQIITTDNTFVSGNCDVVIGIVNNTVYDPLQPELDSFKEELDKYFKNHTSPDVDLGDISGINASVVNIQKEIDRLNEVAKNLNESLIDLQELGKYEQYIK

SEQ ID NO: 2065 - protein, 1211 aa, Artificial Sequence
  SARS-CoV-2/USA/NY-NYUMC7/2020__EPI_ISL_418192 spike protein (1-1211)(I714C_Y1110C)
MFVFLVLLPLVSSQCVNLTTRTQLPPAYTNSFTRGVYYPDKVFRSSVLHSTQDLFLPFFSNVTWFHAIHVSGTNGTKRFDNPVLPFNDGVYFASTEKSNIIRGWIFGTTLDSKTQSLLIVNNATNVVIKVCEFQFCNDPFLGVYHHKNNKSWMESEFRVYSSANNCTFEYVSQPFLMDLEGKQGNFKNLREFVFKNIDGYFKIYSKHTPINLVRDLPQGFSALEPLVDLPIGINITRFQTLLALHRSYLTPGDSSSGWTAGAAAYYVGYLQPRTFLLKYNENGTITDAVDCALDPLSETKCTLKSFTVEKGIYQTSNFRVQPTESIVRFPNITNLCPFGEVFNATRFASVYAWNRKRISNCVADYSVLYNSASFSTFKCYGVSPTKLNDLCFTNVYADSFVIRGDEVRQIAPGQTGKIADYNYKLPDDFTGCVIAWNSNNLDSKVGGNYNYLYRLFRKSNLKPFERDISTEIYQAGSTPCNGVEGFNCYFPLQSYGFQPTNGVGYQPYRVVVLSFELLHAPATVCGPKKSTNLVKNKCVNFNFNGLTGTGVLTESNKKFLPFQQFGRDIADTTDAVRDPQTLEILDITPCSFGGVSVITPGTNTSNQVAVLYQGVNCTEVPVAIHADQLTPTWRVYSTGSNVFQTRAGCLIGAEHVNNSYECDIPIGAGICASYQTQTNSPRRARSVASQSIIAYTMSLGAENSVAYSNNSIACPTNFTISVTTEILPVSMTKTSVDCTMYICGDSTECSNLLLQYGSFCTQLNRALTGIAVEQDKNTQEVFAQVKQIYKTPPIKDFGGFNFSQILPDPSKPSKRSFIEDLLFNKVTLADAGFIKQYGDCLGDIAARDLICAQKFNGLTVLPPLLTDEMIAQYTSALLAGTITSGWTFGAGAALQIPFAMQMAYRFNGIGVTQNVLYENQKLIANQFNSAIGKIQDSLSSTASALGKLQDVVNQNAQALNTLVKQLSSNFGAISSVLNDILSRLDKVEAEVQIDRLITGRLQSLQTYVTQQLIRAAEIRASANLAATKMSECVLGQSKRVDFCGKGYHLMSFPQSAPHGVVFLHVTYVPAQEKNFTTAPAICHDGKAHFPREGVFVSNGTHWFVTQRNFCEPQIITTDNTFVSGNCDVVIGIVNNTVYDPLQPELDSFKEELDKYFKNHTSPDVDLGDISGINASVVNIQKEIDRLNEVAKNLNESLIDLQELGKYEQYIK

SEQ ID NO: 2066 - protein, 1211 aa, Artificial Sequence
  SARS-CoV-2/Iceland/189/2020__EPI_ISL_417709 spike protein (1-1211)(I714C_Y1110C)
MFVFLVLLPLVSSQCVNLTTRTQLPPAYTNSFTRGVYYPDKVFRSSVLHSTQDLFLPFFSNVTWFHAIHVSGTNGTKRFDNPVLPFNDGVYFASTEKSNIIRGWIFGTTLDSKTQSLLIVNNATNVVIKVCEFQFCNDPFLGVYYHKNNKSWMESEFRVYSSANNCTFEYVSQPFLMDLEGKQGNFKNLREFVFKNIDGYFKIYSKHTPINLVRDLPQGFSALEPLVDLPIGINITRFQTLLALHRSYLTPGDSSSGWTAGAAAYYVGYLQPRTFLLKYNENGTITDAVDCALDPLSETKCTLKSFTVEKGIYQTSNFRVQPTESIVRFPNITNLCPFGEVFNATRFASVYAWNRKRISNCVADYSVLYNSASFSTFKCYGVSPTKLNDLCFTNVYADSFVIRGDEVRQIAPGQTGKIADYNYKLPDDFTGCVIAWNSNNLDSKVGGNYNYLYRLFRKSNLKPFERDISTEIYQAGSTPCNGVEGFNCYFPLQSYGFQPTNGVGYQPYRVVVLSFELLHAPATVCGPKKSTNLVKNKCVNFNFNGLTGTGVLTESNKKFLPFQQFGRDIADTTDAVRDPQTLEILDITPCSFGGVSVITPGTNTSNQVAVLYQGVNCTEVPVAIHADQLTPTWRVYSTGSNVFQTRAGCLIGAEHVNNSYECDIPIGAGICASYQTQTNSPRRARSVASQSIIAYTMSLGAENSVAYSNNSIACPTNFTISVTTEILPVSMTKTSVDCTMYICGDSTECSNLLLQYGSFCTQLNRALTGIAVEQDKNTQEVFAQVKQIYKTPPIKDFGGFNFSQILPDPSKPSKRSFIEDLLFNKVTLADAGFTKQYGDCLGDIAARDLICAQKFNGLTVLPPLLTDEMIAQYTSALLAGTITSGWTFGAGAALQIPFAMQMAYRFNGIGVTQNVLYENQKLIANQFNSAIGKIQDSLSSTASALGKLQDVVNQNAQALNTLVKQLSSNFGAISSVLNDILSRLDKVEAEVQIDRLITGRLQSLQTYVTQQLIRAAEIRASANLAATKMSECVLGQSKRVDFCGKGYHLMSFPQSAPHGVVFLHVTYVPAQEKNFTTAPAICHDGKAHFPREGVFVSNGTHWFVTQRNFCEPQIITTDNTFVSGNCDVVIGIVNNTVYDPLQPELDSFKEELDKYFKNHTSPDVDLGDISGINASVVNIQKEIDRLNEVAKNLNESLIDLQELGKYEQYIK

SEQ ID NO: 2067 - protein, 1211 aa, Artificial Sequence
  SARS-CoV-2/Australia/NSW56/2020__EPI_ISL_417408 spike protein (1-1211)(I714C_Y1110C)
MFVFLVLLPLVSSQCVNLTTRTQLPPAYTNSFTRGVYYPDKVFRSSVLHSTQDLFLPFFSNVTWFHAIHVSGTNGTKRFDNPVLPFNDGVYFASTEKSNIIRGWIFGTTLDSKTQSLLIVNNATNVVIKVCEFQFCNDPFLGVYYHKNNKSWMESEFRVYSSANNCTFEYVSQPFLMDLEGKQGNFKNLREFVFKNIDGYFKIYSKHTPINLVRDLPQGFSALEPLVDLPIGINITRFQTLLALHRSYLTPGDSSSGWTAGAAAYYVGYLQPRTFLLKYNENGTITDAVDCALDPLSETKCTLKSFTVEKGIYQTSNFRVQPTESIVRFPNITNLCPFGEVFNATRFASVYAWNRKRISNCVADYSVLYNSASFSTFKCYGVSPTKLNDLCFTNVYADSFVIRGDEVRQIAPGQTGKIADYNYKLPDDFTGCVIAWNSNNLDSKVGGNYNYLYRLFRKSNLKPFERDISTEIYQAGSTPCNGVEGFNCYFPLQSYGFQPTNGVGYQPYRVVVLSFELLHAPATVCGPKKSTNLVKNKCVNFNFNGLTGTGVLTESNKKFLPFQQFGRDIADTTDAVRDPQTLEILDITPCSFGGVSVITPGTNTSNQVAVLYQDVNCTEVPVAIHADQLTPTWRVYSTGSNVFQTRAGCLIGAEHVNNSYECDIPIGAGICASYQTQTNSPRRARSVASQSIIAYTMSLGAENSVAYSNNSIACPTNFTISVTTEILPVSMTKTSVDCTMYICGDSTECSNLLLQYGSFCTQLNRALTGIAVEQDKNTQEVFAQVKQIYKTPPIKDFGGFNFSQILPDSSKPSKRSFIEDLLFNKVTLADAGFIKQYGDCLGDIAARDLICAQKFNGLTVLPPLLTDEMIAQYTSALLAGTITSGWTFGAGAALQIPFAMQMAYRFNGIGVTQNVLYENQKLIANQFNSAIGKIQDSLSSTASALGKLQDVVNQNAQALNTLVKQLSSNFGAISSVLNDILSRLDKVEAEVQIDRLITGRLQSLQTYVTQQLIRAAEIRASANLAATKMSECVLGQSKRVDFCGKGYHLMSFPQSAPHGVVFLHVTYVPAQEKNFTTAPAICHDGKAHFPREGVFVSNGTHWFVTQRNFCEPQIITTDNTFVSGNCDVVIGIVNNTVYDPLQPELDSFKEELDKYFKNHTSPDVDLGDISGINASVVNIQKEIDRLNEVAKNLNESLIDLQELGKYEQYIK

SEQ ID NO: 2068 - protein, 1211 aa, Artificial Sequence
  SARS-CoV-2/Iceland/280/2020__EPI_ISL_417608 spike protein (1-1211)(I714C_Y1110C)
MFVFLVLLPLVSSQCVNLTTRTQLPPAYTNSFTRGVYYPDKVFRSSVLHSTQDLFLPFFSNVTWFHAIHVSGTNGTKRFDNPVLPFNDGVYFASTEKSNIIRGWIFGTTLDSKTQSLLIVNNATNVVIKVCEFQFCNDPFLGVYYHKNNKSWMESEFRVYSSANNCTFEYVSQPFLMDLEGKQGNFKNLREFVFKNIDGYFKIYSKHTPINLVRDLPQGFSALEPLVDLPIGINITRFQTLLALHRSYLTPGDSSSGWTAGAAAYYVGYLQPRTFLLKYNENGTITDAVDCALDPLSETKCTLKSFTVEKGIYQTSNFRVQPTESIVRFPNITNLCPFGEVFNATRFASVYAWNRKRISNCVADYSVLYNSASFSTFKCYGVSPTKLNDLCFTNVYADSFVIRGDEVRQIAPGQTGKIADYNYKLPDDFTGCVIAWNSNNLDSKVGGNYNYLYRLFRKSNLKPFERDISTEIYQAGSTPCNGVEGFNCYFPLQSYGFQPTNGVGYQPYRVVVLSFELLHAPATVCGPKKSTNLVKNKCVNFNFNGLTGTGVLTESNKKFLPFQQFGRDIADTTDAVRDPQTLEILDITPCSFGGVSVITPGTNTSNQVAVLYQGVNCTEVPVAIHADQLTPTWRVYSTGSNVFQTRAGCLIGAEHVNNSYECDIPIGAGICASYHTQTNSPRRARSVASQSIIAYTMSLGAENSVAYSNNSIACPTNFTISVTTEILPVSMTKTSVDCTMYICGDSTECSNLLLQYGSFCTQLNRALTGIAVEQDKNTQEVFAQVKQIYKTPPIKDFGGFNFSQILPDPSKPSKRSFIEDLLFNKVTLADAGFIKQYGDCLGDIAARDLICAQKFNGLTVLPPLLTDEMIAQYTSALLAGTITSGWTFGAGAALQIPFAMQMAYRFNGIGVTQNVLYENQKLIANQFNSAIGKIQDSLSSTASALGKLQDVVNQNAQALNTLVKQLSSNFGAISSVLNDILSRLDKVEAEVQIDRLITGRLQSLQTYVTQQLIRAAEIRASANLAATKMSECVLGQSKRVDFCGKGYHLMSFPQSAPHGVVFLHVTYVPAQEKNFTTAPAICHDGKAHFPREGVFVSNGTHWFVTQRNFCEPQIITTDNTFVSGNCDVVIGIVNNTVYDPLQPELDSFKEELDKYFKNHTSPDVDLGDISGINASVVNIQKEIDRLNEVAKNLNESLIDLQELGKYEQYIK

SEQ ID NO: 2069 - protein, 1211 aa, Artificial Sequence; identical to SEQ ID NO: 2024
  SARS-CoV-2/Iceland/247/2020__EPI_ISL_417575 spike protein (1-1211)(I714C_Y1110C)

SEQ ID NO: 2070 - protein, 1211 aa, Artificial Sequence
  SARS-CoV-2/Iceland/238/2020__EPI_ISL_417566 spike protein (1-1211)(I714C_Y1110C)
MFVFLVLLPLVSSQCVNLTTRTQLPPAYTNSFTRGVYYPDKVFRSSVLHSTQDLFLPFFSNVTWFHAIHVSGTNGTKRFDNPVLPFNDGVYFASTEKSNIIRGWIFGTTLDSKTQSLLIVNNATNVVIKVCEFQFCNDPFLGVYYHKNNKSWMESEFRVYSSANNCTFEYVSQPFLMDLEGKQGNFKNLREFVFKNIDGYFKIYSKHTPINLVRDLPQGFSALEPLVDLPIGINITRFQTLLALHRSYLTPGDSSSGWTAGAAAYYVGYLQPRTFLLKYNENGTITDAVDCALDPLSETKCTLKSFTVEKGIYQTSNFRVQPTESIVRFPNITNLCPFGEVFNATRFASVYAWNRKRISNCVADYSVLYNSASFSTFKCYGVSPTKLNDLCFTNVYADSFVIRGDEVRQIAPGQTGKIADYNYKLPDDFTGCVIAWNSNNLDSKVGGNYNYLYRLFRKSNLKPFERDISTEIYQAGSTPCNGVEGFNCYFPLQSYGFQPTNGVGYQPYRVVVLSFELLHAPATVCGPKKSTNLVKNKCVNFNFNGLTGTGVLTESNKKFLPFQQFGRDIADTTDAVRDPQTLEILDITPCSFGGVSVITPGTNTSNQVAVLYQGVNCTEVPVAIHADQLTPTWRVYSTGSNVFQTRAGCLIGAEHVNNSYECDIPIGAGICASYQTQTNSPRRARSVASQSIIAYTMSLGAENSVAYSNNSIACPTNFTISVTTEILPVSMTKTSVDCTMYICGDSTECSNLLLQYGSFCTQLNRALTGIAVEQDKNTQEVFAQVKQIYKTPPIKDFGGFNFSQILPDPSKPSKRSFIEDLLFNKVTLADVGFIKQYGDCLGDIAARDLICAQKFNGLTVLPPLLTDEMIAQYTSALLAGTITSGWTFGAGAALQIPFAMQMAYRFNGIGVTQNVLYENQKLIANQFNSAIGKIQDSLSSTASALGKLQDVVNQNAQALNTLVKQLSSNFGAISSVLNDILSRLDKVEAEVQIDRLITGRLQSLQTYVTQQLIRAAEIRASANLAATKMSECVLGQSKRVDFCGKGYHLMSFPQSAPHGVVFLHVTYVPAQEKNFTTAPAICHDGKAHFPREGVFVSNGTHWFVTQRNFCEPQIITTDNTFVSGNCDVVIGIVNNTVYDPLQPELDSFKEELDKYFKNHTSPDVDLGDISGINASVVNIQKEIDRLNEVAKNLNESLIDLQELGKYEQYIK

SEQ ID NO: 2071 - protein, 1211 aa, Artificial Sequence
  SARS-CoV-2/Greece/16/2020__EPI_ISL_418265 spike protein (1-1211)(I714C_Y1110C)
MFVFLVLLPLVSSQCVNLTTRTQLPPAYTNSFTRGVYYPDKVFRSSVLHSTQDLFLPFFSNVTWFHAIHVSGTNGTKRFDNPVLPFNDGVYFASTEKSNIIRGWIFGTTLDSKTQSLLIVNNATNVVIKVCEFQFCNDPFLGVYYHKNNKSWMESEFRVYSSANNCTFEYVSQPFLMDLEGKQGNFKNLREFVFKNVDGYFKIYSKHTPINLVRDLPQGFSALEPLVDLPIGINITRFQTLLALHRSYLTPGDSSSGWTAGAAAYYVGYLQPRTFLLKYNENGTITDAVDCALDPLSETKCTLKSFTVEKGIYQTSNFRVQPTESIVRFPNITNLCPFGEVFNATRFASVYAWNRKRISNCVADYSVLYNSASFSTFKCYGVSPTKLNDLCFTNVYADSFVIRGDEVRQIAPGQTGKIADYNYKLPDDFTGCVIAWNSNNLDSKVGGNYNYLYRLFRKSNLKPFERDISTEIYQAGSTPCNGVEGFNCYFPLQSYGFQPTNGVGYQPYRVVVLSFELLHAPATVCGPKKSTNLVKNKCVNFNFNGLTGTGVLTESNKKFLPFQQFGRDIADTTDAVRDPQTLEILDITPCSFGGVSVITPGTNTSNQVAVLYQDVNCTEVPVAIHADQLTPTWRVYSTGSNVFQTRAGCLIGAEHVNNSYECDIPIGAGICASYQTQTNSPRRARSVASQSIIAYTMSLGAENSVAYSNNSIACPTNFTISVTTEILPVSMTKTSVDCTMYICGDSTECSNLLLQYGSFCTQLNRALTGIAVEQDKNTQEVFAQVKQIYKTPPIKDFGGFNFSQILPDPSKPSKRSFIEDLLFNKVTLADAGFIKQYGDCLGDIAARDLICAQKFNGLTVLPPLLTDEMIAQYTSALLAGTITSGWTFGAGAALQIPFAMQMAYRFNGIGVTQNVLYENQKLIANQFNSAIGKIQDSLSSTASALGKLQDVVNQNAQALNTLVKQLSSNFGAISSVLNDILSRLDKVEAEVQIDRLITGRLQSLQTYVTQQLIRAAEIRASANLAATKMSECVLGQSKRVDFCGKGYHLMSFPQSAPHGVVFLHVTYVPAQEKNFTTAPAICHDGKAHFPREGVFVSNGTHWFVTQRNFCEPQIITTDNTFVSGNCDVVIGIVNNTVYDPLQPELDSFKEELDKYFKNHTSPDVDLGDISGINASVVNIQKEIDRLNEVAKNLNESLIDLQELGKYEQYIK

SEQ ID NO: 2072 - protein, 1211 aa, Artificial Sequence
  SARS-CoV-2/Iceland/319/2020__EPI_ISL_417648 spike protein (1-1211)(I714C_Y1110C)
MFVFLVLLPLVSSQCVNLTTRTQLPPAYTNSFTRGVYYPDKVFRSSVLHSTQDLFLPFFSNVTWFHAIHVSGTNGTKRFDNPVLPFNDGVYFASTEKSNIIRGWIFGTTLDSKTQSLLIVNNATNVVIKVCEFQFCNDPFLGVYYHKNNKSWMESEFRVYSSANNCTFEYVSQPFLIDLEGKQGNFKNLREFVFKNIDGYFKIYSKHTPINLVRDLPQGFSALEPLVDLPIGINITRFQTLLALHRSYLTPGDSSSGWTAGAAAYYVGYLQPRTFLLKYNENGTITDAVDCALDPLSETKCTLKSFTVEKGIYQTSNFRVQPTESIVRFPNITNLCPFGEVFNATRFASVYAWNRKRISNCVADYSVLYNSASFSTFKCYGVSPTKLNDLCFTNVYADSFVIRGDEVRQIAPGQTGKIADYNYKLPDDFTGCVIAWNSNNLDSKVGGNYNYLYRLFRKSNLKPFERDISTEIYQAGSTPCNGVEGFNCYFPLQSYGFQPTNGVGYQPYRVVVLSFELLHAPATVCGPKKSTNLVKNKCVNFNFNGLTGTGVLTESNKKFLPFQQFGRDIADTTDAVRDPQTLEILDITPCSFGGVSVITPGTNTSNQVAVLYQGVNCTEVPVAIHADQLTPTWRVYSTGSNVFQTRAGCLIGAEHVNNSYECDIPIGAGICASYQTQTNSPRRARSVASQSIIAYTMSLGAENSVAYSNNSIACPTNFTISVTTEILPVSMTKTSVDCTMYICGDSTECSNLLLQYGSFCTQLNRALTGIAVEQDKNTQEVFAQVKQIYKTPPIKDFGGFNFSQILPDPSKPSKRSFIEDLLFNKVTLADAGFIKQYGDCLGDIAARDLICAQKFNGLTVLPPLLTDEMIAQYTSALLAGTITSGWTFGAGAALQIPFAMQMAYRFNGIGVTQNVLYENQKLIANQFNSAIGKIQDSLSSTASALGKLQDVVNQNAQALNTLVKQLSSNFGAISSVLNDILSRLDKVEAEVQIDRLITGRLQSLQTYVTQQLIRAAEIRASANLAATKMSECVLGQSKRVDFCGKGYHLMSFPQSAPHGVVFLHVTYVPAQEKNFTTAPAICHDGKAHFPREGVFVSNGTHWFVTQRNFCEPQIITTDNTFVSGNCDVVIGIVNNTVYDPLQPELDSFKEELDKYFKNHTSPDVDLGDISGINASVVNIQKEIDRLNEVAKNLNESLIDLQELGKYEQYIK

SEQ ID NO: 2073 - protein, 1211 aa, Artificial Sequence
  SARS-CoV-2/Congo/94/2020__EPI_ISL_417947 spike protein (1-1211)(I714C_Y1110C)
MFVFLVLLPLVSSQCVNLTTRTQLPPAYTNSFTRGVYYPDKVFRSSVLHSTQDLFLPFFSNVTWFHAIHVSGTNGTKRFDNPVLPFNDGVYFASTEKSNIIRGWIFGTTLDSKTQSLLIVNNATNVVIKVCEFQFCNDPFLGVYYHKNNKSWMESEFRVYSSANNCTFEYVSQPFLMDLEGKQGNFKNLREFVFKNIDGYFKIYSKHTPINLVRDLPQGFSALEPLVDLPIGINITRFQTLLALHRSYLTPGDSSSGWTAGAAAYYVGYLQPRTFLLKYNENGTITDAVDCALDPLSETKCTLKSFTVEKGIYQTSNFRVQPTESIVRFPNITNLCPFGEVFNATRFASVYAWNRKRISNCVADYSVLYNSASFSTFKCYGVSPTKLNDLCFTNVYADSFVIRGDEVRQIAPGQTGKIADYNYKLPDDFTGCVIAWNSNNLDSKVGGNYNYLYRLFRKSNLKPFERDISTEIYQAGSTPCNGVEGFNCYFPLQSYGFQPTNGVGYQPYRVVVLSFELLHAPATVCGPKKSTNLVKNKCVNFNFNGLTGTGVLTESNKKFLPFQQFGRDIADTTDAVRDPQTLEILDITPCSFGGVSVITPGTNTSNQVAVLYQGVNCTEVPVAIHADQLTPTWRVYSTGSNVFQTRAGCLIGAEHVNNSYECDIPIGAGICASYQTQTNSPRRARSVASQSIIAYTMSLGAENSVAYSNNSIACPTNFTISVTTEILPVSMTKTSVDCTMYICGDSTECSNLLLQYGSFCTQLNRALTGIAVEQDKNTQEVFAQVKQIYKTPPIKDFGGFNFSQILPDPSKPSKRSFIEDILFNKVTLADAGFIKQYGDCLGDIAARDLICAQKFNGLTVLPPLLTDEMIAQYTSALLAGTITSGWTFGAGAALQIPFAMQMAYRFNGIGVTQNVLYENQKLIANQFNSAIGKIQDSLSSTASALGKLQDVVNQNAQALNTLVKQLSSNFGAISSVLNDILSRLDKVEAEVQIDRLITGRLQSLQTYVTQQLIRAAEIRASANLAATKMSECVLGQSKRVDFCGKGYHLMSFPQSAPHGVVFLHVTYVPAQEKNFTTAPAICHDGKAHFPREGVFVSNGTHWFVTQRNFCEPQIITTDNTFVSGNCDVVIGIVNNTVYDPLQPELDSFKEELDKYFKNHTSPDVDLGDISGINASVVNIQKEIDRLNEVAKNLNESLIDLQELGKYEQYIK

SEQ ID NO: 2074 - protein, 1211 aa, Artificial Sequence
  SARS-CoV-2/Congo/158/2020__EPI_ISL_417950 spike protein (1-1211)(I714C_Y1110C)
MFVFLVLLPLVSSQCVNLTTRTQLPPAYTNSFTRGVYYPDKVFRSSVLHSTQDLFLPFFSNVTWFHAIHVSGTNGTKRFDNPVLPFNDGVYFASTEKSNIIRGWIFGTTLDSKTQSLLIVNNATNVVIKVCEFQFCNDPFLGVYYHKNNKSWMESEFRVYSSANNCTFEYVSQPFLMDLEGKQGNFKNLREFVFKNIDGYFKIYSKHTPINLVRDLPQGFSALEPLVDLPIGINITRFQTLLALHRSYLTPGDSSSGWTAGAAAYYVGYLQPRTFLLKYNENGTITDAVDCALDPLSETKCTLKSFTVEKGIYQTSNFRVQPTESIVRFPNITNLCPFGEVFNATRFASVYAWNRKRISNCVADYSVLYNSASFSTFKCYGVSPTKLNDLCFTNVYADSFVIRGDEVRQIAPGQTGKIADYNYKLPDDFTGCVIAWNSNNLDSKVGGNYNYLYRLFRKSNLKPFERDISTEIYQAGSTPCNGVEGFNCYFPLQSYGFQPTNGVGYQPYRVVVLSFELLHAPATVCGPKKSTNLVKNKCVNFNFNGLTGTGVLTESNKKFLPFQQFGRDIADTTDAVRDPQTLEILDITPCSFGGVSVITPGTNTSNQVAVLYQDVNCTEVPVAIHADQLTPTWRVYSTGSNVFQTRAGCLIGAEHVNNSYECDIPIGAGICASYQTQTNSPRRARSVASQSIIAYTMSLGAENSVAYSNNSIACPTNFTISVTTEILPVSMTKTSVDCTMYICGDSTECSNLLLQYGSFCTQLNRALTGIAVEQDKNTQEVFAQVKQIYKTPPIKDFGGFNFSQILPDPSKPSKRSFIEDLLFNKVTLADAGFIKQYGDCLGDIAARDLICAQKFNGLTVLPPLLTDEMIAQYTSALLAGTITSGWTFGAGAALQIPFAMQMAYRFNGIGVTQNVLYENQKLIANQFNSAIGKIQDSLSSTASALGKLQDVVNQNAQALNTLVKQLSSNFGAISSVLNDILSRLDKVEAEVQIDRLITGRLQSLQTYVTQQLIRAAEIRASANLAATKMSECVLGQSKRVDFCGKGYHLMSFPQSAPHGVVFLHVTYVPAQEKNFTTAPAICHDGKAHFPREGVFVSNGTHWFVTQRNFCEPQIITTDNTFLSGNCDVVIGIVNNTVYDPLQPELDSFKEELDKYFKNHTSPDVDLGDISGINASVVNIQKEIDRLNEVAKNLNESLIDLQELGKYEQYIK

SEQ ID NO: 2075 - protein, 1211 aa, Artificial Sequence
  SARS-CoV-2/USA/UT-00034/2020__EPI_ISL_417977 spike protein (1-1211)(I714C_Y1110C)
MFVFLVLLPLVSSQCVNLTTRTQLPPAYTNSFTRGVYYPDKVFRSSVLHSTQDLFLPFFSNVTWFHAIHVSGTNGTKRFDNPVLPFNDGVYFASTEKSNIIRGWIFGTTLDSKTQSLLIVNNATNVVIKVCEFQFCNDPFLGVYYYKNNKSWMESEFRVYSSANNCTFEYVSQPFLMDLEGKQGNFKNLREFVFKNIDGYFKIYSKHTPINLVRDLPQGFSALEPLVDLPIGINITRFQTLLALHRSYLTPGDSSSGWTAGAAAYYVGYLQPRTFLLKYNENGTITDAVDCALDPLSETKCTLKSFTVEKGIYQTSNFRVQPTESIVRFPNITNLCPFGEVFNATRFASVYAWNRKRISNCVADYSVLYNSASFSTFKCYGVSPTKLNDLCFTNVYADSFVIRGDEVRQIAPGQTGKIADYNYKLPDDFTGCVIAWNSNNLDSKVGGNYNYLYRLFRKSNLKPFERDISTEIYQAGSTPCNGVEGFNCYFPLQSYGFQPTNGVGYQPYRVVVLSFELLHAPATVCGPKKSTNLVKNKCVNFNFNGLTGTGVLTESNKKFLPFQQFGRDIADTTDAVRDPQTLEILDITPCSFGGVSVITPGTNTSNQVAVLYQGVNCTEVPVAIHADQLTPTWRVYSTGSNVFQTRAGCLIGAEHVNNSYECDIPIGAGICASYQTQTNSPRRARSVASQSIIAYTMSLGAENSVAYSNNSIACPTNFTISVTTEILPVSMTKTSVDCTMYICGDSTECSNLLLQYGSFCTQLNRALTGIAVEQDKNTQEVFAQVKQIYKTPPIKDFGGFNFSQILPDPSKPSKRSFIEDLLFNKVTLADAGFIKQYGDCLGDIAARDLICAQKFNGLTVLPPLLTDEMIAQYTSALLAGTITSGWTFGAGAALQIPFAMQMAYRFNGIGVTQNVLYENQKLIANQFNSAIGKIQDSLSSTASALGKLQDVVNQNAQALNTLVKQLSSNFGAISSVLNDILSRLDKVEAEVQIDRLITGRLQSLQTYVTQQLIRAAEIRASANLAATKMSECVLGQSKRVDFCGKGYHLMSFPQSAPHGVVFLHVTYVPAQEKNFTTAPAICHDGKAHFPREGVFVSNGTHWFVTQRNFCEPQIITTDNTFVSGNCDVVIGIVNNTVYDPLQPELDSFKEELDKYFKNHTSPDVDLGDISGINASVVNIQKEIDRLNEVAKNLNESLIDLQELGKYEQYIK

SEQ ID NO: 2076 - protein, 1211 aa, Artificial Sequence
  SARS-CoV-2/USA/UT-00033/2020__EPI_ISL_417976 spike protein (1-1211)(I714C_Y1110C)
MFVFLVLLPLVSSQCVNLTTRTQLPPAYTNSFTRGVYYPDKVFRSSVLHSTQDLFLPFFSNVTWFHAIHVSGTNGTKRFDNPVLPFNDGVYFASTEKSNIIRGWIFGTTLDSKTQSLLIVNNATNVVIKVCEFQFCNDPFLGVYYHKNNKSWMESEFRVYSSANNCTFEYVSQPFLMDLEGKQGNFKNLREFVFKNIDGYFKIYSKHTPINLVRDLPQGFSALEPLVDLPIGINITRFQTLLALHRSYLTPGDSSSGLTAGAAAYYVGYLQPRTFLLKYNENGTITDAVDCALDPLSETKCTLKSFTVEKGIYQTSNFRVQPTESIVRFPNITNLCPFGEVFNATRFASVYAWNRKRISNCVADYSVLYNSASFSTFKCYGVSPTKLNDLCFTNVYADSFVIRGDEVRQIAPGQTGKIADYNYKLPDDFTGCVIAWNSNNLDSKVGGNYNYLYRLFRKSNLKPFERDISTEIYQAGSTPCNGVEGFNCYFPLQSYGFQPTNGVGYQPYRVVVLSFELLHAPATVCGPKKSTNLVKNKCVNFNFNGLTGTGVLTESNKKFLPFQQFGRDIADTTDAVRDPQTLEILDITPCSFGGVSVITPGTNTSNQVAVLYQGVNCTEVPVAIHADQLTPTWRVYSTGSNVFQTRAGCLIGAEHVNNSYECDIPIGAGICASYQTQTNSPRRARSVASQSIIAYTMSLGAENSVAYSNNSIACPTNFTISVTTEILPVSMTKTSVDCTMYICGDSTECSNLLLQYGSFCTQLNRALTGIAVEQDKNTQEVFAQVKQIYKTPPIKDFGGFNFSQILPDPSKPSKRSFIEDLLFNKVTLADAGFIKQYGDCLGDIAARDLICAQKFNGLTVLPPLLTDEMIAQYTSALLAGTITSGWTFGAGAALQIPFAMQMAYRFNGIGVTQNVLYENQKLIANQFNSAIGKIQDSLSSTASALGKLQDVVNQNAQALNTLVKQLSSNFGAISSVLNDILSRLDKVEAEVQIDRLITGRLQSLQTYVTQQLIRAAEIRASANLAATKMSECVLGQSKRVDFCGKGYHLMSFPQSAPHGVVFLHVTYVPAQEKNFTTAPAICHDGKAHFPREGVFVSNGTHWFVTQRNFCEPQIITTDNTFVSGNCDVVIGIVNNTVYDPLQPELDSFKEELDKYFKNHTSPDVDLGDISGINASVVNIQKEIDRLNEVAKNLNESLIDLQELGKYEQYIK

SEQ ID NO: 2077 - protein, 1211 aa, Artificial Sequence
  SARS-CoV-2/USA/WI-13/2020__EPI_ISL_417516 spike protein (1-1211)(I714C_Y1110C)
MFVFLVLLPLVSSQCVNLTTRTQLPPAYTNSFTRGVYYPDKVFRSSVLHSTQDLFLPFFSNVTWFHAIHVSGTNGTKRFDNPVLPFNDGVYFASTEKSNIIRGWIFGTTLDSKTQSLLIVNNATNVVIKVCEFQFCNDPFLGVYYHKNNKSWMESEFRVYSSANNCTFEYVSQPFLMDLEGKQGNFKNLREFVFKNIDGYFKIYSKHTPINLVRDLPQGFSALEPLVDLPIGINITRFQTLLALHRSYLTPGDSSSGWTAGAAAYYVGYLQPRTFLLKYNENGTITDAVDCALDPLSETKCTLKSFTVEKGIYQTSNFRVLPTESIVRFPNITNLCPFGEVFNATRFASVYAWNRKRISNCVADYSVLYNSASFSTFKCYGVSPTKLNDLCFTNVYADSFVIRGDEVRQIAPGQTGKIADYNYKLPDDFTGCVIAWNSNNLDSKVGGNYNYLYRLFRKSNLKPFERDISTEIYQAGSTPCNGVEGFNCYFPLQSYGFQPTNGVGYQPYRVVVLSFELLHAPATVCGPKKSTNLVKNKCVNFNFNGLTGTGVLTESNKKFLPFQQFGRDIADTTDAVRDPQTLEILDITPCSFGGVSVITPGTNTSNQVAVLYQGVNCTEVPVAIHADQLTPTWRVYSTGSNVFQTRAGCLIGAEHVNNSYECDIPIGAGICASYQTQTNSPRRARSVASQSIIAYTMSLGAENSVAYSNNSIACPTNFTISVTTEILPVSMTKTSVDCTMYICGDSTECSNLLLQYGSFCTQLNRALTGIAVEQDKNTQEVFAQVKQIYKTPPIKDFGGFNFSQILPDPSKPSKRSFIEDLLFNKVTLADAGFIKQYGDCLGDIAARDLICAQKFNGLTVLPPLLTDEMIAQYTSALLAGTITSGWTFGAGAALQIPFAMQMAYRFNGIGVTQNVLYENQKLIANQFNSAIGKIQDSLSSTASALGKLQDVVNQNAQALNTLVKQLSSNFGAISSVLNDILSRLDKVEAEVQIDRLITGRLQSLQTYVTQQLIRAAEIRASANLAATKMSECVLGQSKRVDFCGKGYHLMSFPQSAPHGVVFLHVTYVPAQEKNFTTAPAICHDGKAHFPREGVFVSNGTHWFVTQRNFCEPQIITTDNTFVSGNCDVVIGIVNNTVYDPLQPELDSFKEELDKYFKNHTSPDVDLGDISGINASVVNIQKEIDRLNEVAKNLNESLIDLQELGKYEQYIK

SEQ ID NO: 2078 - protein, 1210 aa, Artificial Sequence
  SARS-CoV-2/India/1-27/2020__EPI_ISL_413522 spike protein (1-1210)(I713C_Y1109C)
MFVFLVLLPLVSSQCVNLTTRTQLPPAYTNSFTRGVYYPDKVFRSSVLHSTQDLFLPFFSNVTWFHAIHVSGTNGTKRFDNPVLPFNDGVYFASTEKSNIIRGWIFGTTLDSKTQSLLIVNNATNVVIKVCEFQFCNDPFLGVYHKNNKSWMESEFRVYSSANNCTFEYVSQPFLMDLEGKQGNFKNLREFVFKNIDGYFKIYSKHTPINLVRDLPQGFSALEPLVDLPIGINITRFQTLLALHRSYLTPGDSSSGWTAGAAAYYVGYLQPRTFLLKYNENGTITDAVDCALDPLSETKCTLKSFTVEKGIYQTSNFRVQPTESIVRFPNITNLCPFGEVFNATRFASVYAWNRKRISNCVADYSVLYNSASFSTFKCYGVSPTKLNDLCFTNVYADSFVIRGDEVIQIAPGQTGKIADYNYKLPDDFTGCVIAWNSNNLDSKVGGNYNYLYRLFRKSNLKPFERDISTEIYQAGSTPCNGVEGFNCYFPLQSYGFQPTNGVGYQPYRVVVLSFELLHAPATVCGPKKSTNLVKNKCVNFNFNGLTGTGVLTESNKKFLPFQQFGRDIADTTDAVRDPQTLEILDITPCSFGGVSVITPGTNTSNQVAVLYQDVNCTEVPVAIHADQLTPTWRVYSTGSNVFQTRAGCLIGAEHVNNSYECDIPIGAGICASYQTQTNSPRRARSVASQSIIAYTMSLGAENSVAYSNNSIACPTNFTISVTTEILPVSMTKTSVDCTMYICGDSTECSNLLLQYGSFCTQLNRALTGIAVEQDKNTQEVFAQVKQIYKTPPIKDFGGFNFSQILPDPSKPSKRSFIEDLLFNKVTLADAGFIKQYGDCLGDIAARDLICAQKFNGLTVLPPLLTDEMIAQYTSALLAGTITSGWTFGAGAALQIPFAMQMAYRFNGIGVTQNVLYENQKLIANQFNSAIGKIQDSLSSTASALGKLQDVVNQNAQALNTLVKQLSSNFGAISSVLNDILSRLDKVEAEVQIDRLITGRLQSLQTYVTQQLIRAAEIRASANLAATKMSECVLGQSKRVDFCGKGYHLMSFPQSAPHGVVFLHVTYVPAQEKNFTTAPAICHDGKAHFPREGVFVSNGTHWFVTQRNFCEPQIITTDNTFVSGNCDVVIGIVNNTVYDPLQPELDSFKEELDKYFKNHTSPDVDLGDISGINASVVNIQKEIDRLNEVAKNLNESLIDLQELGKYEQYIK

SEQ ID NO: 2079 - protein, 1205 aa, Artificial Sequence
  SARS-CoV-2/pangolin/Guangxi/P4L/2017__EPI_ISL_410538 spike protein (1-1205)(I708C_Y1104C)
MFVFLFVLPLVSSQCVNLTTRTGIPPGYTNSSTRGVYYPDKVFRSSILHLTQDLFLPFFSNVTWFNTINYQGGFKKFDNPVLPFNDGVYFASTEKSNIIRGWIFGTTLDARTQSLLIVNNATNVVIKVCEFQFCTDPFLGVYYHNNNKTWVENEFRVYSSANNCTFEYISQPFLMDLEGKQGNFKNLREFVFKNVDGYFKIYSKHTPIDLVRDLPRGFAALEPLVDLPIGINITRFQTLLALHRSYLTPGNLESGWTTGAAAYYVGYLQQRTFLLSYNQNGTITDAVDCSLDPLSETKCTLKSLTVEKGIYQTSNFRVQPTISIVRFPNITNLCPFGEVFNASKFASVYAWNRKRISNCVADYSVLYNSTSFSTFKCYGVSPTKLNDLCFTNVYADSFVVKGDEVRQIAPGQTGVIADYNYKLPDDFTGCVIAWNSVKQDALTGGNYGYLYRLFRKSKLKPFERDISTEIYQAGSTPCNGQVGLNCYYPLERYGFHPTTGVNYQPFRVVVLSFELLNGPATVCGPKLSTTLVKDKCVNFNFNGLTGTGVLTTSKKQFLPFQQFGRDISDTTDAVRDPQTLEILDITPCSFGGVSVITPGTNTSNQVAVLYQDVNCTEVPMAIHAEQLTPAWRVYSAGANVFQTRAGCLVGAEHVNNSYECDIPVGAGICASYHSMSSLRSVNQRSIIAYTMSLGAENSVAYSNNSIACPTNFTISVTTEILPVSMTKTSVDCTMYICGDSIECSNLLLQYGSFCTQLNRALTGIAVEQDKNTQEVFAQVKQIYKTPPIKDFGGFNFSQILPDPSKPSKRSFIEDLLFNKVTLADAGFIKQYGDCLGDIAARDLICAQKFNGLTVLPPLLTDEMIAQYTSALLAGTITSGWTFGAGAALQIPFAMQMAYRFNGIGVTQNVLYENQKLIANQFNSAIGKIQDSLSSTASALGKLQDVVNQNAQALNTLVKQLSSNFGAISSVLNDILSRLDKVEAEVQIDRLITGRLQSLQTYVTQQLIRAAEIRASANLAATKMSECVLGQSKRVDFCGKGYHLMSFPQSAPHGVVFLHVTYVPAQEKNFTTAPAICHEGKAHFPREGVFVSNGTHWFITQRNFCEPQIITTDNTFVSGSCDVVIGIVNNTVYDPLQPELDSFKEELDKYFKNHTSPDVDLGDISGINASVVNIQKEIDRLNEVAKNLNESPIDLQELGKYEQYIK

SEQ ID NO: 2080 - protein, 1205 aa, Artificial Sequence
  SARS-CoV-2/pangolin/Guangxi/P5L/2017__EPI_ISL_410540 spike protein (1-1205)(I708C_Y1104C)
MFVFLFVLPLVSSQCVNLTTRTGIPPGYTNSSTRGVYYPDKVFRSSILHLTQDLFLPFFSNVTWFNTINYQGGFKKFDNPVLPFNDGVYFASTEKSNIIRGWIFGTTLDARTQSLLIVNNATNVVIKVCEFQFCTDPFLGVYYHNNNKTWVENEFRVYSSANNCTFEYISQPFLMDLEGKQGNFKNLREFVFKNVDGYFKIYSKHTPIDLVRDLPRGFAALEPLVDLPIGINITRFQTLLALHRSYLTPGKLESGWTTGAAAYYVGYLQQRTFLLSYNQNGTITDAVDCSLDPLSETKCTLKSLTVEKGIYQTSNFRVQPTISIVRFPNITNLCPFGEVFNASKFASVYAWNRKRISNCVADYSVLYNSTSFSTFKCYGVSPTKLNDLCFTNVYADSFVVKGDEVRQIAPGQTGVIADYNYKLPDDFTGCVIAWNSVKQDALTGGNYGYLYRLFRKSKLKPFERDISTEIYQAGSTPCNGQVGLNCYYPLERYGFHPTTGVNYQPFRVVVLSFELLNGPATVCGPKLSTTLVKDKCVNFNFNGLTGTGVLTTSKKQFLPFQQFGRDISDTTDAVRDPQTLEILDITPCSFGGVSVITPGTNTSNQVAVLYQDVNCTEVPMAIHAEQLTPAWRVYSAGANVFQTRAGCLVGAEHVNNSYECDIPVGAGICASYHSMSSFRSVNQRSIIAYTMSLGAENSVAYSNNSIACPTNFTISVTTEILPVSMTKTSVDCTMYICGDSIECSNLLLQYGSFCTQLNRALTGIAVEQDKNTQEVFAQVKQIYKTPPIKDFGGFNFSQILPDPSKPSKRSFIEDLLFNKVTLADAGFIKQYGDCLGDIAARDLICAQKFNGLTVLPPLLTDEMIAQYTSALLAGTITSGWTFGAGAALQIPFAMQMAYRFNGIGVTQNVLYENQKLIANQFNSAIGKIQDSLSSTASALGKLQDVVNQNAQALNTLVKQLSSNFGAISSVLNDILSRLDKVEAEVQIDRLITGRLQSLQTYVTQQLIRAAEIRASANLAATKMSECVLGQSKRVDFCGKGYHLMSFPQSAPHGVVFLHVTYVPAQEKNFTTAPAICHEGKAHFPREGVFVSNGTHWFITQRNFCEPQIITTDNTFVSGSCDVVIGIVNNTVYDPLQPELDSFKEELDKYFKNHTSPDVDLGDISGINASVVNIQKEIDRLNEVAKNLNESLIDLQELGKYEQYIK

SEQ ID NO: 2081 - protein, 1205 aa, Artificial Sequence
  SARS-CoV-2/pangolin/Guangxi/P5E/2017__EPI_ISL_410541 spike protein (1-1205)(I708C_Y1104C)
MFVFLFVLPLVSSQCVNLTTRTGIPPGYTNSSTRGVYYPDKVFRSSILHLTQDLFLPFFSNVTWFNTITYQGGSKKFDNPVLPFNDGVYFASTEKSNIIRGWIFGTTLDARTQSLLIVNNATNVVIKVCEFQFCTDPFLGVYYHNNNKTWVENEFRVYSSANNCTFEYISQPFLMDLEGKQGNFKNLREFVFKNVDGYFKIYSKHTPIDLVRDLPRGFAALEPLVDLPIGINITRFQTLLALHRSYLTPGKLESGWTTGAAAYYVGYLQQRTFLLSYNQNGTITDAVDCSLDPLSETKCTLKSLTVEKGIYQTSNFRVQPTISIVRFPNITNLCPFGEVFNASKFASVYAWNRKRISNCVADYSVLYNSTSFSTFKCYGVSPTKLNDLCFTNVYADSFVVKGDEVRQIAPGQTGVIADYNYKLPDDFTGCVIAWNSVKQDALTGDNYGYLYRLFRKSKLKPFERDISTEIYQAGSTPCNGQVGLNCYYPLERYGFHPTTGVNYQPFRVVVLSFELLNGPATVCGPKLSTTLVKDKCVNFNFNGLTGTGVLTTSKKQFLPFQQFGRDISDTTDAVRDPQTLEILDITPCSFGGVSVITPGTNTSNQVAVLYQDVNCTEVPMAIHAEQLTPAWRVYSAGANVFQTRAGCLVGAEHVNNSYECDIPVGAGICASYHSMSSFRSVNQRSIIAYTMSLGAENSVAYSNNSIACPTNFTISVTTEILPVSMTKTSVDCTMYICGDSIECSNLLLQYGSFCTQLNRALTGIAVEQDKNTQEVFAQVKQIYKTPPIKDFGGFNFSQILPDPSKPSKRSFIEDLLFNKVTLADAGFIKQYGDCLGDIAARDLICAQKFNGLTVLPPLLTDEMIAQYTSALLAGTITSGWTFGAGAALQIPFAMQMAYRFNGIGVTQNVLYENQKLIANQFNSAIGKIQDSLSSTASALGKLQDVVNQNAQALNTLVKQLSSNFGAISSVLNDILSRLDKVEAEVQIDRLITGRLQSLQTYVTQQLIRAAEIRASANLAATKMSECVLGQSKRVDFCGKGYHLMSFPQSAPHGVVFLHVTYVPAQEKNFTTAPAICHEGKAHFPREGVFVSNGTHWFITQRNFCEPQIITTDNTFVSGSCDVVIGIVNNTVYDPLQPELDSFKEELDKYFKNHTSPDVDLGDISGINASVVNIQKEIDRLNEVAKNLNESLIDLQELGKYEQYIK

SEQ ID NO: 2082 - protein, 1203 aa, Artificial Sequence
  SARS-CoV-2/pangolin/Guangxi/P1E/2017__EPI_ISL_410539 spike protein (1-1203)(I706C_Y1102C)
MFVFLFVLPLVSSQCVNLTTRTGIQPGYTNSSTRGVYYPDKVFRSSILHLTQDLFLPFFSNVTWFNTINYQGGFKKFDNPVLPFNDGVYFASTEKSNIIRGWIFGTTLDARTQSLLIVNNATNVVIKVCEFQFCTDPFLGVYYHNNNKTWVENEFRVYSSANNCTFEYISQPFLMDLEGKQGNFKNLREFVFKNVDGYFKIYSKHTPIDLVRDLPRGFAALEPLVDLPIGINITRFQTLLALHRSYLTPGKLESGWTTGAAAYYVGYLQQRTFLLSYNQNGTITDAVDCSLDPLSETKCTLKSLTVEKGIYQTSNFRVQPTISIVRFPNITNLCPFGEVFNASKFASVYAWNRKRISNCVADYSVLYNSTSFSTFKCYGVSPTKLNDLCFTNVYADSFVVKGDEVRQIAPGQTGVIADYNYKLPDDFTGCVIAWNSVKQDALTGGNYLYRLFRKSKLKPFERDISTEIYQAGSTPCNGQVGLNCYYPLERYGFHPTTGVNYQPFRVVVLSFELLNGPATVCGPKLSTTLVKDKCVNFNFNGLTGTGVLTTSKKQFLPFQQFGRDISDTTDAVRDPQTLEILDITPCSFGGVSVITPGTNTSNQVAVLYQDVNCTEVPMAIHAEQLTPAWRVYSAGANVFQTRAGCLVGAEHVNNSYECDIPVGAGICASYHSMSSLRSVNQRSIIAYTMSLGAENSVAYSNNSIACPTNFTISVTTEILPVSMTKTSVDCTMYICGDSIECSNLLLQYGSFCTQLNRALTGIAVEQDKNTQEVFAQVKQIYKTPPIKDFGGFNFSQILPDPSKPSKRSFIEDLLFNKVTLADAGFIKQYGDCLGDIAARDLICAQKFNGLTVLPPLLTDEMIAQYTSALLAGTITSGWTFGAGAALQIPFAMQMAYRFNGIGVTQNVLYENQKLIANQFNSAIGKIQDSLSSTASALGKLQDVVNQNAQALNTLVKQLSSNFGAISSVLNDILSRLDKVEAEVQIDRLITGRLQSLQTYVTQQLIRAAEIRASANLAATKMSECVLGQSKRVDFCGKGYHLMSFPQSAPHGVVFLHVTYVPAQEKNFTTAPAICHEGKAHFPREGVFVSNGTHWFITQRNFCEPQIITTDNTFVSGSCDVVIGIVNNTVYDPLQPELDSFKEELDKYFKNHTSPDVDLGDISGINASVVNIQKEIDRLNEVAKNLNESLIDLQELGKYEQYIK

SEQ ID NO: 2083 - protein, 1211 aa, Artificial Sequence
  SARS-CoV-2/Wuhan/WIV05/2019__EPI_ISL_402128 spike protein (1-1211)(P715C_P1069C)
MFVFLVLLPLVSSQCVNLTTRTQLPPAYTNSFTRGVYYPDKVFRSSVLHSTQDLFLPFFSNVTWFHAIHVSGTNGTKRFDNPVLPFNDGVYFASTEKSNIIRGWIFGTTLDSKTQSLLIVNNATNVVIKVCEFQFCNDPFLGVYYHKNNKSWMESEFRVYSSANNCTFEYVSQPFLMDLEGKQGNFKNLREFVFKNIDGYFKIYSKHTPINLVRDLPQGFSALEPLVDLPIGINITRFQTLLALHRSYLTPGDSSSGWTAGAAAYYVGYLQPRTFLLKYNENGTITDAVDCALDPLSETKCTLKSFTVEKGIYQTSNFRVQPTESIVRFPNITNLCPFGEVFNATRFASVYAWNRKRISNCVADYSVLYNSASFSTFKCYGVSPTKLNDLCFTNVYADSFVIRGDEVRQIAPGQTGKIADYNYKLPDDFTGCVIAWNSNNLDSKVGGNYNYLYRLFRKSNLKPFERDISTEIYQAGSTPCNGVEGFNCYFPLQSYGFQPTNGVGYQPYRVVVLSFELLHAPATVCGPKKSTNLVKNKCVNFNFNGLTGTGVLTESNKKFLPFQQFGRDIADTTDAVRDPQTLEILDITPCSFGGVSVITPGTNTSNQVAVLYQDVNCTEVPVAIHADQLTPTWRVYSTGSNVFQTRAGCLIGAEHVNNSYECDIPIGAGICASYQTQTNSPRRARSVASQSIIAYTMSLGAENSVAYSNNSIAICTNFTISVTTEILPVSMTKTSVDCTMYICGDSTECSNLLLQYGSFCTQLNRALTGIAVEQDKNTQEVFAQVKQIYKTPPIKDFGGFNFSQILPDPSKPSKRSFIEDLLFNKVTLADAGFIKQYGDCLGDIAARDLICAQKFNGLTVLPPLLTDEMIAQYTSALLAGTITSGWTFGAGAALQIPFAMQMAYRFNGIGVTQNVLYENQKLIANQFNSAIGKIQDSLSSTASALGKLQDVVNQNAQALNTLVKQLSSNFGAISSVLNDILSRLDKVEAEVQIDRLITGRLQSLQTYVTQQLIRAAEIRASANLAATKMSECVLGQSKRVDFCGKGYHLMSFPQSAPHGVVFLHVTYVCAQEKNFTTAPAICHDGKAHFPREGVFVSNGTHWFVTQRNFYEPQIITTDNTFVSGNCDVVIGIVNNTVYDPLQPELDSFKEELDKYFKNHTSPDVDLGDISGINASVVNIQKEIDRLNEVAKNLNESLIDLQELGKYEQYIK

SEQ ID NO: 2084 - protein, 1207 aa, Artificial Sequence
  SARS-CoV-2/bat/Yunnan/RaTG13/2013__EPI_ISL_402131 spike protein (1-1207)(P711C_P1065C)
MFVFLVLLPLVSSQCVNLTTRTQLPPAYTNSSTRGVYYPDKVFRSSVLHLTQDLFLPFFSNVTWFHAIHVSGTNGIKRFDNPVLPFNDGVYFASTEKSNIIRGWIFGTTLDSKTQSLLIVNNATNVVIKVCEFQFCNDPFLGVYYHKNNKSWMESEFRVYSSANNCTFEYVSQPFLMDLEGKQGNFKNLREFVFKNIDGYFKIYSKHTPINLVRDLPPGFSALEPLVDLPIGINITRFQTLLALHRSYLTPGDSSSGWTAGAAAYYVGYLQPRTFLLKYNENGTITDAVDCALDPLSETKCTLKSFTVEKGIYQTSNFRVQPTDSIVRFPNITNLCPFGEVFNATTFASVYAWNRKRISNCVADYSVLYNSTSFSTFKCYGVSPTKLNDLCFTNVYADSFVITGDEVRQIAPGQTGKIADYNYKLPDDFTGCVIAWNSKHIDAKEGGNFNYLYRLFRKANLKPFERDISTEIYQAGSKPCNGQTGLNCYYPLYRYGFYPTDGVGHQPYRVVVLSFELLNAPATVCGPKKSTNLVKNKCVNFNFNGLTGTGVLTESNKKFLPFQQFGRDIADTTDAVRDPQTLEILDITPCSFGGVSVITPGTNASNQVAVLYQDVNCTEVPVAIHADQLTPTWRVYSTGSNVFQTRAGCLIGAEHVNNSYECDIPIGAGICASYQTQTNSRSVASQSIIAYTMSLGAENSVAYSNNSIAICTNFTISVTTEILPVSMTKTSVDCTMYICGDSTECSNLLLQYGSFCTQLNRALTGIAVEQDKNTQEVFAQVKQIYKTPPIKDFGGFNFSQILPDPSKPSKRSFIEDLLFNKVTLADAGFIKQYGDCLGDIAARDLICAQKFNGLTVLPPLLTDEMIAQYTSALLAGTITSGWTFGAGAALQIPFAMQMAYRFNGIGVTQNVLYENQKLIANQFNSAIGKIQDSLSSTASALGKLQDVVNQNAQALNTLVKQLSSNFGAISSVLNDILSRLDKVEAEVQIDRLITGRLQSLQTYVTQQLIRAAEIRASANLAATKMSECVLGQSKRVDFCGKGYHLMSFPQSAPHGVVFLHVTYVCAQEKNFTTAPAICHDGKAHFPREGVFVSNGTHWFVTQRNFYEPQIITTDNTFVSGSCDVVIGIVNNTVYDPLQPELDSFKEELDKYFKNHTSPDVDLGDISGINASVVNIQKEIDRLNEVAKNLNESLIDLQELGKYEQYIK

SEQ ID NO: 2085 - protein, 1211 aa, Artificial Sequence
  SARS-CoV-2/Wuhan/HBCDC-HB-01/2019__EPI_ISL_402132 spike protein (1-1211)(P715C_P1069C)
MFVFLVLLPLVSSQCVNLTTRTQLPPAYTNSITRGVYYPDKVFRSSVLHSTQDLFLPFFSNVTWFHAIHVSGTNGTKRFDNPVLPFNDGVYFASTEKSNIIRGWIFGTTLDSKTQSLLIVNNATNVVIKVCEFQFCNDPFLGVYYHKNNKSWMESEFRVYSSANNCTFEYVSQPFLMDLEGKQGNFKNLREFVFKNIDGYFKIYSKHTPINLVRDLPQGFSALEPLVDLPIGINITRFQTLLALHRSYLTPGDSSSGWTAGAAAYYVGYLQPRTFLLKYNENGTITDAVDCALDPLSETKCTLKSFTVEKGIYQTSNFRVQPTESIVRFPNITNLCPFGEVFNATRFASVYAWNRKRISNCVADYSVLYNSASFSTFKCYGVSPTKLNDLCFTNVYADSFVIRGDEVRQIAPGQTGKIADYNYKLPDDFTGCVIAWNSNNLDSKVGGNYNYLYRLFRKSNLKPFERDISTEIYQAGSTPCNGVEGFNCYFPLQSYGFQPTNGVGYQPYRVVVLSFELLHAPATVCGPKKSTNLVKNKCVNFNFNGLTGTGVLTESNKKFLPFQQFGRDIADTTDAVRDPQTLEILDITPCSFGGVSVITPGTNTSNQVAVLYQDVNCTEVPVAIHADQLTPTWRVYSTGSNVFQTRAGCLIGAEHVNNSYECDIPIGAGICASYQTQTNSPRRARSVASQSIIAYTMSLGAENSVAYSNNSIAICTNFTISVTTEILPVSMTKTSVDCTMYICGDSTECSNLLLQYGSFCTQLNRALTGIAVEQDKNTQEVFAQVKQIYKTPPIKDFGGFNFSQILPDPSKPSKRSFIEDLLFNKVTLADAGFIKQYGDCLGDIAARDLICAQKFNGLTVLPPLLTDEMIAQYTSALLAGTITSGWTFGAGAALQIPFAMQMAYRFNGIGVTQNVLYENQKLIANQFNSAIGKIQDSLSSTASALGKLQDVVNQNAQALNTLVKQLSSNFGAISSVLNDILSRLDKVEAEVQIDRLITGRLQSLQTYVTQQLIRAAEIRASANLAATKMSECVLGQSKRVDFCGKGYHLMSFPQSAPHGVVFLHVTYVCAQEKNFTTAPAICHDGKAHFPREGVFVSNGTHWFVTQRNFYEPQIITTDNTFVSGNCDVVIGIVNNTVYDPLQPELDSFKEELDKYFKNHTSPDVDLGDISGINASVVNIQKEIDRLNEVAKNLNESLIDLQELGKYEQYIK

SEQ ID NO: 2086 - protein, 1211 aa, Artificial Sequence
  SARS-CoV-2/Guangdong/20SF028/2020__EPI_ISL_403936 spike protein (1-1211)(P715C_P1069C)
MFVFLVLLPLVSSQCVNLTTRTQLPPAYTNSFTRGVYYPDKVFRSSVLYSTQDLFLPFFSNVTWFHAIHVSGTNGTKRFDNPVLPFNDGVYFASTEKSNIIRGWIFGTTLDSKTQSLLIVNNATNVVIKVCEFQFCNDPFLGVYYHKNNKSWMESEFRVYSSANNCTFEYVSQPFLMDLEGKQGNFKNLREFVFKNIDGYFKIYSKHTPINLVRDLPQGFSALEPLVDLPIGINITRFQTLLALHRSYLTPGDSSSGWTAGAAAYYVGYLQPRTFLLKYNENGTITDAVDCALDPLSETKCTLKSFTVEKGIYQTSNFRVQPTESIVRFPNITNLCPFGEVFNATRFASVYAWNRKRISNCVADYSVLYNSASFSTFKCYGVSPTKLNDLCFTNVYADSFVIRGDEVRQIAPGQTGKIADYNYKLPDDFTGCVIAWNSNNLDSKVGGNYNYLYRLFRKSNLKPFERDISTEIYQAGSTPCNGVEGFNCYFPLQSYGFQPTNGVGYQPYRVVVLSFELLHAPATVCGPKKSTNLVKNKCVNFNFNGLTGTGVLTESNKKFLPFQQFGRDIADTTDAVRDPQTLEILDITPCSFGGVSVITPGTNTSNQVAVLYQDVNCTEVPVAIHADQLTPTWRVYSTGSNVFQTRAGCLIGAEHVNNSYECDIPIGAGICASYQTQTNSPRRARSVASQSIIAYTMSLGAENSVAYSNNSIAICTNFTISVTTEILPVSMTKTSVDCTMYICGDSTECSNLLLQYGSFCTQLNRALTGIAVEQDKNTQEVFAQVKQIYKTPPIKDFGGFNFSQILPDPSKPSKRSFIEDLLFNKVTLADAGFIKQYGDCLGDIAARDLICAQKFNGLTVLPPLLTDEMIAQYTSALLAGTITSGWTFGAGAALQIPFAMQMAYRFNGIGVTQNVLYENQKLIANQFNSAIGKIQDSLSSTASALGKLQDVVNQNAQALNTLVKQLSSNFGAISSVLNDILSRLDKVEAEVQIDRLITGRLQSLQTYVTQQLIRAAEIRASANLAATKMSECVLGQSKRVDFCGKGYHLMSFPQSAPHGVVFLHVTYVCAQEKNFTTAPAICHDGKAHFPREGVFVSNGTHWFVTQRNFYEPQIITTDNTFVSGNCDVVIGIVNNTVYDPLQPELDSFKEELDKYFKNHTSPDVDLGDISGINASVVNIQKEIDRLNEVAKNLNESLIDLQELGKYEQYIK

SEQ ID NO: 2087 - protein, 1211 aa, Artificial Sequence
  SARS-CoV-2/Shenzhen/SZTH-001/2020__EPI_ISL_406592 spike protein (1-1211)(P715C_P1069C)
MFVFLVLLPLVSSQCVNLTTRTQLPPAYTNSFTRGVYYPDKVFRSSVLHSTQDLFLPFFSNVTWFHAIHVSGTNGTKRFDNPVLPFNDGVYFASTEKSNIIRGWIFGTTLDSKTQSLLIVNNATNVVIKVCEFQFCNDPFLGVYYHKNNKSWMESEFRVYSSANNCTFEYVSQPFLMDLEGKQGNFKNLREFVFKNIDGYFKIYSKHTPINLVRDLPQGFSALEPLVDLPIGINITRFQTLLALHRSYLTPGDSSSGWTAGAAAYYVGYLQPRTFLLKYNENGTITDAVDCALDPLSETKCTLKSFTVEKGIYQTSNFRVQPTESIVRFPNITNLCPFGEVFNATRFASVYAWNRKRISNCVADYSVLYNSASFSTFKCYGVSPTKLNDLCFTNVYADSFVIRGDEVRQIAPGQTGKIADYNYKLPDDFTGCVIAWNSNNLDSKVGGNYNYLYRLFRKSNLKPFERDISTEIYQAGSTPCNGVEGFNCYFPLQSYGFQPTNGVGYQPYRVVVLSFELLHAPATVCGPKKSTNLVKNKCVNFNFNGLTGTGVLTESNKKFLPFQQFGRDIADTTDAVRDPQTLEILDITPCSFGGVSVITPGTNTSNQVAVLYQDVNCTEVPVAIHADQLTPTWRVYSTGSNVFQTRAGCLIGAEHVNNSYECDIPIGAGICASYQTQTNSPRRARSVASQSIIAYTMSLGAENSVAYSNNSIAICTNFTISVTTEILPVSMTKTSVDCTMYICGDSTECSNLLLQYGSFCTQLNRALTGIAVEQDKNTQEVFAQVKQIYKTPPIKDFGGFNFSQILPDPSKPSKRSFIEDLLFNKVTLADAGFIKQYGDCLGDIAARDLICAQKFNGLTVLPPLLTDEMIAQYTSALLAGTITSGWTFGAGAALQIPFAMQMAYRFNGIGVTQNVLYENQKLIANQFNSAIGKIQDSLSSTASALGKLQDVVNQNAQALNTLVKQLSSNFGAISSVLNDILSRLDKVEAEVQIDRLITGRLQSLQTYVTQQLIRAAEIRASANLAATKMSECVLGQSKRVDFCGKGYHLMSFPQSAPHGVVFLHVTYVCAQEKNFTTAPAICHDGKAHFPREGVFVSNGTHWFVTQRNFYEPQIITTDNTFVSGNCDVLIGIVNNTVYDPLQPELDSFKEELDKYFKNHTSPDVDLGDISGINASVVNIQKEIDRLNEVAKNLNESLIDLQELGKYEQYIK

SEQ ID NO: 2088 - protein, 1211 aa, Artificial Sequence
  SARS-CoV-2/Shenzhen/SZTH-004/2020__EPI_ISL_406595 spike protein (1-1211)(P715C_P1069C)
MFVFLVLLPLVSSQCVNLTTRTQLPPAYTNSFTRGVYYPDKVFRSSVLHSTQDLFLPFFSNVTWFHAIHVSGTNGTKRFDNPVLPFNDGVYFASTEKSNIIRGWIFGTTLDSKTQSLLIVNNATNVVIKVCEFQFCNDPFLGVYYHKNNKSWMESEFRVYSSANNCTFEYVSQPFLMDLEGKQGNFKNLREFVFKNIDGYFKIYSKHTPINLVRDLPQGFSALEPLVDLPIGINITRFQTLLALHRSYLTPGDSSSGWTAGAAAYYVGYLQPRTFLLKYNENGTITDAVDCALDPLSETKCTLKSFTVEKGIYQTSNFRVQPTESIVRFPNITNLCPFGEVFNATRFASVYAWDRKRISNCVAYYSVLYNSASFSTFKCYGVSPTKLNDLCFTNVYADSFVIRGDEVRQIAPGQTGKIADYNYKLPDDFTGCVIAWNSNNLDSKVGGNYNYLYRLFRKSNLKPFERDISTEIYQAGSTPCNGVEGFNCYFPLQSYGFQPTNGVGYQPYRVVVLSFELLHAPATVCGPKKSTNLVKNKCVNFNFNGLTGTGVLTESNKKFLPFQQFGRDIADTTDAVRDPQTLEILDITPCSFGGVSVITPGTNTSNQVAVLYQDVNCTEVPVAIHADQLTPTWRVYSTGSNVFQTRAGCLIGAEHVNNSYECDIPIGAGICASYQTQTNSPRRARSVASQSIIAYTMSLGAENSVAYSNNSIAICTNFTISVTTEILPVSMTKTSVDCTMYICGDSTECSNLLLQYGSFCTQLNRALTGIAVEQDKNTQEVFAQVKQIYKTPPIKDFGGFNFSQILPDPSKPSKRSFIEDLLFNKVTLADAGFIKQYGDCLGDIAARDLICAQKFNGLTVLPPLLTDEMIAQYTSALLAGTITSGWTFGAGAALQIPFAMQMAYRFNGIGVTQNVLYENQKLIANQFNSAIGKIQDSLSSTASALGKLQDVVNQNAQALNTLVKQLSSNFGAISSVLNDILSRLDKVEAEVQIDRLITGRLQSLQTYVTQQLIRAAEIRASANLAATKMSECVLGQSKRVDFCGKGYHLMSFPQSAPHGVVFLHVTYVCAQEKNFTTAPAICHDGKAHFPREGVFVSNGTHWFVTQRNFYEPQIITTDNTFVSGNCDVVIGIVNNTVYDPLQPELDSFKEELDKYFKNHTSPDVDLGDISGINASVVNIQKEIDRLNEVAKNLNESLIDLQELGKYEQYIK

SEQ ID NO: 2089 - protein, 1211 aa, Artificial Sequence
  SARS-CoV-2/France/IDF0372/2020__EPI_ISL_406596 spike protein (1-1211)(P715C_P1069C)
MFVFLVLLPLVSSQCVNLTTRTQLPPAYTNSFTRGVYYPDKVFRSSVLHSTQDLFLPFFSNVTWFHAIHVSGTNGTKRFDNPVLPFNDGVYFASTEKSNIIRGWIFGTTLDSKTQSLLIVNNATNVVIKVCEFQFCNDPFLGVYYHKNNKSWMESEFRVYSSANNCTFEYVSQPFLMDLEGKQGNFKNLREFVFKNIDGYFKIYSKHTPINLVRDLPQGFSALEPLVDLPIGINITRFQTLLALHRSYLTPGDSSSGWTAGAAAYYVGYLQPRTFLLKYNENGTITDAVDCALDPLSETKCTLKSFTVEKGIYQTSNFRVQPTESIVRFPNITNLCPFGEVFNATRFASVYAWNRKRISNCVADYSFLYNSASFSTFKCYGVSPTKLNDLCFTNVYADSFVIRGDEVRQIAPGQTGKIADYNYKLPDDFTGCVIAWNSNNLDSKVGGNYNYLYRLFRKSNLKPFERDISTEIYQAGSTPCNGVEGFNCYFPLQSYGFQPTNGVGYQPYRVVVLSFELLHAPATVCGPKKSTNLVKNKCVNFNFNGLTGTGVLTESNKKFLPFQQFGRDIADTTDAVRDPQTLEILDITPCSFGGVSVITPGTNTSNQVAVLYQDVNCTEVPVAIHADQLTPTWRVYSTGSNVFQTRAGCLIGAEHVNNSYECDIPIGAGICASYQTQTNSPRRARSVASQSIIAYTMSLGAENSVAYSNNSIAICTNFTISVTTEILPVSMTKTSVDCTMYICGDSTECSNLLLQYGSFCTQLNRALTGIAVEQDKNTQEVFAQVKQIYKTPPIKDFGGFNFSQILPDPSKPSKRSFIEDLLFNKVTLADAGFIKQYGDCLGDIAARDLICAQKFNGLTVLPPLLTDEMIAQYTSALLAGTITSGWTFGAGAALQIPFAMQMAYRFNGIGVTQNVLYENQKLIANQFNSAIGKIQDSLSSTASALGKLQDVVNQNAQALNTLVKQLSSNFGAISSVLNDILSRLDKVEAEVQIDRLITGRLQSLQTYVTQQLIRAAEIRASANLAATKMSECVLGQSKRVDFCGKGYHLMSFPQSAPHGVVFLHVTYVCAQEKNFTTAPAICHDGKAHFPREGVFVSNGTHWFVTQRNFYEPQIITTDNTFVSGNCDVVIGIVNNTVYDPLQPELDSFKEELDKYFKNHTSPDVDLGDISGINASVVNIQKEIDRLNEVAKNLNESLIDLQELGKYEQYIK

SEQ ID NO: 2090 - protein, 1211 aa, Artificial Sequence
  SARS-CoV-2/Australia/VIC01/2020__EPI_ISL_406844 spike protein (1-1211)(P715C_P1069C)
MFVFLVLLPLVSSQCVNLTTRTQLPPAYTNSFTRGVYYPDKVFRSSVLHSTQDLFLPFFSNVTWFHAIHVSGTNGTKRFDNPVLPFNDGVYFASTEKSNIIRGWIFGTTLDSKTQSLLIVNNATNVVIKVCEFQFCNDPFLGVYYHKNNKSWMESEFRVYSSANNCTFEYVSQPFLMDLEGKQGNFKNLREFVFKNIDGYFKIYSKHTPINLVRDLPQGFSALEPLVDLPIGINITRFQTLLALHRRYLTPGDSSSGWTAGAAAYYVGYLQPRTFLLKYNENGTITDAVDCALDPLSETKCTLKSFTVEKGIYQTSNFRVQPTESIVRFPNITNLCPFGEVFNATRFASVYAWNRKRISNCVADYSVLYNSASFSTFKCYGVSPTKLNDLCFTNVYADSFVIRGDEVRQIAPGQTGKIADYNYKLPDDFTGCVIAWNSNNLDSKVGGNYNYLYRLFRKSNLKPFERDISTEIYQAGSTPCNGVEGFNCYFPLQSYGFQPTNGVGYQPYRVVVLSFELLHAPATVCGPKKSTNLVKNKCVNFNFNGLTGTGVLTESNKKFLPFQQFGRDIADTTDAVRDPQTLEILDITPCSFGGVSVITPGTNTSNQVAVLYQDVNCTEVPVAIHADQLTPTWRVYSTGSNVFQTRAGCLIGAEHVNNSYECDIPIGAGICASYQTQTNSPRRARSVASQSIIAYTMSLGAENSVAYSNNSIAICTNFTISVTTEILPVSMTKTSVDCTMYICGDSTECSNLLLQYGSFCTQLNRALTGIAVEQDKNTQEVFAQVKQIYKTPPIKDFGGFNFSQILPDPSKPSKRSFIEDLLFNKVTLADAGFIKQYGDCLGDIAARDLICAQKFNGLTVLPPLLTDEMIAQYTSALLAGTITSGWTFGAGAALQIPFAMQMAYRFNGIGVTQNVLYENQKLIANQFNSAIGKIQDSLSSTASALGKLQDVVNQNAQALNTLVKQLSSNFGAISSVLNDILSRLDKVEAEVQIDRLITGRLQSLQTYVTQQLIRAAEIRASANLAATKMSECVLGQSKRVDFCGKGYHLMSFPQSAPHGVVFLHVTYVCAQEKNFTTAPAICHDGKAHFPREGVFVSNGTHWFVTQRNFYEPQIITTDNTFVSGNCDVVIGIVNNTVYDPLQPELDSFKEELDKYFKNHTSPDVDLGDISGINASVVNIQKEIDRLNEVAKNLNESLIDLQELGKYEQYIK

SEQ ID NO: 2091 - protein, 1211 aa, Artificial Sequence
  SARS-CoV-2/Germany/BavPat1/2020__EPI_ISL_406862 spike protein (1-1211)(P715C_P1069C)
MFVFLVLLPLVSSQCVNLTTRTQLPPAYTNSFTRGVYYPDKVFRSSVLHSTQDLFLPFFSNVTWFHAIHVSGTNGTKRFDNPVLPFNDGVYFASTEKSNIIRGWIFGTTLDSKTQSLLIVNNATNVVIKVCEFQFCNDPFLGVYYHKNNKSWMESEFRVYSSANNCTFEYVSQPFLMDLEGKQGNFKNLREFVFKNIDGYFKIYSKHTPINLVRDLPQGFSALEPLVDLPIGINITRFQTLLALHRSYLTPGDSSSGWTAGAAAYYVGYLQPRTFLLKYNENGTITDAVDCALDPLSETKCTLKSFTVEKGIYQTSNFRVQPTESIVRFPNITNLCPFGEVFNATRFASVYAWNRKRISNCVADYSVLYNSASFSTFKCYGVSPTKLNDLCFTNVYADSFVIRGDEVRQIAPGQTGKIADYNYKLPDDFTGCVIAWNSNNLDSKVGGNYNYLYRLFRKSNLKPFERDISTEIYQAGSTPCNGVEGFNCYFPLQSYGFQPTNGVGYQPYRVVVLSFELLHAPATVCGPKKSTNLVKNKCVNFNFNGLTGTGVLTESNKKFLPFQQFGRDIADTTDAVRDPQTLEILDITPCSFGGVSVITPGTNTSNQVAVLYQGVNCTEVPVAIHADQLTPTWRVYSTGSNVFQTRAGCLIGAEHVNNSYECDIPIGAGICASYQTQTNSPRRARSVASQSIIAYTMSLGAENSVAYSNNSIAICTNFTISVTTEILPVSMTKTSVDCTMYICGDSTECSNLLLQYGSFCTQLNRALTGIAVEQDKNTQEVFAQVKQIYKTPPIKDFGGFNFSQILPDPSKPSKRSFIEDLLFNKVTLADAGFIKQYGDCLGDIAARDLICAQKFNGLTVLPPLLTDEMIAQYTSALLAGTITSGWTFGAGAALQIPFAMQMAYRFNGIGVTQNVLYENQKLIANQFNSAIGKIQDSLSSTASALGKLQDVVNQNAQALNTLVKQLSSNFGAISSVLNDILSRLDKVEAEVQIDRLITGRLQSLQTYVTQQLIRAAEIRASANLAATKMSECVLGQSKRVDFCGKGYHLMSFPQSAPHGVVFLHVTYVCAQEKNFTTAPAICHDGKAHFPREGVFVSNGTHWFVTQRNFYEPQIITTDNTFVSGNCDVVIGIVNNTVYDPLQPELDSFKEELDKYFKNHTSPDVDLGDISGINASVVNIQKEIDRLNEVAKNLNESLIDLQELGKYEQYIK

SEQ ID NO: 2092 - protein, 1211 aa, Artificial Sequence
  SARS-CoV-2/Wuhan/HBCDC-HB-02/2020__EPI_ISL_412978 spike protein (1-1211)(P715C_P1069C)
MFVFLVLLPLVSSQCVNLTTRTQLPPAYTNSFTRGVYYPDKVFRSSVLHSTQDLFLPFFSNVTWFHAIHVSGTNGTKRFDNPVLPFNDGVYFASTEKSNIIRGWIFGTTLDSKTQSLLIVNNATNVVIKVCEFQFCNDPFLGVYYHKNNKSWMESEFRVYSSANNCTFEYVSQPFLMDLEGKQGNFKNLREFVFKNIDGYFKIYSKHTPINLVRDLPQGFSALEPLVDLPIGINITRFQTLLALHRSYLTPGDSSSGWTAGAAAYYVGYLQPRTFLLKYNENGTITDAVDCALDPLSETKCTLKSFTVEKGIYQTSNFRVQPTESIVRFPNITNLCPFGEVFNATRFASVYAWNRKRISNCVADYSVLYNSASFSTFKCYGVSPTKLNDLCFTNVYADSFVIRGDEVRQIAPGQTGKIADYNYKLPDDFTGCVIAWNSNNLDSKVGGNYNYLYRLFRKSNLKPFERDISTEIYQAGSTPCNGVEGFNCYFPLQSYGFQPTNGVGYQPYRVVVLSFELLHAPATVCGPKKSTNLVKNKCVNFNFNGLTGTGVLTESNKKFLPFQQFGRDIADTTDAVRDPQTLEILDITPCSFGGVSVITPGTNTSNQVAVLYQDVNCTEVPVAIHADQLTPTWRVYSTGSNVFQTRAGCLIGAEHVNNSYECDIPIGAGICASYQTQTNSPRRARSVASQSIIAYTMSLGAENSVAYSNNSIAICTNFTISVTTEILPVSMTKTSVDCTMYICGDSTECSNFLLQYGSFCTQLNRALTGIAVEQDKNTQEVFAQVKQIYKTPPIKDFGGFNFSQILPDPSKPSKRSFIEDLLFNKVTLADAGFIKQYGDCLGDIAARDLICAQKFNGLTVLPPLLTDEMIAQYTSALLAGTITSGWTFGAGAALQIPFAMQMAYRFNGIGVTQNVLYENQKLIANQFNSAIGKIQDSLSSTASALGKLQDVVNQNAQALNTLVKQLSSNFGAISSVLNDILSRLDKVEAEVQIDRLITGRLQSLQTYVTQQLIRAAEIRASANLAATKMSECVLGQSKRVDFCGKGYHLMSFPQSAPHGVVFLHVTYVCAQEKNFTTAPAICHDGKAHFPREGVFVSNGTHWFVTQRNFYEPQIITTDNTFVSGNCDVVIGIVNNTVYDPLQPELDSFKEELDKYFKNHTSPDVDLGDISGINASVVNIQKEIDRLNEVAKNLNESLIDLQELGKYEQYIK

SEQ ID NO: 2093 - protein, 1211 aa, Artificial Sequence
  SARS-CoV-2/Australia/QLD02/2020__EPI_ISL_407896 spike protein (1-1211)(P715C_P1069C)
MFVFLVLLPLVSSQCVNLTTRTQLPPAYTNSFTRGVYYPDKVFRSSVLHSTQDLFLPFFSNVTWFHAIHVSGTNGTKRFDNPVLPFNDGVYFASTEKSNIIRGWIFGTTLDSKTQSLLIVNNATNVVIKVCEFQFCNDPFLGVYYHKNNKSWMESEFRVYSSANNCTFEYVSQPFLMDLEGKQGNFKNLREFVFKNIDGYFKIYSKHTPINLVRDLPQGFSALEPLVDLPIGINITRFQTLLALHRSYLTPGDSSSGWTAGAAAYYVGYLQPRTFLLKYNENGTITDAVDCALDPLSETKCTLKSFTVEKGIYQTSNFRVQPTESIVRFPNITNLCPFGEVFNATRFASVYAWNRKRISNCVADYSVLYNSASFSTFKCYGVSPTKLNDLCFTNVYADSFVIRGDEVRQIAPGQTGKIADYNYKLPDDFTGCVIAWNSNNLDSKVGGNYNYLYRLFRKSNLKPFERDISTEIYQAGSTPCNGVEGFNCYFPLQSYGFQPTNGVGYQPYRVVVLSFELLHAPATVCGPKKSTNLVKNKCVNFNFNGLTGTGVLTESNKKFLPFQQFGRDIADTTDAVRDPQTLEILDITPCSFGGVSVITPGTNTSNQVAVLYQDVNCTEVPVAIHADQLTPTWRVYSTGSNVFQTRAGCLIGAEHVNNSYECDIPIGAGICASYQTQTNSPRRARSVASQSIIAYTMSLGAENSVAYSNNSIAICTNFTISVTTEILPVSMTKTSVDCTMYICGDSTECSNLLLQYGSFCTQLNRALTGIAVEQDKNTQEVFAQVKQIYKTPPIKDFGGFNFSQILPDPSKPSKRSFIEDLLFNKVTLADAGFIKQYGDCLGDIAARDLICAQKFNGLTVLPPLLTDEMIAQYTSALLAGTITSGWTFGAGAALQIPFAMQMAYRFNGIGVTQNVLYENQKLIANQFNSAIGKIQDSLSSTASALGKLQDVVNQNAQALNTLVKQLSSNFGAISSVLNDILSRLDKVEAEVQIDRLITGRLQSLQTYVTQQLIRAAEIRASANLAATKMSECVLGQSKRVDFCGKGYHLMSFPQSAPHGVVFLHVTYVCAQEKNFTTAPAICHDGKAHFPREGVFVSNGTHWFVTQRNFYEPQIITTDNTFVSGNCDVVIGIVNNTVYDPLQLELDSFKEELDKYFKNHTSPDVDLGDISGINASVVNIQKEIDRLNEVAKNLNESLIDLQELGKYEQYIK

SEQ ID NO: 2094 - protein, 1211 aa, Artificial Sequence
  SARS-CoV-2/India/1-31/2020__EPI_ISL_413523 spike protein (1-1211)(P715C_P1069C)
MFVFLVLLPLVSSQCVNLTTRTQLPPAYTNSFTRGVYYPDKVFRSSVLHSTQDLFLPFFSNVTWFHAIHVSGTNGTKRFDNPVLPFNDGVYFASTEKSNIIRGWIFGTTLDSKTQSLLIVNNATNVVIKVCEFQFCNDPFLGVYYHKNNKSWMESEFRVYSSANNCTFEYVSQPFLMDLEGKQGNFKNLREFVFKNIDGYFKIYSKHTPINLVRDLPQGFSALEPLVDLPIGINITRFQTLLALHRSYLTPGDSSSGWTAGAAAYYVGYLQPRTFLLKYNENGTITDAVDCALDPLSETKCTLKSFTVEKGIYQTSNFRVQPTESIVRFPNITNLCPFGEVFNATRFASVYAWNRKRISNCVADYSVLYNSASFSTFKCYGVSPTKLNDLCFTNVYADSFVIRGDEVRQIAPGQTGKIADYNYKLPDDFTGCVIAWNSNNLDSKVGGNYNYLYRLFRKSNLKPFERDISTEIYQAGSTPCNGVEGFNCYFPLQSYGFQPTNGVGYQPYRVVVLSFELLHAPATVCGPKKSTNLVKNKCVNFNFNGLTGTGVLTESNKKFLPFQQFGRDIADTTDAVRDPQTLEILDITPCSFGGVSVITPGTNTSNQVAVLYQDVNCTEVPVAIHADQLTPTWRVYSTGSNVFQTRAGCLIGAEHVNNSYECDIPIGAGICASYQTQTNSPRRARSVASQSIIAYTMSLGAENSVAYSNNSIAICTNFTISVTTEILPVSMTKTSVDCTMYICGDSTECSNLLLQYGSFCTQLNRALTGIAVEQDKNTQEVFAQVKQIYKTPPIKDFGGFNFSQILPDPSKPSKRSFIEDLLFNKVTLADAGFIKQYGDCLGDIAARDLICAQKFNGLTVLPPLLTDEMIAQYTSALLAGTITSGWTFGAGAALQIPFAMQMAYRFNGIGVTQNVLYENQKLIANQFNSVIGKIQDSLSSTASALGKLQDVVNQNAQALNTLVKQLSSNFGAISSVLNDILSRLDKVEAEVQIDRLITGRLQSLQTYVTQQLIRAAEIRASANLAATKMSECVLGQSKRVDFCGKGYHLMSFPQSAPHGVVFLHVTYVCAQEKNFTTAPAICHDGKAHFPREGVFVSNGTHWFVTQRNFYEPQIITTDNTFVSGNCDVVIGIVNNTVYDPLQPELDSFKEELDKYFKNHTSPDVDLGDISGINASVVNIQKEIDRLNEVAKNLNESLIDLQELGKYEQYIK

SEQ ID NO: 2095 - protein, 1211 aa, Artificial Sequence
  SARS-CoV-2/Guangdong/GD2020087-P0008/2020__EPI_ISL_413863 spike protein (1-1211)(P715C_P1069C)
MFVFLVLLPLVSSQCVNLTTRTQLPPAYTNSFTRGVYYPDKVFRSSVLHSTQDLFLPFFSNVTWFHAIHVSGTNGTKRFDNPVLPFNDGVYFASTEKSNIIRGWIFGTTLDSKTQSLLIVNNATNVVIKVCEFQFCNDPFLGVYYHKNNKSWMESEFRVYSSANNCTFEYVSQPFLMDLEGKQGNFKNLREFVFKNIDGYFKIYSKHTPINLVRDLPQGFSALEPLVDLPIGINITRFQTLLALHRSYLTPGDSSSGWTAGAAAYYVGYLQPRTFLLKYNENGTITDAVDCALDPLSETKCTLKSFTVEKGIYQTSNFRVQPTESIVRFPNITNLCPFGEVFNATRFASVYAWNRKRISNCVADYSVLYNSASFSTFKCYGVSPTKLNDLCFTNVYADSFVIRGDEVREIAPGQTGKIADYNYKLPDDFTGCVIAWNSNNLDSKVGGNYNYLYRLFRKSNLKPFERDISTEIYQAGSTPCNGVEGFNCYFPLQSYGFQPTNGVGYQPYRVVVLSFELLHAPATVCGPKKSTNLVKNKCVNFNFNGLTGTGVLTESNKKFLPFQQFGRDIADTTDAVRDPQTLEILDITPCSFGGVSVITPGTNTSNQVAVLYQDVNCTEVPVAIHADQLTPTWRVYSTGSNVFQTRAGCLIGAEHVNNSYECDIPIGAGICASYQTQTNSPRRARSVASQSIIAYTMSLGAENSVAYSNNSIAICTNFTISVTTEILPVSMTKTSVDCTMYICGDSTECSNLLLQYGSFCTQLNRALTGIAVEQDKNTQEVFAQVKQIYKTPPIKDFGGFNFSQILPDPSKPSKRSFIEDLLFNKVTLADAGFIKQYGDCLGDIAARDLICAQKFNGLTVLPPLLTDEMIAQYTSALLAGTITSGWTFGAGAALQIPFAMQMAYRFNGIGVTQNVLYENQKLIANQFNSAIGKIQDSLSSTASALGKLQDVVNQNAQALNTLVKQLSSNFGAISSVLNDILSRLDKVEAEVQIDRLITGRLQSLQTYVTQQLIRAAEIRASANLAATKMSECVLGQSKRVDFCGKGYHLMSFPQSAPHGVVFLHVTYVCAQEKNFTTAPAICHDGKAHFPREGVFVSNGTHWFVTQRNFYEPQIITTDNTFVSGNCDVVIGIVNNTVYDPLQPELDSFKEELDKYFKNHTSPDVDLGDISGINASVVNIQKEIDRLNEVAKNLNESLIDLQELGKYEQYIK

SEQ ID NO: 2096 - protein, 1211 aa, Artificial Sequence
  SARS-CoV-2/Sweden/01/2020__EPI_ISL_411951 spike protein (1-1211)(P715C_P1069C)
MFVFLVLLPLVSSQCVNLTTRTQLPPAYTNSFTRGVYYPDKVFRSSVLHSTQDLFLPFFSNVTWFHAIHVSGTNGTKRFDNPVLPFNDGVYFASTEKSNIIRGWIFGTTLDSKTQSLLIVNNATNVVIKVCEFQFCNDPFLGVYYHKNNKSWMESEFRVYSSANNCTFEYVSQPFLMDLEGKQGNFKNLREFVFKNIDGYFKIYSKHTPINLVRDLPQGFSALEPLVDLPIGINITRFQTLLALHRSYLTPGDSSSGWTAGAAAYYVGYLQPRTFLLKYNENGTITDAVDCALDPLSETKCTLKSFTVEKGIYQTSNFRVQPTESIVRFPNITNLCPFGEVFNATRFASVYAWNRKRISNCVADYSVLYNSASFSTFKCYGVSPTKLNDLCFTNVYADSFVIRGDEVRQIAPGQTGKIADYNYKLPDDFTGCVIAWNSNNLDSKVGGNYNYLYRLFRKSNLKPFERDISTEIYQAGSTPCNGVEGFNCYFPLQSYGFQPTNGVGYQPYRVVVLSFELLHAPATVCGPKKSTNLVKNKCVNFNFNGLTGTGVLTESNKKFLPFQQFGRDIADTTDAVRDPQTLEILDITPCSFGGVSVITPGTNTSNQVAVLYQDVNCTEVPVAIHADQLTPTWRVYSTGSNVFQTRAGCLIGAEHVNNSYECDIPIGAGICASYQTQTNSPRRARSVASQSIIAYTMSLGAENSVAYSNNSIAICTNFTISVTTEILPVSMTKTSVDCTMYICGDSTECSNLLLQYGSFCTQLNRALTGIAVEQDKNTQEVFAQVKQIYKTPPIKDCGGFNFSQILPDPSKPSKRSFIEDLLFNKVTLADAGFIKQYGDCLGDIAARDLICAQKFNGLTVLPPLLTDEMIAQYTSALLAGTITSGWTFGAGAALQIPFAMQMAYRFNGIGVTQNVLYENQKLIANQFNSAIGKIQDSLSSTASALGKLQDVVNQNAQALNTLVKQLSSNFGAISSVLNDILSRLDKVEAEVQIDRLITGRLQSLQTYVTQQLIRAAEIRASANLAATKMSECVLGQSKRVDFCGKGYHLMSFPQSAPHGVVFLHVTYVCAQEKNFTTAPAICHDGKAHFPREGVFVSNGTHWFVTQRNFYEPQIITTDNTFVSGNCDVVIGIVNNTVYDPLQPELDSFKEELDKYFKNHTSPDVDLGDISGINASVVNIQKEIDRLNEVAKNLNESLIDLQELGKYEQYIK

SEQ ID NO: 2097 - protein, 1211 aa, Artificial Sequence
  SARS-CoV-2/Tianmen/HBCDC-HB-07/2020__EPI_ISL_412983 spike protein (1-1211)(P715C_P1069C)
MFVFLVLLPLVSSQCVNLTTRTQLPPAYTNSFTRGVYYPDKVFRSSVLHSTQDLFLPFFSNVTWFHAIHVSGTNGTKRFDNPVLPFNDGVYFASTEKSNIIRGWIFGTTLDSKTQSLLIVNNATNVVIKVCEFQFCNDPFLGVYYHKNNKSWMESEFRVYSSANNCTFEYVSQPFLMDLEGKQGNFKNLREFVFKNIDGYFKIYSKHTPINLVRDLPQGFSALEPLVDLPIGINITRFQTLLALHRSYLTPGDSSSGWTAGAAAYYVGYLQPRTFLLKYNENGTITDAVDCALDPLSETKCTLKSFTVEKGIYQTSNFRVQPTESIVRFPNITNLCPFGEVFNATRFASVYAWNRKRISNCVADYSVLYNSASFSTFKCYGVSPTKLNDLCFTNVYADSFVIRGDEVRQIAPGQTGKIADYNYKLPDDFTGCVIAWNSNNLDSKVGGNYNYLYRLFRKSNLKPFERDISTEIYQAGSTPCNGVEGFNCYFPLQSYGFQPTNGVGYQPYRVVVLSFELLHAPATVCGPKKSTNLVKNKCVNFNFNGLTGTGVLTESNKKFLPFQQFGRDIADTTDAVRDPQTLEILDITPCSFGGVSVITPGTNTSNQVAVLYQDLNCTEVPVAIHADQLTPTWRVYSTGSNVFQTRAGCLIGAEHVNNSYECDIPIGAGICASYQTQTNSPRRARSVASQSIIAYTMSLGAENSVAYSNNSIAICTNFTISVTTEILPVSMTKTSVDCTMYICGDSTECSNLLLQYGSFCTQLNRALTGIAVEQDKNTQEVFAQVKQIYKTPPIKDFGGFNFSQILPDPSKPSKRSFIEDLLFNKVTLADAGFIKQYGDCLGDIAARDLICAQKFNGLTVLPPLLTDEMIAQYTSALLAGTITSGWTFGAGAALQIPFAMQMAYRFNGIGVTQNVLYENQKLIANQFNSAIGKIQDSLSSTASALGKLQDVVNQNAQALNTLVKQLSSNFGAISSVLNDILSRLDKVEAEVQIDRLITGRLQSLQTYVTQQLIRAAEIRASANLAATKMSECVLGQSKRVDFCGKGYHLMSFPQSAPHGVVFLHVTYVCAQEKNFTTAPAICHDGKAHFPREGVFVSNGTHWFVTQRNFYEPQIITTDNTFVSGNCDVVIGIVNNTVYDPLQPELDSFKEELDKYFKNHTSPDVDLGDISGINASVVNIQKEIDRLNEVAKNLNESLIDLQELGKYEQYIK

SEQ ID NO: 2098 - protein, 1211 aa, Artificial Sequence
  SARS-CoV-2/Hong Kong/case42_VM20002493/2020__EPI_ISL_414527 spike protein (1-1211)(P715C_P1069C)
MFVFLVLLPLVSSQCVNLTTRTQLPPAYTNSFTRGVYYPDKVFRSSVLHSTQDLFLPFFSNVTWFHAIHVSGTNGTKRFDNPVLPFNDGVYFASTEKSNIIRGWIFGTTLDSKTQSLLIVNNATNVVIKVCEFQFCNDPFLGVYYHKNNKSWMESEFRVYSSANNCTFEYVSQPFLMDLEGKQGNFKNLREFVFKNIDGYFKIYSKHTPINLVRDLPQGFSALEPLVDLPIGINITRFQTLLALHRSYLTPGDSSSGWTAGAAAYYVGYLQPRTFLLKYNENGTITDAVDCALDPLSETKCTLKSFTVEKGIYQTSNFRVQPTESIVRFPNITNLCPFGEVFNATRFASVYAWNRKRISNCVADYSVLYNSASFSTFKCYGVSPTKLNDLCFTNVYADSFVIRGDEVRQIAPGQTGKIADYNYKLPDDFTGCVIAWNSNNLDSKVGGNYNYLYRLFRKSNLKPFERDISTEIYQAGSTPCNGVEGFNCYFPLQSYGFQPTNGVGYQPYRVVVLSFELLHAPATVCGPKKSTNLVKNKCVNFNFNGLTGTGVLTESNKKFLPFQQFGRDIADTTDAVRDPQTLEILDITPCSFGGVSVITPGTNTSNQVAVLYQDVNCTEVPVAIHADQLTPTWRVYSTGSNVFQTRAGCLIGAEHVNNSYECDIPIGAGICASYQTQTNSPRRARSVASQSIIAYTMSLGAENSVAYSNNSIAICTNFAISVTTEILPVSMTKTSVDCTMYICGDSTECSNLLLQYGSFCTQLNRALTGIAVEQDKNTQEVFAQVKQIYKTPPIKDFGGFNFSQILPDPSKPSKRSFIEDLLFNKVTLADAGFIKQYGDCLGDIAARDLICAQKFNGLTVLPPLLTDEMIAQYTSALLAGTITSGWTFGAGAALQIPFAMQMAYRFNGIGVTQNVLYENQKLIANQFNSAIGKIQDSLSSTASALGKLQDVVNQNAQALNTLVKQLSSNFGAISSVLNDILSRLDKVEAEVQIDRLITGRLQSLQTYVTQQLIRAAEIRASANLAATKMSECVLGQSKRVDFCGKGYHLMSFPQSAPHGVVFLHVTYVCAQEKNFTTAPAICHDGKAHFPREGVFVSNGTHWFVTQRNFYEPQIITTDNTFVSGNCDVVIGIVNNTVYDPLQPELDSFKEELDKYFKNHTSPDVDLGDISGINASVVNIQKEIDRLNEVAKNLNESLIDLQELGKYEQYIK

SEQ ID NO: 2099 - protein, 1211 aa, Artificial Sequence
  SARS-CoV-2/USA/CruiseA-23/2020__EPI_ISL_414482 spike protein (1-1211)(P715C_P1069C)
MFVFLVLLPLVSSQCVNLTTRTQLPPAYTNSFTRGVYYPDKVFRSSVLHSTQDLFLPFFSNVTWFHAIHVSGTNGTKRFDNPVLPFNDGVYFASTEKSNIIRGWIFGTTLDSKTQSLLIVNNATNVVIKVCEFQFCNDPFLGVYYHKNNKSWMESEFRVYSSANNCTFEYVSQPFLMDLEVKQGNFKNLREFVFKNIDGYFKIYSKHTPINLVRDLPQGFSALEPLVDLPIGINITRFQTLLALHRSYLTPGDSSSGWTAGAAAYYVGYLQPRTFLLKYNENGTITDAVDCALDPLSETKCTLKSFTVEKGIYQTSNFRVQPTESIVRFPNITNLCPFGEVFNATRFASVYAWNRKRISNCVADYSVLYNSASFSTFKCYGVSPTKLNDLCFTNVYADSFVIRGDEVRQIAPGQTGKIADYNYKLPDDFTGCVIAWNSNNLDSKVGGNYNYLYRLFRKSNLKPFERDISTEIYQAGSTPCNGVEGFNCYFPLQSYGFQPTNGVGYQPYRVVVLSFELLHAPATVCGPKKSTNLVKNKCVNFNFNGLTGTGVLTESNKKFLPFQQFGRDIADTTDAVRDPQTLEILDITPCSFGGVSVITPGTNTSNQVAVLYQDVNCTEVPVAIHADQLTPTWRVYSTGSNVFQTRAGCLIGAEHVNNSYECDIPIGAGICASYQTQTNSPRRARSVASQSIIAYTMSLGAENSVAYSNNSIAICTNFTISVTTEILPVSMTKTSVDCTMYICGDSTECSNLLLQYGSFCTQLNRALTGIAVEQDKNTQEVFAQVKQIYKTPPIKDFGGFNFSQILPDPSKPSKRSFIEDLLFNKVTLADAGFIKQYGDCLGDIAARDLICAQKFNGLTVLPPLLTDEMIAQYTSALLAGTITSGWTFGAGAALQIPFAMQMAYRFNGIGVTQNVLYENQKLIANQFNSAIGKIQDSLSSTASALGKLQDVVNQNAQALNTLVKQLSSNFGAISSVLNDILSRLDKVEAEVQIDRLITGRLQSLQTYVTQQLIRAAEIRASANLAATKMSECVLGQSKRVDFCGKGYHLMSFPQSAPHGVVFLHVTYVCAQEKNFTTAPAICHDGKAHFPREGVFVSNGTHWFVTQRNFYEPQIITTDNTFVSGNCDVVIGIVNNTVYDPLQPELDSFKEELDKYFKNHTSPDVDLGDISGINASVVNIQKEIDRLNEVAKNLNESLIDLQELGKYEQYIK

SEQ ID NO: 2100 - protein, 1211 aa, Artificial Sequence
  SARS-CoV-2/Hong Kong/case85_VM20002868/2020__EPI_ISL_414519 spike protein (1-1211)(P715C_P1069C)
MFVFLVLVPLVSSQCVNLTTRTQLPPAYTNSFTRGVYYPDKVFRSSVLHSTQDLFLPFFSNVTWFHAIHVSGTNGTKRFDNPVLPFNDGVYFASTEKSNIIRGWIFGTTLDSKTQSLLIVNNATNVVIKVCEFQFCNDPFLGVYYHKNNKSWMESEFRVYSSANNCTFEYVSQPFLMDLEGKQGNFKNLREFVFKNIDGYFKIYSKHTPINLVRDLPQGFSALEPLVDLPIGINITRFQTLLALHRSYLTPGDSSSGWTAGAAAYYVGYLQPRTFLLKYNENGTITDAVDCALDPLSETKCTLKSFTVEKGIYQTSNFRVQPTESIVRFPNITNLCPFGEVFNATRFASVYAWNRKRISNCVADYSVLYNSASFSTFKCYGVSPTKLNDLCFTNVYADSFVIRGDEVRQIAPGQTGKIADYNYKLPDDFTGCVIAWNSNNLDSKVGGNYNYLYRLFRKSNLKPFERDISTEIYQAGSTPCNGVEGFNCYFPLQSYGFQPTNGVGYQPYRVVVLSFELLHAPATVCGPKKSTNLVKNKCVNFNFNGLTGTGVLTESNKKFLPFQQFGRDIADTTDAVRDPQTLEILDITPCSFGGVSVITPGTNTSNQVAVLYQDVNCTEVPVAIHADQLTPTWRVYSTGSNVFQTRAGCLIGAEHVNNSYECDIPIGAGICASYQTQTNSPRRARSVASQSIIAYTMSLGAENSVAYSNNSIAICTNFTISVTTEILPVSMTKTSVDCTMYICGDSTECSNLLLQYGSFCTQLNRALTGIAVEQDKNTQEVFAQVKQIYKTPPIKDFGGFNFSQILPDPSKPSKRSFIEDLLFNKVTLADAGFIKQYGDCLGDIAARDLICAQKFNGLTVLPPLLTDEMIAQYTSALLAGTITSGWTFGAGAALQIPFAMQMAYRFNGIGVTQNVLYENQKLIANQFNSAIGKIQDSLSSTASALGKLQDVVNQNAQALNTLVKQLSSNFGAISSVLNDILSRLDKVEAEVQIDRLITGRLQSLQTYVTQQLIRAAEIRASANLAATKMSECVLGQSKRVDFCGKGYHLMSFPQSAPHGVVFLHVTYVCAQEKNFTTAPAICHDGKAHFPREGVFVSNGTHWFVTQRNFYEPQIITTDNTFVSGNCDVVIGIVNNTVYDPLQPELDSFKEELDKYFKNHTSPDVDLGDISGINASVVNIQKEIDRLNEVAKNLNESLIDLQELGKYEQYIK

SEQ ID NO: 2101 - protein, 1211 aa, Artificial Sequence; identical to SEQ ID NO: 2091
  SARS-CoV-2/England/200990660/2020__EPI_ISL_414523 spike protein (1-1211)(P715C_P1069C)

SEQ ID NO: 2102 - protein, 1211 aa, Artificial Sequence
  SARS-CoV-2/Australia/NSW09/2020__EPI_ISL_413595 spike protein (1-1211)(P715C_P1069C)
MFVFLVLLPLVSSQCVNLTTRTQLPPAYTNSFTRGVYYPDKVFRSSVLHSTQDLFLPFFSNVTWFHAIHVSGTNGTKRFDNPVLPFNDGVYFASTEKSNIIRGWIFGTTLDSKTQSLLIVNNATNVVIKVCEFQFCNDPFLGVYYHKNNKSWMESEFRVYSSANNCTFEYVSQPFLMDLEGKQGNFKNLREFVFKNIDGYFKIYSKHTPINLVRDLPQGFSALEPLVDLPIGINITRFQTLLALHRSYLTPGDSSSGWTAGAAAYYVGYLQPRTFLLKYNENGTITDAVDCALDPLSETKCTLKSFTVEKGIYQTSNFRVQPTESIVRFPNITNLCPFGEVFNATRFASVYAWNRKRISNCVADYSVLYNSASFSTFKCYGVSPTKLNDLCFTNVYADSFVIRGDEVRQIAPGQTGKIADYNYKLPDDFTGCVIAWNSNNLDSKVGGNYNYLYRLFRKSNLKPFERDISTEIYQAGSTPCNGVEGFNCYFPLQSYGFQPTNGVGYQPYRVVVLSFELLHAPATVCGPKKSTNLVKNKCVNFNFNGLTGTGVLTESNKKFLPFQQFGRDIADTTDAVRDPQTLEILDITPCSFGGVSVITPGTNTSNQVAVLYQDVNCTEVPVAIHADQLTPTWRVYSTGSNVFQTRAGCLIGAEHVNNSYECDIPIGAGICASYQTQTNSPRRARSVASQSIIAYTMSLGAENSVAYSNNSIAICTNFTISVTTEILPVSMTKTSVDCTMYICGDSTECSNLLLQYGSFCTQLNRALTGIAVEQDKNTQEVFAQVKQIYKTPPIKDFGGFNFSQILPDPSKPSKRSFIEDLLFNKVTLADAGFIKQYGDCLGDIAARDLICAQKFNGLTVLPPLLTDEMIAQYTSALLAGTITSGWTFGAGAALQIPFAMQMAYRFNGIGVTQNVLYENQKLIANQFNSAIGKIQDSLSFTASALGKLQDVVNQNAQALNTLVKQLSSNFGAISSVLNDILSRLDKVEAEVQIDRLITGRLQSLQTYVTQQLIRAAEIRASANLAATKMSECVLGQSKRVDFCGKGYHLMSFPQSAPHGVVFLHVTYVCAQEKNFTTAPAICHDGKAHFPREGVFVSNGTHWFVTQRNFYEPQIITTDNTFVSGNCDVVIGIVNNTVYDPLQPELDSFKEELDKYFKNHTSPDVDLGDISGINASVVNIQKEIDRLNEVAKNLNESLIDLQELGKYEQYIK

SEQ ID NO: 2103 - protein, 1211 aa, Artificial Sequence; identical to SEQ ID NO: 2083
  SARS-CoV-2/Australia/NSW10/2020__EPI_ISL_413596 spike protein (1-1211)(P715C_P1069C)

SEQ ID NO: 2104 - protein, 1211 aa, Artificial Sequence
  SARS-CoV-2/Switzerland/1000477797/2020__EPI_ISL_413023 spike protein (1-1211)(P715C_P1069C)
MFVFLVLLPLVSSQCVNLTTRTQLPPAYTNSFTRGVYYPDKVFRSSVLHSTQDLFLPFFSNVTWFHAIHVSGTNGTKRFDNPVLPFNDGVYFASTEKSNIIRGWIFGTTLDSKTQSLLIVNNATNVVIKVCEFQFCNDPFLGVYYHKNNKSWMESEFRVYSSANNCTFEYVSQPFLMDLEGKQGNFKNLREFVFKNIDGYFNIYSKHTPINLVRDLPQGFSALEPLVDLPIGINITRFQTLLALHRSYLTPGDSSSGWTAGAAAYYVGYLQPRTFLLKYNENGTITDAVDCALDPLSETKCTLKSFTVEKGIYQTSNFRVQPTESIVRFPNITNLCPFGEVFNATRFASVYAWNRKRISNCVADYSVLYNSASFSTFKCYGVSPTKLNDLCFTNVYADSFVIRGDEVRQIAPGQTGKIADYNYKLPDDFTGCVIAWNSNNLDSKVGGNYNYLYRLFRKSNLKPFERDISTEIYQAGSTPCNGVEGFNCYFPLQSYGFQPTNGVGYQPYRVVVLSFELLHAPATVCGPKKSTNLVKNKCVNFNFNGLTGTGVLTESNKKFLPFQQFGRDIADTTDAVRDPQTLEILDITPCSFGGVSVITPGTNTSNQVAVLYQGVNCTEVPVAIHADQLTPTWRVYSTGSNVFQTRAGCLIGAEHVNNSYECDIPIGAGICASYQTQTNSPRRARSVASQSIIAYTMSLGAENSVAYSNNSIAICTNFTISVTTEILPVSMTKTSVDCTMYICGDSTECSNLLLQYGSFCTQLNRALTGIAVEQDKNTQEVFAQVKQIYKTPPIKDFGGFNFSQILPDPSKPSKRSFIEDLLFNKVTLADAGFIKQYGDCLGDIAARDLICAQKFNGLTVLPPLLTDEMIAQYTSALLAGTITSGWTFGAGAALQIPFAMQMAYRFNGIGVTQNVLYENQKLIANQFNSAIGKIQDSLSSTASALGKLQDVVNQNAQALNTLVKQLSSNFGAISSVLNDILSRLDKVEAEVQIDRLITGRLQSLQTYVTQQLIRAAEIRASANLAATKMSECVLGQSKRVDFCGKGYHLMSFPQSAPHGVVFLHVTYVCAQEKNFTTAPAICHDGKAHFPREGVFVSNGTHWFVTQRNFYEPQIITTDNTFVSGNCDVVIGIVNNTVYDPLQPELDSFKEELDKYFKNHTSPDVDLGDISGINASVVNIQKEIDRLNEVAKNLNESLIDLQELGKYEQYIK

SEQ ID NO: 2105 - protein, 1211 aa, Artificial Sequence
  SARS-CoV-2/Belgium/BA-02291/2020__EPI_ISL_415159 spike protein (1-1211)(P715C_P1069C)
MFVFLVLLPLVSSQCVNLTTRTQLPPAYTNSFTRGVYYPDKVFRSSVLHSTQDLFLPFFSNVTWFHAIHVSGTNGTKRFDNPVLPFNDGVYFASTEKSNIIRGWIFGTTLDSKTQSLLIVNNATNVVIKVCEFQFCNDPFLGVYYHKNNKSWMESEFRVYSSANNCTFEYVSQPFLMDLEGKQGNFKNLREFVFKNIDGYFKIYSKHTPINLVRDLPQGFSALEPLVDLPIGINITRFQTLLALHRSYLTPGDSSSGWTAGAAAYYVGYLQPRTFLLKYNENGTITDAVDCALDPLSETKCTLKSFTVEKGIYQTSNFRVQPTESIVRFPNITNLCPFGEVFNATRFASVYAWNRKRISNCVADYSVLYNSASFSTFKCYGVSPTKLNDLCFTNVYADSFVIRGDEVRQIAPGQTGKIADYNYKLPDDFTGCVIAWNSNNLDSKVGGNYNYLYRLFRRSNLKPFERDISTEIYQAGSTPCNGVEGFNCYFPLQSYGFQPTNGVGYQPYRVVVLSFELLPAPATVCGPKKSTNLVKNKCVNFNFNGLTGTGVLTESNKKFLPFQQFGRDIADTTDAVRDPQTLEILDITPCSFGGVSVITPGTNTSNQVAVLYQGVNCTEVPVAIHADQLTPTWRVYSTGSNVFQTRAGCLIGAEHVNNSYECDIPIGAGICASYQTQTNSPRRARSVASQSIIAYTMSLGAENSVAYSNNSIAICTNFTISVTTEILPVSMTKTSVDCTMYICGDSTECSNLLLQYGSFCTQLNRALTGIAVEQDKNTQEVFAQVKQIYKTPPIKDFGGFNFSQILPDPSKPSKRSFIEDLLFNKVTLADAGFIKQYGDCLGDIAARDLICAQKFNGLTVLPPLLTDEMIAQYTSALLAGTITSGWTFGAGAALQIPFAMQMAYRFNGIGVTQNVLYENQKLIANQFNSAIGKIQDSLSSAAPALGKLQDVVNQNAQALNTLVKQLSSNFGAISSVLNDILSRLDKVEAEVQIDRLITGRLQSLQTYVTQQLIRAAEIRASANLAATKMSECVLGQSKRVDFCGKGYHLMSFPQSAPHGVVFLHVTYVCAQEKNFTTAPAICHDGKAHFPREGVFVSNGTHWFVTQRNFYEPQIITTDNTFVSGNCDVVIGIVNNTVYDPLQPELDSFKEELDKYFKNHTSPDVDLGDISGINASVVNIQKEIDRLNEVAKNLNESLIDLQELGKYEQYIK

SEQ ID NO: 2106 - protein, 1211 aa, Artificial Sequence
  SARS-CoV-2/USA/WA8-UW5/2020__EPI_ISL_413486 spike protein (1-1211)(P715C_P1069C)
MFVFLVLLPLVSSQCVNLTTRTQLPPAYTNSFTRGVYYPDKVFRSSVLHSTQDLFLPFFSNVTWFHAIHVSGTNGTKRFDNPVLPFNDGVYFASTEKSNIIRGWIFGTTLDSKTQSLLIVNNATNVVIKVCEFQFCNDPFLGVYYHKNNKSWMESEFRVYSSANNCTFEYVSQPFLMDLEGKQGNFKNLREFVFKNIDGYFKIYSKHTPINLVRDLPQGFSALEPLVDLPIGINITRFQTLLALHRSYLTPGDSSSGWTAGAAAYYVGYLQPRTFLLKYNENGTITDAVDCALDPLSETKCTLKSFTVEKGIYQTSNFRVQPTESIVRFPNITNLCPFGEVFNATRFASVYAWNRKRISNCVADYSVLYNSASFSTFKCYGVSPTKLNDLCFTNVYADSFVIRGDEVRQIAPGQTGKIADYNYKLPDDFTGCVIAWNSNNLDSKVGGNYNYLYRLFRKSNLKPFERDISTEIYQAGSTPCNGVEGFNCYFPLQSYGFQPTNGVGYQPYRVVVLSFELLHAPATVCGPKKSTNLVKNKCVNFNFNGLTGTGVLTESNKKFLPFQQFGRDIADTTDAVRDPQTLEILDITPCSFGGVSVITPGTNTSNQVAVLYQDVNCTEVPVAIHADQLTPTWRVYSTGSNVFQTRAGCLIGAEYVNNSYECDIPIGAGICASYQTQTNSPRRARSVASQSIIAYTMSLGAENSVAYSNNSIAICTNFTISVTTEILPVSMTKTSVDCTMYICGDSTECSNLLLQYGSFCTQLNRALTGIAVEQDKNTQEVFAQVKQIYKTPPIKDFGGFNFSQILPDPSKPSKRSFIEDLLFNKVTLADAGFIKQYGDCLGDIAARDLICAQKFNGLTVLPPLLTDEMIAQYTSALLAGTITSGWTFGAGAALQIPFAMQMAYRFNGIGVTQNVLYENQKLIANQFNSAIGKIQDSLSSTASALGKLQDVVNQNAQALNTLVKQLSSNFGAISSVLNDILSRLDKVEAEVQIDRLITGRLQSLQTYVTQQLIRAAEIRASANLAATKMSECVLGQSKRVDFCGKGYHLMSFPQSAPHGVVFLHVTYVCAQEKNFTTAPAICHDGKAHFPREGVFVSNGTHWFVTQRNFYEPQIITTDNTFVSGNCDVVIGIVNNTVYDPLQPELDSFKEELDKYFKNHTSPDVDLGDISGINASVVNIQKEIDRLNEVAKNLNESLIDLQELGKYEQYIK

SEQ ID NO: 2107 - protein, 1211 aa, Artificial Sequence
  SARS-CoV-2/England/20102000506/2020__EPI_ISL_415147 spike protein (1-1211)(P715C_P1069C)
MFVFLVLLPLVSSQCVNLTTRTQLPPAYTNSFTRGVYYPDKVFRSSVLHSTQDLFLPFFSNVTWFHAIHVSGTNGTKRFDNPVLPFNDGVYFASTEKSNIIRGWIFGTTLDSKTQSLLIVNNATNVVIKVCEFQFCNDPFLGVYYHKNNKSWMESEFRVYSSANNCTFEYVSQPFLMDLEGKQGNFKNLREFVFKNIDGYFKIYSKHTPINLVRDLPQGFSALEPLVDLPIGINITRFQTLLALHRSYLTPGDSSSGWTAGAAAYYVGYLQPRTFLLKYNENGTITDAVDCALDPLSETKCTLKSFTVEKGIYQTSNFRVQPTESIVRFPNITNLCPFGEVFNATRFASVYAWNRKRISNCVADYSVLYNSASFSTFKCYGVSPTKLNDLCFTNVYADSFVIRGDEVRQIAPGQTGKIADYNYKLPDDFTGCVIAWNSNNLDSKVGGNYNYLYRLFRKSNLKPFERDISTEIYQAGSTPCNGVEGFNCYFPLQSYGFQPTNGVGYQPYRVVVLSFELLHAPATVCGPKKSTNLVKNKCVNFNFNGLTGTGVLTESNKKFLPFQQFGRDIADTTDAVRDPQTLEILDITPCSFGGVSVITPGTNTSNQVAVLYQGVNCTEVPVAIHADQLTPTWRVYSTGSNVFQTRAGCLIGAEHVNNSYECDIPIGAGICASYQTQTNSPRRARSVASQSIIAYTMSLGAENSVAYSNNSIAICTNFTISVTTEILPVSMTKTSVDCTMYICGDSTECSNLLLQYGSFCTQLNRALTGIAVEQDKNTQEVFAQVKQIYKTPPIKDFGGFNFSQILPDPSKPSKRSFIEDLLFNKVTLADAGFIKQYGYCLGDIAARDLICAQKFNGLTVLPPLLTDEMIAQYTSALLAGTITSGWTFGAGAALQIPFAMQMAYRFNGIGVTQNVLYENQKLIANQFNSAIGKIQDSLSSTASALGKLQDVVNQNAQALNTLVKQLSSNFGAISSVLNDILSRLDKVEAEVQIDRLITGRLQSLQTYVTQQLIRAAEIRASANLAATKMSECVLGQSKRVDFCGKGYHLMSFPQSAPHGVVFLHVTYVCAQEKNFTTAPAICHDGKAHFPREGVFVSNGTHWFVTQRNFYEPQIITTDNTFVSGNCDVVIGIVNNTVYDPLQPELDSFKEELDKYFKNHTSPDVDLGDISGINASVVNIQKEIDRLNEVAKNLNESLIDLQELGKYEQYIK

SEQ ID NO: 2108 - protein, 1211 aa, Artificial Sequence
  SARS-CoV-2/Belgium/VAG-03013/2020__EPI_ISL_415155 spike protein (1-1211)(P715C_P1069C)
MFVFLVLLPLVSSQCVNLTTRTQLPPAYTNSFTRGVYYPDKVFRSSVLHSTQDLFLPFFSNVTWFHAIHVSGTNGTKRFDNPVLPFNDGVYFASTEKSNIIRGWIFGTTLDSKTQSLLIVNNATNVVIKVCEFQFCNDPFLGVYYHKNNKSWMESEFRVYSSANNCTFEYVSQPFLMDLEGKQGNFKNLREFVFKNIDGYFKIYSKHTPINLVRDLPQGFSALEPLVDLPIGINITRFQTLLALHRSYLTPGDSSSGWTAGAAAYYVGYLQPRTFLLKYNENGTITDAVDCALDPLSETKCTLKSFTVEKGIYQTSNFRVQPTESIVRFPNITNLCPFGEVFNATRFASVYAWNRKRISNCVADYSVLYNSASFSTFKCYGVSPTKLNDLCFTNVYADSFVIRGDEVRQIAPGQTGKIADYNYKLPDDFTGCVIAWNSNNLDSKVGGNYNYLYRLFRKSNLKPFERDISTEIYQAGSTPCNGVEGFNCYFPLQSYGFQPTNGVGYQPYRVVVLSFELLHAPATVCGPKKSTNLVKNKCVNFNFNGLTGTGVLTESNKKFLPFQQFGRDIADTTDAVRDPQTLEILDITPCSFGGVSVITPGTNTSNQVAVLYQGVNCTEVPVAIHADQLTPTWRVYSTGSNVFQTRAGCLIGAEHVNNSYECDIPIGAGICASYQTQTNSPRRARSVASQSIIAYTMSLGAENSVAYSNNSIAICTNFTISVTTEILPVSMTKTSVDCTMYICGDSTECSNLLLQYGSFCTQLNRALTGIAVEQDKNTQEVFAQVKQIYKTPPIKDFGGFNFSQILPDPSKPSKRSFIEDLLFNKVTLADAGFIKQYGDCLGDIAARDLICAQKFNGLTVLPPLLTDEMIAQYTSALLAGTITSGWTFGAGAALQIPFAMQMAYRFNGIGVTQNVLYENQKLIANQFNSAIGKIQDSLSSTATALGKLQDVVNQNAQALNTLVKQLSSNFGAISSVLNDILSRLDKVEAEVQIDRLITGRLQSLQTYVTQQLIRAAEIRASANLAATKMSECVLGQSKRVDFCGKGYHLMSFPQSAPHGVVFLHVTYVCAQEKNFTTAPAICHDGKAHFPREGVFVSNGTHWFVTQRNFYEPQIITTDNTFVSGNCDVVIGIVNNTVYDPLQPELDSFKEELDKYFKNHTSPDVDLGDISGINASVVNIQKEIDRLNEVAKNLNESLIDLQELGKYEQYIK

SEQ ID NO: 2109 - protein, 1211 aa, Artificial Sequence
  SARS-CoV-2/Belgium/BC-03016/2020__EPI_ISL_415157 spike protein (1-1211)(P715C_P1069C)
MFVFLVLLPLVSSQCVNLTTRTQLPPAYTNSFTRGVYYPDKVFRSSVLHSTQDLFLPFFSNVTWFHAIHVSGTNGTKRFDNPVLPFNDGVYFASTEKSNIIRGWIFGTTLDSKTQSLLIVNNATNVVIKVCEFQFCNDPFLGVYYHKNNKSWMESEFRVYSSANNCTFEYVSQPFLMDLEGKQGNFKNLREFVFKNIDGYFKIYSKHTPINLVRDLPQGFSALEPLVDLPIGINITRFQTLLALHRSYLTPGDSSSGWTAGAAAYYVGYLQPRTFLLKYNENGTITDAVDCALDPLSETKCTLKSFTVEKGIYQTSNFRVQPTESIVRFPNITNLCPFGEVFNATRFASVYAWNRKRISNCVADYSVLYNSASFSTFKCYGVSPTKLNDLCFTNVYADSFVIRGDEVRQIAPGQTGKIADYNYKLPDDFTGCVIAWNSNNLDSKVGGNYNYLYRLFRKSNLKPFERDISTEIYQAGSTPCNGVEGFNCYFPLQSYGFQPTNGVGYQPYRVVVLSFELLHAPATVCGPKKSTNLVKNKCVNFNFNGLTGTGVLTESNKKFLPFQQFGRDIADTTDAVRDPQTLEILDITPCSFGGVSVITPGTNTSNQVAVLYQGVNCTEVPVAIHADQLTPTWRVYSTGSNVFQTRAGCLIGAEHVNNSYECDIPIGAGICASYQTQTNSPRRARSVASQSIIAYTMSLGAENSVAYSNNSIAICTNFTISVTTEILPVSMTKTSVDCTMYICGDSTECSNLLLQYGSFCTQLNRALTGIAVEQDKNTQEVFAQVKQIYKTPPIKDFGGFNFSQILPDPSKPSKRSFIEDLLFNKVTLADAGFIKQYGDCLGDIAARDLICAQKFNGLTVLPPLLTDEMIAQYTSALLAGTITSGWTFGAGAALQIPFAMQMAYRFNGIGVTQNVLYENQKLIANQFNSAIGKIQDSLSSTAPALGKLQDVVNQNAQALNTLVKQLSSNFGAISSVLNDILSRLDKVEAEVQIDRLITGRLQSLQTYVTQQLIRAAEIRASANLAATKMSECVLGQSKRVDFCGKGYHLMSFPQSAPHGVVFLHVTYVCAQEKNFTTAPAICHDGKAHFPREGVFVSNGTHWFVTQRNFYEPQIITTDNTFVSGNCDVVIGIVNNTVYDPLQPELDSFKEELDKYFKNHTSPDVDLGDISGINASVVNIQKEIDRLNEVAKNLNESLIDLQELGKYEQYIK

SEQ ID NO: 2110 - protein, 1211 aa, Artificial Sequence
  SARS-CoV-2/Germany/BavPat3/2020__EPI_ISL_414521 spike protein (1-1211)(P715C_P1069C)
MFVFLVLLPLVSSQCVNLTTRTQLPPAYTNSFTRGVYYPDKVFRSSVLHSTQDLFLPFFSNVTWFHAIHVSGTNGTKRFDNPVLPFNDGVYFASTEKSNIIRGWIFGTTLDSKTQSLLIVNNATNVVIKVCEFQFCNDPFLGVYYHKNNKSWMESEFRVYSSANNCTFEYVSQPFLMDLEGKQGNFKNLREFVFKNIDGYFKIYSKHTPINLVRDLPQGFSALEPLVDLPIGINITRFQTLLALHRSYLTPGDSSSGWTAGAAAYYVGYLQPRTFLLKYNENGTITDAVDCALDPLSETKCTLKSFTVEKGIYQTSNFRVQPTESIVRFPNITNLCPFGEVFNATRFASVYAWNRKRISNCVADYSVLYNSASFSTFKCYGVSPTKLNDLCFTNVYADSFVIRGDEVRQIAPGQTGKIADYNYKLPDDFTGCVIAWNSNNLDSKVGGNYNYLYRLFRKSNLKPFERDISTEIYQAGSTPCNGVEGFNCYFPLQSYGFQPTNGVGYQPYRVVVLSFELLHAPATVCGPKKSTNLVKNKCVNFNFNGLTGTGVLTESNKKFLPFQQFGRDIADTTDAVRDPQTLEILDITPCSFGGVSVITPGTNTSNQVAVLYQDVNCTEVPVAIHADQLTPTWRVYSTGSNVFQTRAGCLIGAEHVNNSYECDIPIGAGICASYQTQTNSPRRARSVASQSIIAYTMSLGAENSVAYSNNSIAICTNFTISVTTEILPVSMTKTSVDCTMYICGDSTECSNLLLQYGSFCTQLNRALTGIAVEQDKNTQQVFAQVKQIYKTPPIKDFGGFNFSQILPDPSKPSKRSFIEDLLFNKVTLADAGFIKQYGDCLGDIAARDLICAQKFNGLTVLPPLLTDEMIAQYTSALLAGTITSGWTFGAGAALQIPFAMQMAYRFNGIGVTQNVLYENQKLIANQFNSAIGKIQDSLSSTASALGKLQDVVNQNAQALNTLVKQLSSNFGAISSVLNDILSRLDKVEAEVQIDRLITGRLQSLQTYVTQQLIRAAEIRASANLAATKMSECVLGQSKRVDFCGKGYHLMSFPQSAPHGVVFLHVTYVCAQEKNFTTAPAICHDGKAHFPREGVFVSNGTHWFVTQRNFYEPQIITTDNTFVSGNCDVVIGIVNNTVYDPLQPELDSFKEELDKYFKNHTSPDVDLGDISGINASVVNIQKEIDRLNEVAKNLNESLIDLQELGKYEQYIK

SEQ ID NO: 2111 - protein, 1211 aa, Artificial Sequence
  SARS-CoV-2/France/HF1805/2020__EPI_ISL_414628 spike protein (1-1211)(P715C_P1069C)
MFVFLVLLPLVSSQCVNLTTRTQLPPAYTNSFTRGVYYPDKVFRSSVLHSTQDLFLPFFSNVTWFHAIHVSGTNGTKRFDNPVLPFNDGVYFASTEKSNIIRGWIFGTTLDSKTQSLLIVNNATNVVIKVCEFQFCNDPFLGVYYHKNNKSWMESEFRVYSSANNCTFEYVSQPFLMDLEGKQGNFKNLREFVFKNIDGYFKIYSKHTPINLVRDLPQGFSALEPLVDLPIGINITRFQTLLALHRSYLTPGDSSSGWTAGAAAYYVGYLQPRTFLLKYNENGTITDAVDCALDPLSETKCTLKSFTVEKGIYQTSNFRVQPTESIVRFPNITNLCPFGEVFNATRFASVYAWNRKRISNCVADYSVLYNSASFSTFKCYGVSPTKLNDLCFTNVYADSFVIRGDEVRQIAPGQTGKIADYNYKLPDDFTGCVIAWNSNNLDSKVGGNYNYLYRLFRKSNLKPFERDISTEIYQAGSTPCNGVEGFNCYFPLQSYGFQPTNGVGYQPYRVVVLSFELLHAPATVCGPKKSTNLVKNKCVNFNFNGLTGTGVLTESNKKFLPFQQFGRDIADTTDAVRDPQTLEILDITPCSFGGVSVITPGTNTSNQVAVLYQGVNCTEVPVAIHADQLTPTWRVYSTGSNVFQTRAGCLIGAEHVNNSYECDIPIGAGICASYQTQTNSPRRARSVASQSIIAYTMSLGAENSVAYSNNSIAICTNFTISVTTEILPVSMTKTSVDCTMYICGDSTECSNLLLQYGSFCTQLNRALTGIAVEQDKNTQEVFAQVKQIYKTPPIKDFGGFNFSQILPDPSKPSKRSFIEDLLFNKVTLADAGFIKQYGDCLGDIAARDLICAQKFNGLTVLPPLLTDEMIAQYTSALLAGTITSGWTFGAGAALQIPFAMQMAYRFNGIGVTQNVLYENQKLIANQFNSAIGKIQDSLSSTASALGKLQDVVNQNAQALNTLVKQLSSNFGAISSVLNDILSRLDKVEAEVQIDRLITGRLQSLQTYVTQQLIRAAEIRASANLAATKMSECVLGQSKRVDFCGKGYHLMSFPQSAPHGVVFLHVTYVCAQEKNFTTAPAICHDGKAHFPREGVFVSNGTHWFVTQRNFYEPQIITTDNTFVSGNCDVVIGVVNNTVYDPLQPELDSFKEELDKYFKNHTSPDVDLGDISGINASVVNIQKEIDRLNEVAKNLNESLIDLQELGKYEQYIK

SEQ ID NO: 2112 - protein, 1211 aa, Artificial Sequence
  SARS-CoV-2/Netherlands/ZuidHolland_9/2020__EPI_ISL_414445 spike protein (1-1211)(P715C_P1069C)
MFVFLVLLPLVSSQCVNLTTRTQLPPAYTNSFTRGVYYPDKVFRSSVLHSTQDLFLPFFSNVTWFHAIHVSGTNGTKRFDNPVLPFNDGVYFASTEKSNIIRGWIFGTTLDSKTQSLLIVNNATNVVIKVCEFQFCNDPFLGVYYHKNNKSWMESEFRVYSSANNCTFEYVSQPFLMDLEGKQGNFKNLREFVFKNIDGYFKIYSKHTPINLVRDLPQGFSALEPLVDLPIGINITRFQTLLALHRSYLTPGDSSSGWTAGAAAYYVGYLQPRTFLLKYNENGTITDAVDCALDPLSETKCTLKSFTVEKGIYQTSNFRVQPTESIVRFPNITNLCPFGEVFNATRFASVYAWNRKRISNCVADYSVLYNSASFSTFKCYGVSPTKLNDLCFTNVYADSFVIRGDEVRQIAPGQTGKIADYNYKLPDDFTGCVIAWNSNNLDSKVGGNYNYLYRLFRKSNLKPFERDISTEIYQAGSTPCNGVEGFNCYFPLQSYGFQPTNGVGYQPYRVVVLSFELLHAPATVCGPKKSTNLVKNKCVNFNFNGLTGTGVLTESNKKFLPFQQFGRDIADTTDAVRDPQTLEILDITPCSFGGVSVITPGTNTSNQVAVLYQGVNCTEVPVAIHADQLTPTWRVYSTGSNVFQTRAGCLIGAEHVNNSYECDIPIGAGICASYQTQTNSPRRARSVASQSIIAYTMSLGAENSVAYSNNSIAICTNFTISVTTEILPVSMTKTSVDCTMYICGDSTECSNLLLQYGSFCTQLNRALTGIAVEQDKNTQEVFAQVKQIYKTPPIKDFGGFNFSQILPDPSKPSKRSFIEDLLFNKVTLADAGFIKQYGDCLGDIAARDLICVQKFNGLTVLPPLLTDEMIAQYTSALLAGTITSGWTFGAGAALQIPFAMQMAYRFNGIGVTQNVLYENQKLIANQFNSAIGKIQDSLSSTASALGKLQDVVNQNAQALNTLVKQLSSNFGAISSVLNDILSRLDKVEAEVQIDRLITGRLQSLQTYVTQQLIRAAEIRASANLAATKMSECVLGQSKRVDFCGKGYHLMSFPQSAPHGVVFLHVTYVCAQEKNFTTAPAICHDGKAHFPREGVFVSNGTHWFVTQRNFYEPQIITTDNTFVSGNCDVVIGIVNNTVYDPLQPELDSFKEELDKYFKNHTSPDVDLGDISGINASVVNIQKEIDRLNEVAKNLNESLIDLQELGKYEQYIK

SEQ ID NO: 2113 - protein, 1211 aa, Artificial Sequence
  SARS-CoV-2/Finland/FIN03032020A/2020__EPI_ISL_413602 spike protein (1-1211)(P715C_P1069C)
MFVFLVLLPLVSSQCVNLTTRTQLPPAYTNSFTRGVYYPDKVFRSSVLHSTQDLFLPFFSNVTWFHAIHVSGTNGTKRFDNPVLPFNDGVYFASTEKSNIIRGWIFGTTLDSKTQSLLIVNNATNVVIKVCEFQFCNDPFLGVYYHKNNKSWMESEFRVYSSANNCTFEYVSQPFLMDLEGKQGNFKNLREFVFKNIDGYFKIYSKHTPINLVRDLPQGFSALEPLVDLPIGINITRFQTLLALHRSYLTPGDSSSGWTAGAAAYYVGYLQPRTFLLKYNENGTITDAVDCALDPLSETKCTLKSFTVEKGIYQTSNFRVQPTESIVRFPNITNLCPFGEVFNATRFASVYAWNRKRISNCVADYSVLYNSASFSTFKCYGVSPTKLNDLCFTNVYADSFVIRGDEVRQIAPGQTGKIADYNYKLPDDFTGCVISWNSNNLDSKVGGNYNYLYRLFRKSNLKPFERDISTEIYQAGSTPCNGVEGFNCYFPLQSYGFQPTNGVGYQPYRVVVLSFELLHAPATVCGPKKSTNLVKNKCVNFNFNGLTGTGVLTESNKKFLPFQQFGRDIADTTDAVRDPQTLEILDITPCSFGGVSVITPGTNTSNQVAVLYQGVNCTEVPVAIHADQLTPTWRVYSTGSNVFQTRAGCLIGAEHVNNSYECDIPIGAGICASYQTQTNSPRRARSVASQSIIAYTMSLGAENSVAYSNNSIAICTNFTISVTTEILPVSMTKTSVDCTMYICGDSTECSNLLLQYGSFCTQLNRALTGIAVEQDKNTQEVFAQVKQIYKTPPIKDFGGFNFSQILPDPSKPSKRSFIEDLLFNKVTLADAGFIKQYGDCLGDIAARDLICAQKFNGLTVLPPLLTDEMIAQYTSALLAGTITSGWTFGAGAALQIPFAMQMAYRFNGIGVTQNVLYENQKLIANQFNSAIGKIQDSLSSTASALGKLQDVVNQNAQALNTLVKQLSSNFGAISSVLNDILSRLDKVEAEVQIDRLITGRLQSLQTYVTQQLIRAAEIRASANLAATKMSECVLGQSKRVDFCGKGYHLMSFPQSAPHGVVFLHVTYVCAQEKNFTTAPAICHDGKAHFPREGVFVSNGTHWFVTQRNFYEPQIITTDNTFVSGNCDVVIGIVNNTVYDPLQPELDSFKEELDKYFKNHTSPDVDLGDISGINASVVNIQKEIDRLNEVAKNLNESLIDLQELGKYEQYIK

SEQ ID NO: 2114 - protein, 1211 aa, Artificial Sequence
  SARS-CoV-2/France/GE1977/2020__EPI_ISL_414632 spike protein (1-1211)(P715C_P1069C)
MFVFLVLLPLVSSQCVNLTTRTQLPPAYTNSFTRGVYYPDKVFRSSVLHSTQDLFLPFFSNVTWFHAIHVSGTNGTKRFDNPVLPFNDGVYFASTEKSNIIRGWIFGTTLDSKTQSLLIVNNATNVVIKVCEFQFCNDPFLGVYYHKNNKSWMESEFRVYSSANNCTFEYVSQPFLMDLEGKQGNFKNLREFVFKNIDGYFKIYSKHTPINLVRDLPQGFSALEPLVDLPIGINITRFQTLLALHRSYLTPGDSSSGWTAGAAAYYVGYLQPRTFLLKYNENGTITDAVDCALDPLSETKCTLKSFTVEKGIYQTSNFRVQPTESIVRFPNITNLCPFGEVFNATRFASVYAWNRKRISNCVADYSVLYNSASFSTFKCYGVSPTKLNDLCFTNVYADSFVIRGDEVRQIAPGQTGKIADYNYKLPDDFTGCVIAWNSNNLDSKVGGNYNYLYRLFRKSNLKPFERDISTEIYQAGSTPCNGVEGFNCYFPLQSYGFQPTNGVGYQPYRVVVLSFELLHAPATVCGPKKSTNLVKNKCVNFNFNGLTGTGVLTESNKKFLPFQQFGRDIADTTDAVRDPQTLEILDITPCSFGGVSVITPGTNTSNQVAVLYQGVNCTEVPVAIHADQLTPTWRVYSTGSNVFQTRAGCLIGAEHVNNSYECDIPIGAGICASYQTQTNSPRRARSVASQSIIAYTMSLGAENSVAYSNNSIAICTNFTISVTTEILPVSMTKTSVDCTMYICGDSTECSNLLLQYGSFCTQLNRALTGIAVEQDKNTQEVFAQVKQIYKTPPIKDFGGFNFSQILPDPSKPSKRSFIEDLLFNKVTLADAGFIKQYGDCLGDIAARDLICAQKFNGLTVLPPLLTDEMIAQYTSALLAGTITSGWTFGAGAALQIPFAMQMAYRFNGIGVTQNVLYENQKLIANQFNSAIGKIQDSLFSTASALGKLQDVVNQNAQALNTLVKQLSSNFGAISSVLNDILSRLDKVEAEVQIDRLITGRLQSLQTYVTQQLIRAAEIRASANLAATKMSECVLGQSKRVDFCGKGYHLMSFPQSAPHGVVFLHVTYVCAQEKNFTTAPAICHDGKAHFPREGVFVSNGTHWFVTQRNFYEPQIITTDNTFVSGNCDVVIGIVNNTVYDPLQPELDSFKEELDKYFKNHTSPDVDLGDISGINASVVNIQKEIDRLNEVAKNLNESLIDLQELGKYEQYIK

SEQ ID NO: 2115 - protein, 1211 aa, Artificial Sequence
  SARS-CoV-2/Finland/FIN-313/2020__EPI_ISL_414641 spike protein (1-1211)(P715C_P1069C)
MFVFLVLLPLVSSQCVNLTTRTQLPPAYTNSFTRGVYYPDKVFRSSVLHSTQDLFLPFFSNVTWFHAIHVSGTNGTKRFDNPVLPFNDGVYFASTEKSNIIRGWIFGTTLDSKTQSLLIVNNATNVVIKVCEFQFCNDPFLGVYYHKNNKSWMESEFRVYSSANNCTFEYVSQPFLMDLEGKQGNFKNLREFVFKNIDGYFKIYSKHTPINLVRDLPQGFSALEPLVDLPIGINITRFKTLLALHRSYLTPGDSSSGWTAGAAAYYVGYLQPRTFLLKYNENGTITDAVDCALDPLSETKCTLKSFTVEKGIYQTSNFRVQPTESIVRFPNITNLCPFGEVFNATRFASVYAWNRKRISNCVADYSVLYNSASFSTFKCYGVSPTKLNDLCFTNVYADSFVIRGDEVRQIAPGQTGKIADYNYKLPDDFTGCVIAWNSNNLDSKVGGNYNYLYRLFRKSNLKPFERDISTEIYQAGSTPCNGVEGFNCYFPLQSYGFQPTNGVGYQPYRVVVLSFELLHAPATVCGPKKSTNLVKNKCVNFNFNGLTGTGVLTESNKKFLPFQQFGRDIADTTDAVRDPQTLEILDITPCSFGGVSVITPGTNTSNQVAVLYQGVNCTEVPVAIHADQLTPTWRVYSTGSNVFQTRAGCLIGAEHVNNSYECDIPIGAGICASYQTQTNSPRRARSVASQSIIAYTMSLGAENSVAYSNNSIAICTNFTISVTTEILPVSMTKTSVDCTMYICGDSTECSNLLLQYGSFCTQLNRALTGIAVEQDKNTQEVFAQVKQIYKTPPIKDFGGFNFSQILPDPSKPSKRSFIEDLLFNKVTLADAGFIKQYGDCLGDIAARDLICAQKFNGLTVLPPLLTDEMIAQYTSALLAGTITSGWTFGAGAALQIPFAMQMAYRFNGIGVTQNVLYENQKLIANQFNSAIGKIQDSLSSTASALGKLQDVVNQNAQALNTLVKQLSSNFGAISSVLNDILSRLDKVEAEVQIDRLITGRLQSLQTYVTQQLIRAAEIRASANLAATKMSECVLGQSKRVDFCGKGYHLMSFPQSAPHGVVFLHVTYVCAQEKNFTTAPAICHDGKAHFPREGVFVSNGTHWFVTQRNFYEPQIITTDNTFVSGNCDVVIGIVNNTVYDPLQPELDSFKEELDKYFKNHTSPDVDLGDISGINASVVNIQKEIDRLNEVAKNLNESLIDLQELGKYEQYIK

SEQ ID NO: 2116 - protein, 1211 aa, Artificial Sequence
  SARS-CoV-2/Netherlands/ZuidHolland_2/2020__EPI_ISL_414556 spike protein (1-1211)(P715C_P1069C)
MFVFLVLLPLVSSQCVNLTTRTQLPPAYTNSFTRGVYYPDKVFRSSVLHSTQDLFLPFFSNVTWFHAIHVSGTNGTKRFDNPVLPFNDGVYFASTEKSNIIRGWIFGTTLDSKTQSLLIVNNATNVVIKVCEFQFCNDPFLGVYYHKNNKSWMESEFRVYSSANNCTFEYVSQPFLMDLEGKQGNFKNLREFVFKNIDGYFKIYSKHTPINLVRDLPQGFSALEPLVDLPIGINITRFQTLLALHRSYLTPGDSSSGWTAGAAAYYVGYLQPRTFLLKYNENGTITDAVDCALDPLSETKCTLKSFTVEKGIYQTSNFRVQPTESIVRFPNITNLCPFGEVFNATRFASVYAWNRKRISNCVADYSVLYNSASFSTFKCYGVSPTKLNDLCFTNVYADSFVIRGDEVRQIAPGQTGKIADYNYKLPDDFTGCVIAWNSNNLDSKVGGNYNYLYRLFRKSNLKPFERDISTEIYQAGSTPCNGVEGFNCYFPLQSYGFQPTNGVGYQPYRVVVLSFELLHAPATVCGPKKSTNLVKNKCVNFNFNGLTGTGVLTESNKKFLPFQQFGRDIADTTDAVRDPQTLEILDITPCSFGGVSVITPGTNTSNQVAVLYQGVNCTEVPVAIHADQLTPTWRVYSTGSNVFQTRAGCLIGAEHVNNSYECDIPIGAGICASYQTQTNSPRRARSVASQSIIAYTMSLGAENSVAYSNNSIAICTNFTISVTTEILPVSMTKTSVDCTMYICGDSTECSNLLLQYGSFCTQLNRALTGIALEQDKNTQEVFAQVKQIYKTPPIKDFGGFNFSQILPDPSKPSKRSFIEDLLFNKVTLADAGFIKQYGDCLGDIAARDLICAQKFNGLTVLPPLLTDEMIAQYTSALLAGTITSGWTFGAGAALQIPFAMQMAYRFNGIGVTQNVLYENQKLIANQFNSAIGKIQDSLSSTASALGKLQDVVNQNAQALNTLVKQLSSNFGAISSVLNDILSRLDKVEAEVQIDRLITGRLQSLQTYVTQQLIRAAEIRASANLAATKMSECVLGQSKRVDFCGKGYHLMSFPQSAPHGVVFLHVTYVCAQEKNFTTAPAICHDGKAHFPREGVFVSNGTHWFVTQRNFYEPQIITTDNTFVSGNCDVVIGIVNNTVYDPLQPELDSFKEELDKYFKNHTSPDVDLGDISGINASVVNIQKEIDRLNEVAKNLNESLIDLQELGKYEQYIK

SEQ ID NO: 2117 - protein, 1211 aa, Artificial Sequence
  SARS-CoV-2/USA/WA-UW31/2020__EPI_ISL_414618 spike protein (1-1211)(P715C_P1069C)
MFVFLVLLPLVSSQCVNLTTRTQLPPAYTNSFTRGVYYPDKVFRSSVLHSTQDLFLPFFSNVTWFHAIHVSGTNGTKRFDNPVLPFNDGVYFASTEKSNIIRGWIFGTTLDSKTQSLLIVNNATNVVIKVCEFQFCNDPFLGVYYHKNNKSWMESEFRVYSSANNCTFEYVSQPFLMDLEGKQGNFKNLREFVFKNIDGYFKIYSKHTPINLVRDLPQGFSALEPLVDLPIGINITRFQTLLALHRSYLTPGDSSSGWTAGAAAYYVGYLQPRTFLLKYNENGTITDAVDCALDPLSETKCTLKSFTVEKGIYQTSNFRVQPTESIVRFPNITNLCPFGEVFNATRFASVYAWNRKRISNCVADYSVLYNSASFSTFKCYGVSPTKLNDLCFTNVYADSFVIRGDEVRQIAPGQTGKIADYNYKLPDDFTGCVIAWNSNNLDSKVGGNYNYLYRLFRKSNLKPFERDISTEIYQAGSTPCNGAEGFNCYFPLQSYGFQPTNGVGYQPYRVVVLSFELLHAPATVCGPKKSTNLVKNKCVNFNFNGLTGTGVLTESNKKFLPFQQFGRDIADTTDAVRDPQTLEILDITPCSFGGVSVITPGTNTSNQVAVLYQDVNCTEVPVAIHADQLTPTWRVYSTGSNVFQTRAGCLIGAEHVNNSYECDIPIGAGICASYQTQTNSPRRARSVASQSIIAYTMSLGAENSVAYSNNSIAICTNFTISVTTEILPVSMTKTSVDCTMYICGDSTECSNLLLQYGSFCTQLNRALTGIAVEQDKNTQEVFAQVKQIYKTPPIKDFGGFNFSQILPDPSKPSKRSFIEDLLFNKVTLADAGFIKQYGDCLGDIAARDLICAQKFNGLTVLPPLLTDEMIAQYTSALLAGTITSGWTFGAGAALQIPFAMQMAYRFNGIGVTQNVLYENQKLIANQFNSAIGKIQDSLSSTASALGKLQDVVNQNAQALNTLVKQLSSNFGAISSVLNDILSRLDKVEAEVQIDRLITGRLQSLQTYVTQQLIRAAEIRASANLAATKMSECVLGQSKRVDFCGKGYHLMSFPQSAPHGVVFLHVTYVCAQEKNFTTAPAICHDGKAHFPREGVFVSNGTHWFVTQRNFYEPQIITTDNTFVSGNCDVVIGIVNNTVYDPLQPELDSFKEELDKYFKNHTSPDVDLGDISGINASVVNIQKEIDRLNEVAKNLNESLIDLQELGKYEQYIK

SEQ ID NO: 2118 - protein, 1211 aa, Artificial Sequence
  SARS-CoV-2/South Korea/SNU01/2020__EPI_ISL_411929 spike protein (1-1211)(P715C_P1069C)
MFVFLVLLPLVSSQCVNLTTRTQLPPAYTNSFTRGVYYPDKVFRSSVLHSTQDLFLPFFSNVTWFHAIHVSGTNGTKRFDNPVLPFNDGVYFASTEKSNIIRGWIFGTTLDSKTQSLLIVNNATNVVIKVCEFQFCNDPFLGVYYHKNNKSWMESEFRVYSSANNCTFEYVSQPFLMDLEGKQGNFKNLREFVFKNIDGYFKIYSKHTPINLVRDLPQGFWALEPLVDLPIGINITRFQTLLALHRSYLTPGDSSSGWTAGAAAYYVGYLQPRTFLLKYNENGTITDAVDCALDPLSETKCTLKSFTVEKGIYQTSNFRVQPTESIVRFPNITNLCPFGEVFNATRFASVYAWNRKRISNCVADYSVLYNSASFSTFKCYGVSPTKLNDLCFTNVYADSFVIRGDEVRQIAPGQTGKIADYNYKLPDDFTGCVIAWNSNNLDSKVGGNYNYLYRLFRKSNLKPFERDISTEIYQAGSTPCNGVEGFNCYFPLQSYGFQPTNGVGYQPYRVVVLSFELLHAPATVCGPKKSTNLVKNKCVNFNFNGLTGTGVLTESNKKFLPFQQFGRDIADTTDAVRDPQTLEILDITPCSFGGVSVITPGTNTSNQVAVLYQDVNCTEVPVAIHADQLTPTWRVYSTGSNVFQTRAGCLIGAEHVNNSYECDIPIGAGICASYQTQTNSPRRARSVASQSIIAYTMSLGAENSVAYSNNSIAICTNFTISVTTEILPVSMTKTSVDCTMYICGDSTECSNLLLQYGSFCTQLNRALTGIAVEQDKNTQEVFAQVKQIYKTPPIKDFGGFNFSQILPDPSKPSKRSFIEDLLFNKVTLADAGFIKQYGDCLGDIAARDLICAQKFNGLTVLPPLLTDEMIAQYTSALLAGTITSGWTFGAGAALQIPFAMQMAYRFNGIGVTQNVLYENQKLIANQFNSAIGKIQDSLSSTASALGKLQDVVNQNAQALNTLVKQLSSNFGAISSVLNDILSRLDKVEAEVQIDRLITGRLQSLQTYVTQQLIRAAEIRASANLAATKMSECVLGQSKRVDFCGKGYHLMSFPQSAPHGVVFLHVTYVCAQEKNFTTAPAICHDGKAHFPREGVFVSNGTHWFVTQRNFYEPQIITTDNTFVSGNCDVVIGIVNNTVYDPLQPELDSFKEELDKYFKNHTSPDVDLGDISGINASVVNIQKEIDRLNEVAKNLNESLIDLQELGKYEQYIK

SEQ ID NO: 2119 - protein, 1211 aa, Artificial Sequence
  SARS-CoV-2/China/WF0004/2020__EPI_ISL_413694 spike protein (1-1211)(P715C_P1069C)
MFVFLVLLPLVSSQCVNLTTRTQLPPAYTNSFTRGVYYPDKVFRSSVLHSTQDLFLPFFSNVTWFHAIHVSGTNGTKRFDNPVLPFNDGVYFASTEKSNIIRGWIFGTTLDSKTQSLLIVNNATNVVIKVCEFQFCNDPFLGVYYHKNNKSWTESEFRVYSSANNCTFEYVSQPFLMDLEGKQGNFKNLREFVFKNIDGYFKIYSKHTPINLVRDLPQGFSALEPLVDLPIGINITRFQTLLALHRSYLTPGDSSSGWTAGAAAYYVGYLQPRTFLLKYNENGTITDAVDCALDPLSETKCTLKSFTVEKGIYQTSNFRVQPTESIVRFPNITNLCPFGEVFNATRFASVYAWNRKRISNCVADYSVLYNSASFSTFKCYGVSPTKLNDLCFTNVYADSFVIRGDEVRQIAPGQTGKIADYNYKLPDDFTGCVIAWNSNNLDSKVGGNYNYLYRLFRKSNLKPFERDISTEIYQAGSTPCNGVEGFNCYFPLQSYGFQPTNGVGYQPYRVVVLSFELLHAPATVCGPKKSTNLVKNKCVNFNFNGLTGTGVLTESNKKFLPFQQFGRDIADTTDAVRDPQTLEILDITPCSFGGVSVITPGTNTSNQVAVLYQDVNCTEVPVAIHADQLTPTWRVYSTGSNVFQTRAGCLIGAEHVNNSYECDIPIGAGICASYQTQTNSPRRARSVASQSIIAYTMSLGAENSVAYSNNSIAICTNFTISVTTEILPVSMTKTSVDCTMYICGDSTECSNLLLQYGSFCTQLNRALTGIAVEQDKNTQEVFAQVKQIYKTPPIKDFGGFNFSQILPDPSKPSKRSFIEDLLFNKVTLADAGFIKQYGDCLGDIAARDLICAQKFNGLTVLPPLLTDEMIAQYTSALLAGTITSGWTFGAGAALQIPFAMQMAYRFNGIGVTQNVLYENQKLIANQFNSAIGKIQDSLSSTASALGKLQDVVNQNAQALNTLVKQLSSNFGAISSVLNDILSRLDKVEAEVQIDRLITGRLQSLQTYVTQQLIRAAEIRASANLAATKMSECVLGQSKRFDFCGKGYHLMSFPQSAPHGVVFLHVTYVCAQEKNFTTAPAICHDGKAHFPREGVFVSNGTHWFVTQRNFYEPQIITTDNTFVSGNCDVVIGIVNNTVYDPLQPELDSFKEELDKYFKNHTSPDVDLGDISGINASVVNIQKEIDRLNEVAKNLNESLIDLQELGKYEQYIK

SEQ ID NO: 2120 - protein, 1211 aa, Artificial Sequence
  SARS-CoV-2/China/WF0028/2020__EPI_ISL_413791 spike protein (1-1211)(P715C_P1069C)
MFVFLVLLPLVSSQCVNLTTRTQLPPAYTNSFTRGVYYPDKVFRSSVLHSTQDLFLPFFSNVTWFHAIHVSGTNGTKRFDNPVLPFNDGVYFASTEKSNIIRGWIFGTTLDSKTQSLLIVNNATNVVIKVCEFQFCNDPFLGVYYHKNNKSWMESEFRVYSSANNCTFEYVSQPFLMDLEGKQGNFKNLREFVFKNIDGYFKIYSKHTPINLVRDLPQGFSALEPLVDLPIGINITRFQTLLALHRSYLTPGDSSSGWTAGAAAYYVGYLQPRTFLLKYNENGTITDAVDCALDPLSETKCTLKSFTVEKGIYQTSNFRVQPTESIVRFPNITNLCPFGEVFNATRFASVYAWNRKRISNCVADYSVLYNSASFSTFKCYGVSPTKLNDLCFTNVYADSFVIRGDEVRQIAPGQTGKIADYNYKLPDDFTGCVIAWNSNNLDSKVGGNYNYLYRLFRKSNLKPFERDISTEIYQAGSTPCNGVEGFNCYFPLQSYGFQPTNGVGYQPYRVVVLSFELLHAPATVCGPKKSTNLVKNKCVNFNFNGLTGTGVLTESNKKFLPFQQFGRDIADTTDAVRDPQTLEILDITPCSFGGVSVITPGTNTSNQVAVLYQDVNCTEVPVAIHADQLTPTWRVYSTGSNVFQTRAGCLIGAEHVNNSYECDIPIGAGICASYQTQTNSPRRARSVASQSIIAYTMSLGAENSVAYSNNSIAICTNFTISVTTEILPVSMTKTSVDCTMYICGDSTECSNLLLQYGSFCTQLNRALTGIAVEQDKNTQEVFAQVKQIYKTPPIKDFGGFNFSQILPDPSKPSKRSFIEDLLFNKVTLADAGFIKQYGDCLGDIAARDLICAQKFNGLTVLPPLLTDEMIAQYTSALLAGTITSGWTFGAGAALQIPFAMQMAYRFNGIGVTQNVLYENQKLIANQFNSAIGKIQDSLSSTASALGKLQDVVNQNAQALNTLVKQLSSNFGAISSVLNDILSRLDKVEAEVQIDRLITGRLQSLQTYVTQQLIRAAEIRASANLAATKMSECVLGQSKRVDFCGKGYHLMSFPQSAPHGVVFLHVTYVCAQEKNFTTAPAICHDGKAHFPREGVFVSNGTHWFVTQRNFYEPQIITTDNTFVSGNCDVVIGIVNNTVYDPLQPELESFKEELDKYFKNHTSPDVDLGDISGINASVVNIQKEIDRLNEVAKNLNESLIDLQELGKYEQYIK

SEQ ID NO: 2121 - protein, 1211 aa, Artificial Sequence
  SARS-CoV-2/2019-nCoV/USA-CruiseA-18/2020__MT159716.1 spike protein (1-1211)(P715C_P1069C)
MFVFLVLLPLVSSQCVNLTTRTQLPPAYTNSFTRGVYYPDKVFRSSVLHSTQDLFLPFFSNVTWFHAIHVSGTNGTKRFDNPVLPFNDGVYFASTEKSNIIRGWIFGTTLDSKTQSLLIVNNATNVVIKVCEFQFCNDPFLGVYYHKNNKSWMESELRVYSSANNCTFEYVSQPFLMDLEGKQGNFKNLREFVFKNIDGYFKIYSKHTPINLVRDLPQGFSALEPLVDLPIGINITRFQTLLALHRSYLTPGDSSSGWTAGAAAYYVGYLQPRTFLLKYNENGTITDAVDCALDPLSETKCTLKSFTVEKGIYQTSNFRVQPTESIVRFPNITNLCPFGEVFNATRFASVYAWNRKRISNCVADYSVLYNSASFSTFKCYGVSPTKLNDLCFTNVYADSFVIRGDEVRQIAPGQTGKIADYNYKLPDDFTGCVIAWNSNNLDSKVGGNYNYLYRLFRKSNLKPFERDISTEIYQAGSTPCNGVEGFNCYFPLQSYGFQPTNGVGYQPYRVVVLSFELLHAPATVCGPKKSTNLVKNKCVNFNFNGLTGTGVLTESNKKFLPFQQFGRDIADTTDAVRDPQTLEILDITPCSFGGVSVITPGTNTSNQVAVLYQDVNCTEVPVAIHADQLTPTWRVYSTGSNVFQTRAGCLIGAEHVNNSYECDIPIGAGICASYQTQTNSPRRARSVASQSIIAYTMSLGAENSVAYSNNSIAICTNFTISVTTEILPVSMTKTSVDCTMYICGDSTECSNLLLQYGSFCTQLNRALTGIAVEQDKNTQEVFAQVKQIYKTPPIKDFGGFNFSQILPDPSKPSKRSFIEDLLFNKVTLADAGFIKQYGDCLGDIAARDLICAQKFNGLTVLPPLLTDEMIAQYTSALLAGTITSGWTFGAGAALQIPFAMQMAYRFNGIGVTQNVLYENQKLIANQFNSAIGKIQDSLSSTASALGKLQDVVNQNAQALNTLVKQLSSNFGAISSVLNDILSRLDKVEAEVQIDRLITGRLQSLQTYVTQQLIRAAEIRASANLAATKMSECVLGQSKRVDFCGKGYHLMSFPQSAPHGVVFLHVTYVCAQEKNFTTAPAICHDGKAHFPREGVFVSNGTHWFVTQRNFYEPQIITTDNTFVSGNCDVVIGIVNNTVYDPLQPELDSFKEELDKYFKNHTSPDVDLGDISGINASVVNIQKEIDRLNEVAKNLNESLIDLQELGKYEQYIK

SEQ ID NO: 2122 - protein, 1211 aa, Artificial Sequence
  SARS-CoV-2/SARS-CoV-2/Yunnan-01/human/2020/CHN__MT049951.1 spike protein (1-1211)(P715C_P1069C)
MFVFLVLLPLVSSQCVNLTTRTQLPPANTNSFTRGVYYPDKVFRSSVLHSTQDLFLPFFSNVTWFHAIHVSGTNGTKRFDNPVLPFNDGVYFASTEKSNIIRGWIFGTTLDSKTQSLLIVNNATNVVIKVCEFQFCNDPFLGVYYHKNNKSWMESEFRVYSSANNCTFEYVSQPFLMDLEGKQGNFKNLREFVFKNIDGYFKIYSKHTPINLVRDLPQGFSALEPLVDLPIGINITRFQTLLALHRSYLTPGDSSSGWTAGAAAYYVGYLQPRTFLLKYNENGTITDAVDCALDPLSETKCTLKSFTVEKGIYQTSNFRVQPTESIVRFPNITNLCPFGEVFNATRFASVYAWNRKRISNCVADYSVLYNSASFSTFKCYGVSPTKLNDLCFTNVYADSFVIRGDEVRQIAPGQTGKIADYNYKLPDDFTGCVIAWNSNNLDSKVGGNYNYLYRLFRKSNLKPFERDISTEIYQAGSTPCNGVEGFNCYFPLQSYGFQPTNGVGYQPYRVVVLSFELLHAPATVCGPKKSTNLVKNKCVNFNFNGLTGTGVLTESNKKFLPFQQFGRDIADTTDAVRDPQTLEILDITPCSFGGVSVITPGTNTSNQVAVLYQDVNCTEVPVAIHADQLTPTWRVYSTGSNVFQTRAGCLIGAEHVNNSYECDIPIGAGICASYQTQTNSPRRARSVASQSIIAYTMSLGAENSVAYSNNSIAICTNFTISVTTEILPVSMTKTSVDCTMYICGDSTECSNLLLQYGSFCTQLNRALTGIAVEQDKNTQEVFAQVKQIYKTPPIKDFGGFNFSQILPDPSKPSKRSFIEDLLFNKVTLADAGFIKQYGDCLGDIAARDLICAQKFNGLTVLPPLLTDEMIAQYTSALLAGTITSGWTFGAGAALQIPFAMQMAYRFNGIGVTQNVLYENQKLIANQFNSAIGKIQDSLSSTASALGKLQDVVNQNAQALNTLVKQLSSNFGAISSVLNDILSRLDKVEAEVQIDRLITGRLQSLQTYVTQQLIRAAEIRASANLAATKMSECVLGQSKRVDFCGKGYHLMSFPQSAPHGVVFLHVTYVCAQEKNFTTAPAICHDGKAHFPREGVFVSNGTHWFVTQRNFYEPQIITTDNTFVSGNCDVVIGIVNNTVYDPLQPELDSFKEELDKYFKNHTSPDVDLGDISGINASVVNIQKEIDRLNEVAKNLNESLIDLQELGKYEQYIK

SEQ ID NO: 2123 - protein, 1211 aa, Artificial Sequence
  SARS-CoV-2/USA/WA-UW292/2020__EPI_ISL_418077 spike protein (1-1211)(P715C_P1069C)
MFVFLVLLPLVSSQCVNLTTRTQLPPAYTNSFTRGVYYPDKVFRSSVLHSTQDLFLPFFSNVTWFHAIHVSGTNGTKRFDNPVLPFNDGVYFASTEKSNIIRGWIFGTTLDSKTQSLLIVNNATNVVIKVCEFQFCNDPFLGVYYHKNNKSWMESEFRVYSSANNCTFEYVSQPFLMDLEGKQGNFKNLREFVFKNIDGYFKIYSKHTPINLVRDLPQGFSALEPLVDLPIGINITRFQTLLALHRSYLTPGDSSSGWTAGAAAYYVGYLQPRTFLLKYNENGTITDAVDCALDPLSETKCTLKSFTVEKGIYQTSNFRVQPTESIVRFPNITNLCPFGEVFNATRFASVYAWNRKRISNCVADYSVLYNSASFSTFKCYGVSPTKLNDLCFTNVYADSFVIRGDEVRQIAPGQTGKIADYNYKLPDDFTGCVIAWNSNNLDSKVGGNYNYLYRLFRKSNLKPFERDISTEIYQASSTPCNGVEGFNCYFPLQSYGFQPTNGVGYQPYRVVVLSFELLHAPATVCGPKKSTNLVKNKCVNFNFNGLTGTGVLTESNKKFLPFQQFGRDIADTTDAVRDPQTLEILDITPCSFGGVSVITPGTNTSNQVAVLYQDVNCTEVPVAIHADQLTPTWRVYSTGSNVFQTRAGCLIGAEHVNNSYECDIPIGAGICASYQTQTNSPRRARSVASQSIIAYTMSLGAENSVAYSNNSIAICTNFTISVTTEILPVSMTKTSVDCTMYICGDSTECSNLLLQYGSFCTQLNRALTGIAVEQDKNTQEVFAQVKQIYKTPPIKDFGGFNFSQILPDPSKPSKRSFIEDLLFNKVTLADAGFIKQYGDCLGDIAARDLICAQKFNGLTVLPPLLTDEMIAQYTSALLAGTITSGWTFGAGAALQIPFAMQMAYRFNGIGVTQNVLYENQKLIANQFNSAIGKIQDSLSSTASALGKLQDVVNQNAQALNTLVKQLSSNFGAISSVLNDILSRLDKVEAEVQIDRLITGRLQSLQTYVTQQLIRAAEIRASANLAATKMSECVLGQSKRVDFCGKGYHLMSFPQSAPHGVVFLHVTYVCAQEKNFTTAPAICHDGKAHFPREGVFVSNGTHWFVTQRNFYEPQIITTDNTFVSGNCDVVIGIVNNTVYDPLQPELDSFKEELDKYFKNHTSPDVDLGDISGINASVVNIQKEIDRLNEVAKNLNESLIDLQELGKYEQYIK

SEQ ID NO: 2124 - protein, 1211 aa, Artificial Sequence
  SARS-CoV-2/Iceland/192/2020__EPI_ISL_417819 spike protein (1-1211)(P715C_P1069C)
MFVFFVLLPLVSSQCVNLTTRTQLPPAYTNSFTRGVYYPDKVFRSSVLHSTQDLFLPFFSNVTWFHAIHVSGTNGTKRFDNPVLPFNDGVYFASTEKSNIIRGWIFGTTLDSKTQSLLIVNNATNVVIKVCEFQFCNDPFLGVYYHKNNKSWMESEFRVYSSANNCTFEYVSQPFLMDLEGKQGNFKNLREFVFKNIDGYFKIYSKHTPINLVRDLPQGFSALEPLVDLPIGINITRFQTLLALHRSYLTPGDSSSGWTAGAAAYYVGYLQPRTFLLKYNENGTITDAVDCALDPLSETKCTLKSFTVEKGIYQTSNFRVQPTESIVRFPNITNLCPFGEVFNATRFASVYAWNRKRISNCVADYSVLYNSASFSTFKCYGVSPTKLNDLCFTNVYADSFVIRGDEVRQIAPGQTGKIADYNYKLPDDFTGCVIAWNSNNLDSKVGGNYNYLYRLFRKSNLKPFERDISTEIYQAGSTPCNGVEGFNCYFPLQSYGFQPTNGVGYQPYRVVVLSFELLHAPATVCGPKKSTNLVKNKCVNFNFNGLTGTGVLTESNKKFLPFQQFGRDIADTTDAVRDPQTLEILDITPCSFGGVSVITPGTNTSNQVAVLYQGVNCTEVPVAIHADQLTPTWRVYSTGSNVFQTRAGCLIGAEHVNNSYECDIPIGAGICASYQTQTNSPRRARSVASQSIIAYTMSLGAENSVAYSNNSIAICTNFTISVTTEILPVSMTKTSVDCTMYICGDSTECSNLLLQYGSFCTQLNRALTGIAVEQDKNTQEVFAQVKQIYKTPPIKDFGGFNFSQILPDPSKPSKRSFIEDLLFNKVTLADAGFIKQYGDCLGDIAARDLICAQKFNGLTVLPPLLTDEMIAQYTSALLAGTITSGWTFGAGAALQIPFAMQMAYRFNGIGVTQNVLYENQKLIANQFNSAIGKIQDSLSSTASALGKLQDVVNQNAQALNTLVKQLSSNFGAISSVLNDILSRLDKVEAEVQIDRLITGRLQSLQTYVTQQLIRAAEIRASANLAATKMSECVLGQSKRVDFCGKGYHLMSFPQSAPHGVVFLHVTYVCAQEKNFTTAPAICHDGKAHFPREGVFVSNGTHWFVTQRNFYEPQIITTDNTFVSGNCDVVIGIVNNTVYDPLQPELDSFKEELDKYFKNHTSPDVDLGDISGINASVVNIQKEIDRLNEVAKNLNESLIDLQELGKYEQYIK

SEQ ID NO: 2125 - protein, 1211 aa, Artificial Sequence
  SARS-CoV-2/Belgium/ULG-6939/2020__EPI_ISL_417020 spike protein (1-1211)(P715C_P1069C)
MFVFLVLLPLVSSQCVNLTTRTQLPPAYTNSFTRGVYYPDKVFRSSVLHSTQDLFLPFFSNVTWFHAIHVSGTNGTKRFDNPVLPFNDGVYFASTEKSNIIRGWIFGTTLDSKTQSLLIVNNATNVVIKVCEFQFCNDPFLGVYYHKNNKSWMESEFRVYSSANNCTFEYVSQPFLMDLEGKQGNFKNLREFVFKNIDGYFKIYSKHTPINLVRDLPQGFSALEPLVDLPIGINITRFQTLLALHRSYLTPGDSSSGWTAGAAAYYVGYLQPRTFLLKYNENGTITDAVDCALDPLSETKCTLKSFTVEKGIYQTSNFRVQPTESIVRFPNITNLCPFGEVFNATRFASVYAWNRKRISNCVADYSVLYNSASFSTFKCYGVSPTKLNDLCFTNVYADSFVIRGDEVRQIAPGQTGKIADYNYKLPDDFTGCVIAWNSNNLDSKVGGNYNYLYRLFRKSNLKPFERDISTEIYQAGSTPCNGVEGFNCYFPLQSYGFQPTNGVGYQPYRVVVLSFELLHAPATVCGPKKSTNLVKNKCVNFNFNGLTGTGVLTESNKKFLPFQQFGRDIADTTDAVRDPQTLEILDITPCSFGGVSVITPGTNTSNQVAVLYQGVNCTEVPVAIHADQLTPTWRVYSTGSNVFQTRAGCLIGAEHVNNSYECDIPIGAGICASYQTQTNSPRRARSVASQSIIAYTMSLGAENSVVYSNNSIAICTNFTISVTTEILPVSMTKTSVDCTMYICGDSTECSNLLLQYGSFCTQLNRALTGIAVEQDKNTQEVFAQVKQIYKTPPIKDFGGFNFSQILPDPSKPSKRSFIEDLLFNKVTLADAGFIKQYGDCLGDIAARDLICAQKFNGLTVLPPLLTDEMIAQYTSALLAGTITSGWTFGAGAALQIPFAMQMAYRFNGIGVTQNVLYENQKLIANQFNSAIGKIQDSLSSTASALGKLQDVVNQNAQALNTLVKQLSSNFGAISSVLNDILSRLDKVEAEVQIDRLITGRLQSLQTYVTQQLIRAAEIRASANLAATKMSECVLGQSKRVDFCGKGYHLMSFPQSAPHGVVFLHVTYVCAQEKNFTTAPAICHDGKAHFPREGVFVSNGTHWFVTQRNFYEPQIITTDNTFVSGNCDVVIGIVNNTVYDPLQPELDSFKEELDKYFKNHTSPDVDLGDISGINASVVNIQKEIDRLNEVAKNLNESLIDLQELGKYEQYIK

SEQ ID NO: 2126 - protein, 1211 aa, Artificial Sequence
  SARS-CoV-2/France/HF2496/2020__EPI_ISL_418231 spike protein (1-1211)(P715C_P1069C)
MFVFLVLLPLVSSQCVNLTTRTQLPPAYTNSFTRGVYYPDKVFRSSVLHSTQDLFLPFFSNVTWFHAIHVSGTNGTKRFDNPVLPFNDGVYFASTEKSNIIRGWIFGTTLDSKTQSLLIVNNATNVVIKVCEFQFCNDPFLGVYYHKNNKSWMESEFRVYSSANNCTFEYVSQPFLMDLEGKQGNFKNLREFVFKNIDGYFKIYSKHTPINLVRDLPQGFSALEPLVDLPIGINITRFQTLLALHRSYLTPGDSSSGWTAGAAAYYVGYLQPRTFLLKYNENGTITDAVDCALDPLSETKCTLKSFTVEKGIYQTSNFRVQPTESIVRFPNITNLCPFGEVFNATRFASVYAWNRKRISNCVADYSVLYNSASFSTFKCYGVSPTKLNDLCFTNVYADSFVIRGDEVRQIAPGQTGKIADYNYKLPDDFTGCVIAWNSNNLDSKVGGNYNYLYRLFRKSNLKPFERDISTEIYQAGSTPCNGVEGFNCYFPLQSYGFQPTNGVGYQPYRVVVLSFELLHAPATVCGPKKSTNLVKNKCVNFNFNGLTGTGVLTESNKKFLPFQQFGRDIADTTDAVRDPQTLEILDITPCSFGGVSVITPGTNTSNQVAVLYQGVNCTEVPVAIHADQLTPTWRVYSTGSNVFQTRAGCLIGAEHVNNSYECDIPIGAGICASYQTQTNSPRRARSVASQSIIAYTMSLGAENSVAYSNNSIAICTNFTISVTTEILPVSMTKTSVDCTMYICGDSTECSNLLLQYGSFCTQLNRALTGIAVEQDKNTQEVFAQVKQIYKTPPIKDFGGFNFSQILPDPSKPSKRSFIEDLLFNKVTLADAGFIKQYGDCLGDIVARDLICAQKFNGLTVLPPLLTDEMIAQYTSALLAGTITSGWTFGAGAALQIPFAMQMAYRFNGIGVTQNVLYENQKLIANQFNSAIGKIQDSLSSTASALGKLQDVVNQNAQALNTLVKQLSSNFGAISSVLNDILSRLDKVEAEVQIDRLITGRLQSLQTYVTQQLIRAAEIRASANLAATKMSECVLGQSKRVDFCGKGYHLMSFPQSAPHGVVFLHVTYVCAQEKNFTTAPAICHDGKAHFPREGVFVSNGTHWFVTQRNFYEPQIITTDNTFVSGNCDVVIGIVNNTVYDPLQPELDSFKEELDKYFKNHTSPDVDLGDISGINASVVNIQKEIDRLNEVAKNLNESLIDLQELGKYEQYIK

SEQ ID NO: 2127 - protein, 1211 aa, Artificial Sequence
  SARS-CoV-2/USA/WA-UW291/2020__EPI_ISL_418076 spike protein (1-1211)(P715C_P1069C)
MFVFLVLLPLVSSQCVNLTTRTQLPPAYTNSFTRGVYYPDKVFRSSVLHSTQDLFLPFFSNVTWFHAIHVSGTNGTKRFDNPVLPFNDGVYFASTEKSNIIRGWIFGTTLDSKTQSLLIVNNATNVVIKVCEFQFCNDPFLGVYYHKNNKSWMESEFRVYSSANNCTFEYVSQPFLMDLEGKQGNFKNLREFVFKNIDGYFKIYSKHTPINLVRDLPQGFSALEPLVDLPIGINITRFQTLLALHRSYLTPGDSSSGWTAGAAAYYVGYLQPRTFLLKYNENGTITDAVDCALDPLSETKCTLKSFTVEKGIYQTSNFRVQPTESIVRFPNITNLCPFGEVFNATRFASVYAWNRKRISNCVADYSVLYNSASFSTFKCYGVSPTKLNDLCFTNVYADSFVIRGDEVRQIAPGQTGKIADYNYKLPDDFTGCVIAWNSNNLDSKVGGNYNYLYRLFRKSNLKPFERDISTEIYQAGSTPCNGVEGFNCYFPLQSYGFQPTNGVGYQPYRVVVLSFELLHAPATVCGPKKSTNLVKNKCVNFNFNGLTGTGVLTESNKKFLPFQQFGRDIADTTDAVRDPQTLEILDITPCSFGGVSVITPGTNTSNQVAVLYQGVNCTEVPVAIHADQLTPTWRVYSTGSNVFQTRAGCLIGAEHVNNSYECDIPIGAGICASYQTQTNSPRRARSVASQSIIAYTMSLGAENSVAYSNNSIAICTNFTISVTTEILPVSMTKTSVDCTMYICGDSTECSNLLLQYGSFCTQLNRALTGIAVEQDKNTQEVFAQVKQIYKTPPIKDFGGFNFSQILPDPSKPSKRSFIEDLLFNKVTLADAGFIKQYGDCLGDIAARDLICAQKFNGLTVLPPLLTDEMIAQYTSALLAGTITSGWTFGAGAALQIPFAMQMAYRFNGIGVTQNVLYENQKLIANQFNSAIGKIQYSLSSTASALGKLQDVVNQNAQALNTLVKQLSSNFGAISSVLNDILSRLDKVEAEVQIDRLITGRLQSLQTYVTQQLIRAAEIRASANLAATKMSECVLGQSKRVDFCGKGYHLMSFPQSAPHGVVFLHVTYVCAQEKNFTTAPAICHDGKAHFPREGVFVSNGTHWFVTQRNFYEPQIITTDNTFVSGNCDVVIGIVNNTVYDPLQPELDSFKEELDKYFKNHTSPDVDLGDISGINASVVNIQKEIDRLNEVAKNLNESLIDLQELGKYEQYIK

SEQ ID NO: 2128 - protein, 1211 aa, Artificial Sequence; identical to SEQ ID NO: 2091
  SARS-CoV-2/Portugal/PT0034/2020__EPI_ISL_418019 spike protein (1-1211)(P715C_P1069C)

SEQ ID NO: 2129 - protein, 1211 aa, Artificial Sequence
  SARS-CoV-2/Iceland/202/2020__EPI_ISL_417750 spike protein (1-1211)(P715C_P1069C)
MFVFLVLLPLVSSQCVNLTTRTQLPPAYTNSFTRGVYYPDKVFRSSVLHSTQDLFLPFFSNVTWFHAIHVSGTNGTKRFDNPVLPFNDGVYFASTEKSNIIRGWIFGTTLDSKTQSLLIVNNATNVVIKVCEFQFCNDPFLGVYYHKNNKSWMESEFRVYSSANNCTFEYVSQPFLMDLEGKQGNFKNLREFVFKNIDGYFKIYSKHTPINLVRDLPQGFSALEPLVDLPIGINITRFQTLLALHRSYLTPGDSSSGWTAGAAAYYVGYLQPRTFLLKYNENGTITDAVDCALDPLSETKCTLKSFTVEKGIYQTSNFRVQPTESIVRFPNITNLCPFGEVFNATRFASVYAWNRKRISNCVADYSVLYNSASFSTFKCYGVSPTKLNDLCFTNVYADSFVIRGDEVRQIAPGQTGKIADYNYKLPDDFTGCVIAWNSNNLDSKVGGNYNYLYRLFRKSNLKPFERDISTEIYQAGSTPCNGVEGFNCYFPLQSYGFQPTNGVGYQPYRVVVLSFELLHAPATVCGPKKSTNLVKNKCVNFNFNGLTGTGVLTESNKKFLPFQQFGRDIADTTDAVRDPQTLEILDITPCSFGGVSVITPGTNTSNQVAVLYQDVNCTEVPVAIHADQLTPTWRVYSTGSNVFQTRAGCLIGAEHVNNSYECDIPIGAGICASYQTQTNSPRRARSVASQSIIAYTMSLGAENSVAYSNNSIAICTNFTISVTTEILPVSMTKTSVDCTMYICGDSTECSNLLLQYGSFCTQLNRALTGIAVEQDKNTQEVFAQVKQIYKTPPIKDFGGFNFSQILPDPSKPSKRSFIEDLLFNKVTLADAGFIKQYGDCLGDIAARDLICAQKFNGLTVLPPLLTDEMIAQYTSALLAGTITSGWTFGAGAALQIPFAMQMAYRFNGIGVTQNVLYENQKLIANQFNSAIGKIQDSLSSTASALGKLQDVVNQNAQALNTLVKQLSSNFGAISSVLNDILSRLDKVEAEVQIDRLITGRLQSLQTYVTQQLIRAAEIRASANLAATKMSECVLGQSKRVDFCGKGYHLMSFPQSAPHGVVFLHVTYVCAQEKNFTTAPAICHDGKAHFPREGVFVSNGTHWFVTQRNFYEPQIITTDNTFVSGNCDVVIGIVNNTVYDPLQPELDSFKEELDKYFKNHTSPDVDLGDIPGINASVVNIQKEIDRLNEVAKNLNESLIDLQELGKYEQYIK

SEQ ID NO: 2130 - protein, 1211 aa, Artificial Sequence
  SARS-CoV-2/USA/WA-UW261/2020__EPI_ISL_418046 spike protein (1-1211)(P715C_P1069C)
MFVFLVLLPLVSSQCVNLTTRTQLPPAYTNSFTRGVYYPDKVFRSSVLHSTQDLFLPFFSNVTWFHAIHVSGTNGTKRFDNPVLPFNDGVYFASTEKSNIIRGWIFGTTLDSKTQSLLIVNNATNVVIKVCEFQFCNDPFLGVYYHKNNKSWMESEFRVYSSANNCTFEYVSQPFLMDLEGKQGNFKNLREFVFKNIDGYFKIYSKHTPINLVRDLPQGFSALEPLVDLPIGINITRFQTLLALHRSYLTPGDSSSGWTAGAAAYYVGYLQPRTFLLKYNENGTITDAVDCALDPLSETKCTLKSFTVEKGIYQTSNFRVQPTESIVRFPNITNLCPFGEVFNATRFTSVYAWNRKRISNCVADYSVLYNSASFSTFKCYGVSPTKLNDLCFTNVYADSFVIRGDEVRQIAPGQTGKIADYNYKLPDDFTGCVIAWNSNNLDSKVGGNYNYLYRLFRKSNLKPFERDISTEIYQAGSTPCNGVEGFNCYFPLQSYGFQPTNGVGYQPYRVVVLSFELLHAPATVCGPKKSTNLVKNKCVNFNFNGLTGTGVLTESNKKFLPFQQFGRDIADTTDAVRDPQTLEILDITPCSFGGVSVITPGTNTSNQVAVLYQDVNCTEVPVAIHADQLTPTWRVYSTGSNVFQTRAGCLIGAEHVNNSYECDIPIGAGICASYQTQTNSPRRARSVASQSIIAYTMSLGAENSVAYSNNSIAICTNFTISVTTEILPVSMTKTSVDCTMYICGDSTECSNLLLQYGSFCTQLNRALTGIAVEQDKNTQEVFAQVKQIYKTPPIKDFGGFNFSQILPDPSKPSKRSFIEDLLFNKVTLADAGFIKQYGDCLGDIAARDLICAQKFNGLTVLPPLLTDEMIAQYTSALLAGTITSGWTFGAGAALQIPFAMQMAYRFNGIGVTQNVLYENQKLIANQFNSAIGKIQDSLSSTASALGKLQDVVNQNAQALNTLVKQLSSNFGAISSVLNDILSRLDKVEAEVQIDRLITGRLQSLQTYVTQQLIRAAEIRASANLAATKMSECVLGQSKRVDFCGKGYHLMSFPQSAPHGVVFLHVTYVCAQEKNFTTAPAICHDGKAHFPREGVFVSNGTHWFVTQRNFYEPQIITTDNTFVSGNCDVVIGIVNNTVYDPLQPELDSFKEELDKYFKNHTSPDVDLGDISGINASVVNIQKEIDRLNEVAKNLNESLIDLQELGKYEQYIK

SEQ ID NO: 2131 - protein, 1211 aa, Artificial Sequence
  SARS-CoV-2/Portugal/PT0035/2020__EPI_ISL_418020 spike protein (1-1211)(P715C_P1069C)
MFVFLVLLPLVSSQCVNLTTRTQLPPAYTNSFTRGVYYPDKVFRSSVLHSTQDLFLPFFSNVTWFHAIHVSGTNGTKRFDNPVLPFNDGVYFASTEKSNIIRGWIFGTTLDSKTQSLLIVNNATNVVIKVCEFQFCNDPFLGVYYHKNNKSWMESEFRVYSSANNCTFEYVSQPFLMDLEGKQGNFKNLREFVFKNIDGYFKIYSKHTPINLVRDLPQGFSALEPLVDLPIGINITRFQTLLALHRSYLTPGDSSSGWTAGAAAYYVGYLQPRTFLLKYNENGTITDAVDCALDPLSETKCTLKSFTVEKGIYQTSNFRVQPTESIVRFPNITNLCPFGEVFNATRFASVYAWNRKRISNCVADYSVLYNSASFSTFKCYGVSPTKLNDLCFTNVYADSFVIRGDEVRQIAPGQTGKIADYNYKLPDDFTGCVIAWNSNNLDSKVGGNYNYLYRLFRKSNLKPFERDISTEIYQAGSTPCNGVEGFNCYFPLQSYGFQPTNGVGYQPYRVVVLSFELLHAPATVCGPKKSTNLVKNKCVNFNFNGLTGTGVLTESNKKFLPFQQFGRDIADTTDAVRDPQTLEILDITPCSFGGVSVITPGTNTSNQVAVLYQDVNCTEVPVAIHADQLTPTWRVYSTGSNVFQTRAGCLIGAEHVNNSYECDIPIGAGICASYQTQTNSPRRARSVASQSIIAYTMSLGAENSVAYSNNSIAICTNFTISVTTEILPVSMTKTSVDCTMYICGDSTECSNLLLQYGSFCTQLNRALTGIAVEQDKNTQEVFAQVKQIYKTPPIKDFGGFNFSQILPDPSKPSKRSFIEDLLFNKVTLADAGFIKQYGDCLGDISARDLICAQKFNGLTVLPPLLTDEMIAQYTSALLAGTITSGWTFGAGAALQIPFAMQMAYRFNGIGVTQNVLYENQKLIANQFNSAIGKIQDSLSSTASALGKLQDVVNQNAQALNTLVKQLSSNFGAISSVLNDILSRLDKVEAEVQIDRLITGRLQSLQTYVTQQLIRAAEIRASANLAATKMSECVLGQSKRVDFCGKGYHLMSFPQSAPHGVVFLHVTYVCAQEKNFTTAPAICHDGKAHFPREGVFVSNGTHWFVTQRNFYEPQIITTDNTFVSGNCDVVIGIVNNTVYDPLQPELDSFKEELDKYFKNHTSPDVDLGDISGINASVVNIQKEIDRLNEVAKNLNESLIDLQELGKYEQYIK

SEQ ID NO: 2132 - protein, 1211 aa, Artificial Sequence
  SARS-CoV-2/USA/NY-NYUMC7/2020__EPI_ISL_418192 spike protein (1-1211)(P715C_P1069C)
MFVFLVLLPLVSSQCVNLTTRTQLPPAYTNSFTRGVYYPDKVFRSSVLHSTQDLFLPFFSNVTWFHAIHVSGTNGTKRFDNPVLPFNDGVYFASTEKSNIIRGWIFGTTLDSKTQSLLIVNNATNVVIKVCEFQFCNDPFLGVYHHKNNKSWMESEFRVYSSANNCTFEYVSQPFLMDLEGKQGNFKNLREFVFKNIDGYFKIYSKHTPINLVRDLPQGFSALEPLVDLPIGINITRFQTLLALHRSYLTPGDSSSGWTAGAAAYYVGYLQPRTFLLKYNENGTITDAVDCALDPLSETKCTLKSFTVEKGIYQTSNFRVQPTESIVRFPNITNLCPFGEVFNATRFASVYAWNRKRISNCVADYSVLYNSASFSTFKCYGVSPTKLNDLCFTNVYADSFVIRGDEVRQIAPGQTGKIADYNYKLPDDFTGCVIAWNSNNLDSKVGGNYNYLYRLFRKSNLKPFERDISTEIYQAGSTPCNGVEGFNCYFPLQSYGFQPTNGVGYQPYRVVVLSFELLHAPATVCGPKKSTNLVKNKCVNFNFNGLTGTGVLTESNKKFLPFQQFGRDIADTTDAVRDPQTLEILDITPCSFGGVSVITPGTNTSNQVAVLYQGVNCTEVPVAIHADQLTPTWRVYSTGSNVFQTRAGCLIGAEHVNNSYECDIPIGAGICASYQTQTNSPRRARSVASQSIIAYTMSLGAENSVAYSNNSIAICTNFTISVTTEILPVSMTKTSVDCTMYICGDSTECSNLLLQYGSFCTQLNRALTGIAVEQDKNTQEVFAQVKQIYKTPPIKDFGGFNFSQILPDPSKPSKRSFIEDLLFNKVTLADAGFIKQYGDCLGDIAARDLICAQKFNGLTVLPPLLTDEMIAQYTSALLAGTITSGWTFGAGAALQIPFAMQMAYRFNGIGVTQNVLYENQKLIANQFNSAIGKIQDSLSSTASALGKLQDVVNQNAQALNTLVKQLSSNFGAISSVLNDILSRLDKVEAEVQIDRLITGRLQSLQTYVTQQLIRAAEIRASANLAATKMSECVLGQSKRVDFCGKGYHLMSFPQSAPHGVVFLHVTYVCAQEKNFTTAPAICHDGKAHFPREGVFVSNGTHWFVTQRNFYEPQIITTDNTFVSGNCDVVIGIVNNTVYDPLQPELDSFKEELDKYFKNHTSPDVDLGDISGINASVVNIQKEIDRLNEVAKNLNESLIDLQELGKYEQYIK

SEQ ID NO: 2133 - protein, 1211 aa, Artificial Sequence
  SARS-CoV-2/Iceland/189/2020__EPI_ISL_417709 spike protein (1-1211)(P715C_P1069C)
MFVFLVLLPLVSSQCVNLTTRTQLPPAYTNSFTRGVYYPDKVFRSSVLHSTQDLFLPFFSNVTWFHAIHVSGTNGTKRFDNPVLPFNDGVYFASTEKSNIIRGWIFGTTLDSKTQSLLIVNNATNVVIKVCEFQFCNDPFLGVYYHKNNKSWMESEFRVYSSANNCTFEYVSQPFLMDLEGKQGNFKNLREFVFKNIDGYFKIYSKHTPINLVRDLPQGFSALEPLVDLPIGINITRFQTLLALHRSYLTPGDSSSGWTAGAAAYYVGYLQPRTFLLKYNENGTITDAVDCALDPLSETKCTLKSFTVEKGIYQTSNFRVQPTESIVRFPNITNLCPFGEVFNATRFASVYAWNRKRISNCVADYSVLYNSASFSTFKCYGVSPTKLNDLCFTNVYADSFVIRGDEVRQIAPGQTGKIADYNYKLPDDFTGCVIAWNSNNLDSKVGGNYNYLYRLFRKSNLKPFERDISTEIYQAGSTPCNGVEGFNCYFPLQSYGFQPTNGVGYQPYRVVVLSFELLHAPATVCGPKKSTNLVKNKCVNFNFNGLTGTGVLTESNKKFLPFQQFGRDIADTTDAVRDPQTLEILDITPCSFGGVSVITPGTNTSNQVAVLYQGVNCTEVPVAIHADQLTPTWRVYSTGSNVFQTRAGCLIGAEHVNNSYECDIPIGAGICASYQTQTNSPRRARSVASQSIIAYTMSLGAENSVAYSNNSIAICTNFTISVTTEILPVSMTKTSVDCTMYICGDSTECSNLLLQYGSFCTQLNRALTGIAVEQDKNTQEVFAQVKQIYKTPPIKDFGGFNFSQILPDPSKPSKRSFIEDLLFNKVTLADAGFTKQYGDCLGDIAARDLICAQKFNGLTVLPPLLTDEMIAQYTSALLAGTITSGWTFGAGAALQIPFAMQMAYRFNGIGVTQNVLYENQKLIANQFNSAIGKIQDSLSSTASALGKLQDVVNQNAQALNTLVKQLSSNFGAISSVLNDILSRLDKVEAEVQIDRLITGRLQSLQTYVTQQLIRAAEIRASANLAATKMSECVLGQSKRVDFCGKGYHLMSFPQSAPHGVVFLHVTYVCAQEKNFTTAPAICHDGKAHFPREGVFVSNGTHWFVTQRNFYEPQIITTDNTFVSGNCDVVIGIVNNTVYDPLQPELDSFKEELDKYFKNHTSPDVDLGDISGINASVVNIQKEIDRLNEVAKNLNESLIDLQELGKYEQYIK

SEQ ID NO: 2134 - protein, 1211 aa, Artificial Sequence
  SARS-CoV-2/Australia/NSW56/2020__EPI_ISL_417408 spike protein (1-1211)(P715C_P1069C)
MFVFLVLLPLVSSQCVNLTTRTQLPPAYTNSFTRGVYYPDKVFRSSVLHSTQDLFLPFFSNVTWFHAIHVSGTNGTKRFDNPVLPFNDGVYFASTEKSNIIRGWIFGTTLDSKTQSLLIVNNATNVVIKVCEFQFCNDPFLGVYYHKNNKSWMESEFRVYSSANNCTFEYVSQPFLMDLEGKQGNFKNLREFVFKNIDGYFKIYSKHTPINLVRDLPQGFSALEPLVDLPIGINITRFQTLLALHRSYLTPGDSSSGWTAGAAAYYVGYLQPRTFLLKYNENGTITDAVDCALDPLSETKCTLKSFTVEKGIYQTSNFRVQPTESIVRFPNITNLCPFGEVFNATRFASVYAWNRKRISNCVADYSVLYNSASFSTFKCYGVSPTKLNDLCFTNVYADSFVIRGDEVRQIAPGQTGKIADYNYKLPDDFTGCVIAWNSNNLDSKVGGNYNYLYRLFRKSNLKPFERDISTEIYQAGSTPCNGVEGFNCYFPLQSYGFQPTNGVGYQPYRVVVLSFELLHAPATVCGPKKSTNLVKNKCVNFNFNGLTGTGVLTESNKKFLPFQQFGRDIADTTDAVRDPQTLEILDITPCSFGGVSVITPGTNTSNQVAVLYQDVNCTEVPVAIHADQLTPTWRVYSTGSNVFQTRAGCLIGAEHVNNSYECDIPIGAGICASYQTQTNSPRRARSVASQSIIAYTMSLGAENSVAYSNNSIAICTNFTISVTTEILPVSMTKTSVDCTMYICGDSTECSNLLLQYGSFCTQLNRALTGIAVEQDKNTQEVFAQVKQIYKTPPIKDFGGFNFSQILPDSSKPSKRSFIEDLLFNKVTLADAGFIKQYGDCLGDIAARDLICAQKFNGLTVLPPLLTDEMIAQYTSALLAGTITSGWTFGAGAALQIPFAMQMAYRFNGIGVTQNVLYENQKLIANQFNSAIGKIQDSLSSTASALGKLQDVVNQNAQALNTLVKQLSSNFGAISSVLNDILSRLDKVEAEVQIDRLITGRLQSLQTYVTQQLIRAAEIRASANLAATKMSECVLGQSKRVDFCGKGYHLMSFPQSAPHGVVFLHVTYVCAQEKNFTTAPAICHDGKAHFPREGVFVSNGTHWFVTQRNFYEPQIITTDNTFVSGNCDVVIGIVNNTVYDPLQPELDSFKEELDKYFKNHTSPDVDLGDISGINASVVNIQKEIDRLNEVAKNLNESLIDLQELGKYEQYIK

SEQ ID NO: 2135 - protein, 1211 aa, Artificial Sequence
  SARS-CoV-2/Iceland/280/2020__EPI_ISL_417608 spike protein (1-1211)(P715C_P1069C)
MFVFLVLLPLVSSQCVNLTTRTQLPPAYTNSFTRGVYYPDKVFRSSVLHSTQDLFLPFFSNVTWFHAIHVSGTNGTKRFDNPVLPFNDGVYFASTEKSNIIRGWIFGTTLDSKTQSLLIVNNATNVVIKVCEFQFCNDPFLGVYYHKNNKSWMESEFRVYSSANNCTFEYVSQPFLMDLEGKQGNFKNLREFVFKNIDGYFKIYSKHTPINLVRDLPQGFSALEPLVDLPIGINITRFQTLLALHRSYLTPGDSSSGWTAGAAAYYVGYLQPRTFLLKYNENGTITDAVDCALDPLSETKCTLKSFTVEKGIYQTSNFRVQPTESIVRFPNITNLCPFGEVFNATRFASVYAWNRKRISNCVADYSVLYNSASFSTFKCYGVSPTKLNDLCFTNVYADSFVIRGDEVRQIAPGQTGKIADYNYKLPDDFTGCVIAWNSNNLDSKVGGNYNYLYRLFRKSNLKPFERDISTEIYQAGSTPCNGVEGFNCYFPLQSYGFQPTNGVGYQPYRVVVLSFELLHAPATVCGPKKSTNLVKNKCVNFNFNGLTGTGVLTESNKKFLPFQQFGRDIADTTDAVRDPQTLEILDITPCSFGGVSVITPGTNTSNQVAVLYQGVNCTEVPVAIHADQLTPTWRVYSTGSNVFQTRAGCLIGAEHVNNSYECDIPIGAGICASYHTQTNSPRRARSVASQSIIAYTMSLGAENSVAYSNNSIAICTNFTISVTTEILPVSMTKTSVDCTMYICGDSTECSNLLLQYGSFCTQLNRALTGIAVEQDKNTQEVFAQVKQIYKTPPIKDFGGFNFSQILPDPSKPSKRSFIEDLLFNKVTLADAGFIKQYGDCLGDIAARDLICAQKFNGLTVLPPLLTDEMIAQYTSALLAGTITSGWTFGAGAALQIPFAMQMAYRFNGIGVTQNVLYENQKLIANQFNSAIGKIQDSLSSTASALGKLQDVVNQNAQALNTLVKQLSSNFGAISSVLNDILSRLDKVEAEVQIDRLITGRLQSLQTYVTQQLIRAAEIRASANLAATKMSECVLGQSKRVDFCGKGYHLMSFPQSAPHGVVFLHVTYVCAQEKNFTTAPAICHDGKAHFPREGVFVSNGTHWFVTQRNFYEPQIITTDNTFVSGNCDVVIGIVNNTVYDPLQPELDSFKEELDKYFKNHTSPDVDLGDISGINASVVNIQKEIDRLNEVAKNLNESLIDLQELGKYEQYIK

SEQ ID NO: 2136 - protein, 1211 aa, Artificial Sequence; identical to SEQ ID NO: 2091
  SARS-CoV-2/Iceland/247/2020__EPI_ISL_417575 spike protein (1-1211)(P715C_P1069C)

SEQ ID NO: 2137 - protein, 1211 aa, Artificial Sequence
  SARS-CoV-2/Iceland/238/2020__EPI_ISL_417566 spike protein (1-1211)(P715C_P1069C)
MFVFLVLLPLVSSQCVNLTTRTQLPPAYTNSFTRGVYYPDKVFRSSVLHSTQDLFLPFFSNVTWFHAIHVSGTNGTKRFDNPVLPFNDGVYFASTEKSNIIRGWIFGTTLDSKTQSLLIVNNATNVVIKVCEFQFCNDPFLGVYYHKNNKSWMESEFRVYSSANNCTFEYVSQPFLMDLEGKQGNFKNLREFVFKNIDGYFKIYSKHTPINLVRDLPQGFSALEPLVDLPIGINITRFQTLLALHRSYLTPGDSSSGWTAGAAAYYVGYLQPRTFLLKYNENGTITDAVDCALDPLSETKCTLKSFTVEKGIYQTSNFRVQPTESIVRFPNITNLCPFGEVFNATRFASVYAWNRKRISNCVADYSVLYNSASFSTFKCYGVSPTKLNDLCFTNVYADSFVIRGDEVRQIAPGQTGKIADYNYKLPDDFTGCVIAWNSNNLDSKVGGNYNYLYRLFRKSNLKPFERDISTEIYQAGSTPCNGVEGFNCYFPLQSYGFQPTNGVGYQPYRVVVLSFELLHAPATVCGPKKSTNLVKNKCVNFNFNGLTGTGVLTESNKKFLPFQQFGRDIADTTDAVRDPQTLEILDITPCSFGGVSVITPGTNTSNQVAVLYQGVNCTEVPVAIHADQLTPTWRVYSTGSNVFQTRAGCLIGAEHVNNSYECDIPIGAGICASYQTQTNSPRRARSVASQSIIAYTMSLGAENSVAYSNNSIAICTNFTISVTTEILPVSMTKTSVDCTMYICGDSTECSNLLLQYGSFCTQLNRALTGIAVEQDKNTQEVFAQVKQIYKTPPIKDFGGFNFSQILPDPSKPSKRSFIEDLLFNKVTLADVGFIKQYGDCLGDIAARDLICAQKFNGLTVLPPLLTDEMIAQYTSALLAGTITSGWTFGAGAALQIPFAMQMAYRFNGIGVTQNVLYENQKLIANQFNSAIGKIQDSLSSTASALGKLQDVVNQNAQALNTLVKQLSSNFGAISSVLNDILSRLDKVEAEVQIDRLITGRLQSLQTYVTQQLIRAAEIRASANLAATKMSECVLGQSKRVDFCGKGYHLMSFPQSAPHGVVFLHVTYVCAQEKNFTTAPAICHDGKAHFPREGVFVSNGTHWFVTQRNFYEPQIITTDNTFVSGNCDVVIGIVNNTVYDPLQPELDSFKEELDKYFKNHTSPDVDLGDISGINASVVNIQKEIDRLNEVAKNLNESLIDLQELGKYEQYIK

SEQ ID NO: 2138 - protein, 1211 aa, Artificial Sequence
  SARS-CoV-2/Greece/16/2020__EPI_ISL_418265 spike protein (1-1211)(P715C_P1069C)
MFVFLVLLPLVSSQCVNLTTRTQLPPAYTNSFTRGVYYPDKVFRSSVLHSTQDLFLPFFSNVTWFHAIHVSGTNGTKRFDNPVLPFNDGVYFASTEKSNIIRGWIFGTTLDSKTQSLLIVNNATNVVIKVCEFQFCNDPFLGVYYHKNNKSWMESEFRVYSSANNCTFEYVSQPFLMDLEGKQGNFKNLREFVFKNVDGYFKIYSKHTPINLVRDLPQGFSALEPLVDLPIGINITRFQTLLALHRSYLTPGDSSSGWTAGAAAYYVGYLQPRTFLLKYNENGTITDAVDCALDPLSETKCTLKSFTVEKGIYQTSNFRVQPTESIVRFPNITNLCPFGEVFNATRFASVYAWNRKRISNCVADYSVLYNSASFSTFKCYGVSPTKLNDLCFTNVYADSFVIRGDEVRQIAPGQTGKIADYNYKLPDDFTGCVIAWNSNNLDSKVGGNYNYLYRLFRKSNLKPFERDISTEIYQAGSTPCNGVEGFNCYFPLQSYGFQPTNGVGYQPYRVVVLSFELLHAPATVCGPKKSTNLVKNKCVNFNFNGLTGTGVLTESNKKFLPFQQFGRDIADTTDAVRDPQTLEILDITPCSFGGVSVITPGTNTSNQVAVLYQDVNCTEVPVAIHADQLTPTWRVYSTGSNVFQTRAGCLIGAEHVNNSYECDIPIGAGICASYQTQTNSPRRARSVASQSIIAYTMSLGAENSVAYSNNSIAICTNFTISVTTEILPVSMTKTSVDCTMYICGDSTECSNLLLQYGSFCTQLNRALTGIAVEQDKNTQEVFAQVKQIYKTPPIKDFGGFNFSQILPDPSKPSKRSFIEDLLFNKVTLADAGFIKQYGDCLGDIAARDLICAQKFNGLTVLPPLLTDEMIAQYTSALLAGTITSGWTFGAGAALQIPFAMQMAYRFNGIGVTQNVLYENQKLIANQFNSAIGKIQDSLSSTASALGKLQDVVNQNAQALNTLVKQLSSNFGAISSVLNDILSRLDKVEAEVQIDRLITGRLQSLQTYVTQQLIRAAEIRASANLAATKMSECVLGQSKRVDFCGKGYHLMSFPQSAPHGVVFLHVTYVCAQEKNFTTAPAICHDGKAHFPREGVFVSNGTHWFVTQRNFYEPQIITTDNTFVSGNCDVVIGIVNNTVYDPLQPELDSFKEELDKYFKNHTSPDVDLGDISGINASVVNIQKEIDRLNEVAKNLNESLIDLQELGKYEQYIK

SEQ ID NO: 2139 - protein, 1211 aa, Artificial Sequence
  SARS-CoV-2/Iceland/319/2020__EPI_ISL_417648 spike protein (1-1211)(P715C_P1069C)
MFVFLVLLPLVSSQCVNLTTRTQLPPAYTNSFTRGVYYPDKVFRSSVLHSTQDLFLPFFSNVTWFHAIHVSGTNGTKRFDNPVLPFNDGVYFASTEKSNIIRGWIFGTTLDSKTQSLLIVNNATNVVIKVCEFQFCNDPFLGVYYHKNNKSWMESEFRVYSSANNCTFEYVSQPFLIDLEGKQGNFKNLREFVFKNIDGYFKIYSKHTPINLVRDLPQGFSALEPLVDLPIGINITRFQTLLALHRSYLTPGDSSSGWTAGAAAYYVGYLQPRTFLLKYNENGTITDAVDCALDPLSETKCTLKSFTVEKGIYQTSNFRVQPTESIVRFPNITNLCPFGEVFNATRFASVYAWNRKRISNCVADYSVLYNSASFSTFKCYGVSPTKLNDLCFTNVYADSFVIRGDEVRQIAPGQTGKIADYNYKLPDDFTGCVIAWNSNNLDSKVGGNYNYLYRLFRKSNLKPFERDISTEIYQAGSTPCNGVEGFNCYFPLQSYGFQPTNGVGYQPYRVVVLSFELLHAPATVCGPKKSTNLVKNKCVNFNFNGLTGTGVLTESNKKFLPFQQFGRDIADTTDAVRDPQTLEILDITPCSFGGVSVITPGTNTSNQVAVLYQGVNCTEVPVAIHADQLTPTWRVYSTGSNVFQTRAGCLIGAEHVNNSYECDIPIGAGICASYQTQTNSPRRARSVASQSIIAYTMSLGAENSVAYSNNSIAICTNFTISVTTEILPVSMTKTSVDCTMYICGDSTECSNLLLQYGSFCTQLNRALTGIAVEQDKNTQEVFAQVKQIYKTPPIKDFGGFNFSQILPDPSKPSKRSFIEDLLFNKVTLADAGFIKQYGDCLGDIAARDLICAQKFNGLTVLPPLLTDEMIAQYTSALLAGTITSGWTFGAGAALQIPFAMQMAYRFNGIGVTQNVLYENQKLIANQFNSAIGKIQDSLSSTASALGKLQDVVNQNAQALNTLVKQLSSNFGAISSVLNDILSRLDKVEAEVQIDRLITGRLQSLQTYVTQQLIRAAEIRASANLAATKMSECVLGQSKRVDFCGKGYHLMSFPQSAPHGVVFLHVTYVCAQEKNFTTAPAICHDGKAHFPREGVFVSNGTHWFVTQRNFYEPQIITTDNTFVSGNCDVVIGIVNNTVYDPLQPELDSFKEELDKYFKNHTSPDVDLGDISGINASVVNIQKEIDRLNEVAKNLNESLIDLQELGKYEQYIK

SEQ ID NO: 2140 - protein, 1211 aa, Artificial Sequence
  SARS-CoV-2/Congo/94/2020__EPI_ISL_417947 spike protein (1-1211)(P715C_P1069C)
MFVFLVLLPLVSSQCVNLTTRTQLPPAYTNSFTRGVYYPDKVFRSSVLHSTQDLFLPFFSNVTWFHAIHVSGTNGTKRFDNPVLPFNDGVYFASTEKSNIIRGWIFGTTLDSKTQSLLIVNNATNVVIKVCEFQFCNDPFLGVYYHKNNKSWMESEFRVYSSANNCTFEYVSQPFLMDLEGKQGNFKNLREFVFKNIDGYFKIYSKHTPINLVRDLPQGFSALEPLVDLPIGINITRFQTLLALHRSYLTPGDSSSGWTAGAAAYYVGYLQPRTFLLKYNENGTITDAVDCALDPLSETKCTLKSFTVEKGIYQTSNFRVQPTESIVRFPNITNLCPFGEVFNATRFASVYAWNRKRISNCVADYSVLYNSASFSTFKCYGVSPTKLNDLCFTNVYADSFVIRGDEVRQIAPGQTGKIADYNYKLPDDFTGCVIAWNSNNLDSKVGGNYNYLYRLFRKSNLKPFERDISTEIYQAGSTPCNGVEGFNCYFPLQSYGFQPTNGVGYQPYRVVVLSFELLHAPATVCGPKKSTNLVKNKCVNFNFNGLTGTGVLTESNKKFLPFQQFGRDIADTTDAVRDPQTLEILDITPCSFGGVSVITPGTNTSNQVAVLYQGVNCTEVPVAIHADQLTPTWRVYSTGSNVFQTRAGCLIGAEHVNNSYECDIPIGAGICASYQTQTNSPRRARSVASQSIIAYTMSLGAENSVAYSNNSIAICTNFTISVTTEILPVSMTKTSVDCTMYICGDSTECSNLLLQYGSFCTQLNRALTGIAVEQDKNTQEVFAQVKQIYKTPPIKDFGGFNFSQILPDPSKPSKRSFIEDILFNKVTLADAGFIKQYGDCLGDIAARDLICAQKFNGLTVLPPLLTDEMIAQYTSALLAGTITSGWTFGAGAALQIPFAMQMAYRFNGIGVTQNVLYENQKLIANQFNSAIGKIQDSLSSTASALGKLQDVVNQNAQALNTLVKQLSSNFGAISSVLNDILSRLDKVEAEVQIDRLITGRLQSLQTYVTQQLIRAAEIRASANLAATKMSECVLGQSKRVDFCGKGYHLMSFPQSAPHGVVFLHVTYVCAQEKNFTTAPAICHDGKAHFPREGVFVSNGTHWFVTQRNFYEPQIITTDNTFVSGNCDVVIGIVNNTVYDPLQPELDSFKEELDKYFKNHTSPDVDLGDISGINASVVNIQKEIDRLNEVAKNLNESLIDLQELGKYEQYIK

SEQ ID NO: 2141 - protein, 1211 aa, Artificial Sequence
  SARS-CoV-2/Congo/158/2020__EPI_ISL_417950 spike protein (1-1211)(P715C_P1069C)
MFVFLVLLPLVSSQCVNLTTRTQLPPAYTNSFTRGVYYPDKVFRSSVLHSTQDLFLPFFSNVTWFHAIHVSGTNGTKRFDNPVLPFNDGVYFASTEKSNIIRGWIFGTTLDSKTQSLLIVNNATNVVIKVCEFQFCNDPFLGVYYHKNNKSWMESEFRVYSSANNCTFEYVSQPFLMDLEGKQGNFKNLREFVFKNIDGYFKIYSKHTPINLVRDLPQGFSALEPLVDLPIGINITRFQTLLALHRSYLTPGDSSSGWTAGAAAYYVGYLQPRTFLLKYNENGTITDAVDCALDPLSETKCTLKSFTVEKGIYQTSNFRVQPTESIVRFPNITNLCPFGEVFNATRFASVYAWNRKRISNCVADYSVLYNSASFSTFKCYGVSPTKLNDLCFTNVYADSFVIRGDEVRQIAPGQTGKIADYNYKLPDDFTGCVIAWNSNNLDSKVGGNYNYLYRLFRKSNLKPFERDISTEIYQAGSTPCNGVEGFNCYFPLQSYGFQPTNGVGYQPYRVVVLSFELLHAPATVCGPKKSTNLVKNKCVNFNFNGLTGTGVLTESNKKFLPFQQFGRDIADTTDAVRDPQTLEILDITPCSFGGVSVITPGTNTSNQVAVLYQDVNCTEVPVAIHADQLTPTWRVYSTGSNVFQTRAGCLIGAEHVNNSYECDIPIGAGICASYQTQTNSPRRARSVASQSIIAYTMSLGAENSVAYSNNSIAICTNFTISVTTEILPVSMTKTSVDCTMYICGDSTECSNLLLQYGSFCTQLNRALTGIAVEQDKNTQEVFAQVKQIYKTPPIKDFGGFNFSQILPDPSKPSKRSFIEDLLFNKVTLADAGFIKQYGDCLGDIAARDLICAQKFNGLTVLPPLLTDEMIAQYTSALLAGTITSGWTFGAGAALQIPFAMQMAYRFNGIGVTQNVLYENQKLIANQFNSAIGKIQDSLSSTASALGKLQDVVNQNAQALNTLVKQLSSNFGAISSVLNDILSRLDKVEAEVQIDRLITGRLQSLQTYVTQQLIRAAEIRASANLAATKMSECVLGQSKRVDFCGKGYHLMSFPQSAPHGVVFLHVTYVCAQEKNFTTAPAICHDGKAHFPREGVFVSNGTHWFVTQRNFYEPQIITTDNTFLSGNCDVVIGIVNNTVYDPLQPELDSFKEELDKYFKNHTSPDVDLGDISGINASVVNIQKEIDRLNEVAKNLNESLIDLQELGKYEQYIK

SEQ ID NO: 2142 - protein, 1211 aa, Artificial Sequence
  SARS-CoV-2/USA/UT-00034/2020__EPI_ISL_417977 spike protein (1-1211)(P715C_P1069C)
MFVFLVLLPLVSSQCVNLTTRTQLPPAYTNSFTRGVYYPDKVFRSSVLHSTQDLFLPFFSNVTWFHAIHVSGTNGTKRFDNPVLPFNDGVYFASTEKSNIIRGWIFGTTLDSKTQSLLIVNNATNVVIKVCEFQFCNDPFLGVYYYKNNKSWMESEFRVYSSANNCTFEYVSQPFLMDLEGKQGNFKNLREFVFKNIDGYFKIYSKHTPINLVRDLPQGFSALEPLVDLPIGINITRFQTLLALHRSYLTPGDSSSGWTAGAAAYYVGYLQPRTFLLKYNENGTITDAVDCALDPLSETKCTLKSFTVEKGIYQTSNFRVQPTESIVRFPNITNLCPFGEVFNATRFASVYAWNRKRISNCVADYSVLYNSASFSTFKCYGVSPTKLNDLCFTNVYADSFVIRGDEVRQIAPGQTGKIADYNYKLPDDFTGCVIAWNSNNLDSKVGGNYNYLYRLFRKSNLKPFERDISTEIYQAGSTPCNGVEGFNCYFPLQSYGFQPTNGVGYQPYRVVVLSFELLHAPATVCGPKKSTNLVKNKCVNFNFNGLTGTGVLTESNKKFLPFQQFGRDIADTTDAVRDPQTLEILDITPCSFGGVSVITPGTNTSNQVAVLYQGVNCTEVPVAIHADQLTPTWRVYSTGSNVFQTRAGCLIGAEHVNNSYECDIPIGAGICASYQTQTNSPRRARSVASQSIIAYTMSLGAENSVAYSNNSIAICTNFTISVTTEILPVSMTKTSVDCTMYICGDSTECSNLLLQYGSFCTQLNRALTGIAVEQDKNTQEVFAQVKQIYKTPPIKDFGGFNFSQILPDPSKPSKRSFIEDLLFNKVTLADAGFIKQYGDCLGDIAARDLICAQKFNGLTVLPPLLTDEMIAQYTSALLAGTITSGWTFGAGAALQIPFAMQMAYRFNGIGVTQNVLYENQKLIANQFNSAIGKIQDSLSSTASALGKLQDVVNQNAQALNTLVKQLSSNFGAISSVLNDILSRLDKVEAEVQIDRLITGRLQSLQTYVTQQLIRAAEIRASANLAATKMSECVLGQSKRVDFCGKGYHLMSFPQSAPHGVVFLHVTYVCAQEKNFTTAPAICHDGKAHFPREGVFVSNGTHWFVTQRNFYEPQIITTDNTFVSGNCDVVIGIVNNTVYDPLQPELDSFKEELDKYFKNHTSPDVDLGDISGINASVVNIQKEIDRLNEVAKNLNESLIDLQELGKYEQYIK

SEQ ID NO: 2143 - protein, 1211 aa, Artificial Sequence
  SARS-CoV-2/USA/UT-00033/2020__EPI_ISL_417976 spike protein (1-1211)(P715C_P1069C)
MFVFLVLLPLVSSQCVNLTTRTQLPPAYTNSFTRGVYYPDKVFRSSVLHSTQDLFLPFFSNVTWFHAIHVSGTNGTKRFDNPVLPFNDGVYFASTEKSNIIRGWIFGTTLDSKTQSLLIVNNATNVVIKVCEFQFCNDPFLGVYYHKNNKSWMESEFRVYSSANNCTFEYVSQPFLMDLEGKQGNFKNLREFVFKNIDGYFKIYSKHTPINLVRDLPQGFSALEPLVDLPIGINITRFQTLLALHRSYLTPGDSSSGLTAGAAAYYVGYLQPRTFLLKYNENGTITDAVDCALDPLSETKCTLKSFTVEKGIYQTSNFRVQPTESIVRFPNITNLCPFGEVFNATRFASVYAWNRKRISNCVADYSVLYNSASFSTFKCYGVSPTKLNDLCFTNVYADSFVIRGDEVRQIAPGQTGKIADYNYKLPDDFTGCVIAWNSNNLDSKVGGNYNYLYRLFRKSNLKPFERDISTEIYQAGSTPCNGVEGFNCYFPLQSYGFQPTNGVGYQPYRVVVLSFELLHAPATVCGPKKSTNLVKNKCVNFNFNGLTGTGVLTESNKKFLPFQQFGRDIADTTDAVRDPQTLEILDITPCSFGGVSVITPGTNTSNQVAVLYQGVNCTEVPVAIHADQLTPTWRVYSTGSNVFQTRAGCLIGAEHVNNSYECDIPIGAGICASYQTQTNSPRRARSVASQSIIAYTMSLGAENSVAYSNNSIAICTNFTISVTTEILPVSMTKTSVDCTMYICGDSTECSNLLLQYGSFCTQLNRALTGIAVEQDKNTQEVFAQVKQIYKTPPIKDFGGFNFSQILPDPSKPSKRSFIEDLLFNKVTLADAGFIKQYGDCLGDIAARDLICAQKFNGLTVLPPLLTDEMIAQYTSALLAGTITSGWTFGAGAALQIPFAMQMAYRFNGIGVTQNVLYENQKLIANQFNSAIGKIQDSLSSTASALGKLQDVVNQNAQALNTLVKQLSSNFGAISSVLNDILSRLDKVEAEVQIDRLITGRLQSLQTYVTQQLIRAAEIRASANLAATKMSECVLGQSKRVDFCGKGYHLMSFPQSAPHGVVFLHVTYVCAQEKNFTTAPAICHDGKAHFPREGVFVSNGTHWFVTQRNFYEPQIITTDNTFVSGNCDVVIGIVNNTVYDPLQPELDSFKEELDKYFKNHTSPDVDLGDISGINASVVNIQKEIDRLNEVAKNLNESLIDLQELGKYEQYIK

SEQ ID NO: 2144 - protein, 1211 aa, Artificial Sequence
  SARS-CoV-2/USA/WI-13/2020__EPI_ISL_417516 spike protein (1-1211)(P715C_P1069C)
MFVFLVLLPLVSSQCVNLTTRTQLPPAYTNSFTRGVYYPDKVFRSSVLHSTQDLFLPFFSNVTWFHAIHVSGTNGTKRFDNPVLPFNDGVYFASTEKSNIIRGWIFGTTLDSKTQSLLIVNNATNVVIKVCEFQFCNDPFLGVYYHKNNKSWMESEFRVYSSANNCTFEYVSQPFLMDLEGKQGNFKNLREFVFKNIDGYFKIYSKHTPINLVRDLPQGFSALEPLVDLPIGINITRFQTLLALHRSYLTPGDSSSGWTAGAAAYYVGYLQPRTFLLKYNENGTITDAVDCALDPLSETKCTLKSFTVEKGIYQTSNFRVLPTESIVRFPNITNLCPFGEVFNATRFASVYAWNRKRISNCVADYSVLYNSASFSTFKCYGVSPTKLNDLCFTNVYADSFVIRGDEVRQIAPGQTGKIADYNYKLPDDFTGCVIAWNSNNLDSKVGGNYNYLYRLFRKSNLKPFERDISTEIYQAGSTPCNGVEGFNCYFPLQSYGFQPTNGVGYQPYRVVVLSFELLHAPATVCGPKKSTNLVKNKCVNFNFNGLTGTGVLTESNKKFLPFQQFGRDIADTTDAVRDPQTLEILDITPCSFGGVSVITPGTNTSNQVAVLYQGVNCTEVPVAIHADQLTPTWRVYSTGSNVFQTRAGCLIGAEHVNNSYECDIPIGAGICASYQTQTNSPRRARSVASQSIIAYTMSLGAENSVAYSNNSIAICTNFTISVTTEILPVSMTKTSVDCTMYICGDSTECSNLLLQYGSFCTQLNRALTGIAVEQDKNTQEVFAQVKQIYKTPPIKDFGGFNFSQILPDPSKPSKRSFIEDLLFNKVTLADAGFIKQYGDCLGDIAARDLICAQKFNGLTVLPPLLTDEMIAQYTSALLAGTITSGWTFGAGAALQIPFAMQMAYRFNGIGVTQNVLYENQKLIANQFNSAIGKIQDSLSSTASALGKLQDVVNQNAQALNTLVKQLSSNFGAISSVLNDILSRLDKVEAEVQIDRLITGRLQSLQTYVTQQLIRAAEIRASANLAATKMSECVLGQSKRVDFCGKGYHLMSFPQSAPHGVVFLHVTYVCAQEKNFTTAPAICHDGKAHFPREGVFVSNGTHWFVTQRNFYEPQIITTDNTFVSGNCDVVIGIVNNTVYDPLQPELDSFKEELDKYFKNHTSPDVDLGDISGINASVVNIQKEIDRLNEVAKNLNESLIDLQELGKYEQYIK

SEQ ID NO: 2145 - protein, 1210 aa, Artificial Sequence
  SARS-CoV-2/India/1-27/2020__EPI_ISL_413522 spike protein (1-1210)(P714C_P1068C)
MFVFLVLLPLVSSQCVNLTTRTQLPPAYTNSFTRGVYYPDKVFRSSVLHSTQDLFLPFFSNVTWFHAIHVSGTNGTKRFDNPVLPFNDGVYFASTEKSNIIRGWIFGTTLDSKTQSLLIVNNATNVVIKVCEFQFCNDPFLGVYHKNNKSWMESEFRVYSSANNCTFEYVSQPFLMDLEGKQGNFKNLREFVFKNIDGYFKIYSKHTPINLVRDLPQGFSALEPLVDLPIGINITRFQTLLALHRSYLTPGDSSSGWTAGAAAYYVGYLQPRTFLLKYNENGTITDAVDCALDPLSETKCTLKSFTVEKGIYQTSNFRVQPTESIVRFPNITNLCPFGEVFNATRFASVYAWNRKRISNCVADYSVLYNSASFSTFKCYGVSPTKLNDLCFTNVYADSFVIRGDEVIQIAPGQTGKIADYNYKLPDDFTGCVIAWNSNNLDSKVGGNYNYLYRLFRKSNLKPFERDISTEIYQAGSTPCNGVEGFNCYFPLQSYGFQPTNGVGYQPYRVVVLSFELLHAPATVCGPKKSTNLVKNKCVNFNFNGLTGTGVLTESNKKFLPFQQFGRDIADTTDAVRDPQTLEILDITPCSFGGVSVITPGTNTSNQVAVLYQDVNCTEVPVAIHADQLTPTWRVYSTGSNVFQTRAGCLIGAEHVNNSYECDIPIGAGICASYQTQTNSPRRARSVASQSIIAYTMSLGAENSVAYSNNSIAICTNFTISVTTEILPVSMTKTSVDCTMYICGDSTECSNLLLQYGSFCTQLNRALTGIAVEQDKNTQEVFAQVKQIYKTPPIKDFGGFNFSQILPDPSKPSKRSFIEDLLFNKVTLADAGFIKQYGDCLGDIAARDLICAQKFNGLTVLPPLLTDEMIAQYTSALLAGTITSGWTFGAGAALQIPFAMQMAYRFNGIGVTQNVLYENQKLIANQFNSAIGKIQDSLSSTASALGKLQDVVNQNAQALNTLVKQLSSNFGAISSVLNDILSRLDKVEAEVQIDRLITGRLQSLQTYVTQQLIRAAEIRASANLAATKMSECVLGQSKRVDFCGKGYHLMSFPQSAPHGVVFLHVTYVCAQEKNFTTAPAICHDGKAHFPREGVFVSNGTHWFVTQRNFYEPQIITTDNTFVSGNCDVVIGIVNNTVYDPLQPELDSFKEELDKYFKNHTSPDVDLGDISGINASVVNIQKEIDRLNEVAKNLNESLIDLQELGKYEQYIK

SEQ ID NO: 2146 - protein, 1205 aa, Artificial Sequence
  SARS-CoV-2/pangolin/Guangxi/P4L/2017__EPI_ISL_410538 spike protein (1-1205)(P709C_P1063C)
MFVFLFVLPLVSSQCVNLTTRTGIPPGYTNSSTRGVYYPDKVFRSSILHLTQDLFLPFFSNVTWFNTINYQGGFKKFDNPVLPFNDGVYFASTEKSNIIRGWIFGTTLDARTQSLLIVNNATNVVIKVCEFQFCTDPFLGVYYHNNNKTWVENEFRVYSSANNCTFEYISQPFLMDLEGKQGNFKNLREFVFKNVDGYFKIYSKHTPIDLVRDLPRGFAALEPLVDLPIGINITRFQTLLALHRSYLTPGNLESGWTTGAAAYYVGYLQQRTFLLSYNQNGTITDAVDCSLDPLSETKCTLKSLTVEKGIYQTSNFRVQPTISIVRFPNITNLCPFGEVFNASKFASVYAWNRKRISNCVADYSVLYNSTSFSTFKCYGVSPTKLNDLCFTNVYADSFVVKGDEVRQIAPGQTGVIADYNYKLPDDFTGCVIAWNSVKQDALTGGNYGYLYRLFRKSKLKPFERDISTEIYQAGSTPCNGQVGLNCYYPLERYGFHPTTGVNYQPFRVVVLSFELLNGPATVCGPKLSTTLVKDKCVNFNFNGLTGTGVLTTSKKQFLPFQQFGRDISDTTDAVRDPQTLEILDITPCSFGGVSVITPGTNTSNQVAVLYQDVNCTEVPMAIHAEQLTPAWRVYSAGANVFQTRAGCLVGAEHVNNSYECDIPVGAGICASYHSMSSLRSVNQRSIIAYTMSLGAENSVAYSNNSIAICTNFTISVTTEILPVSMTKTSVDCTMYICGDSIECSNLLLQYGSFCTQLNRALTGIAVEQDKNTQEVFAQVKQIYKTPPIKDFGGFNFSQILPDPSKPSKRSFIEDLLFNKVTLADAGFIKQYGDCLGDIAARDLICAQKFNGLTVLPPLLTDEMIAQYTSALLAGTITSGWTFGAGAALQIPFAMQMAYRFNGIGVTQNVLYENQKLIANQFNSAIGKIQDSLSSTASALGKLQDVVNQNAQALNTLVKQLSSNFGAISSVLNDILSRLDKVEAEVQIDRLITGRLQSLQTYVTQQLIRAAEIRASANLAATKMSECVLGQSKRVDFCGKGYHLMSFPQSAPHGVVFLHVTYVCAQEKNFTTAPAICHEGKAHFPREGVFVSNGTHWFITQRNFYEPQIITTDNTFVSGSCDVVIGIVNNTVYDPLQPELDSFKEELDKYFKNHTSPDVDLGDISGINASVVNIQKEIDRLNEVAKNLNESPIDLQELGKYEQYIK

SEQ ID NO: 2147 - protein, 1205 aa, Artificial Sequence
  SARS-CoV-2/pangolin/Guangxi/P5L/2017__EPI_ISL_410540 spike protein (1-1205)(P709C_P1063C)
MFVFLFVLPLVSSQCVNLTTRTGIPPGYTNSSTRGVYYPDKVFRSSILHLTQDLFLPFFSNVTWFNTINYQGGFKKFDNPVLPFNDGVYFASTEKSNIIRGWIFGTTLDARTQSLLIVNNATNVVIKVCEFQFCTDPFLGVYYHNNNKTWVENEFRVYSSANNCTFEYISQPFLMDLEGKQGNFKNLREFVFKNVDGYFKIYSKHTPIDLVRDLPRGFAALEPLVDLPIGINITRFQTLLALHRSYLTPGKLESGWTTGAAAYYVGYLQQRTFLLSYNQNGTITDAVDCSLDPLSETKCTLKSLTVEKGIYQTSNFRVQPTISIVRFPNITNLCPFGEVFNASKFASVYAWNRKRISNCVADYSVLYNSTSFSTFKCYGVSPTKLNDLCFTNVYADSFVVKGDEVRQIAPGQTGVIADYNYKLPDDFTGCVIAWNSVKQDALTGGNYGYLYRLFRKSKLKPFERDISTEIYQAGSTPCNGQVGLNCYYPLERYGFHPTTGVNYQPFRVVVLSFELLNGPATVCGPKLSTTLVKDKCVNFNFNGLTGTGVLTTSKKQFLPFQQFGRDISDTTDAVRDPQTLEILDITPCSFGGVSVITPGTNTSNQVAVLYQDVNCTEVPMAIHAEQLTPAWRVYSAGANVFQTRAGCLVGAEHVNNSYECDIPVGAGICASYHSMSSFRSVNQRSIIAYTMSLGAENSVAYSNNSIAICTNFTISVTTEILPVSMTKTSVDCTMYICGDSIECSNLLLQYGSFCTQLNRALTGIAVEQDKNTQEVFAQVKQIYKTPPIKDFGGFNFSQILPDPSKPSKRSFIEDLLFNKVTLADAGFIKQYGDCLGDIAARDLICAQKFNGLTVLPPLLTDEMIAQYTSALLAGTITSGWTFGAGAALQIPFAMQMAYRFNGIGVTQNVLYENQKLIANQFNSAIGKIQDSLSSTASALGKLQDVVNQNAQALNTLVKQLSSNFGAISSVLNDILSRLDKVEAEVQIDRLITGRLQSLQTYVTQQLIRAAEIRASANLAATKMSECVLGQSKRVDFCGKGYHLMSFPQSAPHGVVFLHVTYVCAQEKNFTTAPAICHEGKAHFPREGVFVSNGTHWFITQRNFYEPQIITTDNTFVSGSCDVVIGIVNNTVYDPLQPELDSFKEELDKYFKNHTSPDVDLGDISGINASVVNIQKEIDRLNEVAKNLNESLIDLQELGKYEQYIK

SEQ ID NO: 2148 - protein, 1205 aa, Artificial Sequence
  SARS-CoV-2/pangolin/Guangxi/P5E/2017__EPI_ISL_410541 spike protein (1-1205)(P709C_P1063C)
MFVFLFVLPLVSSQCVNLTTRTGIPPGYTNSSTRGVYYPDKVFRSSILHLTQDLFLPFFSNVTWFNTITYQGGSKKFDNPVLPFNDGVYFASTEKSNIIRGWIFGTTLDARTQSLLIVNNATNVVIKVCEFQFCTDPFLGVYYHNNNKTWVENEFRVYSSANNCTFEYISQPFLMDLEGKQGNFKNLREFVFKNVDGYFKIYSKHTPIDLVRDLPRGFAALEPLVDLPIGINITRFQTLLALHRSYLTPGKLESGWTTGAAAYYVGYLQQRTFLLSYNQNGTITDAVDCSLDPLSETKCTLKSLTVEKGIYQTSNFRVQPTISIVRFPNITNLCPFGEVFNASKFASVYAWNRKRISNCVADYSVLYNSTSFSTFKCYGVSPTKLNDLCFTNVYADSFVVKGDEVRQIAPGQTGVIADYNYKLPDDFTGCVIAWNSVKQDALTGDNYGYLYRLFRKSKLKPFERDISTEIYQAGSTPCNGQVGLNCYYPLERYGFHPTTGVNYQPFRVVVLSFELLNGPATVCGPKLSTTLVKDKCVNFNFNGLTGTGVLTTSKKQFLPFQQFGRDISDTTDAVRDPQTLEILDITPCSFGGVSVITPGTNTSNQVAVLYQDVNCTEVPMAIHAEQLTPAWRVYSAGANVFQTRAGCLVGAEHVNNSYECDIPVGAGICASYHSMSSFRSVNQRSIIAYTMSLGAENSVAYSNNSIAICTNFTISVTTEILPVSMTKTSVDCTMYICGDSIECSNLLLQYGSFCTQLNRALTGIAVEQDKNTQEVFAQVKQIYKTPPIKDFGGFNFSQILPDPSKPSKRSFIEDLLFNKVTLADAGFIKQYGDCLGDIAARDLICAQKFNGLTVLPPLLTDEMIAQYTSALLAGTITSGWTFGAGAALQIPFAMQMAYRFNGIGVTQNVLYENQKLIANQFNSAIGKIQDSLSSTASALGKLQDVVNQNAQALNTLVKQLSSNFGAISSVLNDILSRLDKVEAEVQIDRLITGRLQSLQTYVTQQLIRAAEIRASANLAATKMSECVLGQSKRVDFCGKGYHLMSFPQSAPHGVVFLHVTYVCAQEKNFTTAPAICHEGKAHFPREGVFVSNGTHWFITQRNFYEPQIITTDNTFVSGSCDVVIGIVNNTVYDPLQPELDSFKEELDKYFKNHTSPDVDLGDISGINASVVNIQKEIDRLNEVAKNLNESLIDLQELGKYEQYIK

SEQ ID NO: 2149 - protein, 1203 aa, Artificial Sequence
  SARS-CoV-2/pangolin/Guangxi/P1E/2017__EPI_ISL_410539 spike protein (1-1203)(P707C_P1061C)
MFVFLFVLPLVSSQCVNLTTRTGIQPGYTNSSTRGVYYPDKVFRSSILHLTQDLFLPFFSNVTWFNTINYQGGFKKFDNPVLPFNDGVYFASTEKSNIIRGWIFGTTLDARTQSLLIVNNATNVVIKVCEFQFCTDPFLGVYYHNNNKTWVENEFRVYSSANNCTFEYISQPFLMDLEGKQGNFKNLREFVFKNVDGYFKIYSKHTPIDLVRDLPRGFAALEPLVDLPIGINITRFQTLLALHRSYLTPGKLESGWTTGAAAYYVGYLQQRTFLLSYNQNGTITDAVDCSLDPLSETKCTLKSLTVEKGIYQTSNFRVQPTISIVRFPNITNLCPFGEVFNASKFASVYAWNRKRISNCVADYSVLYNSTSFSTFKCYGVSPTKLNDLCFTNVYADSFVVKGDEVRQIAPGQTGVIADYNYKLPDDFTGCVIAWNSVKQDALTGGNYLYRLFRKSKLKPFERDISTEIYQAGSTPCNGQVGLNCYYPLERYGFHPTTGVNYQPFRVVVLSFELLNGPATVCGPKLSTTLVKDKCVNFNFNGLTGTGVLTTSKKQFLPFQQFGRDISDTTDAVRDPQTLEILDITPCSFGGVSVITPGTNTSNQVAVLYQDVNCTEVPMAIHAEQLTPAWRVYSAGANVFQTRAGCLVGAEHVNNSYECDIPVGAGICASYHSMSSLRSVNQRSIIAYTMSLGAENSVAYSNNSIAICTNFTISVTTEILPVSMTKTSVDCTMYICGDSIECSNLLLQYGSFCTQLNRALTGIAVEQDKNTQEVFAQVKQIYKTPPIKDFGGFNFSQILPDPSKPSKRSFIEDLLFNKVTLADAGFIKQYGDCLGDIAARDLICAQKFNGLTVLPPLLTDEMIAQYTSALLAGTITSGWTFGAGAALQIPFAMQMAYRFNGIGVTQNVLYENQKLIANQFNSAIGKIQDSLSSTASALGKLQDVVNQNAQALNTLVKQLSSNFGAISSVLNDILSRLDKVEAEVQIDRLITGRLQSLQTYVTQQLIRAAEIRASANLAATKMSECVLGQSKRVDFCGKGYHLMSFPQSAPHGVVFLHVTYVCAQEKNFTTAPAICHEGKAHFPREGVFVSNGTHWFITQRNFYEPQIITTDNTFVSGSCDVVIGIVNNTVYDPLQPELDSFKEELDKYFKNHTSPDVDLGDISGINASVVNIQKEIDRLNEVAKNLNESLIDLQELGKYEQYIK

SEQ ID NO: 2150 - protein, 1211 aa, Artificial Sequence
  SARS-CoV-2/Wuhan/WIV05/2019__EPI_ISL_402128 spike protein (1-1211)(G889C_L1034C)
MFVFLVLLPLVSSQCVNLTTRTQLPPAYTNSFTRGVYYPDKVFRSSVLHSTQDLFLPFFSNVTWFHAIHVSGTNGTKRFDNPVLPFNDGVYFASTEKSNIIRGWIFGTTLDSKTQSLLIVNNATNVVIKVCEFQFCNDPFLGVYYHKNNKSWMESEFRVYSSANNCTFEYVSQPFLMDLEGKQGNFKNLREFVFKNIDGYFKIYSKHTPINLVRDLPQGFSALEPLVDLPIGINITRFQTLLALHRSYLTPGDSSSGWTAGAAAYYVGYLQPRTFLLKYNENGTITDAVDCALDPLSETKCTLKSFTVEKGIYQTSNFRVQPTESIVRFPNITNLCPFGEVFNATRFASVYAWNRKRISNCVADYSVLYNSASFSTFKCYGVSPTKLNDLCFTNVYADSFVIRGDEVRQIAPGQTGKIADYNYKLPDDFTGCVIAWNSNNLDSKVGGNYNYLYRLFRKSNLKPFERDISTEIYQAGSTPCNGVEGFNCYFPLQSYGFQPTNGVGYQPYRVVVLSFELLHAPATVCGPKKSTNLVKNKCVNFNFNGLTGTGVLTESNKKFLPFQQFGRDIADTTDAVRDPQTLEILDITPCSFGGVSVITPGTNTSNQVAVLYQDVNCTEVPVAIHADQLTPTWRVYSTGSNVFQTRAGCLIGAEHVNNSYECDIPIGAGICASYQTQTNSPRRARSVASQSIIAYTMSLGAENSVAYSNNSIAIPTNFTISVTTEILPVSMTKTSVDCTMYICGDSTECSNLLLQYGSFCTQLNRALTGIAVEQDKNTQEVFAQVKQIYKTPPIKDFGGFNFSQILPDPSKPSKRSFIEDLLFNKVTLADAGFIKQYGDCLGDIAARDLICAQKFNGLTVLPPLLTDEMIAQYTSALLAGTITSGWTFCAGAALQIPFAMQMAYRFNGIGVTQNVLYENQKLIANQFNSAIGKIQDSLSSTASALGKLQDVVNQNAQALNTLVKQLSSNFGAISSVLNDILSRLDKVEAEVQIDRLITGRLQSLQTYVTQQLIRAAEIRASANLAATKMSECVCGQSKRVDFCGKGYHLMSFPQSAPHGVVFLHVTYVPAQEKNFTTAPAICHDGKAHFPREGVFVSNGTHWFVTQRNFYEPQIITTDNTFVSGNCDVVIGIVNNTVYDPLQPELDSFKEELDKYFKNHTSPDVDLGDISGINASVVNIQKEIDRLNEVAKNLNESLIDLQELGKYEQYIK

SEQ ID NO: 2151 - protein, 1207 aa, Artificial Sequence
  SARS-CoV-2/bat/Yunnan/RaTG13/2013__EPI_ISL_402131 spike protein (1-1207)(G885C_L1030C)
MFVFLVLLPLVSSQCVNLTTRTQLPPAYTNSSTRGVYYPDKVFRSSVLHLTQDLFLPFFSNVTWFHAIHVSGTNGIKRFDNPVLPFNDGVYFASTEKSNIIRGWIFGTTLDSKTQSLLIVNNATNVVIKVCEFQFCNDPFLGVYYHKNNKSWMESEFRVYSSANNCTFEYVSQPFLMDLEGKQGNFKNLREFVFKNIDGYFKIYSKHTPINLVRDLPPGFSALEPLVDLPIGINITRFQTLLALHRSYLTPGDSSSGWTAGAAAYYVGYLQPRTFLLKYNENGTITDAVDCALDPLSETKCTLKSFTVEKGIYQTSNFRVQPTDSIVRFPNITNLCPFGEVFNATTFASVYAWNRKRISNCVADYSVLYNSTSFSTFKCYGVSPTKLNDLCFTNVYADSFVITGDEVRQIAPGQTGKIADYNYKLPDDFTGCVIAWNSKHIDAKEGGNFNYLYRLFRKANLKPFERDISTEIYQAGSKPCNGQTGLNCYYPLYRYGFYPTDGVGHQPYRVVVLSFELLNAPATVCGPKKSTNLVKNKCVNFNFNGLTGTGVLTESNKKFLPFQQFGRDIADTTDAVRDPQTLEILDITPCSFGGVSVITPGTNASNQVAVLYQDVNCTEVPVAIHADQLTPTWRVYSTGSNVFQTRAGCLIGAEHVNNSYECDIPIGAGICASYQTQTNSRSVASQSIIAYTMSLGAENSVAYSNNSIAIPTNFTISVTTEILPVSMTKTSVDCTMYICGDSTECSNLLLQYGSFCTQLNRALTGIAVEQDKNTQEVFAQVKQIYKTPPIKDFGGFNFSQILPDPSKPSKRSFIEDLLFNKVTLADAGFIKQYGDCLGDIAARDLICAQKFNGLTVLPPLLTDEMIAQYTSALLAGTITSGWTFCAGAALQIPFAMQMAYRFNGIGVTQNVLYENQKLIANQFNSAIGKIQDSLSSTASALGKLQDVVNQNAQALNTLVKQLSSNFGAISSVLNDILSRLDKVEAEVQIDRLITGRLQSLQTYVTQQLIRAAEIRASANLAATKMSECVCGQSKRVDFCGKGYHLMSFPQSAPHGVVFLHVTYVPAQEKNFTTAPAICHDGKAHFPREGVFVSNGTHWFVTQRNFYEPQIITTDNTFVSGSCDVVIGIVNNTVYDPLQPELDSFKEELDKYFKNHTSPDVDLGDISGINASVVNIQKEIDRLNEVAKNLNESLIDLQELGKYEQYIK

SEQ ID NO: 2152 - protein, 1211 aa, Artificial Sequence
  SARS-CoV-2/Wuhan/HBCDC-HB-01/2019__EPI_ISL_402132 spike protein (1-1211)(G889C_L1034C)
MFVFLVLLPLVSSQCVNLTTRTQLPPAYTNSITRGVYYPDKVFRSSVLHSTQDLFLPFFSNVTWFHAIHVSGTNGTKRFDNPVLPFNDGVYFASTEKSNIIRGWIFGTTLDSKTQSLLIVNNATNVVIKVCEFQFCNDPFLGVYYHKNNKSWMESEFRVYSSANNCTFEYVSQPFLMDLEGKQGNFKNLREFVFKNIDGYFKIYSKHTPINLVRDLPQGFSALEPLVDLPIGINITRFQTLLALHRSYLTPGDSSSGWTAGAAAYYVGYLQPRTFLLKYNENGTITDAVDCALDPLSETKCTLKSFTVEKGIYQTSNFRVQPTESIVRFPNITNLCPFGEVFNATRFASVYAWNRKRISNCVADYSVLYNSASFSTFKCYGVSPTKLNDLCFTNVYADSFVIRGDEVRQIAPGQTGKIADYNYKLPDDFTGCVIAWNSNNLDSKVGGNYNYLYRLFRKSNLKPFERDISTEIYQAGSTPCNGVEGFNCYFPLQSYGFQPTNGVGYQPYRVVVLSFELLHAPATVCGPKKSTNLVKNKCVNFNFNGLTGTGVLTESNKKFLPFQQFGRDIADTTDAVRDPQTLEILDITPCSFGGVSVITPGTNTSNQVAVLYQDVNCTEVPVAIHADQLTPTWRVYSTGSNVFQTRAGCLIGAEHVNNSYECDIPIGAGICASYQTQTNSPRRARSVASQSIIAYTMSLGAENSVAYSNNSIAIPTNFTISVTTEILPVSMTKTSVDCTMYICGDSTECSNLLLQYGSFCTQLNRALTGIAVEQDKNTQEVFAQVKQIYKTPPIKDFGGFNFSQILPDPSKPSKRSFIEDLLFNKVTLADAGFIKQYGDCLGDIAARDLICAQKFNGLTVLPPLLTDEMIAQYTSALLAGTITSGWTFCAGAALQIPFAMQMAYRFNGIGVTQNVLYENQKLIANQFNSAIGKIQDSLSSTASALGKLQDVVNQNAQALNTLVKQLSSNFGAISSVLNDILSRLDKVEAEVQIDRLITGRLQSLQTYVTQQLIRAAEIRASANLAATKMSECVCGQSKRVDFCGKGYHLMSFPQSAPHGVVFLHVTYVPAQEKNFTTAPAICHDGKAHFPREGVFVSNGTHWFVTQRNFYEPQIITTDNTFVSGNCDVVIGIVNNTVYDPLQPELDSFKEELDKYFKNHTSPDVDLGDISGINASVVNIQKEIDRLNEVAKNLNESLIDLQELGKYEQYIK

SEQ ID NO: 2153 - protein, 1211 aa, Artificial Sequence
  SARS-CoV-2/Guangdong/20SF028/2020__EPI_ISL_403936 spike protein (1-1211)(G889C_L1034C)
MFVFLVLLPLVSSQCVNLTTRTQLPPAYTNSFTRGVYYPDKVFRSSVLYSTQDLFLPFFSNVTWFHAIHVSGTNGTKRFDNPVLPFNDGVYFASTEKSNIIRGWIFGTTLDSKTQSLLIVNNATNVVIKVCEFQFCNDPFLGVYYHKNNKSWMESEFRVYSSANNCTFEYVSQPFLMDLEGKQGNFKNLREFVFKNIDGYFKIYSKHTPINLVRDLPQGFSALEPLVDLPIGINITRFQTLLALHRSYLTPGDSSSGWTAGAAAYYVGYLQPRTFLLKYNENGTITDAVDCALDPLSETKCTLKSFTVEKGIYQTSNFRVQPTESIVRFPNITNLCPFGEVFNATRFASVYAWNRKRISNCVADYSVLYNSASFSTFKCYGVSPTKLNDLCFTNVYADSFVIRGDEVRQIAPGQTGKIADYNYKLPDDFTGCVIAWNSNNLDSKVGGNYNYLYRLFRKSNLKPFERDISTEIYQAGSTPCNGVEGFNCYFPLQSYGFQPTNGVGYQPYRVVVLSFELLHAPATVCGPKKSTNLVKNKCVNFNFNGLTGTGVLTESNKKFLPFQQFGRDIADTTDAVRDPQTLEILDITPCSFGGVSVITPGTNTSNQVAVLYQDVNCTEVPVAIHADQLTPTWRVYSTGSNVFQTRAGCLIGAEHVNNSYECDIPIGAGICASYQTQTNSPRRARSVASQSIIAYTMSLGAENSVAYSNNSIAIPTNFTISVTTEILPVSMTKTSVDCTMYICGDSTECSNLLLQYGSFCTQLNRALTGIAVEQDKNTQEVFAQVKQIYKTPPIKDFGGFNFSQILPDPSKPSKRSFIEDLLFNKVTLADAGFIKQYGDCLGDIAARDLICAQKFNGLTVLPPLLTDEMIAQYTSALLAGTITSGWTFCAGAALQIPFAMQMAYRFNGIGVTQNVLYENQKLIANQFNSAIGKIQDSLSSTASALGKLQDVVNQNAQALNTLVKQLSSNFGAISSVLNDILSRLDKVEAEVQIDRLITGRLQSLQTYVTQQLIRAAEIRASANLAATKMSECVCGQSKRVDFCGKGYHLMSFPQSAPHGVVFLHVTYVPAQEKNFTTAPAICHDGKAHFPREGVFVSNGTHWFVTQRNFYEPQIITTDNTFVSGNCDVVIGIVNNTVYDPLQPELDSFKEELDKYFKNHTSPDVDLGDISGINASVVNIQKEIDRLNEVAKNLNESLIDLQELGKYEQYIK

SEQ ID NO: 2154 - protein, 1211 aa, Artificial Sequence
  SARS-CoV-2/Shenzhen/SZTH-001/2020__EPI_ISL_406592 spike protein (1-1211)(G889C_L1034C)
MFVFLVLLPLVSSQCVNLTTRTQLPPAYTNSFTRGVYYPDKVFRSSVLHSTQDLFLPFFSNVTWFHAIHVSGTNGTKRFDNPVLPFNDGVYFASTEKSNIIRGWIFGTTLDSKTQSLLIVNNATNVVIKVCEFQFCNDPFLGVYYHKNNKSWMESEFRVYSSANNCTFEYVSQPFLMDLEGKQGNFKNLREFVFKNIDGYFKIYSKHTPINLVRDLPQGFSALEPLVDLPIGINITRFQTLLALHRSYLTPGDSSSGWTAGAAAYYVGYLQPRTFLLKYNENGTITDAVDCALDPLSETKCTLKSFTVEKGIYQTSNFRVQPTESIVRFPNITNLCPFGEVFNATRFASVYAWNRKRISNCVADYSVLYNSASFSTFKCYGVSPTKLNDLCFTNVYADSFVIRGDEVRQIAPGQTGKIADYNYKLPDDFTGCVIAWNSNNLDSKVGGNYNYLYRLFRKSNLKPFERDISTEIYQAGSTPCNGVEGFNCYFPLQSYGFQPTNGVGYQPYRVVVLSFELLHAPATVCGPKKSTNLVKNKCVNFNFNGLTGTGVLTESNKKFLPFQQFGRDIADTTDAVRDPQTLEILDITPCSFGGVSVITPGTNTSNQVAVLYQDVNCTEVPVAIHADQLTPTWRVYSTGSNVFQTRAGCLIGAEHVNNSYECDIPIGAGICASYQTQTNSPRRARSVASQSIIAYTMSLGAENSVAYSNNSIAIPTNFTISVTTEILPVSMTKTSVDCTMYICGDSTECSNLLLQYGSFCTQLNRALTGIAVEQDKNTQEVFAQVKQIYKTPPIKDFGGFNFSQILPDPSKPSKRSFIEDLLFNKVTLADAGFIKQYGDCLGDIAARDLICAQKFNGLTVLPPLLTDEMIAQYTSALLAGTITSGWTFCAGAALQIPFAMQMAYRFNGIGVTQNVLYENQKLIANQFNSAIGKIQDSLSSTASALGKLQDVVNQNAQALNTLVKQLSSNFGAISSVLNDILSRLDKVEAEVQIDRLITGRLQSLQTYVTQQLIRAAEIRASANLAATKMSECVCGQSKRVDFCGKGYHLMSFPQSAPHGVVFLHVTYVPAQEKNFTTAPAICHDGKAHFPREGVFVSNGTHWFVTQRNFYEPQIITTDNTFVSGNCDVLIGIVNNTVYDPLQPELDSFKEELDKYFKNHTSPDVDLGDISGINASVVNIQKEIDRLNEVAKNLNESLIDLQELGKYEQYIK

SEQ ID NO: 2155 - protein, 1211 aa, Artificial Sequence
  SARS-CoV-2/Shenzhen/SZTH-004/2020__EPI_ISL_406595 spike protein (1-1211)(G889C_L1034C)
MFVFLVLLPLVSSQCVNLTTRTQLPPAYTNSFTRGVYYPDKVFRSSVLHSTQDLFLPFFSNVTWFHAIHVSGTNGTKRFDNPVLPFNDGVYFASTEKSNIIRGWIFGTTLDSKTQSLLIVNNATNVVIKVCEFQFCNDPFLGVYYHKNNKSWMESEFRVYSSANNCTFEYVSQPFLMDLEGKQGNFKNLREFVFKNIDGYFKIYSKHTPINLVRDLPQGFSALEPLVDLPIGINITRFQTLLALHRSYLTPGDSSSGWTAGAAAYYVGYLQPRTFLLKYNENGTITDAVDCALDPLSETKCTLKSFTVEKGIYQTSNFRVQPTESIVRFPNITNLCPFGEVFNATRFASVYAWDRKRISNCVAYYSVLYNSASFSTFKCYGVSPTKLNDLCFTNVYADSFVIRGDEVRQIAPGQTGKIADYNYKLPDDFTGCVIAWNSNNLDSKVGGNYNYLYRLFRKSNLKPFERDISTEIYQAGSTPCNGVEGFNCYFPLQSYGFQPTNGVGYQPYRVVVLSFELLHAPATVCGPKKSTNLVKNKCVNFNFNGLTGTGVLTESNKKFLPFQQFGRDIADTTDAVRDPQTLEILDITPCSFGGVSVITPGTNTSNQVAVLYQDVNCTEVPVAIHADQLTPTWRVYSTGSNVFQTRAGCLIGAEHVNNSYECDIPIGAGICASYQTQTNSPRRARSVASQSIIAYTMSLGAENSVAYSNNSIAIPTNFTISVTTEILPVSMTKTSVDCTMYICGDSTECSNLLLQYGSFCTQLNRALTGIAVEQDKNTQEVFAQVKQIYKTPPIKDFGGFNFSQILPDPSKPSKRSFIEDLLFNKVTLADAGFIKQYGDCLGDIAARDLICAQKFNGLTVLPPLLTDEMIAQYTSALLAGTITSGWTFCAGAALQIPFAMQMAYRFNGIGVTQNVLYENQKLIANQFNSAIGKIQDSLSSTASALGKLQDVVNQNAQALNTLVKQLSSNFGAISSVLNDILSRLDKVEAEVQIDRLITGRLQSLQTYVTQQLIRAAEIRASANLAATKMSECVCGQSKRVDFCGKGYHLMSFPQSAPHGVVFLHVTYVPAQEKNFTTAPAICHDGKAHFPREGVFVSNGTHWFVTQRNFYEPQIITTDNTFVSGNCDVVIGIVNNTVYDPLQPELDSFKEELDKYFKNHTSPDVDLGDISGINASVVNIQKEIDRLNEVAKNLNESLIDLQELGKYEQYIK

SEQ ID NO: 2156 - protein, 1211 aa, Artificial Sequence
  SARS-CoV-2/France/IDF0372/2020__EPI_ISL_406596 spike protein (1-1211)(G889C_L1034C)
MFVFLVLLPLVSSQCVNLTTRTQLPPAYTNSFTRGVYYPDKVFRSSVLHSTQDLFLPFFSNVTWFHAIHVSGTNGTKRFDNPVLPFNDGVYFASTEKSNIIRGWIFGTTLDSKTQSLLIVNNATNVVIKVCEFQFCNDPFLGVYYHKNNKSWMESEFRVYSSANNCTFEYVSQPFLMDLEGKQGNFKNLREFVFKNIDGYFKIYSKHTPINLVRDLPQGFSALEPLVDLPIGINITRFQTLLALHRSYLTPGDSSSGWTAGAAAYYVGYLQPRTFLLKYNENGTITDAVDCALDPLSETKCTLKSFTVEKGIYQTSNFRVQPTESIVRFPNITNLCPFGEVFNATRFASVYAWNRKRISNCVADYSFLYNSASFSTFKCYGVSPTKLNDLCFTNVYADSFVIRGDEVRQIAPGQTGKIADYNYKLPDDFTGCVIAWNSNNLDSKVGGNYNYLYRLFRKSNLKPFERDISTEIYQAGSTPCNGVEGFNCYFPLQSYGFQPTNGVGYQPYRVVVLSFELLHAPATVCGPKKSTNLVKNKCVNFNFNGLTGTGVLTESNKKFLPFQQFGRDIADTTDAVRDPQTLEILDITPCSFGGVSVITPGTNTSNQVAVLYQDVNCTEVPVAIHADQLTPTWRVYSTGSNVFQTRAGCLIGAEHVNNSYECDIPIGAGICASYQTQTNSPRRARSVASQSIIAYTMSLGAENSVAYSNNSIAIPTNFTISVTTEILPVSMTKTSVDCTMYICGDSTECSNLLLQYGSFCTQLNRALTGIAVEQDKNTQEVFAQVKQIYKTPPIKDFGGFNFSQILPDPSKPSKRSFIEDLLFNKVTLADAGFIKQYGDCLGDIAARDLICAQKFNGLTVLPPLLTDEMIAQYTSALLAGTITSGWTFCAGAALQIPFAMQMAYRFNGIGVTQNVLYENQKLIANQFNSAIGKIQDSLSSTASALGKLQDVVNQNAQALNTLVKQLSSNFGAISSVLNDILSRLDKVEAEVQIDRLITGRLQSLQTYVTQQLIRAAEIRASANLAATKMSECVCGQSKRVDFCGKGYHLMSFPQSAPHGVVFLHVTYVPAQEKNFTTAPAICHDGKAHFPREGVFVSNGTHWFVTQRNFYEPQIITTDNTFVSGNCDVVIGIVNNTVYDPLQPELDSFKEELDKYFKNHTSPDVDLGDISGINASVVNIQKEIDRLNEVAKNLNESLIDLQELGKYEQYIK

SEQ ID NO: 2157 - protein, 1211 aa, Artificial Sequence
  SARS-CoV-2/Australia/VIC01/2020__EPI_ISL_406844 spike protein (1-1211)(G889C_L1034C)
MFVFLVLLPLVSSQCVNLTTRTQLPPAYTNSFTRGVYYPDKVFRSSVLHSTQDLFLPFFSNVTWFHAIHVSGTNGTKRFDNPVLPFNDGVYFASTEKSNIIRGWIFGTTLDSKTQSLLIVNNATNVVIKVCEFQFCNDPFLGVYYHKNNKSWMESEFRVYSSANNCTFEYVSQPFLMDLEGKQGNFKNLREFVFKNIDGYFKIYSKHTPINLVRDLPQGFSALEPLVDLPIGINITRFQTLLALHRRYLTPGDSSSGWTAGAAAYYVGYLQPRTFLLKYNENGTITDAVDCALDPLSETKCTLKSFTVEKGIYQTSNFRVQPTESIVRFPNITNLCPFGEVFNATRFASVYAWNRKRISNCVADYSVLYNSASFSTFKCYGVSPTKLNDLCFTNVYADSFVIRGDEVRQIAPGQTGKIADYNYKLPDDFTGCVIAWNSNNLDSKVGGNYNYLYRLFRKSNLKPFERDISTEIYQAGSTPCNGVEGFNCYFPLQSYGFQPTNGVGYQPYRVVVLSFELLHAPATVCGPKKSTNLVKNKCVNFNFNGLTGTGVLTESNKKFLPFQQFGRDIADTTDAVRDPQTLEILDITPCSFGGVSVITPGTNTSNQVAVLYQDVNCTEVPVAIHADQLTPTWRVYSTGSNVFQTRAGCLIGAEHVNNSYECDIPIGAGICASYQTQTNSPRRARSVASQSIIAYTMSLGAENSVAYSNNSIAIPTNFTISVTTEILPVSMTKTSVDCTMYICGDSTECSNLLLQYGSFCTQLNRALTGIAVEQDKNTQEVFAQVKQIYKTPPIKDFGGFNFSQILPDPSKPSKRSFIEDLLFNKVTLADAGFIKQYGDCLGDIAARDLICAQKFNGLTVLPPLLTDEMIAQYTSALLAGTITSGWTFCAGAALQIPFAMQMAYRFNGIGVTQNVLYENQKLIANQFNSAIGKIQDSLSSTASALGKLQDVVNQNAQALNTLVKQLSSNFGAISSVLNDILSRLDKVEAEVQIDRLITGRLQSLQTYVTQQLIRAAEIRASANLAATKMSECVCGQSKRVDFCGKGYHLMSFPQSAPHGVVFLHVTYVPAQEKNFTTAPAICHDGKAHFPREGVFVSNGTHWFVTQRNFYEPQIITTDNTFVSGNCDVVIGIVNNTVYDPLQPELDSFKEELDKYFKNHTSPDVDLGDISGINASVVNIQKEIDRLNEVAKNLNESLIDLQELGKYEQYIK

SEQ ID NO: 2158 - protein, 1211 aa, Artificial Sequence
  SARS-CoV-2/Germany/BavPat1/2020__EPI_ISL_406862 spike protein (1-1211)(G889C_L1034C)
MFVFLVLLPLVSSQCVNLTTRTQLPPAYTNSFTRGVYYPDKVFRSSVLHSTQDLFLPFFSNVTWFHAIHVSGTNGTKRFDNPVLPFNDGVYFASTEKSNIIRGWIFGTTLDSKTQSLLIVNNATNVVIKVCEFQFCNDPFLGVYYHKNNKSWMESEFRVYSSANNCTFEYVSQPFLMDLEGKQGNFKNLREFVFKNIDGYFKIYSKHTPINLVRDLPQGFSALEPLVDLPIGINITRFQTLLALHRSYLTPGDSSSGWTAGAAAYYVGYLQPRTFLLKYNENGTITDAVDCALDPLSETKCTLKSFTVEKGIYQTSNFRVQPTESIVRFPNITNLCPFGEVFNATRFASVYAWNRKRISNCVADYSVLYNSASFSTFKCYGVSPTKLNDLCFTNVYADSFVIRGDEVRQIAPGQTGKIADYNYKLPDDFTGCVIAWNSNNLDSKVGGNYNYLYRLFRKSNLKPFERDISTEIYQAGSTPCNGVEGFNCYFPLQSYGFQPTNGVGYQPYRVVVLSFELLHAPATVCGPKKSTNLVKNKCVNFNFNGLTGTGVLTESNKKFLPFQQFGRDIADTTDAVRDPQTLEILDITPCSFGGVSVITPGTNTSNQVAVLYQGVNCTEVPVAIHADQLTPTWRVYSTGSNVFQTRAGCLIGAEHVNNSYECDIPIGAGICASYQTQTNSPRRARSVASQSIIAYTMSLGAENSVAYSNNSIAIPTNFTISVTTEILPVSMTKTSVDCTMYICGDSTECSNLLLQYGSFCTQLNRALTGIAVEQDKNTQEVFAQVKQIYKTPPIKDFGGFNFSQILPDPSKPSKRSFIEDLLFNKVTLADAGFIKQYGDCLGDIAARDLICAQKFNGLTVLPPLLTDEMIAQYTSALLAGTITSGWTFCAGAALQIPFAMQMAYRFNGIGVTQNVLYENQKLIANQFNSAIGKIQDSLSSTASALGKLQDVVNQNAQALNTLVKQLSSNFGAISSVLNDILSRLDKVEAEVQIDRLITGRLQSLQTYVTQQLIRAAEIRASANLAATKMSECVCGQSKRVDFCGKGYHLMSFPQSAPHGVVFLHVTYVPAQEKNFTTAPAICHDGKAHFPREGVFVSNGTHWFVTQRNFYEPQIITTDNTFVSGNCDVVIGIVNNTVYDPLQPELDSFKEELDKYFKNHTSPDVDLGDISGINASVVNIQKEIDRLNEVAKNLNESLIDLQELGKYEQYIK

SEQ ID NO: 2159 - protein, 1211 aa, Artificial Sequence
  SARS-CoV-2/Wuhan/HBCDC-HB-02/2020__EPI_ISL_412978 spike protein (1-1211)(G889C_L1034C)
MFVFLVLLPLVSSQCVNLTTRTQLPPAYTNSFTRGVYYPDKVFRSSVLHSTQDLFLPFFSNVTWFHAIHVSGTNGTKRFDNPVLPFNDGVYFASTEKSNIIRGWIFGTTLDSKTQSLLIVNNATNVVIKVCEFQFCNDPFLGVYYHKNNKSWMESEFRVYSSANNCTFEYVSQPFLMDLEGKQGNFKNLREFVFKNIDGYFKIYSKHTPINLVRDLPQGFSALEPLVDLPIGINITRFQTLLALHRSYLTPGDSSSGWTAGAAAYYVGYLQPRTFLLKYNENGTITDAVDCALDPLSETKCTLKSFTVEKGIYQTSNFRVQPTESIVRFPNITNLCPFGEVFNATRFASVYAWNRKRISNCVADYSVLYNSASFSTFKCYGVSPTKLNDLCFTNVYADSFVIRGDEVRQIAPGQTGKIADYNYKLPDDFTGCVIAWNSNNLDSKVGGNYNYLYRLFRKSNLKPFERDISTEIYQAGSTPCNGVEGFNCYFPLQSYGFQPTNGVGYQPYRVVVLSFELLHAPATVCGPKKSTNLVKNKCVNFNFNGLTGTGVLTESNKKFLPFQQFGRDIADTTDAVRDPQTLEILDITPCSFGGVSVITPGTNTSNQVAVLYQDVNCTEVPVAIHADQLTPTWRVYSTGSNVFQTRAGCLIGAEHVNNSYECDIPIGAGICASYQTQTNSPRRARSVASQSIIAYTMSLGAENSVAYSNNSIAIPTNFTISVTTEILPVSMTKTSVDCTMYICGDSTECSNFLLQYGSFCTQLNRALTGIAVEQDKNTQEVFAQVKQIYKTPPIKDFGGFNFSQILPDPSKPSKRSFIEDLLFNKVTLADAGFIKQYGDCLGDIAARDLICAQKFNGLTVLPPLLTDEMIAQYTSALLAGTITSGWTFCAGAALQIPFAMQMAYRFNGIGVTQNVLYENQKLIANQFNSAIGKIQDSLSSTASALGKLQDVVNQNAQALNTLVKQLSSNFGAISSVLNDILSRLDKVEAEVQIDRLITGRLQSLQTYVTQQLIRAAEIRASANLAATKMSECVCGQSKRVDFCGKGYHLMSFPQSAPHGVVFLHVTYVPAQEKNFTTAPAICHDGKAHFPREGVFVSNGTHWFVTQRNFYEPQIITTDNTFVSGNCDVVIGIVNNTVYDPLQPELDSFKEELDKYFKNHTSPDVDLGDISGINASVVNIQKEIDRLNEVAKNLNESLIDLQELGKYEQYIK

SEQ ID NO: 2160 - protein, 1211 aa, Artificial Sequence
  SARS-CoV-2/Australia/QLD02/2020__EPI_ISL_407896 spike protein (1-1211)(G889C_L1034C)
MFVFLVLLPLVSSQCVNLTTRTQLPPAYTNSFTRGVYYPDKVFRSSVLHSTQDLFLPFFSNVTWFHAIHVSGTNGTKRFDNPVLPFNDGVYFASTEKSNIIRGWIFGTTLDSKTQSLLIVNNATNVVIKVCEFQFCNDPFLGVYYHKNNKSWMESEFRVYSSANNCTFEYVSQPFLMDLEGKQGNFKNLREFVFKNIDGYFKIYSKHTPINLVRDLPQGFSALEPLVDLPIGINITRFQTLLALHRSYLTPGDSSSGWTAGAAAYYVGYLQPRTFLLKYNENGTITDAVDCALDPLSETKCTLKSFTVEKGIYQTSNFRVQPTESIVRFPNITNLCPFGEVFNATRFASVYAWNRKRISNCVADYSVLYNSASFSTFKCYGVSPTKLNDLCFTNVYADSFVIRGDEVRQIAPGQTGKIADYNYKLPDDFTGCVIAWNSNNLDSKVGGNYNYLYRLFRKSNLKPFERDISTEIYQAGSTPCNGVEGFNCYFPLQSYGFQPTNGVGYQPYRVVVLSFELLHAPATVCGPKKSTNLVKNKCVNFNFNGLTGTGVLTESNKKFLPFQQFGRDIADTTDAVRDPQTLEILDITPCSFGGVSVITPGTNTSNQVAVLYQDVNCTEVPVAIHADQLTPTWRVYSTGSNVFQTRAGCLIGAEHVNNSYECDIPIGAGICASYQTQTNSPRRARSVASQSIIAYTMSLGAENSVAYSNNSIAIPTNFTISVTTEILPVSMTKTSVDCTMYICGDSTECSNLLLQYGSFCTQLNRALTGIAVEQDKNTQEVFAQVKQIYKTPPIKDFGGFNFSQILPDPSKPSKRSFIEDLLFNKVTLADAGFIKQYGDCLGDIAARDLICAQKFNGLTVLPPLLTDEMIAQYTSALLAGTITSGWTFCAGAALQIPFAMQMAYRFNGIGVTQNVLYENQKLIANQFNSAIGKIQDSLSSTASALGKLQDVVNQNAQALNTLVKQLSSNFGAISSVLNDILSRLDKVEAEVQIDRLITGRLQSLQTYVTQQLIRAAEIRASANLAATKMSECVCGQSKRVDFCGKGYHLMSFPQSAPHGVVFLHVTYVPAQEKNFTTAPAICHDGKAHFPREGVFVSNGTHWFVTQRNFYEPQIITTDNTFVSGNCDVVIGIVNNTVYDPLQLELDSFKEELDKYFKNHTSPDVDLGDISGINASVVNIQKEIDRLNEVAKNLNESLIDLQELGKYEQYIK

SEQ ID NO: 2161 - protein, 1211 aa, Artificial Sequence
  SARS-CoV-2/India/1-31/2020__EPI_ISL_413523 spike protein (1-1211)(G889C_L1034C)
MFVFLVLLPLVSSQCVNLTTRTQLPPAYTNSFTRGVYYPDKVFRSSVLHSTQDLFLPFFSNVTWFHAIHVSGTNGTKRFDNPVLPFNDGVYFASTEKSNIIRGWIFGTTLDSKTQSLLIVNNATNVVIKVCEFQFCNDPFLGVYYHKNNKSWMESEFRVYSSANNCTFEYVSQPFLMDLEGKQGNFKNLREFVFKNIDGYFKIYSKHTPINLVRDLPQGFSALEPLVDLPIGINITRFQTLLALHRSYLTPGDSSSGWTAGAAAYYVGYLQPRTFLLKYNENGTITDAVDCALDPLSETKCTLKSFTVEKGIYQTSNFRVQPTESIVRFPNITNLCPFGEVFNATRFASVYAWNRKRISNCVADYSVLYNSASFSTFKCYGVSPTKLNDLCFTNVYADSFVIRGDEVRQIAPGQTGKIADYNYKLPDDFTGCVIAWNSNNLDSKVGGNYNYLYRLFRKSNLKPFERDISTEIYQAGSTPCNGVEGFNCYFPLQSYGFQPTNGVGYQPYRVVVLSFELLHAPATVCGPKKSTNLVKNKCVNFNFNGLTGTGVLTESNKKFLPFQQFGRDIADTTDAVRDPQTLEILDITPCSFGGVSVITPGTNTSNQVAVLYQDVNCTEVPVAIHADQLTPTWRVYSTGSNVFQTRAGCLIGAEHVNNSYECDIPIGAGICASYQTQTNSPRRARSVASQSIIAYTMSLGAENSVAYSNNSIAIPTNFTISVTTEILPVSMTKTSVDCTMYICGDSTECSNLLLQYGSFCTQLNRALTGIAVEQDKNTQEVFAQVKQIYKTPPIKDFGGFNFSQILPDPSKPSKRSFIEDLLFNKVTLADAGFIKQYGDCLGDIAARDLICAQKFNGLTVLPPLLTDEMIAQYTSALLAGTITSGWTFCAGAALQIPFAMQMAYRFNGIGVTQNVLYENQKLIANQFNSVIGKIQDSLSSTASALGKLQDVVNQNAQALNTLVKQLSSNFGAISSVLNDILSRLDKVEAEVQIDRLITGRLQSLQTYVTQQLIRAAEIRASANLAATKMSECVCGQSKRVDFCGKGYHLMSFPQSAPHGVVFLHVTYVPAQEKNFTTAPAICHDGKAHFPREGVFVSNGTHWFVTQRNFYEPQIITTDNTFVSGNCDVVIGIVNNTVYDPLQPELDSFKEELDKYFKNHTSPDVDLGDISGINASVVNIQKEIDRLNEVAKNLNESLIDLQELGKYEQYIK

SEQ ID NO: 2162 - protein, 1211 aa, Artificial Sequence
  SARS-CoV-2/Guangdong/GD2020087-P0008/2020__EPI_ISL_413863 spike protein (1-1211)(G889C_L1034C)
MFVFLVLLPLVSSQCVNLTTRTQLPPAYTNSFTRGVYYPDKVFRSSVLHSTQDLFLPFFSNVTWFHAIHVSGTNGTKRFDNPVLPFNDGVYFASTEKSNIIRGWIFGTTLDSKTQSLLIVNNATNVVIKVCEFQFCNDPFLGVYYHKNNKSWMESEFRVYSSANNCTFEYVSQPFLMDLEGKQGNFKNLREFVFKNIDGYFKIYSKHTPINLVRDLPQGFSALEPLVDLPIGINITRFQTLLALHRSYLTPGDSSSGWTAGAAAYYVGYLQPRTFLLKYNENGTITDAVDCALDPLSETKCTLKSFTVEKGIYQTSNFRVQPTESIVRFPNITNLCPFGEVFNATRFASVYAWNRKRISNCVADYSVLYNSASFSTFKCYGVSPTKLNDLCFTNVYADSFVIRGDEVREIAPGQTGKIADYNYKLPDDFTGCVIAWNSNNLDSKVGGNYNYLYRLFRKSNLKPFERDISTEIYQAGSTPCNGVEGFNCYFPLQSYGFQPTNGVGYQPYRVVVLSFELLHAPATVCGPKKSTNLVKNKCVNFNFNGLTGTGVLTESNKKFLPFQQFGRDIADTTDAVRDPQTLEILDITPCSFGGVSVITPGTNTSNQVAVLYQDVNCTEVPVAIHADQLTPTWRVYSTGSNVFQTRAGCLIGAEHVNNSYECDIPIGAGICASYQTQTNSPRRARSVASQSIIAYTMSLGAENSVAYSNNSIAIPTNFTISVTTEILPVSMTKTSVDCTMYICGDSTECSNLLLQYGSFCTQLNRALTGIAVEQDKNTQEVFAQVKQIYKTPPIKDFGGFNFSQILPDPSKPSKRSFIEDLLFNKVTLADAGFIKQYGDCLGDIAARDLICAQKFNGLTVLPPLLTDEMIAQYTSALLAGTITSGWTFCAGAALQIPFAMQMAYRFNGIGVTQNVLYENQKLIANQFNSAIGKIQDSLSSTASALGKLQDVVNQNAQALNTLVKQLSSNFGAISSVLNDILSRLDKVEAEVQIDRLITGRLQSLQTYVTQQLIRAAEIRASANLAATKMSECVCGQSKRVDFCGKGYHLMSFPQSAPHGVVFLHVTYVPAQEKNFTTAPAICHDGKAHFPREGVFVSNGTHWFVTQRNFYEPQIITTDNTFVSGNCDVVIGIVNNTVYDPLQPELDSFKEELDKYFKNHTSPDVDLGDISGINASVVNIQKEIDRLNEVAKNLNESLIDLQELGKYEQYIK

SEQ ID NO: 2163 - protein, 1211 aa, Artificial Sequence
  SARS-CoV-2/Sweden/01/2020__EPI_ISL_411951 spike protein (1-1211)(G889C_L1034C)
MFVFLVLLPLVSSQCVNLTTRTQLPPAYTNSFTRGVYYPDKVFRSSVLHSTQDLFLPFFSNVTWFHAIHVSGTNGTKRFDNPVLPFNDGVYFASTEKSNIIRGWIFGTTLDSKTQSLLIVNNATNVVIKVCEFQFCNDPFLGVYYHKNNKSWMESEFRVYSSANNCTFEYVSQPFLMDLEGKQGNFKNLREFVFKNIDGYFKIYSKHTPINLVRDLPQGFSALEPLVDLPIGINITRFQTLLALHRSYLTPGDSSSGWTAGAAAYYVGYLQPRTFLLKYNENGTITDAVDCALDPLSETKCTLKSFTVEKGIYQTSNFRVQPTESIVRFPNITNLCPFGEVFNATRFASVYAWNRKRISNCVADYSVLYNSASFSTFKCYGVSPTKLNDLCFTNVYADSFVIRGDEVRQIAPGQTGKIADYNYKLPDDFTGCVIAWNSNNLDSKVGGNYNYLYRLFRKSNLKPFERDISTEIYQAGSTPCNGVEGFNCYFPLQSYGFQPTNGVGYQPYRVVVLSFELLHAPATVCGPKKSTNLVKNKCVNFNFNGLTGTGVLTESNKKFLPFQQFGRDIADTTDAVRDPQTLEILDITPCSFGGVSVITPGTNTSNQVAVLYQDVNCTEVPVAIHADQLTPTWRVYSTGSNVFQTRAGCLIGAEHVNNSYECDIPIGAGICASYQTQTNSPRRARSVASQSIIAYTMSLGAENSVAYSNNSIAIPTNFTISVTTEILPVSMTKTSVDCTMYICGDSTECSNLLLQYGSFCTQLNRALTGIAVEQDKNTQEVFAQVKQIYKTPPIKDCGGFNFSQILPDPSKPSKRSFIEDLLFNKVTLADAGFIKQYGDCLGDIAARDLICAQKFNGLTVLPPLLTDEMIAQYTSALLAGTITSGWTFCAGAALQIPFAMQMAYRFNGIGVTQNVLYENQKLIANQFNSAIGKIQDSLSSTASALGKLQDVVNQNAQALNTLVKQLSSNFGAISSVLNDILSRLDKVEAEVQIDRLITGRLQSLQTYVTQQLIRAAEIRASANLAATKMSECVCGQSKRVDFCGKGYHLMSFPQSAPHGVVFLHVTYVPAQEKNFTTAPAICHDGKAHFPREGVFVSNGTHWFVTQRNFYEPQIITTDNTFVSGNCDVVIGIVNNTVYDPLQPELDSFKEELDKYFKNHTSPDVDLGDISGINASVVNIQKEIDRLNEVAKNLNESLIDLQELGKYEQYIK

SEQ ID NO: 2164 - protein, 1211 aa, Artificial Sequence
  SARS-CoV-2/Tianmen/HBCDC-HB-07/2020__EPI_ISL_412983 spike protein (1-1211)(G889C_L1034C)
MFVFLVLLPLVSSQCVNLTTRTQLPPAYTNSFTRGVYYPDKVFRSSVLHSTQDLFLPFFSNVTWFHAIHVSGTNGTKRFDNPVLPFNDGVYFASTEKSNIIRGWIFGTTLDSKTQSLLIVNNATNVVIKVCEFQFCNDPFLGVYYHKNNKSWMESEFRVYSSANNCTFEYVSQPFLMDLEGKQGNFKNLREFVFKNIDGYFKIYSKHTPINLVRDLPQGFSALEPLVDLPIGINITRFQTLLALHRSYLTPGDSSSGWTAGAAAYYVGYLQPRTFLLKYNENGTITDAVDCALDPLSETKCTLKSFTVEKGIYQTSNFRVQPTESIVRFPNITNLCPFGEVFNATRFASVYAWNRKRISNCVADYSVLYNSASFSTFKCYGVSPTKLNDLCFTNVYADSFVIRGDEVRQIAPGQTGKIADYNYKLPDDFTGCVIAWNSNNLDSKVGGNYNYLYRLFRKSNLKPFERDISTEIYQAGSTPCNGVEGFNCYFPLQSYGFQPTNGVGYQPYRVVVLSFELLHAPATVCGPKKSTNLVKNKCVNFNFNGLTGTGVLTESNKKFLPFQQFGRDIADTTDAVRDPQTLEILDITPCSFGGVSVITPGTNTSNQVAVLYQDLNCTEVPVAIHADQLTPTWRVYSTGSNVFQTRAGCLIGAEHVNNSYECDIPIGAGICASYQTQTNSPRRARSVASQSIIAYTMSLGAENSVAYSNNSIAIPTNFTISVTTEILPVSMTKTSVDCTMYICGDSTECSNLLLQYGSFCTQLNRALTGIAVEQDKNTQEVFAQVKQIYKTPPIKDFGGFNFSQILPDPSKPSKRSFIEDLLFNKVTLADAGFIKQYGDCLGDIAARDLICAQKFNGLTVLPPLLTDEMIAQYTSALLAGTITSGWTFCAGAALQIPFAMQMAYRFNGIGVTQNVLYENQKLIANQFNSAIGKIQDSLSSTASALGKLQDVVNQNAQALNTLVKQLSSNFGAISSVLNDILSRLDKVEAEVQIDRLITGRLQSLQTYVTQQLIRAAEIRASANLAATKMSECVCGQSKRVDFCGKGYHLMSFPQSAPHGVVFLHVTYVPAQEKNFTTAPAICHDGKAHFPREGVFVSNGTHWFVTQRNFYEPQIITTDNTFVSGNCDVVIGIVNNTVYDPLQPELDSFKEELDKYFKNHTSPDVDLGDISGINASVVNIQKEIDRLNEVAKNLNESLIDLQELGKYEQYIK

SEQ ID NO: 2165 - protein, 1211 aa, Artificial Sequence
  SARS-CoV-2/Hong Kong/case42_VM20002493/2020__EPI_ISL_414527 spike protein (1-1211)(G889C_L1034C)
MFVFLVLLPLVSSQCVNLTTRTQLPPAYTNSFTRGVYYPDKVFRSSVLHSTQDLFLPFFSNVTWFHAIHVSGTNGTKRFDNPVLPFNDGVYFASTEKSNIIRGWIFGTTLDSKTQSLLIVNNATNVVIKVCEFQFCNDPFLGVYYHKNNKSWMESEFRVYSSANNCTFEYVSQPFLMDLEGKQGNFKNLREFVFKNIDGYFKIYSKHTPINLVRDLPQGFSALEPLVDLPIGINITRFQTLLALHRSYLTPGDSSSGWTAGAAAYYVGYLQPRTFLLKYNENGTITDAVDCALDPLSETKCTLKSFTVEKGIYQTSNFRVQPTESIVRFPNITNLCPFGEVFNATRFASVYAWNRKRISNCVADYSVLYNSASFSTFKCYGVSPTKLNDLCFTNVYADSFVIRGDEVRQIAPGQTGKIADYNYKLPDDFTGCVIAWNSNNLDSKVGGNYNYLYRLFRKSNLKPFERDISTEIYQAGSTPCNGVEGFNCYFPLQSYGFQPTNGVGYQPYRVVVLSFELLHAPATVCGPKKSTNLVKNKCVNFNFNGLTGTGVLTESNKKFLPFQQFGRDIADTTDAVRDPQTLEILDITPCSFGGVSVITPGTNTSNQVAVLYQDVNCTEVPVAIHADQLTPTWRVYSTGSNVFQTRAGCLIGAEHVNNSYECDIPIGAGICASYQTQTNSPRRARSVASQSIIAYTMSLGAENSVAYSNNSIAIPTNFAISVTTEILPVSMTKTSVDCTMYICGDSTECSNLLLQYGSFCTQLNRALTGIAVEQDKNTQEVFAQVKQIYKTPPIKDFGGFNFSQILPDPSKPSKRSFIEDLLFNKVTLADAGFIKQYGDCLGDIAARDLICAQKFNGLTVLPPLLTDEMIAQYTSALLAGTITSGWTFCAGAALQIPFAMQMAYRFNGIGVTQNVLYENQKLIANQFNSAIGKIQDSLSSTASALGKLQDVVNQNAQALNTLVKQLSSNFGAISSVLNDILSRLDKVEAEVQIDRLITGRLQSLQTYVTQQLIRAAEIRASANLAATKMSECVCGQSKRVDFCGKGYHLMSFPQSAPHGVVFLHVTYVPAQEKNFTTAPAICHDGKAHFPREGVFVSNGTHWFVTQRNFYEPQIITTDNTFVSGNCDVVIGIVNNTVYDPLQPELDSFKEELDKYFKNHTSPDVDLGDISGINASVVNIQKEIDRLNEVAKNLNESLIDLQELGKYEQYIK

SEQ ID NO: 2166 - protein, 1211 aa, Artificial Sequence
  SARS-CoV-2/USA/CruiseA-23/2020__EPI_ISL_414482 spike protein (1-1211)(G889C_L1034C)
MFVFLVLLPLVSSQCVNLTTRTQLPPAYTNSFTRGVYYPDKVFRSSVLHSTQDLFLPFFSNVTWFHAIHVSGTNGTKRFDNPVLPFNDGVYFASTEKSNIIRGWIFGTTLDSKTQSLLIVNNATNVVIKVCEFQFCNDPFLGVYYHKNNKSWMESEFRVYSSANNCTFEYVSQPFLMDLEVKQGNFKNLREFVFKNIDGYFKIYSKHTPINLVRDLPQGFSALEPLVDLPIGINITRFQTLLALHRSYLTPGDSSSGWTAGAAAYYVGYLQPRTFLLKYNENGTITDAVDCALDPLSETKCTLKSFTVEKGIYQTSNFRVQPTESIVRFPNITNLCPFGEVFNATRFASVYAWNRKRISNCVADYSVLYNSASFSTFKCYGVSPTKLNDLCFTNVYADSFVIRGDEVRQIAPGQTGKIADYNYKLPDDFTGCVIAWNSNNLDSKVGGNYNYLYRLFRKSNLKPFERDISTEIYQAGSTPCNGVEGFNCYFPLQSYGFQPTNGVGYQPYRVVVLSFELLHAPATVCGPKKSTNLVKNKCVNFNFNGLTGTGVLTESNKKFLPFQQFGRDIADTTDAVRDPQTLEILDITPCSFGGVSVITPGTNTSNQVAVLYQDVNCTEVPVAIHADQLTPTWRVYSTGSNVFQTRAGCLIGAEHVNNSYECDIPIGAGICASYQTQTNSPRRARSVASQSIIAYTMSLGAENSVAYSNNSIAIPTNFTISVTTEILPVSMTKTSVDCTMYICGDSTECSNLLLQYGSFCTQLNRALTGIAVEQDKNTQEVFAQVKQIYKTPPIKDFGGFNFSQILPDPSKPSKRSFIEDLLFNKVTLADAGFIKQYGDCLGDIAARDLICAQKFNGLTVLPPLLTDEMIAQYTSALLAGTITSGWTFCAGAALQIPFAMQMAYRFNGIGVTQNVLYENQKLIANQFNSAIGKIQDSLSSTASALGKLQDVVNQNAQALNTLVKQLSSNFGAISSVLNDILSRLDKVEAEVQIDRLITGRLQSLQTYVTQQLIRAAEIRASANLAATKMSECVCGQSKRVDFCGKGYHLMSFPQSAPHGVVFLHVTYVPAQEKNFTTAPAICHDGKAHFPREGVFVSNGTHWFVTQRNFYEPQIITTDNTFVSGNCDVVIGIVNNTVYDPLQPELDSFKEELDKYFKNHTSPDVDLGDISGINASVVNIQKEIDRLNEVAKNLNESLIDLQELGKYEQYIK

SEQ ID NO: 2167 - protein, 1211 aa, Artificial Sequence
  SARS-CoV-2/Hong Kong/case85_VM20002868/2020__EPI_ISL_414519 spike protein (1-1211)(G889C_L1034C)
MFVFLVLVPLVSSQCVNLTTRTQLPPAYTNSFTRGVYYPDKVFRSSVLHSTQDLFLPFFSNVTWFHAIHVSGTNGTKRFDNPVLPFNDGVYFASTEKSNIIRGWIFGTTLDSKTQSLLIVNNATNVVIKVCEFQFCNDPFLGVYYHKNNKSWMESEFRVYSSANNCTFEYVSQPFLMDLEGKQGNFKNLREFVFKNIDGYFKIYSKHTPINLVRDLPQGFSALEPLVDLPIGINITRFQTLLALHRSYLTPGDSSSGWTAGAAAYYVGYLQPRTFLLKYNENGTITDAVDCALDPLSETKCTLKSFTVEKGIYQTSNFRVQPTESIVRFPNITNLCPFGEVFNATRFASVYAWNRKRISNCVADYSVLYNSASFSTFKCYGVSPTKLNDLCFTNVYADSFVIRGDEVRQIAPGQTGKIADYNYKLPDDFTGCVIAWNSNNLDSKVGGNYNYLYRLFRKSNLKPFERDISTEIYQAGSTPCNGVEGFNCYFPLQSYGFQPTNGVGYQPYRVVVLSFELLHAPATVCGPKKSTNLVKNKCVNFNFNGLTGTGVLTESNKKFLPFQQFGRDIADTTDAVRDPQTLEILDITPCSFGGVSVITPGTNTSNQVAVLYQDVNCTEVPVAIHADQLTPTWRVYSTGSNVFQTRAGCLIGAEHVNNSYECDIPIGAGICASYQTQTNSPRRARSVASQSIIAYTMSLGAENSVAYSNNSIAIPTNFTISVTTEILPVSMTKTSVDCTMYICGDSTECSNLLLQYGSFCTQLNRALTGIAVEQDKNTQEVFAQVKQIYKTPPIKDFGGFNFSQILPDPSKPSKRSFIEDLLFNKVTLADAGFIKQYGDCLGDIAARDLICAQKFNGLTVLPPLLTDEMIAQYTSALLAGTITSGWTFCAGAALQIPFAMQMAYRFNGIGVTQNVLYENQKLIANQFNSAIGKIQDSLSSTASALGKLQDVVNQNAQALNTLVKQLSSNFGAISSVLNDILSRLDKVEAEVQIDRLITGRLQSLQTYVTQQLIRAAEIRASANLAATKMSECVCGQSKRVDFCGKGYHLMSFPQSAPHGVVFLHVTYVPAQEKNFTTAPAICHDGKAHFPREGVFVSNGTHWFVTQRNFYEPQIITTDNTFVSGNCDVVIGIVNNTVYDPLQPELDSFKEELDKYFKNHTSPDVDLGDISGINASVVNIQKEIDRLNEVAKNLNESLIDLQELGKYEQYIK

SEQ ID NO: 2168 - protein, 1211 aa, Artificial Sequence; identical to SEQ ID NO: 2158
  SARS-CoV-2/England/200990660/2020__EPI_ISL_414523 spike protein (1-1211)(G889C_L1034C)

SEQ ID NO: 2169 - protein, 1211 aa, Artificial Sequence
  SARS-CoV-2/Australia/NSW09/2020__EPI_ISL_413595 spike protein (1-1211)(G889C_L1034C)
MFVFLVLLPLVSSQCVNLTTRTQLPPAYTNSFTRGVYYPDKVFRSSVLHSTQDLFLPFFSNVTWFHAIHVSGTNGTKRFDNPVLPFNDGVYFASTEKSNIIRGWIFGTTLDSKTQSLLIVNNATNVVIKVCEFQFCNDPFLGVYYHKNNKSWMESEFRVYSSANNCTFEYVSQPFLMDLEGKQGNFKNLREFVFKNIDGYFKIYSKHTPINLVRDLPQGFSALEPLVDLPIGINITRFQTLLALHRSYLTPGDSSSGWTAGAAAYYVGYLQPRTFLLKYNENGTITDAVDCALDPLSETKCTLKSFTVEKGIYQTSNFRVQPTESIVRFPNITNLCPFGEVFNATRFASVYAWNRKRISNCVADYSVLYNSASFSTFKCYGVSPTKLNDLCFTNVYADSFVIRGDEVRQIAPGQTGKIADYNYKLPDDFTGCVIAWNSNNLDSKVGGNYNYLYRLFRKSNLKPFERDISTEIYQAGSTPCNGVEGFNCYFPLQSYGFQPTNGVGYQPYRVVVLSFELLHAPATVCGPKKSTNLVKNKCVNFNFNGLTGTGVLTESNKKFLPFQQFGRDIADTTDAVRDPQTLEILDITPCSFGGVSVITPGTNTSNQVAVLYQDVNCTEVPVAIHADQLTPTWRVYSTGSNVFQTRAGCLIGAEHVNNSYECDIPIGAGICASYQTQTNSPRRARSVASQSIIAYTMSLGAENSVAYSNNSIAIPTNFTISVTTEILPVSMTKTSVDCTMYICGDSTECSNLLLQYGSFCTQLNRALTGIAVEQDKNTQEVFAQVKQIYKTPPIKDFGGFNFSQILPDPSKPSKRSFIEDLLFNKVTLADAGFIKQYGDCLGDIAARDLICAQKFNGLTVLPPLLTDEMIAQYTSALLAGTITSGWTFCAGAALQIPFAMQMAYRFNGIGVTQNVLYENQKLIANQFNSAIGKIQDSLSFTASALGKLQDVVNQNAQALNTLVKQLSSNFGAISSVLNDILSRLDKVEAEVQIDRLITGRLQSLQTYVTQQLIRAAEIRASANLAATKMSECVCGQSKRVDFCGKGYHLMSFPQSAPHGVVFLHVTYVPAQEKNFTTAPAICHDGKAHFPREGVFVSNGTHWFVTQRNFYEPQIITTDNTFVSGNCDVVIGIVNNTVYDPLQPELDSFKEELDKYFKNHTSPDVDLGDISGINASVVNIQKEIDRLNEVAKNLNESLIDLQELGKYEQYIK

SEQ ID NO: 2170 - protein, 1211 aa, Artificial Sequence; identical to SEQ ID NO: 2150
  SARS-CoV-2/Australia/NSW10/2020__EPI_ISL_413596 spike protein (1-1211)(G889C_L1034C)

SEQ ID NO: 2171 - protein, 1211 aa, Artificial Sequence
  SARS-CoV-2/Switzerland/1000477797/2020__EPI_ISL_413023 spike protein (1-1211)(G889C_L1034C)
MFVFLVLLPLVSSQCVNLTTRTQLPPAYTNSFTRGVYYPDKVFRSSVLHSTQDLFLPFFSNVTWFHAIHVSGTNGTKRFDNPVLPFNDGVYFASTEKSNIIRGWIFGTTLDSKTQSLLIVNNATNVVIKVCEFQFCNDPFLGVYYHKNNKSWMESEFRVYSSANNCTFEYVSQPFLMDLEGKQGNFKNLREFVFKNIDGYFNIYSKHTPINLVRDLPQGFSALEPLVDLPIGINITRFQTLLALHRSYLTPGDSSSGWTAGAAAYYVGYLQPRTFLLKYNENGTITDAVDCALDPLSETKCTLKSFTVEKGIYQTSNFRVQPTESIVRFPNITNLCPFGEVFNATRFASVYAWNRKRISNCVADYSVLYNSASFSTFKCYGVSPTKLNDLCFTNVYADSFVIRGDEVRQIAPGQTGKIADYNYKLPDDFTGCVIAWNSNNLDSKVGGNYNYLYRLFRKSNLKPFERDISTEIYQAGSTPCNGVEGFNCYFPLQSYGFQPTNGVGYQPYRVVVLSFELLHAPATVCGPKKSTNLVKNKCVNFNFNGLTGTGVLTESNKKFLPFQQFGRDIADTTDAVRDPQTLEILDITPCSFGGVSVITPGTNTSNQVAVLYQGVNCTEVPVAIHADQLTPTWRVYSTGSNVFQTRAGCLIGAEHVNNSYECDIPIGAGICASYQTQTNSPRRARSVASQSIIAYTMSLGAENSVAYSNNSIAIPTNFTISVTTEILPVSMTKTSVDCTMYICGDSTECSNLLLQYGSFCTQLNRALTGIAVEQDKNTQEVFAQVKQIYKTPPIKDFGGFNFSQILPDPSKPSKRSFIEDLLFNKVTLADAGFIKQYGDCLGDIAARDLICAQKFNGLTVLPPLLTDEMIAQYTSALLAGTITSGWTFCAGAALQIPFAMQMAYRFNGIGVTQNVLYENQKLIANQFNSAIGKIQDSLSSTASALGKLQDVVNQNAQALNTLVKQLSSNFGAISSVLNDILSRLDKVEAEVQIDRLITGRLQSLQTYVTQQLIRAAEIRASANLAATKMSECVCGQSKRVDFCGKGYHLMSFPQSAPHGVVFLHVTYVPAQEKNFTTAPAICHDGKAHFPREGVFVSNGTHWFVTQRNFYEPQIITTDNTFVSGNCDVVIGIVNNTVYDPLQPELDSFKEELDKYFKNHTSPDVDLGDISGINASVVNIQKEIDRLNEVAKNLNESLIDLQELGKYEQYIK

SEQ ID NO: 2172 - protein, 1211 aa, Artificial Sequence
  SARS-CoV-2/Belgium/BA-02291/2020__EPI_ISL_415159 spike protein (1-1211)(G889C_L1034C)
MFVFLVLLPLVSSQCVNLTTRTQLPPAYTNSFTRGVYYPDKVFRSSVLHSTQDLFLPFFSNVTWFHAIHVSGTNGTKRFDNPVLPFNDGVYFASTEKSNIIRGWIFGTTLDSKTQSLLIVNNATNVVIKVCEFQFCNDPFLGVYYHKNNKSWMESEFRVYSSANNCTFEYVSQPFLMDLEGKQGNFKNLREFVFKNIDGYFKIYSKHTPINLVRDLPQGFSALEPLVDLPIGINITRFQTLLALHRSYLTPGDSSSGWTAGAAAYYVGYLQPRTFLLKYNENGTITDAVDCALDPLSETKCTLKSFTVEKGIYQTSNFRVQPTESIVRFPNITNLCPFGEVFNATRFASVYAWNRKRISNCVADYSVLYNSASFSTFKCYGVSPTKLNDLCFTNVYADSFVIRGDEVRQIAPGQTGKIADYNYKLPDDFTGCVIAWNSNNLDSKVGGNYNYLYRLFRRSNLKPFERDISTEIYQAGSTPCNGVEGFNCYFPLQSYGFQPTNGVGYQPYRVVVLSFELLPAPATVCGPKKSTNLVKNKCVNFNFNGLTGTGVLTESNKKFLPFQQFGRDIADTTDAVRDPQTLEILDITPCSFGGVSVITPGTNTSNQVAVLYQGVNCTEVPVAIHADQLTPTWRVYSTGSNVFQTRAGCLIGAEHVNNSYECDIPIGAGICASYQTQTNSPRRARSVASQSIIAYTMSLGAENSVAYSNNSIAIPTNFTISVTTEILPVSMTKTSVDCTMYICGDSTECSNLLLQYGSFCTQLNRALTGIAVEQDKNTQEVFAQVKQIYKTPPIKDFGGFNFSQILPDPSKPSKRSFIEDLLFNKVTLADAGFIKQYGDCLGDIAARDLICAQKFNGLTVLPPLLTDEMIAQYTSALLAGTITSGWTFCAGAALQIPFAMQMAYRFNGIGVTQNVLYENQKLIANQFNSAIGKIQDSLSSAAPALGKLQDVVNQNAQALNTLVKQLSSNFGAISSVLNDILSRLDKVEAEVQIDRLITGRLQSLQTYVTQQLIRAAEIRASANLAATKMSECVCGQSKRVDFCGKGYHLMSFPQSAPHGVVFLHVTYVPAQEKNFTTAPAICHDGKAHFPREGVFVSNGTHWFVTQRNFYEPQIITTDNTFVSGNCDVVIGIVNNTVYDPLQPELDSFKEELDKYFKNHTSPDVDLGDISGINASVVNIQKEIDRLNEVAKNLNESLIDLQELGKYEQYIK

SEQ ID NO: 2173 - protein, 1211 aa, Artificial Sequence
  SARS-CoV-2/USA/WA8-UW5/2020__EPI_ISL_413486 spike protein (1-1211)(G889C_L1034C)
MFVFLVLLPLVSSQCVNLTTRTQLPPAYTNSFTRGVYYPDKVFRSSVLHSTQDLFLPFFSNVTWFHAIHVSGTNGTKRFDNPVLPFNDGVYFASTEKSNIIRGWIFGTTLDSKTQSLLIVNNATNVVIKVCEFQFCNDPFLGVYYHKNNKSWMESEFRVYSSANNCTFEYVSQPFLMDLEGKQGNFKNLREFVFKNIDGYFKIYSKHTPINLVRDLPQGFSALEPLVDLPIGINITRFQTLLALHRSYLTPGDSSSGWTAGAAAYYVGYLQPRTFLLKYNENGTITDAVDCALDPLSETKCTLKSFTVEKGIYQTSNFRVQPTESIVRFPNITNLCPFGEVFNATRFASVYAWNRKRISNCVADYSVLYNSASFSTFKCYGVSPTKLNDLCFTNVYADSFVIRGDEVRQIAPGQTGKIADYNYKLPDDFTGCVIAWNSNNLDSKVGGNYNYLYRLFRKSNLKPFERDISTEIYQAGSTPCNGVEGFNCYFPLQSYGFQPTNGVGYQPYRVVVLSFELLHAPATVCGPKKSTNLVKNKCVNFNFNGLTGTGVLTESNKKFLPFQQFGRDIADTTDAVRDPQTLEILDITPCSFGGVSVITPGTNTSNQVAVLYQDVNCTEVPVAIHADQLTPTWRVYSTGSNVFQTRAGCLIGAEYVNNSYECDIPIGAGICASYQTQTNSPRRARSVASQSIIAYTMSLGAENSVAYSNNSIAIPTNFTISVTTEILPVSMTKTSVDCTMYICGDSTECSNLLLQYGSFCTQLNRALTGIAVEQDKNTQEVFAQVKQIYKTPPIKDFGGFNFSQILPDPSKPSKRSFIEDLLFNKVTLADAGFIKQYGDCLGDIAARDLICAQKFNGLTVLPPLLTDEMIAQYTSALLAGTITSGWTFCAGAALQIPFAMQMAYRFNGIGVTQNVLYENQKLIANQFNSAIGKIQDSLSSTASALGKLQDVVNQNAQALNTLVKQLSSNFGAISSVLNDILSRLDKVEAEVQIDRLITGRLQSLQTYVTQQLIRAAEIRASANLAATKMSECVCGQSKRVDFCGKGYHLMSFPQSAPHGVVFLHVTYVPAQEKNFTTAPAICHDGKAHFPREGVFVSNGTHWFVTQRNFYEPQIITTDNTFVSGNCDVVIGIVNNTVYDPLQPELDSFKEELDKYFKNHTSPDVDLGDISGINASVVNIQKEIDRLNEVAKNLNESLIDLQELGKYEQYIK

SEQ ID NO: 2174 - protein, 1211 aa, Artificial Sequence
  SARS-CoV-2/England/20102000506/2020__EPI_ISL_415147 spike protein (1-1211)(G889C_L1034C)
MFVFLVLLPLVSSQCVNLTTRTQLPPAYTNSFTRGVYYPDKVFRSSVLHSTQDLFLPFFSNVTWFHAIHVSGTNGTKRFDNPVLPFNDGVYFASTEKSNIIRGWIFGTTLDSKTQSLLIVNNATNVVIKVCEFQFCNDPFLGVYYHKNNKSWMESEFRVYSSANNCTFEYVSQPFLMDLEGKQGNFKNLREFVFKNIDGYFKIYSKHTPINLVRDLPQGFSALEPLVDLPIGINITRFQTLLALHRSYLTPGDSSSGWTAGAAAYYVGYLQPRTFLLKYNENGTITDAVDCALDPLSETKCTLKSFTVEKGIYQTSNFRVQPTESIVRFPNITNLCPFGEVFNATRFASVYAWNRKRISNCVADYSVLYNSASFSTFKCYGVSPTKLNDLCFTNVYADSFVIRGDEVRQIAPGQTGKIADYNYKLPDDFTGCVIAWNSNNLDSKVGGNYNYLYRLFRKSNLKPFERDISTEIYQAGSTPCNGVEGFNCYFPLQSYGFQPTNGVGYQPYRVVVLSFELLHAPATVCGPKKSTNLVKNKCVNFNFNGLTGTGVLTESNKKFLPFQQFGRDIADTTDAVRDPQTLEILDITPCSFGGVSVITPGTNTSNQVAVLYQGVNCTEVPVAIHADQLTPTWRVYSTGSNVFQTRAGCLIGAEHVNNSYECDIPIGAGICASYQTQTNSPRRARSVASQSIIAYTMSLGAENSVAYSNNSIAIPTNFTISVTTEILPVSMTKTSVDCTMYICGDSTECSNLLLQYGSFCTQLNRALTGIAVEQDKNTQEVFAQVKQIYKTPPIKDFGGFNFSQILPDPSKPSKRSFIEDLLFNKVTLADAGFIKQYGYCLGDIAARDLICAQKFNGLTVLPPLLTDEMIAQYTSALLAGTITSGWTFCAGAALQIPFAMQMAYRFNGIGVTQNVLYENQKLIANQFNSAIGKIQDSLSSTASALGKLQDVVNQNAQALNTLVKQLSSNFGAISSVLNDILSRLDKVEAEVQIDRLITGRLQSLQTYVTQQLIRAAEIRASANLAATKMSECVCGQSKRVDFCGKGYHLMSFPQSAPHGVVFLHVTYVPAQEKNFTTAPAICHDGKAHFPREGVFVSNGTHWFVTQRNFYEPQIITTDNTFVSGNCDVVIGIVNNTVYDPLQPELDSFKEELDKYFKNHTSPDVDLGDISGINASVVNIQKEIDRLNEVAKNLNESLIDLQELGKYEQYIK

SEQ ID NO: 2175 - protein, 1211 aa, Artificial Sequence
  SARS-CoV-2/Belgium/VAG-03013/2020__EPI_ISL_415155 spike protein (1-1211)(G889C_L1034C)
MFVFLVLLPLVSSQCVNLTTRTQLPPAYTNSFTRGVYYPDKVFRSSVLHSTQDLFLPFFSNVTWFHAIHVSGTNGTKRFDNPVLPFNDGVYFASTEKSNIIRGWIFGTTLDSKTQSLLIVNNATNVVIKVCEFQFCNDPFLGVYYHKNNKSWMESEFRVYSSANNCTFEYVSQPFLMDLEGKQGNFKNLREFVFKNIDGYFKIYSKHTPINLVRDLPQGFSALEPLVDLPIGINITRFQTLLALHRSYLTPGDSSSGWTAGAAAYYVGYLQPRTFLLKYNENGTITDAVDCALDPLSETKCTLKSFTVEKGIYQTSNFRVQPTESIVRFPNITNLCPFGEVFNATRFASVYAWNRKRISNCVADYSVLYNSASFSTFKCYGVSPTKLNDLCFTNVYADSFVIRGDEVRQIAPGQTGKIADYNYKLPDDFTGCVIAWNSNNLDSKVGGNYNYLYRLFRKSNLKPFERDISTEIYQAGSTPCNGVEGFNCYFPLQSYGFQPTNGVGYQPYRVVVLSFELLHAPATVCGPKKSTNLVKNKCVNFNFNGLTGTGVLTESNKKFLPFQQFGRDIADTTDAVRDPQTLEILDITPCSFGGVSVITPGTNTSNQVAVLYQGVNCTEVPVAIHADQLTPTWRVYSTGSNVFQTRAGCLIGAEHVNNSYECDIPIGAGICASYQTQTNSPRRARSVASQSIIAYTMSLGAENSVAYSNNSIAIPTNFTISVTTEILPVSMTKTSVDCTMYICGDSTECSNLLLQYGSFCTQLNRALTGIAVEQDKNTQEVFAQVKQIYKTPPIKDFGGFNFSQILPDPSKPSKRSFIEDLLFNKVTLADAGFIKQYGDCLGDIAARDLICAQKFNGLTVLPPLLTDEMIAQYTSALLAGTITSGWTFCAGAALQIPFAMQMAYRFNGIGVTQNVLYENQKLIANQFNSAIGKIQDSLSSTATALGKLQDVVNQNAQALNTLVKQLSSNFGAISSVLNDILSRLDKVEAEVQIDRLITGRLQSLQTYVTQQLIRAAEIRASANLAATKMSECVCGQSKRVDFCGKGYHLMSFPQSAPHGVVFLHVTYVPAQEKNFTTAPAICHDGKAHFPREGVFVSNGTHWFVTQRNFYEPQIITTDNTFVSGNCDVVIGIVNNTVYDPLQPELDSFKEELDKYFKNHTSPDVDLGDISGINASVVNIQKEIDRLNEVAKNLNESLIDLQELGKYEQYIK

SEQ ID NO: 2176 - protein, 1211 aa, Artificial Sequence
  SARS-CoV-2/Belgium/BC-03016/2020__EPI_ISL_415157 spike protein (1-1211)(G889C_L1034C)
MFVFLVLLPLVSSQCVNLTTRTQLPPAYTNSFTRGVYYPDKVFRSSVLHSTQDLFLPFFSNVTWFHAIHVSGTNGTKRFDNPVLPFNDGVYFASTEKSNIIRGWIFGTTLDSKTQSLLIVNNATNVVIKVCEFQFCNDPFLGVYYHKNNKSWMESEFRVYSSANNCTFEYVSQPFLMDLEGKQGNFKNLREFVFKNIDGYFKIYSKHTPINLVRDLPQGFSALEPLVDLPIGINITRFQTLLALHRSYLTPGDSSSGWTAGAAAYYVGYLQPRTFLLKYNENGTITDAVDCALDPLSETKCTLKSFTVEKGIYQTSNFRVQPTESIVRFPNITNLCPFGEVFNATRFASVYAWNRKRISNCVADYSVLYNSASFSTFKCYGVSPTKLNDLCFTNVYADSFVIRGDEVRQIAPGQTGKIADYNYKLPDDFTGCVIAWNSNNLDSKVGGNYNYLYRLFRKSNLKPFERDISTEIYQAGSTPCNGVEGFNCYFPLQSYGFQPTNGVGYQPYRVVVLSFELLHAPATVCGPKKSTNLVKNKCVNFNFNGLTGTGVLTESNKKFLPFQQFGRDIADTTDAVRDPQTLEILDITPCSFGGVSVITPGTNTSNQVAVLYQGVNCTEVPVAIHADQLTPTWRVYSTGSNVFQTRAGCLIGAEHVNNSYECDIPIGAGICASYQTQTNSPRRARSVASQSIIAYTMSLGAENSVAYSNNSIAIPTNFTISVTTEILPVSMTKTSVDCTMYICGDSTECSNLLLQYGSFCTQLNRALTGIAVEQDKNTQEVFAQVKQIYKTPPIKDFGGFNFSQILPDPSKPSKRSFIEDLLFNKVTLADAGFIKQYGDCLGDIAARDLICAQKFNGLTVLPPLLTDEMIAQYTSALLAGTITSGWTFCAGAALQIPFAMQMAYRFNGIGVTQNVLYENQKLIANQFNSAIGKIQDSLSSTAPALGKLQDVVNQNAQALNTLVKQLSSNFGAISSVLNDILSRLDKVEAEVQIDRLITGRLQSLQTYVTQQLIRAAEIRASANLAATKMSECVCGQSKRVDFCGKGYHLMSFPQSAPHGVVFLHVTYVPAQEKNFTTAPAICHDGKAHFPREGVFVSNGTHWFVTQRNFYEPQIITTDNTFVSGNCDVVIGIVNNTVYDPLQPELDSFKEELDKYFKNHTSPDVDLGDISGINASVVNIQKEIDRLNEVAKNLNESLIDLQELGKYEQYIK

SEQ ID NO: 2177 - protein, 1211 aa, Artificial Sequence
  SARS-CoV-2/Germany/BavPat3/2020__EPI_ISL_414521 spike protein (1-1211)(G889C_L1034C)
MFVFLVLLPLVSSQCVNLTTRTQLPPAYTNSFTRGVYYPDKVFRSSVLHSTQDLFLPFFSNVTWFHAIHVSGTNGTKRFDNPVLPFNDGVYFASTEKSNIIRGWIFGTTLDSKTQSLLIVNNATNVVIKVCEFQFCNDPFLGVYYHKNNKSWMESEFRVYSSANNCTFEYVSQPFLMDLEGKQGNFKNLREFVFKNIDGYFKIYSKHTPINLVRDLPQGFSALEPLVDLPIGINITRFQTLLALHRSYLTPGDSSSGWTAGAAAYYVGYLQPRTFLLKYNENGTITDAVDCALDPLSETKCTLKSFTVEKGIYQTSNFRVQPTESIVRFPNITNLCPFGEVFNATRFASVYAWNRKRISNCVADYSVLYNSASFSTFKCYGVSPTKLNDLCFTNVYADSFVIRGDEVRQIAPGQTGKIADYNYKLPDDFTGCVIAWNSNNLDSKVGGNYNYLYRLFRKSNLKPFERDISTEIYQAGSTPCNGVEGFNCYFPLQSYGFQPTNGVGYQPYRVVVLSFELLHAPATVCGPKKSTNLVKNKCVNFNFNGLTGTGVLTESNKKFLPFQQFGRDIADTTDAVRDPQTLEILDITPCSFGGVSVITPGTNTSNQVAVLYQDVNCTEVPVAIHADQLTPTWRVYSTGSNVFQTRAGCLIGAEHVNNSYECDIPIGAGICASYQTQTNSPRRARSVASQSIIAYTMSLGAENSVAYSNNSIAIPTNFTISVTTEILPVSMTKTSVDCTMYICGDSTECSNLLLQYGSFCTQLNRALTGIAVEQDKNTQQVFAQVKQIYKTPPIKDFGGFNFSQILPDPSKPSKRSFIEDLLFNKVTLADAGFIKQYGDCLGDIAARDLICAQKFNGLTVLPPLLTDEMIAQYTSALLAGTITSGWTFCAGAALQIPFAMQMAYRFNGIGVTQNVLYENQKLIANQFNSAIGKIQDSLSSTASALGKLQDVVNQNAQALNTLVKQLSSNFGAISSVLNDILSRLDKVEAEVQIDRLITGRLQSLQTYVTQQLIRAAEIRASANLAATKMSECVCGQSKRVDFCGKGYHLMSFPQSAPHGVVFLHVTYVPAQEKNFTTAPAICHDGKAHFPREGVFVSNGTHWFVTQRNFYEPQIITTDNTFVSGNCDVVIGIVNNTVYDPLQPELDSFKEELDKYFKNHTSPDVDLGDISGINASVVNIQKEIDRLNEVAKNLNESLIDLQELGKYEQYIK

SEQ ID NO: 2178 - protein, 1211 aa, Artificial Sequence
  SARS-CoV-2/France/HF1805/2020__EPI_ISL_414628 spike protein (1-1211)(G889C_L1034C)
MFVFLVLLPLVSSQCVNLTTRTQLPPAYTNSFTRGVYYPDKVFRSSVLHSTQDLFLPFFSNVTWFHAIHVSGTNGTKRFDNPVLPFNDGVYFASTEKSNIIRGWIFGTTLDSKTQSLLIVNNATNVVIKVCEFQFCNDPFLGVYYHKNNKSWMESEFRVYSSANNCTFEYVSQPFLMDLEGKQGNFKNLREFVFKNIDGYFKIYSKHTPINLVRDLPQGFSALEPLVDLPIGINITRFQTLLALHRSYLTPGDSSSGWTAGAAAYYVGYLQPRTFLLKYNENGTITDAVDCALDPLSETKCTLKSFTVEKGIYQTSNFRVQPTESIVRFPNITNLCPFGEVFNATRFASVYAWNRKRISNCVADYSVLYNSASFSTFKCYGVSPTKLNDLCFTNVYADSFVIRGDEVRQIAPGQTGKIADYNYKLPDDFTGCVIAWNSNNLDSKVGGNYNYLYRLFRKSNLKPFERDISTEIYQAGSTPCNGVEGFNCYFPLQSYGFQPTNGVGYQPYRVVVLSFELLHAPATVCGPKKSTNLVKNKCVNFNFNGLTGTGVLTESNKKFLPFQQFGRDIADTTDAVRDPQTLEILDITPCSFGGVSVITPGTNTSNQVAVLYQGVNCTEVPVAIHADQLTPTWRVYSTGSNVFQTRAGCLIGAEHVNNSYECDIPIGAGICASYQTQTNSPRRARSVASQSIIAYTMSLGAENSVAYSNNSIAIPTNFTISVTTEILPVSMTKTSVDCTMYICGDSTECSNLLLQYGSFCTQLNRALTGIAVEQDKNTQEVFAQVKQIYKTPPIKDFGGFNFSQILPDPSKPSKRSFIEDLLFNKVTLADAGFIKQYGDCLGDIAARDLICAQKFNGLTVLPPLLTDEMIAQYTSALLAGTITSGWTFCAGAALQIPFAMQMAYRFNGIGVTQNVLYENQKLIANQFNSAIGKIQDSLSSTASALGKLQDVVNQNAQALNTLVKQLSSNFGAISSVLNDILSRLDKVEAEVQIDRLITGRLQSLQTYVTQQLIRAAEIRASANLAATKMSECVCGQSKRVDFCGKGYHLMSFPQSAPHGVVFLHVTYVPAQEKNFTTAPAICHDGKAHFPREGVFVSNGTHWFVTQRNFYEPQIITTDNTFVSGNCDVVIGVVNNTVYDPLQPELDSFKEELDKYFKNHTSPDVDLGDISGINASVVNIQKEIDRLNEVAKNLNESLIDLQELGKYEQYIK

SEQ ID NO: 2179 - protein, 1211 aa, Artificial Sequence
  SARS-CoV-2/Netherlands/ZuidHolland_9/2020__EPI_ISL_414445 spike protein (1-1211)(G889C_L1034C)
MFVFLVLLPLVSSQCVNLTTRTQLPPAYTNSFTRGVYYPDKVFRSSVLHSTQDLFLPFFSNVTWFHAIHVSGTNGTKRFDNPVLPFNDGVYFASTEKSNIIRGWIFGTTLDSKTQSLLIVNNATNVVIKVCEFQFCNDPFLGVYYHKNNKSWMESEFRVYSSANNCTFEYVSQPFLMDLEGKQGNFKNLREFVFKNIDGYFKIYSKHTPINLVRDLPQGFSALEPLVDLPIGINITRFQTLLALHRSYLTPGDSSSGWTAGAAAYYVGYLQPRTFLLKYNENGTITDAVDCALDPLSETKCTLKSFTVEKGIYQTSNFRVQPTESIVRFPNITNLCPFGEVFNATRFASVYAWNRKRISNCVADYSVLYNSASFSTFKCYGVSPTKLNDLCFTNVYADSFVIRGDEVRQIAPGQTGKIADYNYKLPDDFTGCVIAWNSNNLDSKVGGNYNYLYRLFRKSNLKPFERDISTEIYQAGSTPCNGVEGFNCYFPLQSYGFQPTNGVGYQPYRVVVLSFELLHAPATVCGPKKSTNLVKNKCVNFNFNGLTGTGVLTESNKKFLPFQQFGRDIADTTDAVRDPQTLEILDITPCSFGGVSVITPGTNTSNQVAVLYQGVNCTEVPVAIHADQLTPTWRVYSTGSNVFQTRAGCLIGAEHVNNSYECDIPIGAGICASYQTQTNSPRRARSVASQSIIAYTMSLGAENSVAYSNNSIAIPTNFTISVTTEILPVSMTKTSVDCTMYICGDSTECSNLLLQYGSFCTQLNRALTGIAVEQDKNTQEVFAQVKQIYKTPPIKDFGGFNFSQILPDPSKPSKRSFIEDLLFNKVTLADAGFIKQYGDCLGDIAARDLICVQKFNGLTVLPPLLTDEMIAQYTSALLAGTITSGWTFCAGAALQIPFAMQMAYRFNGIGVTQNVLYENQKLIANQFNSAIGKIQDSLSSTASALGKLQDVVNQNAQALNTLVKQLSSNFGAISSVLNDILSRLDKVEAEVQIDRLITGRLQSLQTYVTQQLIRAAEIRASANLAATKMSECVCGQSKRVDFCGKGYHLMSFPQSAPHGVVFLHVTYVPAQEKNFTTAPAICHDGKAHFPREGVFVSNGTHWFVTQRNFYEPQIITTDNTFVSGNCDVVIGIVNNTVYDPLQPELDSFKEELDKYFKNHTSPDVDLGDISGINASVVNIQKEIDRLNEVAKNLNESLIDLQELGKYEQYIK

SEQ ID NO: 2180 - protein, 1211 aa, Artificial Sequence
  SARS-CoV-2/Finland/FIN03032020A/2020__EPI_ISL_413602 spike protein (1-1211)(G889C_L1034C)
MFVFLVLLPLVSSQCVNLTTRTQLPPAYTNSFTRGVYYPDKVFRSSVLHSTQDLFLPFFSNVTWFHAIHVSGTNGTKRFDNPVLPFNDGVYFASTEKSNIIRGWIFGTTLDSKTQSLLIVNNATNVVIKVCEFQFCNDPFLGVYYHKNNKSWMESEFRVYSSANNCTFEYVSQPFLMDLEGKQGNFKNLREFVFKNIDGYFKIYSKHTPINLVRDLPQGFSALEPLVDLPIGINITRFQTLLALHRSYLTPGDSSSGWTAGAAAYYVGYLQPRTFLLKYNENGTITDAVDCALDPLSETKCTLKSFTVEKGIYQTSNFRVQPTESIVRFPNITNLCPFGEVFNATRFASVYAWNRKRISNCVADYSVLYNSASFSTFKCYGVSPTKLNDLCFTNVYADSFVIRGDEVRQIAPGQTGKIADYNYKLPDDFTGCVISWNSNNLDSKVGGNYNYLYRLFRKSNLKPFERDISTEIYQAGSTPCNGVEGFNCYFPLQSYGFQPTNGVGYQPYRVVVLSFELLHAPATVCGPKKSTNLVKNKCVNFNFNGLTGTGVLTESNKKFLPFQQFGRDIADTTDAVRDPQTLEILDITPCSFGGVSVITPGTNTSNQVAVLYQGVNCTEVPVAIHADQLTPTWRVYSTGSNVFQTRAGCLIGAEHVNNSYECDIPIGAGICASYQTQTNSPRRARSVASQSIIAYTMSLGAENSVAYSNNSIAIPTNFTISVTTEILPVSMTKTSVDCTMYICGDSTECSNLLLQYGSFCTQLNRALTGIAVEQDKNTQEVFAQVKQIYKTPPIKDFGGFNFSQILPDPSKPSKRSFIEDLLFNKVTLADAGFIKQYGDCLGDIAARDLICAQKFNGLTVLPPLLTDEMIAQYTSALLAGTITSGWTFCAGAALQIPFAMQMAYRFNGIGVTQNVLYENQKLIANQFNSAIGKIQDSLSSTASALGKLQDVVNQNAQALNTLVKQLSSNFGAISSVLNDILSRLDKVEAEVQIDRLITGRLQSLQTYVTQQLIRAAEIRASANLAATKMSECVCGQSKRVDFCGKGYHLMSFPQSAPHGVVFLHVTYVPAQEKNFTTAPAICHDGKAHFPREGVFVSNGTHWFVTQRNFYEPQIITTDNTFVSGNCDVVIGIVNNTVYDPLQPELDSFKEELDKYFKNHTSPDVDLGDISGINASVVNIQKEIDRLNEVAKNLNESLIDLQELGKYEQYIK

SEQ ID NO: 2181 - protein, 1211 aa, Artificial Sequence
  SARS-CoV-2/France/GE1977/2020__EPI_ISL_414632 spike protein (1-1211)(G889C_L1034C)
MFVFLVLLPLVSSQCVNLTTRTQLPPAYTNSFTRGVYYPDKVFRSSVLHSTQDLFLPFFSNVTWFHAIHVSGTNGTKRFDNPVLPFNDGVYFASTEKSNIIRGWIFGTTLDSKTQSLLIVNNATNVVIKVCEFQFCNDPFLGVYYHKNNKSWMESEFRVYSSANNCTFEYVSQPFLMDLEGKQGNFKNLREFVFKNIDGYFKIYSKHTPINLVRDLPQGFSALEPLVDLPIGINITRFQTLLALHRSYLTPGDSSSGWTAGAAAYYVGYLQPRTFLLKYNENGTITDAVDCALDPLSETKCTLKSFTVEKGIYQTSNFRVQPTESIVRFPNITNLCPFGEVFNATRFASVYAWNRKRISNCVADYSVLYNSASFSTFKCYGVSPTKLNDLCFTNVYADSFVIRGDEVRQIAPGQTGKIADYNYKLPDDFTGCVIAWNSNNLDSKVGGNYNYLYRLFRKSNLKPFERDISTEIYQAGSTPCNGVEGFNCYFPLQSYGFQPTNGVGYQPYRVVVLSFELLHAPATVCGPKKSTNLVKNKCVNFNFNGLTGTGVLTESNKKFLPFQQFGRDIADTTDAVRDPQTLEILDITPCSFGGVSVITPGTNTSNQVAVLYQGVNCTEVPVAIHADQLTPTWRVYSTGSNVFQTRAGCLIGAEHVNNSYECDIPIGAGICASYQTQTNSPRRARSVASQSIIAYTMSLGAENSVAYSNNSIAIPTNFTISVTTEILPVSMTKTSVDCTMYICGDSTECSNLLLQYGSFCTQLNRALTGIAVEQDKNTQEVFAQVKQIYKTPPIKDFGGFNFSQILPDPSKPSKRSFIEDLLFNKVTLADAGFIKQYGDCLGDIAARDLICAQKFNGLTVLPPLLTDEMIAQYTSALLAGTITSGWTFCAGAALQIPFAMQMAYRFNGIGVTQNVLYENQKLIANQFNSAIGKIQDSLFSTASALGKLQDVVNQNAQALNTLVKQLSSNFGAISSVLNDILSRLDKVEAEVQIDRLITGRLQSLQTYVTQQLIRAAEIRASANLAATKMSECVCGQSKRVDFCGKGYHLMSFPQSAPHGVVFLHVTYVPAQEKNFTTAPAICHDGKAHFPREGVFVSNGTHWFVTQRNFYEPQIITTDNTFVSGNCDVVIGIVNNTVYDPLQPELDSFKEELDKYFKNHTSPDVDLGDISGINASVVNIQKEIDRLNEVAKNLNESLIDLQELGKYEQYIK

SEQ ID NO: 2182 - protein, 1211 aa, Artificial Sequence
  SARS-CoV-2/Finland/FIN-313/2020__EPI_ISL_414641 spike protein (1-1211)(G889C_L1034C)
MFVFLVLLPLVSSQCVNLTTRTQLPPAYTNSFTRGVYYPDKVFRSSVLHSTQDLFLPFFSNVTWFHAIHVSGTNGTKRFDNPVLPFNDGVYFASTEKSNIIRGWIFGTTLDSKTQSLLIVNNATNVVIKVCEFQFCNDPFLGVYYHKNNKSWMESEFRVYSSANNCTFEYVSQPFLMDLEGKQGNFKNLREFVFKNIDGYFKIYSKHTPINLVRDLPQGFSALEPLVDLPIGINITRFKTLLALHRSYLTPGDSSSGWTAGAAAYYVGYLQPRTFLLKYNENGTITDAVDCALDPLSETKCTLKSFTVEKGIYQTSNFRVQPTESIVRFPNITNLCPFGEVFNATRFASVYAWNRKRISNCVADYSVLYNSASFSTFKCYGVSPTKLNDLCFTNVYADSFVIRGDEVRQIAPGQTGKIADYNYKLPDDFTGCVIAWNSNNLDSKVGGNYNYLYRLFRKSNLKPFERDISTEIYQAGSTPCNGVEGFNCYFPLQSYGFQPTNGVGYQPYRVVVLSFELLHAPATVCGPKKSTNLVKNKCVNFNFNGLTGTGVLTESNKKFLPFQQFGRDIADTTDAVRDPQTLEILDITPCSFGGVSVITPGTNTSNQVAVLYQGVNCTEVPVAIHADQLTPTWRVYSTGSNVFQTRAGCLIGAEHVNNSYECDIPIGAGICASYQTQTNSPRRARSVASQSIIAYTMSLGAENSVAYSNNSIAIPTNFTISVTTEILPVSMTKTSVDCTMYICGDSTECSNLLLQYGSFCTQLNRALTGIAVEQDKNTQEVFAQVKQIYKTPPIKDFGGFNFSQILPDPSKPSKRSFIEDLLFNKVTLADAGFIKQYGDCLGDIAARDLICAQKFNGLTVLPPLLTDEMIAQYTSALLAGTITSGWTFCAGAALQIPFAMQMAYRFNGIGVTQNVLYENQKLIANQFNSAIGKIQDSLSSTASALGKLQDVVNQNAQALNTLVKQLSSNFGAISSVLNDILSRLDKVEAEVQIDRLITGRLQSLQTYVTQQLIRAAEIRASANLAATKMSECVCGQSKRVDFCGKGYHLMSFPQSAPHGVVFLHVTYVPAQEKNFTTAPAICHDGKAHFPREGVFVSNGTHWFVTQRNFYEPQIITTDNTFVSGNCDVVIGIVNNTVYDPLQPELDSFKEELDKYFKNHTSPDVDLGDISGINASVVNIQKEIDRLNEVAKNLNESLIDLQELGKYEQYIK

SEQ ID NO: 2183 - protein, 1211 aa, Artificial Sequence
  SARS-CoV-2/Netherlands/ZuidHolland_2/2020__EPI_ISL_414556 spike protein (1-1211)(G889C_L1034C)
MFVFLVLLPLVSSQCVNLTTRTQLPPAYTNSFTRGVYYPDKVFRSSVLHSTQDLFLPFFSNVTWFHAIHVSGTNGTKRFDNPVLPFNDGVYFASTEKSNIIRGWIFGTTLDSKTQSLLIVNNATNVVIKVCEFQFCNDPFLGVYYHKNNKSWMESEFRVYSSANNCTFEYVSQPFLMDLEGKQGNFKNLREFVFKNIDGYFKIYSKHTPINLVRDLPQGFSALEPLVDLPIGINITRFQTLLALHRSYLTPGDSSSGWTAGAAAYYVGYLQPRTFLLKYNENGTITDAVDCALDPLSETKCTLKSFTVEKGIYQTSNFRVQPTESIVRFPNITNLCPFGEVFNATRFASVYAWNRKRISNCVADYSVLYNSASFSTFKCYGVSPTKLNDLCFTNVYADSFVIRGDEVRQIAPGQTGKIADYNYKLPDDFTGCVIAWNSNNLDSKVGGNYNYLYRLFRKSNLKPFERDISTEIYQAGSTPCNGVEGFNCYFPLQSYGFQPTNGVGYQPYRVVVLSFELLHAPATVCGPKKSTNLVKNKCVNFNFNGLTGTGVLTESNKKFLPFQQFGRDIADTTDAVRDPQTLEILDITPCSFGGVSVITPGTNTSNQVAVLYQGVNCTEVPVAIHADQLTPTWRVYSTGSNVFQTRAGCLIGAEHVNNSYECDIPIGAGICASYQTQTNSPRRARSVASQSIIAYTMSLGAENSVAYSNNSIAIPTNFTISVTTEILPVSMTKTSVDCTMYICGDSTECSNLLLQYGSFCTQLNRALTGIALEQDKNTQEVFAQVKQIYKTPPIKDFGGFNFSQILPDPSKPSKRSFIEDLLFNKVTLADAGFIKQYGDCLGDIAARDLICAQKFNGLTVLPPLLTDEMIAQYTSALLAGTITSGWTFCAGAALQIPFAMQMAYRFNGIGVTQNVLYENQKLIANQFNSAIGKIQDSLSSTASALGKLQDVVNQNAQALNTLVKQLSSNFGAISSVLNDILSRLDKVEAEVQIDRLITGRLQSLQTYVTQQLIRAAEIRASANLAATKMSECVCGQSKRVDFCGKGYHLMSFPQSAPHGVVFLHVTYVPAQEKNFTTAPAICHDGKAHFPREGVFVSNGTHWFVTQRNFYEPQIITTDNTFVSGNCDVVIGIVNNTVYDPLQPELDSFKEELDKYFKNHTSPDVDLGDISGINASVVNIQKEIDRLNEVAKNLNESLIDLQELGKYEQYIK

SEQ ID NO: 2184 - protein, 1211 aa, Artificial Sequence
  SARS-CoV-2/USA/WA-UW31/2020__EPI_ISL_414618 spike protein (1-1211)(G889C_L1034C)
MFVFLVLLPLVSSQCVNLTTRTQLPPAYTNSFTRGVYYPDKVFRSSVLHSTQDLFLPFFSNVTWFHAIHVSGTNGTKRFDNPVLPFNDGVYFASTEKSNIIRGWIFGTTLDSKTQSLLIVNNATNVVIKVCEFQFCNDPFLGVYYHKNNKSWMESEFRVYSSANNCTFEYVSQPFLMDLEGKQGNFKNLREFVFKNIDGYFKIYSKHTPINLVRDLPQGFSALEPLVDLPIGINITRFQTLLALHRSYLTPGDSSSGWTAGAAAYYVGYLQPRTFLLKYNENGTITDAVDCALDPLSETKCTLKSFTVEKGIYQTSNFRVQPTESIVRFPNITNLCPFGEVFNATRFASVYAWNRKRISNCVADYSVLYNSASFSTFKCYGVSPTKLNDLCFTNVYADSFVIRGDEVRQIAPGQTGKIADYNYKLPDDFTGCVIAWNSNNLDSKVGGNYNYLYRLFRKSNLKPFERDISTEIYQAGSTPCNGAEGFNCYFPLQSYGFQPTNGVGYQPYRVVVLSFELLHAPATVCGPKKSTNLVKNKCVNFNFNGLTGTGVLTESNKKFLPFQQFGRDIADTTDAVRDPQTLEILDITPCSFGGVSVITPGTNTSNQVAVLYQDVNCTEVPVAIHADQLTPTWRVYSTGSNVFQTRAGCLIGAEHVNNSYECDIPIGAGICASYQTQTNSPRRARSVASQSIIAYTMSLGAENSVAYSNNSIAIPTNFTISVTTEILPVSMTKTSVDCTMYICGDSTECSNLLLQYGSFCTQLNRALTGIAVEQDKNTQEVFAQVKQIYKTPPIKDFGGFNFSQILPDPSKPSKRSFIEDLLFNKVTLADAGFIKQYGDCLGDIAARDLICAQKFNGLTVLPPLLTDEMIAQYTSALLAGTITSGWTFCAGAALQIPFAMQMAYRFNGIGVTQNVLYENQKLIANQFNSAIGKIQDSLSSTASALGKLQDVVNQNAQALNTLVKQLSSNFGAISSVLNDILSRLDKVEAEVQIDRLITGRLQSLQTYVTQQLIRAAEIRASANLAATKMSECVCGQSKRVDFCGKGYHLMSFPQSAPHGVVFLHVTYVPAQEKNFTTAPAICHDGKAHFPREGVFVSNGTHWFVTQRNFYEPQIITTDNTFVSGNCDVVIGIVNNTVYDPLQPELDSFKEELDKYFKNHTSPDVDLGDISGINASVVNIQKEIDRLNEVAKNLNESLIDLQELGKYEQYIK

SEQ ID NO: 2185 - protein, 1211 aa, Artificial Sequence
  SARS-CoV-2/South Korea/SNU01/2020__EPI_ISL_411929 spike protein (1-1211)(G889C_L1034C)
MFVFLVLLPLVSSQCVNLTTRTQLPPAYTNSFTRGVYYPDKVFRSSVLHSTQDLFLPFFSNVTWFHAIHVSGTNGTKRFDNPVLPFNDGVYFASTEKSNIIRGWIFGTTLDSKTQSLLIVNNATNVVIKVCEFQFCNDPFLGVYYHKNNKSWMESEFRVYSSANNCTFEYVSQPFLMDLEGKQGNFKNLREFVFKNIDGYFKIYSKHTPINLVRDLPQGFWALEPLVDLPIGINITRFQTLLALHRSYLTPGDSSSGWTAGAAAYYVGYLQPRTFLLKYNENGTITDAVDCALDPLSETKCTLKSFTVEKGIYQTSNFRVQPTESIVRFPNITNLCPFGEVFNATRFASVYAWNRKRISNCVADYSVLYNSASFSTFKCYGVSPTKLNDLCFTNVYADSFVIRGDEVRQIAPGQTGKIADYNYKLPDDFTGCVIAWNSNNLDSKVGGNYNYLYRLFRKSNLKPFERDISTEIYQAGSTPCNGVEGFNCYFPLQSYGFQPTNGVGYQPYRVVVLSFELLHAPATVCGPKKSTNLVKNKCVNFNFNGLTGTGVLTESNKKFLPFQQFGRDIADTTDAVRDPQTLEILDITPCSFGGVSVITPGTNTSNQVAVLYQDVNCTEVPVAIHADQLTPTWRVYSTGSNVFQTRAGCLIGAEHVNNSYECDIPIGAGICASYQTQTNSPRRARSVASQSIIAYTMSLGAENSVAYSNNSIAIPTNFTISVTTEILPVSMTKTSVDCTMYICGDSTECSNLLLQYGSFCTQLNRALTGIAVEQDKNTQEVFAQVKQIYKTPPIKDFGGFNFSQILPDPSKPSKRSFIEDLLFNKVTLADAGFIKQYGDCLGDIAARDLICAQKFNGLTVLPPLLTDEMIAQYTSALLAGTITSGWTFCAGAALQIPFAMQMAYRFNGIGVTQNVLYENQKLIANQFNSAIGKIQDSLSSTASALGKLQDVVNQNAQALNTLVKQLSSNFGAISSVLNDILSRLDKVEAEVQIDRLITGRLQSLQTYVTQQLIRAAEIRASANLAATKMSECVCGQSKRVDFCGKGYHLMSFPQSAPHGVVFLHVTYVPAQEKNFTTAPAICHDGKAHFPREGVFVSNGTHWFVTQRNFYEPQIITTDNTFVSGNCDVVIGIVNNTVYDPLQPELDSFKEELDKYFKNHTSPDVDLGDISGINASVVNIQKEIDRLNEVAKNLNESLIDLQELGKYEQYIK

SEQ ID NO: 2186 - protein, 1211 aa, Artificial Sequence
  SARS-CoV-2/China/WF0004/2020__EPI_ISL_413694 spike protein (1-1211)(G889C_L1034C)
MFVFLVLLPLVSSQCVNLTTRTQLPPAYTNSFTRGVYYPDKVFRSSVLHSTQDLFLPFFSNVTWFHAIHVSGTNGTKRFDNPVLPFNDGVYFASTEKSNIIRGWIFGTTLDSKTQSLLIVNNATNVVIKVCEFQFCNDPFLGVYYHKNNKSWTESEFRVYSSANNCTFEYVSQPFLMDLEGKQGNFKNLREFVFKNIDGYFKIYSKHTPINLVRDLPQGFSALEPLVDLPIGINITRFQTLLALHRSYLTPGDSSSGWTAGAAAYYVGYLQPRTFLLKYNENGTITDAVDCALDPLSETKCTLKSFTVEKGIYQTSNFRVQPTESIVRFPNITNLCPFGEVFNATRFASVYAWNRKRISNCVADYSVLYNSASFSTFKCYGVSPTKLNDLCFTNVYADSFVIRGDEVRQIAPGQTGKIADYNYKLPDDFTGCVIAWNSNNLDSKVGGNYNYLYRLFRKSNLKPFERDISTEIYQAGSTPCNGVEGFNCYFPLQSYGFQPTNGVGYQPYRVVVLSFELLHAPATVCGPKKSTNLVKNKCVNFNFNGLTGTGVLTESNKKFLPFQQFGRDIADTTDAVRDPQTLEILDITPCSFGGVSVITPGTNTSNQVAVLYQDVNCTEVPVAIHADQLTPTWRVYSTGSNVFQTRAGCLIGAEHVNNSYECDIPIGAGICASYQTQTNSPRRARSVASQSIIAYTMSLGAENSVAYSNNSIAIPTNFTISVTTEILPVSMTKTSVDCTMYICGDSTECSNLLLQYGSFCTQLNRALTGIAVEQDKNTQEVFAQVKQIYKTPPIKDFGGFNFSQILPDPSKPSKRSFIEDLLFNKVTLADAGFIKQYGDCLGDIAARDLICAQKFNGLTVLPPLLTDEMIAQYTSALLAGTITSGWTFCAGAALQIPFAMQMAYRFNGIGVTQNVLYENQKLIANQFNSAIGKIQDSLSSTASALGKLQDVVNQNAQALNTLVKQLSSNFGAISSVLNDILSRLDKVEAEVQIDRLITGRLQSLQTYVTQQLIRAAEIRASANLAATKMSECVCGQSKRFDFCGKGYHLMSFPQSAPHGVVFLHVTYVPAQEKNFTTAPAICHDGKAHFPREGVFVSNGTHWFVTQRNFYEPQIITTDNTFVSGNCDVVIGIVNNTVYDPLQPELDSFKEELDKYFKNHTSPDVDLGDISGINASVVNIQKEIDRLNEVAKNLNESLIDLQELGKYEQYIK

SEQ ID NO: 2187 - protein, 1211 aa, Artificial Sequence
  SARS-CoV-2/China/WF0028/2020__EPI_ISL_413791 spike protein (1-1211)(G889C_L1034C)
MFVFLVLLPLVSSQCVNLTTRTQLPPAYTNSFTRGVYYPDKVFRSSVLHSTQDLFLPFFSNVTWFHAIHVSGTNGTKRFDNPVLPFNDGVYFASTEKSNIIRGWIFGTTLDSKTQSLLIVNNATNVVIKVCEFQFCNDPFLGVYYHKNNKSWMESEFRVYSSANNCTFEYVSQPFLMDLEGKQGNFKNLREFVFKNIDGYFKIYSKHTPINLVRDLPQGFSALEPLVDLPIGINITRFQTLLALHRSYLTPGDSSSGWTAGAAAYYVGYLQPRTFLLKYNENGTITDAVDCALDPLSETKCTLKSFTVEKGIYQTSNFRVQPTESIVRFPNITNLCPFGEVFNATRFASVYAWNRKRISNCVADYSVLYNSASFSTFKCYGVSPTKLNDLCFTNVYADSFVIRGDEVRQIAPGQTGKIADYNYKLPDDFTGCVIAWNSNNLDSKVGGNYNYLYRLFRKSNLKPFERDISTEIYQAGSTPCNGVEGFNCYFPLQSYGFQPTNGVGYQPYRVVVLSFELLHAPATVCGPKKSTNLVKNKCVNFNFNGLTGTGVLTESNKKFLPFQQFGRDIADTTDAVRDPQTLEILDITPCSFGGVSVITPGTNTSNQVAVLYQDVNCTEVPVAIHADQLTPTWRVYSTGSNVFQTRAGCLIGAEHVNNSYECDIPIGAGICASYQTQTNSPRRARSVASQSIIAYTMSLGAENSVAYSNNSIAIPTNFTISVTTEILPVSMTKTSVDCTMYICGDSTECSNLLLQYGSFCTQLNRALTGIAVEQDKNTQEVFAQVKQIYKTPPIKDFGGFNFSQILPDPSKPSKRSFIEDLLFNKVTLADAGFIKQYGDCLGDIAARDLICAQKFNGLTVLPPLLTDEMIAQYTSALLAGTITSGWTFCAGAALQIPFAMQMAYRFNGIGVTQNVLYENQKLIANQFNSAIGKIQDSLSSTASALGKLQDVVNQNAQALNTLVKQLSSNFGAISSVLNDILSRLDKVEAEVQIDRLITGRLQSLQTYVTQQLIRAAEIRASANLAATKMSECVCGQSKRVDFCGKGYHLMSFPQSAPHGVVFLHVTYVPAQEKNFTTAPAICHDGKAHFPREGVFVSNGTHWFVTQRNFYEPQIITTDNTFVSGNCDVVIGIVNNTVYDPLQPELESFKEELDKYFKNHTSPDVDLGDISGINASVVNIQKEIDRLNEVAKNLNESLIDLQELGKYEQYIK

SEQ ID NO: 2188 - protein, 1211 aa, Artificial Sequence
  SARS-CoV-2/2019-nCoV/USA-CruiseA-18/2020__MT159716.1 spike protein (1-1211)(G889C_L1034C)
MFVFLVLLPLVSSQCVNLTTRTQLPPAYTNSFTRGVYYPDKVFRSSVLHSTQDLFLPFFSNVTWFHAIHVSGTNGTKRFDNPVLPFNDGVYFASTEKSNIIRGWIFGTTLDSKTQSLLIVNNATNVVIKVCEFQFCNDPFLGVYYHKNNKSWMESELRVYSSANNCTFEYVSQPFLMDLEGKQGNFKNLREFVFKNIDGYFKIYSKHTPINLVRDLPQGFSALEPLVDLPIGINITRFQTLLALHRSYLTPGDSSSGWTAGAAAYYVGYLQPRTFLLKYNENGTITDAVDCALDPLSETKCTLKSFTVEKGIYQTSNFRVQPTESIVRFPNITNLCPFGEVFNATRFASVYAWNRKRISNCVADYSVLYNSASFSTFKCYGVSPTKLNDLCFTNVYADSFVIRGDEVRQIAPGQTGKIADYNYKLPDDFTGCVIAWNSNNLDSKVGGNYNYLYRLFRKSNLKPFERDISTEIYQAGSTPCNGVEGFNCYFPLQSYGFQPTNGVGYQPYRVVVLSFELLHAPATVCGPKKSTNLVKNKCVNFNFNGLTGTGVLTESNKKFLPFQQFGRDIADTTDAVRDPQTLEILDITPCSFGGVSVITPGTNTSNQVAVLYQDVNCTEVPVAIHADQLTPTWRVYSTGSNVFQTRAGCLIGAEHVNNSYECDIPIGAGICASYQTQTNSPRRARSVASQSIIAYTMSLGAENSVAYSNNSIAIPTNFTISVTTEILPVSMTKTSVDCTMYICGDSTECSNLLLQYGSFCTQLNRALTGIAVEQDKNTQEVFAQVKQIYKTPPIKDFGGFNFSQILPDPSKPSKRSFIEDLLFNKVTLADAGFIKQYGDCLGDIAARDLICAQKFNGLTVLPPLLTDEMIAQYTSALLAGTITSGWTFCAGAALQIPFAMQMAYRFNGIGVTQNVLYENQKLIANQFNSAIGKIQDSLSSTASALGKLQDVVNQNAQALNTLVKQLSSNFGAISSVLNDILSRLDKVEAEVQIDRLITGRLQSLQTYVTQQLIRAAEIRASANLAATKMSECVCGQSKRVDFCGKGYHLMSFPQSAPHGVVFLHVTYVPAQEKNFTTAPAICHDGKAHFPREGVFVSNGTHWFVTQRNFYEPQIITTDNTFVSGNCDVVIGIVNNTVYDPLQPELDSFKEELDKYFKNHTSPDVDLGDISGINASVVNIQKEIDRLNEVAKNLNESLIDLQELGKYEQYIK

SEQ ID NO: 2189 - protein, 1211 aa, Artificial Sequence
  SARS-CoV-2/SARS-CoV-2/Yunnan-01/human/2020/CHN__MT049951.1 spike protein (1-1211)(G889C_L1034C)
MFVFLVLLPLVSSQCVNLTTRTQLPPANTNSFTRGVYYPDKVFRSSVLHSTQDLFLPFFSNVTWFHAIHVSGTNGTKRFDNPVLPFNDGVYFASTEKSNIIRGWIFGTTLDSKTQSLLIVNNATNVVIKVCEFQFCNDPFLGVYYHKNNKSWMESEFRVYSSANNCTFEYVSQPFLMDLEGKQGNFKNLREFVFKNIDGYFKIYSKHTPINLVRDLPQGFSALEPLVDLPIGINITRFQTLLALHRSYLTPGDSSSGWTAGAAAYYVGYLQPRTFLLKYNENGTITDAVDCALDPLSETKCTLKSFTVEKGIYQTSNFRVQPTESIVRFPNITNLCPFGEVFNATRFASVYAWNRKRISNCVADYSVLYNSASFSTFKCYGVSPTKLNDLCFTNVYADSFVIRGDEVRQIAPGQTGKIADYNYKLPDDFTGCVIAWNSNNLDSKVGGNYNYLYRLFRKSNLKPFERDISTEIYQAGSTPCNGVEGFNCYFPLQSYGFQPTNGVGYQPYRVVVLSFELLHAPATVCGPKKSTNLVKNKCVNFNFNGLTGTGVLTESNKKFLPFQQFGRDIADTTDAVRDPQTLEILDITPCSFGGVSVITPGTNTSNQVAVLYQDVNCTEVPVAIHADQLTPTWRVYSTGSNVFQTRAGCLIGAEHVNNSYECDIPIGAGICASYQTQTNSPRRARSVASQSIIAYTMSLGAENSVAYSNNSIAIPTNFTISVTTEILPVSMTKTSVDCTMYICGDSTECSNLLLQYGSFCTQLNRALTGIAVEQDKNTQEVFAQVKQIYKTPPIKDFGGFNFSQILPDPSKPSKRSFIEDLLFNKVTLADAGFIKQYGDCLGDIAARDLICAQKFNGLTVLPPLLTDEMIAQYTSALLAGTITSGWTFCAGAALQIPFAMQMAYRFNGIGVTQNVLYENQKLIANQFNSAIGKIQDSLSSTASALGKLQDVVNQNAQALNTLVKQLSSNFGAISSVLNDILSRLDKVEAEVQIDRLITGRLQSLQTYVTQQLIRAAEIRASANLAATKMSECVCGQSKRVDFCGKGYHLMSFPQSAPHGVVFLHVTYVPAQEKNFTTAPAICHDGKAHFPREGVFVSNGTHWFVTQRNFYEPQIITTDNTFVSGNCDVVIGIVNNTVYDPLQPELDSFKEELDKYFKNHTSPDVDLGDISGINASVVNIQKEIDRLNEVAKNLNESLIDLQELGKYEQYIK

SEQ ID NO: 2190 - protein, 1211 aa, Artificial Sequence
  SARS-CoV-2/USA/WA-UW292/2020__EPI_ISL_418077 spike protein (1-1211)(G889C_L1034C)
MFVFLVLLPLVSSQCVNLTTRTQLPPAYTNSFTRGVYYPDKVFRSSVLHSTQDLFLPFFSNVTWFHAIHVSGTNGTKRFDNPVLPFNDGVYFASTEKSNIIRGWIFGTTLDSKTQSLLIVNNATNVVIKVCEFQFCNDPFLGVYYHKNNKSWMESEFRVYSSANNCTFEYVSQPFLMDLEGKQGNFKNLREFVFKNIDGYFKIYSKHTPINLVRDLPQGFSALEPLVDLPIGINITRFQTLLALHRSYLTPGDSSSGWTAGAAAYYVGYLQPRTFLLKYNENGTITDAVDCALDPLSETKCTLKSFTVEKGIYQTSNFRVQPTESIVRFPNITNLCPFGEVFNATRFASVYAWNRKRISNCVADYSVLYNSASFSTFKCYGVSPTKLNDLCFTNVYADSFVIRGDEVRQIAPGQTGKIADYNYKLPDDFTGCVIAWNSNNLDSKVGGNYNYLYRLFRKSNLKPFERDISTEIYQASSTPCNGVEGFNCYFPLQSYGFQPTNGVGYQPYRVVVLSFELLHAPATVCGPKKSTNLVKNKCVNFNFNGLTGTGVLTESNKKFLPFQQFGRDIADTTDAVRDPQTLEILDITPCSFGGVSVITPGTNTSNQVAVLYQDVNCTEVPVAIHADQLTPTWRVYSTGSNVFQTRAGCLIGAEHVNNSYECDIPIGAGICASYQTQTNSPRRARSVASQSIIAYTMSLGAENSVAYSNNSIAIPTNFTISVTTEILPVSMTKTSVDCTMYICGDSTECSNLLLQYGSFCTQLNRALTGIAVEQDKNTQEVFAQVKQIYKTPPIKDFGGFNFSQILPDPSKPSKRSFIEDLLFNKVTLADAGFIKQYGDCLGDIAARDLICAQKFNGLTVLPPLLTDEMIAQYTSALLAGTITSGWTFCAGAALQIPFAMQMAYRFNGIGVTQNVLYENQKLIANQFNSAIGKIQDSLSSTASALGKLQDVVNQNAQALNTLVKQLSSNFGAISSVLNDILSRLDKVEAEVQIDRLITGRLQSLQTYVTQQLIRAAEIRASANLAATKMSECVCGQSKRVDFCGKGYHLMSFPQSAPHGVVFLHVTYVPAQEKNFTTAPAICHDGKAHFPREGVFVSNGTHWFVTQRNFYEPQIITTDNTFVSGNCDVVIGIVNNTVYDPLQPELDSFKEELDKYFKNHTSPDVDLGDISGINASVVNIQKEIDRLNEVAKNLNESLIDLQELGKYEQYIK

SEQ ID NO: 2191 - protein, 1211 aa, Artificial Sequence
  SARS-CoV-2/Iceland/192/2020__EPI_ISL_417819 spike protein (1-1211)(G889C_L1034C)
MFVFFVLLPLVSSQCVNLTTRTQLPPAYTNSFTRGVYYPDKVFRSSVLHSTQDLFLPFFSNVTWFHAIHVSGTNGTKRFDNPVLPFNDGVYFASTEKSNIIRGWIFGTTLDSKTQSLLIVNNATNVVIKVCEFQFCNDPFLGVYYHKNNKSWMESEFRVYSSANNCTFEYVSQPFLMDLEGKQGNFKNLREFVFKNIDGYFKIYSKHTPINLVRDLPQGFSALEPLVDLPIGINITRFQTLLALHRSYLTPGDSSSGWTAGAAAYYVGYLQPRTFLLKYNENGTITDAVDCALDPLSETKCTLKSFTVEKGIYQTSNFRVQPTESIVRFPNITNLCPFGEVFNATRFASVYAWNRKRISNCVADYSVLYNSASFSTFKCYGVSPTKLNDLCFTNVYADSFVIRGDEVRQIAPGQTGKIADYNYKLPDDFTGCVIAWNSNNLDSKVGGNYNYLYRLFRKSNLKPFERDISTEIYQAGSTPCNGVEGFNCYFPLQSYGFQPTNGVGYQPYRVVVLSFELLHAPATVCGPKKSTNLVKNKCVNFNFNGLTGTGVLTESNKKFLPFQQFGRDIADTTDAVRDPQTLEILDITPCSFGGVSVITPGTNTSNQVAVLYQGVNCTEVPVAIHADQLTPTWRVYSTGSNVFQTRAGCLIGAEHVNNSYECDIPIGAGICASYQTQTNSPRRARSVASQSIIAYTMSLGAENSVAYSNNSIAIPTNFTISVTTEILPVSMTKTSVDCTMYICGDSTECSNLLLQYGSFCTQLNRALTGIAVEQDKNTQEVFAQVKQIYKTPPIKDFGGFNFSQILPDPSKPSKRSFIEDLLFNKVTLADAGFIKQYGDCLGDIAARDLICAQKFNGLTVLPPLLTDEMIAQYTSALLAGTITSGWTFCAGAALQIPFAMQMAYRFNGIGVTQNVLYENQKLIANQFNSAIGKIQDSLSSTASALGKLQDVVNQNAQALNTLVKQLSSNFGAISSVLNDILSRLDKVEAEVQIDRLITGRLQSLQTYVTQQLIRAAEIRASANLAATKMSECVCGQSKRVDFCGKGYHLMSFPQSAPHGVVFLHVTYVPAQEKNFTTAPAICHDGKAHFPREGVFVSNGTHWFVTQRNFYEPQIITTDNTFVSGNCDVVIGIVNNTVYDPLQPELDSFKEELDKYFKNHTSPDVDLGDISGINASVVNIQKEIDRLNEVAKNLNESLIDLQELGKYEQYIK

SEQ ID NO: 2192 - protein, 1211 aa, Artificial Sequence
  SARS-CoV-2/Belgium/ULG-6939/2020__EPI_ISL_417020 spike protein (1-1211)(G889C_L1034C)
MFVFLVLLPLVSSQCVNLTTRTQLPPAYTNSFTRGVYYPDKVFRSSVLHSTQDLFLPFFSNVTWFHAIHVSGTNGTKRFDNPVLPFNDGVYFASTEKSNIIRGWIFGTTLDSKTQSLLIVNNATNVVIKVCEFQFCNDPFLGVYYHKNNKSWMESEFRVYSSANNCTFEYVSQPFLMDLEGKQGNFKNLREFVFKNIDGYFKIYSKHTPINLVRDLPQGFSALEPLVDLPIGINITRFQTLLALHRSYLTPGDSSSGWTAGAAAYYVGYLQPRTFLLKYNENGTITDAVDCALDPLSETKCTLKSFTVEKGIYQTSNFRVQPTESIVRFPNITNLCPFGEVFNATRFASVYAWNRKRISNCVADYSVLYNSASFSTFKCYGVSPTKLNDLCFTNVYADSFVIRGDEVRQIAPGQTGKIADYNYKLPDDFTGCVIAWNSNNLDSKVGGNYNYLYRLFRKSNLKPFERDISTEIYQAGSTPCNGVEGFNCYFPLQSYGFQPTNGVGYQPYRVVVLSFELLHAPATVCGPKKSTNLVKNKCVNFNFNGLTGTGVLTESNKKFLPFQQFGRDIADTTDAVRDPQTLEILDITPCSFGGVSVITPGTNTSNQVAVLYQGVNCTEVPVAIHADQLTPTWRVYSTGSNVFQTRAGCLIGAEHVNNSYECDIPIGAGICASYQTQTNSPRRARSVASQSIIAYTMSLGAENSVVYSNNSIAIPTNFTISVTTEILPVSMTKTSVDCTMYICGDSTECSNLLLQYGSFCTQLNRALTGIAVEQDKNTQEVFAQVKQIYKTPPIKDFGGFNFSQILPDPSKPSKRSFIEDLLFNKVTLADAGFIKQYGDCLGDIAARDLICAQKFNGLTVLPPLLTDEMIAQYTSALLAGTITSGWTFCAGAALQIPFAMQMAYRFNGIGVTQNVLYENQKLIANQFNSAIGKIQDSLSSTASALGKLQDVVNQNAQALNTLVKQLSSNFGAISSVLNDILSRLDKVEAEVQIDRLITGRLQSLQTYVTQQLIRAAEIRASANLAATKMSECVCGQSKRVDFCGKGYHLMSFPQSAPHGVVFLHVTYVPAQEKNFTTAPAICHDGKAHFPREGVFVSNGTHWFVTQRNFYEPQIITTDNTFVSGNCDVVIGIVNNTVYDPLQPELDSFKEELDKYFKNHTSPDVDLGDISGINASVVNIQKEIDRLNEVAKNLNESLIDLQELGKYEQYIK

SEQ ID NO: 2193 - protein, 1211 aa, Artificial Sequence
  SARS-CoV-2/France/HF2496/2020__EPI_ISL_418231 spike protein (1-1211)(G889C_L1034C)
MFVFLVLLPLVSSQCVNLTTRTQLPPAYTNSFTRGVYYPDKVFRSSVLHSTQDLFLPFFSNVTWFHAIHVSGTNGTKRFDNPVLPFNDGVYFASTEKSNIIRGWIFGTTLDSKTQSLLIVNNATNVVIKVCEFQFCNDPFLGVYYHKNNKSWMESEFRVYSSANNCTFEYVSQPFLMDLEGKQGNFKNLREFVFKNIDGYFKIYSKHTPINLVRDLPQGFSALEPLVDLPIGINITRFQTLLALHRSYLTPGDSSSGWTAGAAAYYVGYLQPRTFLLKYNENGTITDAVDCALDPLSETKCTLKSFTVEKGIYQTSNFRVQPTESIVRFPNITNLCPFGEVFNATRFASVYAWNRKRISNCVADYSVLYNSASFSTFKCYGVSPTKLNDLCFTNVYADSFVIRGDEVRQIAPGQTGKIADYNYKLPDDFTGCVIAWNSNNLDSKVGGNYNYLYRLFRKSNLKPFERDISTEIYQAGSTPCNGVEGFNCYFPLQSYGFQPTNGVGYQPYRVVVLSFELLHAPATVCGPKKSTNLVKNKCVNFNFNGLTGTGVLTESNKKFLPFQQFGRDIADTTDAVRDPQTLEILDITPCSFGGVSVITPGTNTSNQVAVLYQGVNCTEVPVAIHADQLTPTWRVYSTGSNVFQTRAGCLIGAEHVNNSYECDIPIGAGICASYQTQTNSPRRARSVASQSIIAYTMSLGAENSVAYSNNSIAIPTNFTISVTTEILPVSMTKTSVDCTMYICGDSTECSNLLLQYGSFCTQLNRALTGIAVEQDKNTQEVFAQVKQIYKTPPIKDFGGFNFSQILPDPSKPSKRSFIEDLLFNKVTLADAGFIKQYGDCLGDIVARDLICAQKFNGLTVLPPLLTDEMIAQYTSALLAGTITSGWTFCAGAALQIPFAMQMAYRFNGIGVTQNVLYENQKLIANQFNSAIGKIQDSLSSTASALGKLQDVVNQNAQALNTLVKQLSSNFGAISSVLNDILSRLDKVEAEVQIDRLITGRLQSLQTYVTQQLIRAAEIRASANLAATKMSECVCGQSKRVDFCGKGYHLMSFPQSAPHGVVFLHVTYVPAQEKNFTTAPAICHDGKAHFPREGVFVSNGTHWFVTQRNFYEPQIITTDNTFVSGNCDVVIGIVNNTVYDPLQPELDSFKEELDKYFKNHTSPDVDLGDISGINASVVNIQKEIDRLNEVAKNLNESLIDLQELGKYEQYIK

SEQ ID NO: 2194 - protein, 1211 aa, Artificial Sequence
  SARS-CoV-2/USA/WA-UW291/2020__EPI_ISL_418076 spike protein (1-1211)(G889C_L1034C)
MFVFLVLLPLVSSQCVNLTTRTQLPPAYTNSFTRGVYYPDKVFRSSVLHSTQDLFLPFFSNVTWFHAIHVSGTNGTKRFDNPVLPFNDGVYFASTEKSNIIRGWIFGTTLDSKTQSLLIVNNATNVVIKVCEFQFCNDPFLGVYYHKNNKSWMESEFRVYSSANNCTFEYVSQPFLMDLEGKQGNFKNLREFVFKNIDGYFKIYSKHTPINLVRDLPQGFSALEPLVDLPIGINITRFQTLLALHRSYLTPGDSSSGWTAGAAAYYVGYLQPRTFLLKYNENGTITDAVDCALDPLSETKCTLKSFTVEKGIYQTSNFRVQPTESIVRFPNITNLCPFGEVFNATRFASVYAWNRKRISNCVADYSVLYNSASFSTFKCYGVSPTKLNDLCFTNVYADSFVIRGDEVRQIAPGQTGKIADYNYKLPDDFTGCVIAWNSNNLDSKVGGNYNYLYRLFRKSNLKPFERDISTEIYQAGSTPCNGVEGFNCYFPLQSYGFQPTNGVGYQPYRVVVLSFELLHAPATVCGPKKSTNLVKNKCVNFNFNGLTGTGVLTESNKKFLPFQQFGRDIADTTDAVRDPQTLEILDITPCSFGGVSVITPGTNTSNQVAVLYQGVNCTEVPVAIHADQLTPTWRVYSTGSNVFQTRAGCLIGAEHVNNSYECDIPIGAGICASYQTQTNSPRRARSVASQSIIAYTMSLGAENSVAYSNNSIAIPTNFTISVTTEILPVSMTKTSVDCTMYICGDSTECSNLLLQYGSFCTQLNRALTGIAVEQDKNTQEVFAQVKQIYKTPPIKDFGGFNFSQILPDPSKPSKRSFIEDLLFNKVTLADAGFIKQYGDCLGDIAARDLICAQKFNGLTVLPPLLTDEMIAQYTSALLAGTITSGWTFCAGAALQIPFAMQMAYRFNGIGVTQNVLYENQKLIANQFNSAIGKIQYSLSSTASALGKLQDVVNQNAQALNTLVKQLSSNFGAISSVLNDILSRLDKVEAEVQIDRLITGRLQSLQTYVTQQLIRAAEIRASANLAATKMSECVCGQSKRVDFCGKGYHLMSFPQSAPHGVVFLHVTYVPAQEKNFTTAPAICHDGKAHFPREGVFVSNGTHWFVTQRNFYEPQIITTDNTFVSGNCDVVIGIVNNTVYDPLQPELDSFKEELDKYFKNHTSPDVDLGDISGINASVVNIQKEIDRLNEVAKNLNESLIDLQELGKYEQYIK

SEQ ID NO: 2195 - protein, 1211 aa, Artificial Sequence; identical to SEQ ID NO: 2158
  SARS-CoV-2/Portugal/PT0034/2020__EPI_ISL_418019 spike protein (1-1211)(G889C_L1034C)

SEQ ID NO: 2196 - protein, 1211 aa, Artificial Sequence
  SARS-CoV-2/Iceland/202/2020__EPI_ISL_417750 spike protein (1-1211)(G889C_L1034C)
MFVFLVLLPLVSSQCVNLTTRTQLPPAYTNSFTRGVYYPDKVFRSSVLHSTQDLFLPFFSNVTWFHAIHVSGTNGTKRFDNPVLPFNDGVYFASTEKSNIIRGWIFGTTLDSKTQSLLIVNNATNVVIKVCEFQFCNDPFLGVYYHKNNKSWMESEFRVYSSANNCTFEYVSQPFLMDLEGKQGNFKNLREFVFKNIDGYFKIYSKHTPINLVRDLPQGFSALEPLVDLPIGINITRFQTLLALHRSYLTPGDSSSGWTAGAAAYYVGYLQPRTFLLKYNENGTITDAVDCALDPLSETKCTLKSFTVEKGIYQTSNFRVQPTESIVRFPNITNLCPFGEVFNATRFASVYAWNRKRISNCVADYSVLYNSASFSTFKCYGVSPTKLNDLCFTNVYADSFVIRGDEVRQIAPGQTGKIADYNYKLPDDFTGCVIAWNSNNLDSKVGGNYNYLYRLFRKSNLKPFERDISTEIYQAGSTPCNGVEGFNCYFPLQSYGFQPTNGVGYQPYRVVVLSFELLHAPATVCGPKKSTNLVKNKCVNFNFNGLTGTGVLTESNKKFLPFQQFGRDIADTTDAVRDPQTLEILDITPCSFGGVSVITPGTNTSNQVAVLYQDVNCTEVPVAIHADQLTPTWRVYSTGSNVFQTRAGCLIGAEHVNNSYECDIPIGAGICASYQTQTNSPRRARSVASQSIIAYTMSLGAENSVAYSNNSIAIPTNFTISVTTEILPVSMTKTSVDCTMYICGDSTECSNLLLQYGSFCTQLNRALTGIAVEQDKNTQEVFAQVKQIYKTPPIKDFGGFNFSQILPDPSKPSKRSFIEDLLFNKVTLADAGFIKQYGDCLGDIAARDLICAQKFNGLTVLPPLLTDEMIAQYTSALLAGTITSGWTFCAGAALQIPFAMQMAYRFNGIGVTQNVLYENQKLIANQFNSAIGKIQDSLSSTASALGKLQDVVNQNAQALNTLVKQLSSNFGAISSVLNDILSRLDKVEAEVQIDRLITGRLQSLQTYVTQQLIRAAEIRASANLAATKMSECVCGQSKRVDFCGKGYHLMSFPQSAPHGVVFLHVTYVPAQEKNFTTAPAICHDGKAHFPREGVFVSNGTHWFVTQRNFYEPQIITTDNTFVSGNCDVVIGIVNNTVYDPLQPELDSFKEELDKYFKNHTSPDVDLGDIPGINASVVNIQKEIDRLNEVAKNLNESLIDLQELGKYEQYIK

SEQ ID NO: 2197 - protein, 1211 aa, Artificial Sequence
  SARS-CoV-2/USA/WA-UW261/2020__EPI_ISL_418046 spike protein (1-1211)(G889C_L1034C)
MFVFLVLLPLVSSQCVNLTTRTQLPPAYTNSFTRGVYYPDKVFRSSVLHSTQDLFLPFFSNVTWFHAIHVSGTNGTKRFDNPVLPFNDGVYFASTEKSNIIRGWIFGTTLDSKTQSLLIVNNATNVVIKVCEFQFCNDPFLGVYYHKNNKSWMESEFRVYSSANNCTFEYVSQPFLMDLEGKQGNFKNLREFVFKNIDGYFKIYSKHTPINLVRDLPQGFSALEPLVDLPIGINITRFQTLLALHRSYLTPGDSSSGWTAGAAAYYVGYLQPRTFLLKYNENGTITDAVDCALDPLSETKCTLKSFTVEKGIYQTSNFRVQPTESIVRFPNITNLCPFGEVFNATRFTSVYAWNRKRISNCVADYSVLYNSASFSTFKCYGVSPTKLNDLCFTNVYADSFVIRGDEVRQIAPGQTGKIADYNYKLPDDFTGCVIAWNSNNLDSKVGGNYNYLYRLFRKSNLKPFERDISTEIYQAGSTPCNGVEGFNCYFPLQSYGFQPTNGVGYQPYRVVVLSFELLHAPATVCGPKKSTNLVKNKCVNFNFNGLTGTGVLTESNKKFLPFQQFGRDIADTTDAVRDPQTLEILDITPCSFGGVSVITPGTNTSNQVAVLYQDVNCTEVPVAIHADQLTPTWRVYSTGSNVFQTRAGCLIGAEHVNNSYECDIPIGAGICASYQTQTNSPRRARSVASQSIIAYTMSLGAENSVAYSNNSIAIPTNFTISVTTEILPVSMTKTSVDCTMYICGDSTECSNLLLQYGSFCTQLNRALTGIAVEQDKNTQEVFAQVKQIYKTPPIKDFGGFNFSQILPDPSKPSKRSFIEDLLFNKVTLADAGFIKQYGDCLGDIAARDLICAQKFNGLTVLPPLLTDEMIAQYTSALLAGTITSGWTFCAGAALQIPFAMQMAYRFNGIGVTQNVLYENQKLIANQFNSAIGKIQDSLSSTASALGKLQDVVNQNAQALNTLVKQLSSNFGAISSVLNDILSRLDKVEAEVQIDRLITGRLQSLQTYVTQQLIRAAEIRASANLAATKMSECVCGQSKRVDFCGKGYHLMSFPQSAPHGVVFLHVTYVPAQEKNFTTAPAICHDGKAHFPREGVFVSNGTHWFVTQRNFYEPQIITTDNTFVSGNCDVVIGIVNNTVYDPLQPELDSFKEELDKYFKNHTSPDVDLGDISGINASVVNIQKEIDRLNEVAKNLNESLIDLQELGKYEQYIK

SEQ ID NO: 2198 - protein, 1211 aa, Artificial Sequence
  SARS-CoV-2/Portugal/PT0035/2020__EPI_ISL_418020 spike protein (1-1211)(G889C_L1034C)
MFVFLVLLPLVSSQCVNLTTRTQLPPAYTNSFTRGVYYPDKVFRSSVLHSTQDLFLPFFSNVTWFHAIHVSGTNGTKRFDNPVLPFNDGVYFASTEKSNIIRGWIFGTTLDSKTQSLLIVNNATNVVIKVCEFQFCNDPFLGVYYHKNNKSWMESEFRVYSSANNCTFEYVSQPFLMDLEGKQGNFKNLREFVFKNIDGYFKIYSKHTPINLVRDLPQGFSALEPLVDLPIGINITRFQTLLALHRSYLTPGDSSSGWTAGAAAYYVGYLQPRTFLLKYNENGTITDAVDCALDPLSETKCTLKSFTVEKGIYQTSNFRVQPTESIVRFPNITNLCPFGEVFNATRFASVYAWNRKRISNCVADYSVLYNSASFSTFKCYGVSPTKLNDLCFTNVYADSFVIRGDEVRQIAPGQTGKIADYNYKLPDDFTGCVIAWNSNNLDSKVGGNYNYLYRLFRKSNLKPFERDISTEIYQAGSTPCNGVEGFNCYFPLQSYGFQPTNGVGYQPYRVVVLSFELLHAPATVCGPKKSTNLVKNKCVNFNFNGLTGTGVLTESNKKFLPFQQFGRDIADTTDAVRDPQTLEILDITPCSFGGVSVITPGTNTSNQVAVLYQDVNCTEVPVAIHADQLTPTWRVYSTGSNVFQTRAGCLIGAEHVNNSYECDIPIGAGICASYQTQTNSPRRARSVASQSIIAYTMSLGAENSVAYSNNSIAIPTNFTISVTTEILPVSMTKTSVDCTMYICGDSTECSNLLLQYGSFCTQLNRALTGIAVEQDKNTQEVFAQVKQIYKTPPIKDFGGFNFSQILPDPSKPSKRSFIEDLLFNKVTLADAGFIKQYGDCLGDISARDLICAQKFNGLTVLPPLLTDEMIAQYTSALLAGTITSGWTFCAGAALQIPFAMQMAYRFNGIGVTQNVLYENQKLIANQFNSAIGKIQDSLSSTASALGKLQDVVNQNAQALNTLVKQLSSNFGAISSVLNDILSRLDKVEAEVQIDRLITGRLQSLQTYVTQQLIRAAEIRASANLAATKMSECVCGQSKRVDFCGKGYHLMSFPQSAPHGVVFLHVTYVPAQEKNFTTAPAICHDGKAHFPREGVFVSNGTHWFVTQRNFYEPQIITTDNTFVSGNCDVVIGIVNNTVYDPLQPELDSFKEELDKYFKNHTSPDVDLGDISGINASVVNIQKEIDRLNEVAKNLNESLIDLQELGKYEQYIK

SEQ ID NO: 2199 - protein, 1211 aa, Artificial Sequence
  SARS-CoV-2/USA/NY-NYUMC7/2020__EPI_ISL_418192 spike protein (1-1211)(G889C_L1034C)
MFVFLVLLPLVSSQCVNLTTRTQLPPAYTNSFTRGVYYPDKVFRSSVLHSTQDLFLPFFSNVTWFHAIHVSGTNGTKRFDNPVLPFNDGVYFASTEKSNIIRGWIFGTTLDSKTQSLLIVNNATNVVIKVCEFQFCNDPFLGVYHHKNNKSWMESEFRVYSSANNCTFEYVSQPFLMDLEGKQGNFKNLREFVFKNIDGYFKIYSKHTPINLVRDLPQGFSALEPLVDLPIGINITRFQTLLALHRSYLTPGDSSSGWTAGAAAYYVGYLQPRTFLLKYNENGTITDAVDCALDPLSETKCTLKSFTVEKGIYQTSNFRVQPTESIVRFPNITNLCPFGEVFNATRFASVYAWNRKRISNCVADYSVLYNSASFSTFKCYGVSPTKLNDLCFTNVYADSFVIRGDEVRQIAPGQTGKIADYNYKLPDDFTGCVIAWNSNNLDSKVGGNYNYLYRLFRKSNLKPFERDISTEIYQAGSTPCNGVEGFNCYFPLQSYGFQPTNGVGYQPYRVVVLSFELLHAPATVCGPKKSTNLVKNKCVNFNFNGLTGTGVLTESNKKFLPFQQFGRDIADTTDAVRDPQTLEILDITPCSFGGVSVITPGTNTSNQVAVLYQGVNCTEVPVAIHADQLTPTWRVYSTGSNVFQTRAGCLIGAEHVNNSYECDIPIGAGICASYQTQTNSPRRARSVASQSIIAYTMSLGAENSVAYSNNSIAIPTNFTISVTTEILPVSMTKTSVDCTMYICGDSTECSNLLLQYGSFCTQLNRALTGIAVEQDKNTQEVFAQVKQIYKTPPIKDFGGFNFSQILPDPSKPSKRSFIEDLLFNKVTLADAGFIKQYGDCLGDIAARDLICAQKFNGLTVLPPLLTDEMIAQYTSALLAGTITSGWTFCAGAALQIPFAMQMAYRFNGIGVTQNVLYENQKLIANQFNSAIGKIQDSLSSTASALGKLQDVVNQNAQALNTLVKQLSSNFGAISSVLNDILSRLDKVEAEVQIDRLITGRLQSLQTYVTQQLIRAAEIRASANLAATKMSECVCGQSKRVDFCGKGYHLMSFPQSAPHGVVFLHVTYVPAQEKNFTTAPAICHDGKAHFPREGVFVSNGTHWFVTQRNFYEPQIITTDNTFVSGNCDVVIGIVNNTVYDPLQPELDSFKEELDKYFKNHTSPDVDLGDISGINASVVNIQKEIDRLNEVAKNLNESLIDLQELGKYEQYIK

SEQ ID NO: 2200 - protein, 1211 aa, Artificial Sequence
  SARS-CoV-2/Iceland/189/2020__EPI_ISL_417709 spike protein (1-1211)(G889C_L1034C)
MFVFLVLLPLVSSQCVNLTTRTQLPPAYTNSFTRGVYYPDKVFRSSVLHSTQDLFLPFFSNVTWFHAIHVSGTNGTKRFDNPVLPFNDGVYFASTEKSNIIRGWIFGTTLDSKTQSLLIVNNATNVVIKVCEFQFCNDPFLGVYYHKNNKSWMESEFRVYSSANNCTFEYVSQPFLMDLEGKQGNFKNLREFVFKNIDGYFKIYSKHTPINLVRDLPQGFSALEPLVDLPIGINITRFQTLLALHRSYLTPGDSSSGWTAGAAAYYVGYLQPRTFLLKYNENGTITDAVDCALDPLSETKCTLKSFTVEKGIYQTSNFRVQPTESIVRFPNITNLCPFGEVFNATRFASVYAWNRKRISNCVADYSVLYNSASFSTFKCYGVSPTKLNDLCFTNVYADSFVIRGDEVRQIAPGQTGKIADYNYKLPDDFTGCVIAWNSNNLDSKVGGNYNYLYRLFRKSNLKPFERDISTEIYQAGSTPCNGVEGFNCYFPLQSYGFQPTNGVGYQPYRVVVLSFELLHAPATVCGPKKSTNLVKNKCVNFNFNGLTGTGVLTESNKKFLPFQQFGRDIADTTDAVRDPQTLEILDITPCSFGGVSVITPGTNTSNQVAVLYQGVNCTEVPVAIHADQLTPTWRVYSTGSNVFQTRAGCLIGAEHVNNSYECDIPIGAGICASYQTQTNSPRRARSVASQSIIAYTMSLGAENSVAYSNNSIAIPTNFTISVTTEILPVSMTKTSVDCTMYICGDSTECSNLLLQYGSFCTQLNRALTGIAVEQDKNTQEVFAQVKQIYKTPPIKDFGGFNFSQILPDPSKPSKRSFIEDLLFNKVTLADAGFTKQYGDCLGDIAARDLICAQKFNGLTVLPPLLTDEMIAQYTSALLAGTITSGWTFCAGAALQIPFAMQMAYRFNGIGVTQNVLYENQKLIANQFNSAIGKIQDSLSSTASALGKLQDVVNQNAQALNTLVKQLSSNFGAISSVLNDILSRLDKVEAEVQIDRLITGRLQSLQTYVTQQLIRAAEIRASANLAATKMSECVCGQSKRVDFCGKGYHLMSFPQSAPHGVVFLHVTYVPAQEKNFTTAPAICHDGKAHFPREGVFVSNGTHWFVTQRNFYEPQIITTDNTFVSGNCDVVIGIVNNTVYDPLQPELDSFKEELDKYFKNHTSPDVDLGDISGINASVVNIQKEIDRLNEVAKNLNESLIDLQELGKYEQYIK

SEQ ID NO: 2201 - protein, 1211 aa, Artificial Sequence
  SARS-CoV-2/Australia/NSW56/2020__EPI_ISL_417408 spike protein (1-1211)(G889C_L1034C)
MFVFLVLLPLVSSQCVNLTTRTQLPPAYTNSFTRGVYYPDKVFRSSVLHSTQDLFLPFFSNVTWFHAIHVSGTNGTKRFDNPVLPFNDGVYFASTEKSNIIRGWIFGTTLDSKTQSLLIVNNATNVVIKVCEFQFCNDPFLGVYYHKNNKSWMESEFRVYSSANNCTFEYVSQPFLMDLEGKQGNFKNLREFVFKNIDGYFKIYSKHTPINLVRDLPQGFSALEPLVDLPIGINITRFQTLLALHRSYLTPGDSSSGWTAGAAAYYVGYLQPRTFLLKYNENGTITDAVDCALDPLSETKCTLKSFTVEKGIYQTSNFRVQPTESIVRFPNITNLCPFGEVFNATRFASVYAWNRKRISNCVADYSVLYNSASFSTFKCYGVSPTKLNDLCFTNVYADSFVIRGDEVRQIAPGQTGKIADYNYKLPDDFTGCVIAWNSNNLDSKVGGNYNYLYRLFRKSNLKPFERDISTEIYQAGSTPCNGVEGFNCYFPLQSYGFQPTNGVGYQPYRVVVLSFELLHAPATVCGPKKSTNLVKNKCVNFNFNGLTGTGVLTESNKKFLPFQQFGRDIADTTDAVRDPQTLEILDITPCSFGGVSVITPGTNTSNQVAVLYQDVNCTEVPVAIHADQLTPTWRVYSTGSNVFQTRAGCLIGAEHVNNSYECDIPIGAGICASYQTQTNSPRRARSVASQSIIAYTMSLGAENSVAYSNNSIAIPTNFTISVTTEILPVSMTKTSVDCTMYICGDSTECSNLLLQYGSFCTQLNRALTGIAVEQDKNTQEVFAQVKQIYKTPPIKDFGGFNFSQILPDSSKPSKRSFIEDLLFNKVTLADAGFIKQYGDCLGDIAARDLICAQKFNGLTVLPPLLTDEMIAQYTSALLAGTITSGWTFCAGAALQIPFAMQMAYRFNGIGVTQNVLYENQKLIANQFNSAIGKIQDSLSSTASALGKLQDVVNQNAQALNTLVKQLSSNFGAISSVLNDILSRLDKVEAEVQIDRLITGRLQSLQTYVTQQLIRAAEIRASANLAATKMSECVCGQSKRVDFCGKGYHLMSFPQSAPHGVVFLHVTYVPAQEKNFTTAPAICHDGKAHFPREGVFVSNGTHWFVTQRNFYEPQIITTDNTFVSGNCDVVIGIVNNTVYDPLQPELDSFKEELDKYFKNHTSPDVDLGDISGINASVVNIQKEIDRLNEVAKNLNESLIDLQELGKYEQYIK

SEQ ID NO: 2202 - protein, 1211 aa, Artificial Sequence
  SARS-CoV-2/Iceland/280/2020__EPI_ISL_417608 spike protein (1-1211)(G889C_L1034C)
MFVFLVLLPLVSSQCVNLTTRTQLPPAYTNSFTRGVYYPDKVFRSSVLHSTQDLFLPFFSNVTWFHAIHVSGTNGTKRFDNPVLPFNDGVYFASTEKSNIIRGWIFGTTLDSKTQSLLIVNNATNVVIKVCEFQFCNDPFLGVYYHKNNKSWMESEFRVYSSANNCTFEYVSQPFLMDLEGKQGNFKNLREFVFKNIDGYFKIYSKHTPINLVRDLPQGFSALEPLVDLPIGINITRFQTLLALHRSYLTPGDSSSGWTAGAAAYYVGYLQPRTFLLKYNENGTITDAVDCALDPLSETKCTLKSFTVEKGIYQTSNFRVQPTESIVRFPNITNLCPFGEVFNATRFASVYAWNRKRISNCVADYSVLYNSASFSTFKCYGVSPTKLNDLCFTNVYADSFVIRGDEVRQIAPGQTGKIADYNYKLPDDFTGCVIAWNSNNLDSKVGGNYNYLYRLFRKSNLKPFERDISTEIYQAGSTPCNGVEGFNCYFPLQSYGFQPTNGVGYQPYRVVVLSFELLHAPATVCGPKKSTNLVKNKCVNFNFNGLTGTGVLTESNKKFLPFQQFGRDIADTTDAVRDPQTLEILDITPCSFGGVSVITPGTNTSNQVAVLYQGVNCTEVPVAIHADQLTPTWRVYSTGSNVFQTRAGCLIGAEHVNNSYECDIPIGAGICASYHTQTNSPRRARSVASQSIIAYTMSLGAENSVAYSNNSIAIPTNFTISVTTEILPVSMTKTSVDCTMYICGDSTECSNLLLQYGSFCTQLNRALTGIAVEQDKNTQEVFAQVKQIYKTPPIKDFGGFNFSQILPDPSKPSKRSFIEDLLFNKVTLADAGFIKQYGDCLGDIAARDLICAQKFNGLTVLPPLLTDEMIAQYTSALLAGTITSGWTFCAGAALQIPFAMQMAYRFNGIGVTQNVLYENQKLIANQFNSAIGKIQDSLSSTASALGKLQDVVNQNAQALNTLVKQLSSNFGAISSVLNDILSRLDKVEAEVQIDRLITGRLQSLQTYVTQQLIRAAEIRASANLAATKMSECVCGQSKRVDFCGKGYHLMSFPQSAPHGVVFLHVTYVPAQEKNFTTAPAICHDGKAHFPREGVFVSNGTHWFVTQRNFYEPQIITTDNTFVSGNCDVVIGIVNNTVYDPLQPELDSFKEELDKYFKNHTSPDVDLGDISGINASVVNIQKEIDRLNEVAKNLNESLIDLQELGKYEQYIK

SEQ ID NO: 2203 - protein, 1211 aa, Artificial Sequence; identical to SEQ ID NO: 2158
  SARS-CoV-2/Iceland/247/2020__EPI_ISL_417575 spike protein (1-1211)(G889C_L1034C)

SEQ ID NO: 2204 - protein, 1211 aa, Artificial Sequence
  SARS-CoV-2/Iceland/238/2020__EPI_ISL_417566 spike protein (1-1211)(G889C_L1034C)
MFVFLVLLPLVSSQCVNLTTRTQLPPAYTNSFTRGVYYPDKVFRSSVLHSTQDLFLPFFSNVTWFHAIHVSGTNGTKRFDNPVLPFNDGVYFASTEKSNIIRGWIFGTTLDSKTQSLLIVNNATNVVIKVCEFQFCNDPFLGVYYHKNNKSWMESEFRVYSSANNCTFEYVSQPFLMDLEGKQGNFKNLREFVFKNIDGYFKIYSKHTPINLVRDLPQGFSALEPLVDLPIGINITRFQTLLALHRSYLTPGDSSSGWTAGAAAYYVGYLQPRTFLLKYNENGTITDAVDCALDPLSETKCTLKSFTVEKGIYQTSNFRVQPTESIVRFPNITNLCPFGEVFNATRFASVYAWNRKRISNCVADYSVLYNSASFSTFKCYGVSPTKLNDLCFTNVYADSFVIRGDEVRQIAPGQTGKIADYNYKLPDDFTGCVIAWNSNNLDSKVGGNYNYLYRLFRKSNLKPFERDISTEIYQAGSTPCNGVEGFNCYFPLQSYGFQPTNGVGYQPYRVVVLSFELLHAPATVCGPKKSTNLVKNKCVNFNFNGLTGTGVLTESNKKFLPFQQFGRDIADTTDAVRDPQTLEILDITPCSFGGVSVITPGTNTSNQVAVLYQGVNCTEVPVAIHADQLTPTWRVYSTGSNVFQTRAGCLIGAEHVNNSYECDIPIGAGICASYQTQTNSPRRARSVASQSIIAYTMSLGAENSVAYSNNSIAIPTNFTISVTTEILPVSMTKTSVDCTMYICGDSTECSNLLLQYGSFCTQLNRALTGIAVEQDKNTQEVFAQVKQIYKTPPIKDFGGFNFSQILPDPSKPSKRSFIEDLLFNKVTLADVGFIKQYGDCLGDIAARDLICAQKFNGLTVLPPLLTDEMIAQYTSALLAGTITSGWTFCAGAALQIPFAMQMAYRFNGIGVTQNVLYENQKLIANQFNSAIGKIQDSLSSTASALGKLQDVVNQNAQALNTLVKQLSSNFGAISSVLNDILSRLDKVEAEVQIDRLITGRLQSLQTYVTQQLIRAAEIRASANLAATKMSECVCGQSKRVDFCGKGYHLMSFPQSAPHGVVFLHVTYVPAQEKNFTTAPAICHDGKAHFPREGVFVSNGTHWFVTQRNFYEPQIITTDNTFVSGNCDVVIGIVNNTVYDPLQPELDSFKEELDKYFKNHTSPDVDLGDISGINASVVNIQKEIDRLNEVAKNLNESLIDLQELGKYEQYIK

SEQ ID NO: 2205 - protein, 1211 aa, Artificial Sequence
  SARS-CoV-2/Greece/16/2020__EPI_ISL_418265 spike protein (1-1211)(G889C_L1034C)
MFVFLVLLPLVSSQCVNLTTRTQLPPAYTNSFTRGVYYPDKVFRSSVLHSTQDLFLPFFSNVTWFHAIHVSGTNGTKRFDNPVLPFNDGVYFASTEKSNIIRGWIFGTTLDSKTQSLLIVNNATNVVIKVCEFQFCNDPFLGVYYHKNNKSWMESEFRVYSSANNCTFEYVSQPFLMDLEGKQGNFKNLREFVFKNVDGYFKIYSKHTPINLVRDLPQGFSALEPLVDLPIGINITRFQTLLALHRSYLTPGDSSSGWTAGAAAYYVGYLQPRTFLLKYNENGTITDAVDCALDPLSETKCTLKSFTVEKGIYQTSNFRVQPTESIVRFPNITNLCPFGEVFNATRFASVYAWNRKRISNCVADYSVLYNSASFSTFKCYGVSPTKLNDLCFTNVYADSFVIRGDEVRQIAPGQTGKIADYNYKLPDDFTGCVIAWNSNNLDSKVGGNYNYLYRLFRKSNLKPFERDISTEIYQAGSTPCNGVEGFNCYFPLQSYGFQPTNGVGYQPYRVVVLSFELLHAPATVCGPKKSTNLVKNKCVNFNFNGLTGTGVLTESNKKFLPFQQFGRDIADTTDAVRDPQTLEILDITPCSFGGVSVITPGTNTSNQVAVLYQDVNCTEVPVAIHADQLTPTWRVYSTGSNVFQTRAGCLIGAEHVNNSYECDIPIGAGICASYQTQTNSPRRARSVASQSIIAYTMSLGAENSVAYSNNSIAIPTNFTISVTTEILPVSMTKTSVDCTMYICGDSTECSNLLLQYGSFCTQLNRALTGIAVEQDKNTQEVFAQVKQIYKTPPIKDFGGFNFSQILPDPSKPSKRSFIEDLLFNKVTLADAGFIKQYGDCLGDIAARDLICAQKFNGLTVLPPLLTDEMIAQYTSALLAGTITSGWTFCAGAALQIPFAMQMAYRFNGIGVTQNVLYENQKLIANQFNSAIGKIQDSLSSTASALGKLQDVVNQNAQALNTLVKQLSSNFGAISSVLNDILSRLDKVEAEVQIDRLITGRLQSLQTYVTQQLIRAAEIRASANLAATKMSECVCGQSKRVDFCGKGYHLMSFPQSAPHGVVFLHVTYVPAQEKNFTTAPAICHDGKAHFPREGVFVSNGTHWFVTQRNFYEPQIITTDNTFVSGNCDVVIGIVNNTVYDPLQPELDSFKEELDKYFKNHTSPDVDLGDISGINASVVNIQKEIDRLNEVAKNLNESLIDLQELGKYEQYIK

SEQ ID NO: 2206 - protein, 1211 aa, Artificial Sequence
  SARS-CoV-2/Iceland/319/2020__EPI_ISL_417648 spike protein (1-1211)(G889C_L1034C)
MFVFLVLLPLVSSQCVNLTTRTQLPPAYTNSFTRGVYYPDKVFRSSVLHSTQDLFLPFFSNVTWFHAIHVSGTNGTKRFDNPVLPFNDGVYFASTEKSNIIRGWIFGTTLDSKTQSLLIVNNATNVVIKVCEFQFCNDPFLGVYYHKNNKSWMESEFRVYSSANNCTFEYVSQPFLIDLEGKQGNFKNLREFVFKNIDGYFKIYSKHTPINLVRDLPQGFSALEPLVDLPIGINITRFQTLLALHRSYLTPGDSSSGWTAGAAAYYVGYLQPRTFLLKYNENGTITDAVDCALDPLSETKCTLKSFTVEKGIYQTSNFRVQPTESIVRFPNITNLCPFGEVFNATRFASVYAWNRKRISNCVADYSVLYNSASFSTFKCYGVSPTKLNDLCFTNVYADSFVIRGDEVRQIAPGQTGKIADYNYKLPDDFTGCVIAWNSNNLDSKVGGNYNYLYRLFRKSNLKPFERDISTEIYQAGSTPCNGVEGFNCYFPLQSYGFQPTNGVGYQPYRVVVLSFELLHAPATVCGPKKSTNLVKNKCVNFNFNGLTGTGVLTESNKKFLPFQQFGRDIADTTDAVRDPQTLEILDITPCSFGGVSVITPGTNTSNQVAVLYQGVNCTEVPVAIHADQLTPTWRVYSTGSNVFQTRAGCLIGAEHVNNSYECDIPIGAGICASYQTQTNSPRRARSVASQSIIAYTMSLGAENSVAYSNNSIAIPTNFTISVTTEILPVSMTKTSVDCTMYICGDSTECSNLLLQYGSFCTQLNRALTGIAVEQDKNTQEVFAQVKQIYKTPPIKDFGGFNFSQILPDPSKPSKRSFIEDLLFNKVTLADAGFIKQYGDCLGDIAARDLICAQKFNGLTVLPPLLTDEMIAQYTSALLAGTITSGWTFCAGAALQIPFAMQMAYRFNGIGVTQNVLYENQKLIANQFNSAIGKIQDSLSSTASALGKLQDVVNQNAQALNTLVKQLSSNFGAISSVLNDILSRLDKVEAEVQIDRLITGRLQSLQTYVTQQLIRAAEIRASANLAATKMSECVCGQSKRVDFCGKGYHLMSFPQSAPHGVVFLHVTYVPAQEKNFTTAPAICHDGKAHFPREGVFVSNGTHWFVTQRNFYEPQIITTDNTFVSGNCDVVIGIVNNTVYDPLQPELDSFKEELDKYFKNHTSPDVDLGDISGINASVVNIQKEIDRLNEVAKNLNESLIDLQELGKYEQYIK

SEQ ID NO: 2207 - protein, 1211 aa, Artificial Sequence
  SARS-CoV-2/Congo/94/2020__EPI_ISL_417947 spike protein (1-1211)(G889C_L1034C)
MFVFLVLLPLVSSQCVNLTTRTQLPPAYTNSFTRGVYYPDKVFRSSVLHSTQDLFLPFFSNVTWFHAIHVSGTNGTKRFDNPVLPFNDGVYFASTEKSNIIRGWIFGTTLDSKTQSLLIVNNATNVVIKVCEFQFCNDPFLGVYYHKNNKSWMESEFRVYSSANNCTFEYVSQPFLMDLEGKQGNFKNLREFVFKNIDGYFKIYSKHTPINLVRDLPQGFSALEPLVDLPIGINITRFQTLLALHRSYLTPGDSSSGWTAGAAAYYVGYLQPRTFLLKYNENGTITDAVDCALDPLSETKCTLKSFTVEKGIYQTSNFRVQPTESIVRFPNITNLCPFGEVFNATRFASVYAWNRKRISNCVADYSVLYNSASFSTFKCYGVSPTKLNDLCFTNVYADSFVIRGDEVRQIAPGQTGKIADYNYKLPDDFTGCVIAWNSNNLDSKVGGNYNYLYRLFRKSNLKPFERDISTEIYQAGSTPCNGVEGFNCYFPLQSYGFQPTNGVGYQPYRVVVLSFELLHAPATVCGPKKSTNLVKNKCVNFNFNGLTGTGVLTESNKKFLPFQQFGRDIADTTDAVRDPQTLEILDITPCSFGGVSVITPGTNTSNQVAVLYQGVNCTEVPVAIHADQLTPTWRVYSTGSNVFQTRAGCLIGAEHVNNSYECDIPIGAGICASYQTQTNSPRRARSVASQSIIAYTMSLGAENSVAYSNNSIAIPTNFTISVTTEILPVSMTKTSVDCTMYICGDSTECSNLLLQYGSFCTQLNRALTGIAVEQDKNTQEVFAQVKQIYKTPPIKDFGGFNFSQILPDPSKPSKRSFIEDILFNKVTLADAGFIKQYGDCLGDIAARDLICAQKFNGLTVLPPLLTDEMIAQYTSALLAGTITSGWTFCAGAALQIPFAMQMAYRFNGIGVTQNVLYENQKLIANQFNSAIGKIQDSLSSTASALGKLQDVVNQNAQALNTLVKQLSSNFGAISSVLNDILSRLDKVEAEVQIDRLITGRLQSLQTYVTQQLIRAAEIRASANLAATKMSECVCGQSKRVDFCGKGYHLMSFPQSAPHGVVFLHVTYVPAQEKNFTTAPAICHDGKAHFPREGVFVSNGTHWFVTQRNFYEPQIITTDNTFVSGNCDVVIGIVNNTVYDPLQPELDSFKEELDKYFKNHTSPDVDLGDISGINASVVNIQKEIDRLNEVAKNLNESLIDLQELGKYEQYIK

SEQ ID NO: 2208 - protein, 1211 aa, Artificial Sequence
  SARS-CoV-2/Congo/158/2020__EPI_ISL_417950 spike protein (1-1211)(G889C_L1034C)
MFVFLVLLPLVSSQCVNLTTRTQLPPAYTNSFTRGVYYPDKVFRSSVLHSTQDLFLPFFSNVTWFHAIHVSGTNGTKRFDNPVLPFNDGVYFASTEKSNIIRGWIFGTTLDSKTQSLLIVNNATNVVIKVCEFQFCNDPFLGVYYHKNNKSWMESEFRVYSSANNCTFEYVSQPFLMDLEGKQGNFKNLREFVFKNIDGYFKIYSKHTPINLVRDLPQGFSALEPLVDLPIGINITRFQTLLALHRSYLTPGDSSSGWTAGAAAYYVGYLQPRTFLLKYNENGTITDAVDCALDPLSETKCTLKSFTVEKGIYQTSNFRVQPTESIVRFPNITNLCPFGEVFNATRFASVYAWNRKRISNCVADYSVLYNSASFSTFKCYGVSPTKLNDLCFTNVYADSFVIRGDEVRQIAPGQTGKIADYNYKLPDDFTGCVIAWNSNNLDSKVGGNYNYLYRLFRKSNLKPFERDISTEIYQAGSTPCNGVEGFNCYFPLQSYGFQPTNGVGYQPYRVVVLSFELLHAPATVCGPKKSTNLVKNKCVNFNFNGLTGTGVLTESNKKFLPFQQFGRDIADTTDAVRDPQTLEILDITPCSFGGVSVITPGTNTSNQVAVLYQDVNCTEVPVAIHADQLTPTWRVYSTGSNVFQTRAGCLIGAEHVNNSYECDIPIGAGICASYQTQTNSPRRARSVASQSIIAYTMSLGAENSVAYSNNSIAIPTNFTISVTTEILPVSMTKTSVDCTMYICGDSTECSNLLLQYGSFCTQLNRALTGIAVEQDKNTQEVFAQVKQIYKTPPIKDFGGFNFSQILPDPSKPSKRSFIEDLLFNKVTLADAGFIKQYGDCLGDIAARDLICAQKFNGLTVLPPLLTDEMIAQYTSALLAGTITSGWTFCAGAALQIPFAMQMAYRFNGIGVTQNVLYENQKLIANQFNSAIGKIQDSLSSTASALGKLQDVVNQNAQALNTLVKQLSSNFGAISSVLNDILSRLDKVEAEVQIDRLITGRLQSLQTYVTQQLIRAAEIRASANLAATKMSECVCGQSKRVDFCGKGYHLMSFPQSAPHGVVFLHVTYVPAQEKNFTTAPAICHDGKAHFPREGVFVSNGTHWFVTQRNFYEPQIITTDNTFLSGNCDVVIGIVNNTVYDPLQPELDSFKEELDKYFKNHTSPDVDLGDISGINASVVNIQKEIDRLNEVAKNLNESLIDLQELGKYEQYIK

SEQ ID NO: 2209 - protein, 1211 aa, Artificial Sequence
  SARS-CoV-2/USA/UT-00034/2020__EPI_ISL_417977 spike protein (1-1211)(G889C_L1034C)
MFVFLVLLPLVSSQCVNLTTRTQLPPAYTNSFTRGVYYPDKVFRSSVLHSTQDLFLPFFSNVTWFHAIHVSGTNGTKRFDNPVLPFNDGVYFASTEKSNIIRGWIFGTTLDSKTQSLLIVNNATNVVIKVCEFQFCNDPFLGVYYYKNNKSWMESEFRVYSSANNCTFEYVSQPFLMDLEGKQGNFKNLREFVFKNIDGYFKIYSKHTPINLVRDLPQGFSALEPLVDLPIGINITRFQTLLALHRSYLTPGDSSSGWTAGAAAYYVGYLQPRTFLLKYNENGTITDAVDCALDPLSETKCTLKSFTVEKGIYQTSNFRVQPTESIVRFPNITNLCPFGEVFNATRFASVYAWNRKRISNCVADYSVLYNSASFSTFKCYGVSPTKLNDLCFTNVYADSFVIRGDEVRQIAPGQTGKIADYNYKLPDDFTGCVIAWNSNNLDSKVGGNYNYLYRLFRKSNLKPFERDISTEIYQAGSTPCNGVEGFNCYFPLQSYGFQPTNGVGYQPYRVVVLSFELLHAPATVCGPKKSTNLVKNKCVNFNFNGLTGTGVLTESNKKFLPFQQFGRDIADTTDAVRDPQTLEILDITPCSFGGVSVITPGTNTSNQVAVLYQGVNCTEVPVAIHADQLTPTWRVYSTGSNVFQTRAGCLIGAEHVNNSYECDIPIGAGICASYQTQTNSPRRARSVASQSIIAYTMSLGAENSVAYSNNSIAIPTNFTISVTTEILPVSMTKTSVDCTMYICGDSTECSNLLLQYGSFCTQLNRALTGIAVEQDKNTQEVFAQVKQIYKTPPIKDFGGFNFSQILPDPSKPSKRSFIEDLLFNKVTLADAGFIKQYGDCLGDIAARDLICAQKFNGLTVLPPLLTDEMIAQYTSALLAGTITSGWTFCAGAALQIPFAMQMAYRFNGIGVTQNVLYENQKLIANQFNSAIGKIQDSLSSTASALGKLQDVVNQNAQALNTLVKQLSSNFGAISSVLNDILSRLDKVEAEVQIDRLITGRLQSLQTYVTQQLIRAAEIRASANLAATKMSECVCGQSKRVDFCGKGYHLMSFPQSAPHGVVFLHVTYVPAQEKNFTTAPAICHDGKAHFPREGVFVSNGTHWFVTQRNFYEPQIITTDNTFVSGNCDVVIGIVNNTVYDPLQPELDSFKEELDKYFKNHTSPDVDLGDISGINASVVNIQKEIDRLNEVAKNLNESLIDLQELGKYEQYIK

SEQ ID NO: 2210 - protein, 1211 aa, Artificial Sequence
  SARS-CoV-2/USA/UT-00033/2020__EPI_ISL_417976 spike protein (1-1211)(G889C_L1034C)
MFVFLVLLPLVSSQCVNLTTRTQLPPAYTNSFTRGVYYPDKVFRSSVLHSTQDLFLPFFSNVTWFHAIHVSGTNGTKRFDNPVLPFNDGVYFASTEKSNIIRGWIFGTTLDSKTQSLLIVNNATNVVIKVCEFQFCNDPFLGVYYHKNNKSWMESEFRVYSSANNCTFEYVSQPFLMDLEGKQGNFKNLREFVFKNIDGYFKIYSKHTPINLVRDLPQGFSALEPLVDLPIGINITRFQTLLALHRSYLTPGDSSSGLTAGAAAYYVGYLQPRTFLLKYNENGTITDAVDCALDPLSETKCTLKSFTVEKGIYQTSNFRVQPTESIVRFPNITNLCPFGEVFNATRFASVYAWNRKRISNCVADYSVLYNSASFSTFKCYGVSPTKLNDLCFTNVYADSFVIRGDEVRQIAPGQTGKIADYNYKLPDDFTGCVIAWNSNNLDSKVGGNYNYLYRLFRKSNLKPFERDISTEIYQAGSTPCNGVEGFNCYFPLQSYGFQPTNGVGYQPYRVVVLSFELLHAPATVCGPKKSTNLVKNKCVNFNFNGLTGTGVLTESNKKFLPFQQFGRDIADTTDAVRDPQTLEILDITPCSFGGVSVITPGTNTSNQVAVLYQGVNCTEVPVAIHADQLTPTWRVYSTGSNVFQTRAGCLIGAEHVNNSYECDIPIGAGICASYQTQTNSPRRARSVASQSIIAYTMSLGAENSVAYSNNSIAIPTNFTISVTTEILPVSMTKTSVDCTMYICGDSTECSNLLLQYGSFCTQLNRALTGIAVEQDKNTQEVFAQVKQIYKTPPIKDFGGFNFSQILPDPSKPSKRSFIEDLLFNKVTLADAGFIKQYGDCLGDIAARDLICAQKFNGLTVLPPLLTDEMIAQYTSALLAGTITSGWTFCAGAALQIPFAMQMAYRFNGIGVTQNVLYENQKLIANQFNSAIGKIQDSLSSTASALGKLQDVVNQNAQALNTLVKQLSSNFGAISSVLNDILSRLDKVEAEVQIDRLITGRLQSLQTYVTQQLIRAAEIRASANLAATKMSECVCGQSKRVDFCGKGYHLMSFPQSAPHGVVFLHVTYVPAQEKNFTTAPAICHDGKAHFPREGVFVSNGTHWFVTQRNFYEPQIITTDNTFVSGNCDVVIGIVNNTVYDPLQPELDSFKEELDKYFKNHTSPDVDLGDISGINASVVNIQKEIDRLNEVAKNLNESLIDLQELGKYEQYIK

SEQ ID NO: 2211 - protein, 1211 aa, Artificial Sequence
  SARS-CoV-2/USA/WI-13/2020__EPI_ISL_417516 spike protein (1-1211)(G889C_L1034C)
MFVFLVLLPLVSSQCVNLTTRTQLPPAYTNSFTRGVYYPDKVFRSSVLHSTQDLFLPFFSNVTWFHAIHVSGTNGTKRFDNPVLPFNDGVYFASTEKSNIIRGWIFGTTLDSKTQSLLIVNNATNVVIKVCEFQFCNDPFLGVYYHKNNKSWMESEFRVYSSANNCTFEYVSQPFLMDLEGKQGNFKNLREFVFKNIDGYFKIYSKHTPINLVRDLPQGFSALEPLVDLPIGINITRFQTLLALHRSYLTPGDSSSGWTAGAAAYYVGYLQPRTFLLKYNENGTITDAVDCALDPLSETKCTLKSFTVEKGIYQTSNFRVLPTESIVRFPNITNLCPFGEVFNATRFASVYAWNRKRISNCVADYSVLYNSASFSTFKCYGVSPTKLNDLCFTNVYADSFVIRGDEVRQIAPGQTGKIADYNYKLPDDFTGCVIAWNSNNLDSKVGGNYNYLYRLFRKSNLKPFERDISTEIYQAGSTPCNGVEGFNCYFPLQSYGFQPTNGVGYQPYRVVVLSFELLHAPATVCGPKKSTNLVKNKCVNFNFNGLTGTGVLTESNKKFLPFQQFGRDIADTTDAVRDPQTLEILDITPCSFGGVSVITPGTNTSNQVAVLYQGVNCTEVPVAIHADQLTPTWRVYSTGSNVFQTRAGCLIGAEHVNNSYECDIPIGAGICASYQTQTNSPRRARSVASQSIIAYTMSLGAENSVAYSNNSIAIPTNFTISVTTEILPVSMTKTSVDCTMYICGDSTECSNLLLQYGSFCTQLNRALTGIAVEQDKNTQEVFAQVKQIYKTPPIKDFGGFNFSQILPDPSKPSKRSFIEDLLFNKVTLADAGFIKQYGDCLGDIAARDLICAQKFNGLTVLPPLLTDEMIAQYTSALLAGTITSGWTFCAGAALQIPFAMQMAYRFNGIGVTQNVLYENQKLIANQFNSAIGKIQDSLSSTASALGKLQDVVNQNAQALNTLVKQLSSNFGAISSVLNDILSRLDKVEAEVQIDRLITGRLQSLQTYVTQQLIRAAEIRASANLAATKMSECVCGQSKRVDFCGKGYHLMSFPQSAPHGVVFLHVTYVPAQEKNFTTAPAICHDGKAHFPREGVFVSNGTHWFVTQRNFYEPQIITTDNTFVSGNCDVVIGIVNNTVYDPLQPELDSFKEELDKYFKNHTSPDVDLGDISGINASVVNIQKEIDRLNEVAKNLNESLIDLQELGKYEQYIK

SEQ ID NO: 2212 - protein, 1210 aa, Artificial Sequence
  SARS-CoV-2/India/1-27/2020__EPI_ISL_413522 spike protein (1-1210)(G888C_L1033C)
MFVFLVLLPLVSSQCVNLTTRTQLPPAYTNSFTRGVYYPDKVFRSSVLHSTQDLFLPFFSNVTWFHAIHVSGTNGTKRFDNPVLPFNDGVYFASTEKSNIIRGWIFGTTLDSKTQSLLIVNNATNVVIKVCEFQFCNDPFLGVYHKNNKSWMESEFRVYSSANNCTFEYVSQPFLMDLEGKQGNFKNLREFVFKNIDGYFKIYSKHTPINLVRDLPQGFSALEPLVDLPIGINITRFQTLLALHRSYLTPGDSSSGWTAGAAAYYVGYLQPRTFLLKYNENGTITDAVDCALDPLSETKCTLKSFTVEKGIYQTSNFRVQPTESIVRFPNITNLCPFGEVFNATRFASVYAWNRKRISNCVADYSVLYNSASFSTFKCYGVSPTKLNDLCFTNVYADSFVIRGDEVIQIAPGQTGKIADYNYKLPDDFTGCVIAWNSNNLDSKVGGNYNYLYRLFRKSNLKPFERDISTEIYQAGSTPCNGVEGFNCYFPLQSYGFQPTNGVGYQPYRVVVLSFELLHAPATVCGPKKSTNLVKNKCVNFNFNGLTGTGVLTESNKKFLPFQQFGRDIADTTDAVRDPQTLEILDITPCSFGGVSVITPGTNTSNQVAVLYQDVNCTEVPVAIHADQLTPTWRVYSTGSNVFQTRAGCLIGAEHVNNSYECDIPIGAGICASYQTQTNSPRRARSVASQSIIAYTMSLGAENSVAYSNNSIAIPTNFTISVTTEILPVSMTKTSVDCTMYICGDSTECSNLLLQYGSFCTQLNRALTGIAVEQDKNTQEVFAQVKQIYKTPPIKDFGGFNFSQILPDPSKPSKRSFIEDLLFNKVTLADAGFIKQYGDCLGDIAARDLICAQKFNGLTVLPPLLTDEMIAQYTSALLAGTITSGWTFCAGAALQIPFAMQMAYRFNGIGVTQNVLYENQKLIANQFNSAIGKIQDSLSSTASALGKLQDVVNQNAQALNTLVKQLSSNFGAISSVLNDILSRLDKVEAEVQIDRLITGRLQSLQTYVTQQLIRAAEIRASANLAATKMSECVCGQSKRVDFCGKGYHLMSFPQSAPHGVVFLHVTYVPAQEKNFTTAPAICHDGKAHFPREGVFVSNGTHWFVTQRNFYEPQIITTDNTFVSGNCDVVIGIVNNTVYDPLQPELDSFKEELDKYFKNHTSPDVDLGDISGINASVVNIQKEIDRLNEVAKNLNESLIDLQELGKYEQYIK

SEQ ID NO: 2213 - protein, 1205 aa, Artificial Sequence
  SARS-CoV-2/pangolin/Guangxi/P4L/2017__EPI_ISL_410538 spike protein (1-1205)(G883C_L1028C)
MFVFLFVLPLVSSQCVNLTTRTGIPPGYTNSSTRGVYYPDKVFRSSILHLTQDLFLPFFSNVTWFNTINYQGGFKKFDNPVLPFNDGVYFASTEKSNIIRGWIFGTTLDARTQSLLIVNNATNVVIKVCEFQFCTDPFLGVYYHNNNKTWVENEFRVYSSANNCTFEYISQPFLMDLEGKQGNFKNLREFVFKNVDGYFKIYSKHTPIDLVRDLPRGFAALEPLVDLPIGINITRFQTLLALHRSYLTPGNLESGWTTGAAAYYVGYLQQRTFLLSYNQNGTITDAVDCSLDPLSETKCTLKSLTVEKGIYQTSNFRVQPTISIVRFPNITNLCPFGEVFNASKFASVYAWNRKRISNCVADYSVLYNSTSFSTFKCYGVSPTKLNDLCFTNVYADSFVVKGDEVRQIAPGQTGVIADYNYKLPDDFTGCVIAWNSVKQDALTGGNYGYLYRLFRKSKLKPFERDISTEIYQAGSTPCNGQVGLNCYYPLERYGFHPTTGVNYQPFRVVVLSFELLNGPATVCGPKLSTTLVKDKCVNFNFNGLTGTGVLTTSKKQFLPFQQFGRDISDTTDAVRDPQTLEILDITPCSFGGVSVITPGTNTSNQVAVLYQDVNCTEVPMAIHAEQLTPAWRVYSAGANVFQTRAGCLVGAEHVNNSYECDIPVGAGICASYHSMSSLRSVNQRSIIAYTMSLGAENSVAYSNNSIAIPTNFTISVTTEILPVSMTKTSVDCTMYICGDSIECSNLLLQYGSFCTQLNRALTGIAVEQDKNTQEVFAQVKQIYKTPPIKDFGGFNFSQILPDPSKPSKRSFIEDLLFNKVTLADAGFIKQYGDCLGDIAARDLICAQKFNGLTVLPPLLTDEMIAQYTSALLAGTITSGWTFCAGAALQIPFAMQMAYRFNGIGVTQNVLYENQKLIANQFNSAIGKIQDSLSSTASALGKLQDVVNQNAQALNTLVKQLSSNFGAISSVLNDILSRLDKVEAEVQIDRLITGRLQSLQTYVTQQLIRAAEIRASANLAATKMSECVCGQSKRVDFCGKGYHLMSFPQSAPHGVVFLHVTYVPAQEKNFTTAPAICHEGKAHFPREGVFVSNGTHWFITQRNFYEPQIITTDNTFVSGSCDVVIGIVNNTVYDPLQPELDSFKEELDKYFKNHTSPDVDLGDISGINASVVNIQKEIDRLNEVAKNLNESPIDLQELGKYEQYIK

SEQ ID NO: 2214 - protein, 1205 aa, Artificial Sequence
  SARS-CoV-2/pangolin/Guangxi/P5L/2017__EPI_ISL_410540 spike protein (1-1205)(G883C_L1028C)
MFVFLFVLPLVSSQCVNLTTRTGIPPGYTNSSTRGVYYPDKVFRSSILHLTQDLFLPFFSNVTWFNTINYQGGFKKFDNPVLPFNDGVYFASTEKSNIIRGWIFGTTLDARTQSLLIVNNATNVVIKVCEFQFCTDPFLGVYYHNNNKTWVENEFRVYSSANNCTFEYISQPFLMDLEGKQGNFKNLREFVFKNVDGYFKIYSKHTPIDLVRDLPRGFAALEPLVDLPIGINITRFQTLLALHRSYLTPGKLESGWTTGAAAYYVGYLQQRTFLLSYNQNGTITDAVDCSLDPLSETKCTLKSLTVEKGIYQTSNFRVQPTISIVRFPNITNLCPFGEVFNASKFASVYAWNRKRISNCVADYSVLYNSTSFSTFKCYGVSPTKLNDLCFTNVYADSFVVKGDEVRQIAPGQTGVIADYNYKLPDDFTGCVIAWNSVKQDALTGGNYGYLYRLFRKSKLKPFERDISTEIYQAGSTPCNGQVGLNCYYPLERYGFHPTTGVNYQPFRVVVLSFELLNGPATVCGPKLSTTLVKDKCVNFNFNGLTGTGVLTTSKKQFLPFQQFGRDISDTTDAVRDPQTLEILDITPCSFGGVSVITPGTNTSNQVAVLYQDVNCTEVPMAIHAEQLTPAWRVYSAGANVFQTRAGCLVGAEHVNNSYECDIPVGAGICASYHSMSSFRSVNQRSIIAYTMSLGAENSVAYSNNSIAIPTNFTISVTTEILPVSMTKTSVDCTMYICGDSIECSNLLLQYGSFCTQLNRALTGIAVEQDKNTQEVFAQVKQIYKTPPIKDFGGFNFSQILPDPSKPSKRSFIEDLLFNKVTLADAGFIKQYGDCLGDIAARDLICAQKFNGLTVLPPLLTDEMIAQYTSALLAGTITSGWTFCAGAALQIPFAMQMAYRFNGIGVTQNVLYENQKLIANQFNSAIGKIQDSLSSTASALGKLQDVVNQNAQALNTLVKQLSSNFGAISSVLNDILSRLDKVEAEVQIDRLITGRLQSLQTYVTQQLIRAAEIRASANLAATKMSECVCGQSKRVDFCGKGYHLMSFPQSAPHGVVFLHVTYVPAQEKNFTTAPAICHEGKAHFPREGVFVSNGTHWFITQRNFYEPQIITTDNTFVSGSCDVVIGIVNNTVYDPLQPELDSFKEELDKYFKNHTSPDVDLGDISGINASVVNIQKEIDRLNEVAKNLNESLIDLQELGKYEQYIK

SEQ ID NO: 2215 - protein, 1205 aa, Artificial Sequence
  SARS-CoV-2/pangolin/Guangxi/P5E/2017__EPI_ISL_410541 spike protein (1-1205)(G883C_L1028C)
MFVFLFVLPLVSSQCVNLTTRTGIPPGYTNSSTRGVYYPDKVFRSSILHLTQDLFLPFFSNVTWFNTITYQGGSKKFDNPVLPFNDGVYFASTEKSNIIRGWIFGTTLDARTQSLLIVNNATNVVIKVCEFQFCTDPFLGVYYHNNNKTWVENEFRVYSSANNCTFEYISQPFLMDLEGKQGNFKNLREFVFKNVDGYFKIYSKHTPIDLVRDLPRGFAALEPLVDLPIGINITRFQTLLALHRSYLTPGKLESGWTTGAAAYYVGYLQQRTFLLSYNQNGTITDAVDCSLDPLSETKCTLKSLTVEKGIYQTSNFRVQPTISIVRFPNITNLCPFGEVFNASKFASVYAWNRKRISNCVADYSVLYNSTSFSTFKCYGVSPTKLNDLCFTNVYADSFVVKGDEVRQIAPGQTGVIADYNYKLPDDFTGCVIAWNSVKQDALTGDNYGYLYRLFRKSKLKPFERDISTEIYQAGSTPCNGQVGLNCYYPLERYGFHPTTGVNYQPFRVVVLSFELLNGPATVCGPKLSTTLVKDKCVNFNFNGLTGTGVLTTSKKQFLPFQQFGRDISDTTDAVRDPQTLEILDITPCSFGGVSVITPGTNTSNQVAVLYQDVNCTEVPMAIHAEQLTPAWRVYSAGANVFQTRAGCLVGAEHVNNSYECDIPVGAGICASYHSMSSFRSVNQRSIIAYTMSLGAENSVAYSNNSIAIPTNFTISVTTEILPVSMTKTSVDCTMYICGDSIECSNLLLQYGSFCTQLNRALTGIAVEQDKNTQEVFAQVKQIYKTPPIKDFGGFNFSQILPDPSKPSKRSFIEDLLFNKVTLADAGFIKQYGDCLGDIAARDLICAQKFNGLTVLPPLLTDEMIAQYTSALLAGTITSGWTFCAGAALQIPFAMQMAYRFNGIGVTQNVLYENQKLIANQFNSAIGKIQDSLSSTASALGKLQDVVNQNAQALNTLVKQLSSNFGAISSVLNDILSRLDKVEAEVQIDRLITGRLQSLQTYVTQQLIRAAEIRASANLAATKMSECVCGQSKRVDFCGKGYHLMSFPQSAPHGVVFLHVTYVPAQEKNFTTAPAICHEGKAHFPREGVFVSNGTHWFITQRNFYEPQIITTDNTFVSGSCDVVIGIVNNTVYDPLQPELDSFKEELDKYFKNHTSPDVDLGDISGINASVVNIQKEIDRLNEVAKNLNESLIDLQELGKYEQYIK

SEQ ID NO: 2216 - protein, 1203 aa, Artificial Sequence
  SARS-CoV-2/pangolin/Guangxi/P1E/2017__EPI_ISL_410539 spike protein (1-1203)(G881C_L1026C)
MFVFLFVLPLVSSQCVNLTTRTGIQPGYTNSSTRGVYYPDKVFRSSILHLTQDLFLPFFSNVTWFNTINYQGGFKKFDNPVLPFNDGVYFASTEKSNIIRGWIFGTTLDARTQSLLIVNNATNVVIKVCEFQFCTDPFLGVYYHNNNKTWVENEFRVYSSANNCTFEYISQPFLMDLEGKQGNFKNLREFVFKNVDGYFKIYSKHTPIDLVRDLPRGFAALEPLVDLPIGINITRFQTLLALHRSYLTPGKLESGWTTGAAAYYVGYLQQRTFLLSYNQNGTITDAVDCSLDPLSETKCTLKSLTVEKGIYQTSNFRVQPTISIVRFPNITNLCPFGEVFNASKFASVYAWNRKRISNCVADYSVLYNSTSFSTFKCYGVSPTKLNDLCFTNVYADSFVVKGDEVRQIAPGQTGVIADYNYKLPDDFTGCVIAWNSVKQDALTGGNYLYRLFRKSKLKPFERDISTEIYQAGSTPCNGQVGLNCYYPLERYGFHPTTGVNYQPFRVVVLSFELLNGPATVCGPKLSTTLVKDKCVNFNFNGLTGTGVLTTSKKQFLPFQQFGRDISDTTDAVRDPQTLEILDITPCSFGGVSVITPGTNTSNQVAVLYQDVNCTEVPMAIHAEQLTPAWRVYSAGANVFQTRAGCLVGAEHVNNSYECDIPVGAGICASYHSMSSLRSVNQRSIIAYTMSLGAENSVAYSNNSIAIPTNFTISVTTEILPVSMTKTSVDCTMYICGDSIECSNLLLQYGSFCTQLNRALTGIAVEQDKNTQEVFAQVKQIYKTPPIKDFGGFNFSQILPDPSKPSKRSFIEDLLFNKVTLADAGFIKQYGDCLGDIAARDLICAQKFNGLTVLPPLLTDEMIAQYTSALLAGTITSGWTFCAGAALQIPFAMQMAYRFNGIGVTQNVLYENQKLIANQFNSAIGKIQDSLSSTASALGKLQDVVNQNAQALNTLVKQLSSNFGAISSVLNDILSRLDKVEAEVQIDRLITGRLQSLQTYVTQQLIRAAEIRASANLAATKMSECVCGQSKRVDFCGKGYHLMSFPQSAPHGVVFLHVTYVPAQEKNFTTAPAICHEGKAHFPREGVFVSNGTHWFITQRNFYEPQIITTDNTFVSGSCDVVIGIVNNTVYDPLQPELDSFKEELDKYFKNHTSPDVDLGDISGINASVVNIQKEIDRLNEVAKNLNESLIDLQELGKYEQYIK

SEQ ID NO: 2217 - protein, 1211 aa, Artificial Sequence
  SARS-CoV-2/Wuhan/WIV05/2019__EPI_ISL_402128 spike protein (1-1211)(I909C_Y1047C)
MFVFLVLLPLVSSQCVNLTTRTQLPPAYTNSFTRGVYYPDKVFRSSVLHSTQDLFLPFFSNVTWFHAIHVSGTNGTKRFDNPVLPFNDGVYFASTEKSNIIRGWIFGTTLDSKTQSLLIVNNATNVVIKVCEFQFCNDPFLGVYYHKNNKSWMESEFRVYSSANNCTFEYVSQPFLMDLEGKQGNFKNLREFVFKNIDGYFKIYSKHTPINLVRDLPQGFSALEPLVDLPIGINITRFQTLLALHRSYLTPGDSSSGWTAGAAAYYVGYLQPRTFLLKYNENGTITDAVDCALDPLSETKCTLKSFTVEKGIYQTSNFRVQPTESIVRFPNITNLCPFGEVFNATRFASVYAWNRKRISNCVADYSVLYNSASFSTFKCYGVSPTKLNDLCFTNVYADSFVIRGDEVRQIAPGQTGKIADYNYKLPDDFTGCVIAWNSNNLDSKVGGNYNYLYRLFRKSNLKPFERDISTEIYQAGSTPCNGVEGFNCYFPLQSYGFQPTNGVGYQPYRVVVLSFELLHAPATVCGPKKSTNLVKNKCVNFNFNGLTGTGVLTESNKKFLPFQQFGRDIADTTDAVRDPQTLEILDITPCSFGGVSVITPGTNTSNQVAVLYQDVNCTEVPVAIHADQLTPTWRVYSTGSNVFQTRAGCLIGAEHVNNSYECDIPIGAGICASYQTQTNSPRRARSVASQSIIAYTMSLGAENSVAYSNNSIAIPTNFTISVTTEILPVSMTKTSVDCTMYICGDSTECSNLLLQYGSFCTQLNRALTGIAVEQDKNTQEVFAQVKQIYKTPPIKDFGGFNFSQILPDPSKPSKRSFIEDLLFNKVTLADAGFIKQYGDCLGDIAARDLICAQKFNGLTVLPPLLTDEMIAQYTSALLAGTITSGWTFGAGAALQIPFAMQMAYRFNGCGVTQNVLYENQKLIANQFNSAIGKIQDSLSSTASALGKLQDVVNQNAQALNTLVKQLSSNFGAISSVLNDILSRLDKVEAEVQIDRLITGRLQSLQTYVTQQLIRAAEIRASANLAATKMSECVLGQSKRVDFCGKGCHLMSFPQSAPHGVVFLHVTYVPAQEKNFTTAPAICHDGKAHFPREGVFVSNGTHWFVTQRNFYEPQIITTDNTFVSGNCDVVIGIVNNTVYDPLQPELDSFKEELDKYFKNHTSPDVDLGDISGINASVVNIQKEIDRLNEVAKNLNESLIDLQELGKYEQYIK

SEQ ID NO: 2218 - protein, 1207 aa, Artificial Sequence
  SARS-CoV-2/bat/Yunnan/RaTG13/2013__EPI_ISL_402131 spike protein (1-1207)(I905C_Y1043C)
MFVFLVLLPLVSSQCVNLTTRTQLPPAYTNSSTRGVYYPDKVFRSSVLHLTQDLFLPFFSNVTWFHAIHVSGTNGIKRFDNPVLPFNDGVYFASTEKSNIIRGWIFGTTLDSKTQSLLIVNNATNVVIKVCEFQFCNDPFLGVYYHKNNKSWMESEFRVYSSANNCTFEYVSQPFLMDLEGKQGNFKNLREFVFKNIDGYFKIYSKHTPINLVRDLPPGFSALEPLVDLPIGINITRFQTLLALHRSYLTPGDSSSGWTAGAAAYYVGYLQPRTFLLKYNENGTITDAVDCALDPLSETKCTLKSFTVEKGIYQTSNFRVQPTDSIVRFPNITNLCPFGEVFNATTFASVYAWNRKRISNCVADYSVLYNSTSFSTFKCYGVSPTKLNDLCFTNVYADSFVITGDEVRQIAPGQTGKIADYNYKLPDDFTGCVIAWNSKHIDAKEGGNFNYLYRLFRKANLKPFERDISTEIYQAGSKPCNGQTGLNCYYPLYRYGFYPTDGVGHQPYRVVVLSFELLNAPATVCGPKKSTNLVKNKCVNFNFNGLTGTGVLTESNKKFLPFQQFGRDIADTTDAVRDPQTLEILDITPCSFGGVSVITPGTNASNQVAVLYQDVNCTEVPVAIHADQLTPTWRVYSTGSNVFQTRAGCLIGAEHVNNSYECDIPIGAGICASYQTQTNSRSVASQSIIAYTMSLGAENSVAYSNNSIAIPTNFTISVTTEILPVSMTKTSVDCTMYICGDSTECSNLLLQYGSFCTQLNRALTGIAVEQDKNTQEVFAQVKQIYKTPPIKDFGGFNFSQILPDPSKPSKRSFIEDLLFNKVTLADAGFIKQYGDCLGDIAARDLICAQKFNGLTVLPPLLTDEMIAQYTSALLAGTITSGWTFGAGAALQIPFAMQMAYRFNGCGVTQNVLYENQKLIANQFNSAIGKIQDSLSSTASALGKLQDVVNQNAQALNTLVKQLSSNFGAISSVLNDILSRLDKVEAEVQIDRLITGRLQSLQTYVTQQLIRAAEIRASANLAATKMSECVLGQSKRVDFCGKGCHLMSFPQSAPHGVVFLHVTYVPAQEKNFTTAPAICHDGKAHFPREGVFVSNGTHWFVTQRNFYEPQIITTDNTFVSGSCDVVIGIVNNTVYDPLQPELDSFKEELDKYFKNHTSPDVDLGDISGINASVVNIQKEIDRLNEVAKNLNESLIDLQELGKYEQYIK

SEQ ID NO: 2219 - protein, 1211 aa, Artificial Sequence
  SARS-CoV-2/Wuhan/HBCDC-HB-01/2019__EPI_ISL_402132 spike protein (1-1211)(I909C_Y1047C)
MFVFLVLLPLVSSQCVNLTTRTQLPPAYTNSITRGVYYPDKVFRSSVLHSTQDLFLPFFSNVTWFHAIHVSGTNGTKRFDNPVLPFNDGVYFASTEKSNIIRGWIFGTTLDSKTQSLLIVNNATNVVIKVCEFQFCNDPFLGVYYHKNNKSWMESEFRVYSSANNCTFEYVSQPFLMDLEGKQGNFKNLREFVFKNIDGYFKIYSKHTPINLVRDLPQGFSALEPLVDLPIGINITRFQTLLALHRSYLTPGDSSSGWTAGAAAYYVGYLQPRTFLLKYNENGTITDAVDCALDPLSETKCTLKSFTVEKGIYQTSNFRVQPTESIVRFPNITNLCPFGEVFNATRFASVYAWNRKRISNCVADYSVLYNSASFSTFKCYGVSPTKLNDLCFTNVYADSFVIRGDEVRQIAPGQTGKIADYNYKLPDDFTGCVIAWNSNNLDSKVGGNYNYLYRLFRKSNLKPFERDISTEIYQAGSTPCNGVEGFNCYFPLQSYGFQPTNGVGYQPYRVVVLSFELLHAPATVCGPKKSTNLVKNKCVNFNFNGLTGTGVLTESNKKFLPFQQFGRDIADTTDAVRDPQTLEILDITPCSFGGVSVITPGTNTSNQVAVLYQDVNCTEVPVAIHADQLTPTWRVYSTGSNVFQTRAGCLIGAEHVNNSYECDIPIGAGICASYQTQTNSPRRARSVASQSIIAYTMSLGAENSVAYSNNSIAIPTNFTISVTTEILPVSMTKTSVDCTMYICGDSTECSNLLLQYGSFCTQLNRALTGIAVEQDKNTQEVFAQVKQIYKTPPIKDFGGFNFSQILPDPSKPSKRSFIEDLLFNKVTLADAGFIKQYGDCLGDIAARDLICAQKFNGLTVLPPLLTDEMIAQYTSALLAGTITSGWTFGAGAALQIPFAMQMAYRFNGCGVTQNVLYENQKLIANQFNSAIGKIQDSLSSTASALGKLQDVVNQNAQALNTLVKQLSSNFGAISSVLNDILSRLDKVEAEVQIDRLITGRLQSLQTYVTQQLIRAAEIRASANLAATKMSECVLGQSKRVDFCGKGCHLMSFPQSAPHGVVFLHVTYVPAQEKNFTTAPAICHDGKAHFPREGVFVSNGTHWFVTQRNFYEPQIITTDNTFVSGNCDVVIGIVNNTVYDPLQPELDSFKEELDKYFKNHTSPDVDLGDISGINASVVNIQKEIDRLNEVAKNLNESLIDLQELGKYEQYIK

SEQ ID NO: 2220 - protein, 1211 aa, Artificial Sequence
  SARS-CoV-2/Guangdong/20SF028/2020__EPI_ISL_403936 spike protein (1-1211)(I909C_Y1047C)
MFVFLVLLPLVSSQCVNLTTRTQLPPAYTNSFTRGVYYPDKVFRSSVLYSTQDLFLPFFSNVTWFHAIHVSGTNGTKRFDNPVLPFNDGVYFASTEKSNIIRGWIFGTTLDSKTQSLLIVNNATNVVIKVCEFQFCNDPFLGVYYHKNNKSWMESEFRVYSSANNCTFEYVSQPFLMDLEGKQGNFKNLREFVFKNIDGYFKIYSKHTPINLVRDLPQGFSALEPLVDLPIGINITRFQTLLALHRSYLTPGDSSSGWTAGAAAYYVGYLQPRTFLLKYNENGTITDAVDCALDPLSETKCTLKSFTVEKGIYQTSNFRVQPTESIVRFPNITNLCPFGEVFNATRFASVYAWNRKRISNCVADYSVLYNSASFSTFKCYGVSPTKLNDLCFTNVYADSFVIRGDEVRQIAPGQTGKIADYNYKLPDDFTGCVIAWNSNNLDSKVGGNYNYLYRLFRKSNLKPFERDISTEIYQAGSTPCNGVEGFNCYFPLQSYGFQPTNGVGYQPYRVVVLSFELLHAPATVCGPKKSTNLVKNKCVNFNFNGLTGTGVLTESNKKFLPFQQFGRDIADTTDAVRDPQTLEILDITPCSFGGVSVITPGTNTSNQVAVLYQDVNCTEVPVAIHADQLTPTWRVYSTGSNVFQTRAGCLIGAEHVNNSYECDIPIGAGICASYQTQTNSPRRARSVASQSIIAYTMSLGAENSVAYSNNSIAIPTNFTISVTTEILPVSMTKTSVDCTMYICGDSTECSNLLLQYGSFCTQLNRALTGIAVEQDKNTQEVFAQVKQIYKTPPIKDFGGFNFSQILPDPSKPSKRSFIEDLLFNKVTLADAGFIKQYGDCLGDIAARDLICAQKFNGLTVLPPLLTDEMIAQYTSALLAGTITSGWTFGAGAALQIPFAMQMAYRFNGCGVTQNVLYENQKLIANQFNSAIGKIQDSLSSTASALGKLQDVVNQNAQALNTLVKQLSSNFGAISSVLNDILSRLDKVEAEVQIDRLITGRLQSLQTYVTQQLIRAAEIRASANLAATKMSECVLGQSKRVDFCGKGCHLMSFPQSAPHGVVFLHVTYVPAQEKNFTTAPAICHDGKAHFPREGVFVSNGTHWFVTQRNFYEPQIITTDNTFVSGNCDVVIGIVNNTVYDPLQPELDSFKEELDKYFKNHTSPDVDLGDISGINASVVNIQKEIDRLNEVAKNLNESLIDLQELGKYEQYIK

SEQ ID NO: 2221 - protein, 1211 aa, Artificial Sequence
  SARS-CoV-2/Shenzhen/SZTH-001/2020__EPI_ISL_406592 spike protein (1-1211)(I909C_Y1047C)
MFVFLVLLPLVSSQCVNLTTRTQLPPAYTNSFTRGVYYPDKVFRSSVLHSTQDLFLPFFSNVTWFHAIHVSGTNGTKRFDNPVLPFNDGVYFASTEKSNIIRGWIFGTTLDSKTQSLLIVNNATNVVIKVCEFQFCNDPFLGVYYHKNNKSWMESEFRVYSSANNCTFEYVSQPFLMDLEGKQGNFKNLREFVFKNIDGYFKIYSKHTPINLVRDLPQGFSALEPLVDLPIGINITRFQTLLALHRSYLTPGDSSSGWTAGAAAYYVGYLQPRTFLLKYNENGTITDAVDCALDPLSETKCTLKSFTVEKGIYQTSNFRVQPTESIVRFPNITNLCPFGEVFNATRFASVYAWNRKRISNCVADYSVLYNSASFSTFKCYGVSPTKLNDLCFTNVYADSFVIRGDEVRQIAPGQTGKIADYNYKLPDDFTGCVIAWNSNNLDSKVGGNYNYLYRLFRKSNLKPFERDISTEIYQAGSTPCNGVEGFNCYFPLQSYGFQPTNGVGYQPYRVVVLSFELLHAPATVCGPKKSTNLVKNKCVNFNFNGLTGTGVLTESNKKFLPFQQFGRDIADTTDAVRDPQTLEILDITPCSFGGVSVITPGTNTSNQVAVLYQDVNCTEVPVAIHADQLTPTWRVYSTGSNVFQTRAGCLIGAEHVNNSYECDIPIGAGICASYQTQTNSPRRARSVASQSIIAYTMSLGAENSVAYSNNSIAIPTNFTISVTTEILPVSMTKTSVDCTMYICGDSTECSNLLLQYGSFCTQLNRALTGIAVEQDKNTQEVFAQVKQIYKTPPIKDFGGFNFSQILPDPSKPSKRSFIEDLLFNKVTLADAGFIKQYGDCLGDIAARDLICAQKFNGLTVLPPLLTDEMIAQYTSALLAGTITSGWTFGAGAALQIPFAMQMAYRFNGCGVTQNVLYENQKLIANQFNSAIGKIQDSLSSTASALGKLQDVVNQNAQALNTLVKQLSSNFGAISSVLNDILSRLDKVEAEVQIDRLITGRLQSLQTYVTQQLIRAAEIRASANLAATKMSECVLGQSKRVDFCGKGCHLMSFPQSAPHGVVFLHVTYVPAQEKNFTTAPAICHDGKAHFPREGVFVSNGTHWFVTQRNFYEPQIITTDNTFVSGNCDVLIGIVNNTVYDPLQPELDSFKEELDKYFKNHTSPDVDLGDISGINASVVNIQKEIDRLNEVAKNLNESLIDLQELGKYEQYIK

SEQ ID NO: 2222 - protein, 1211 aa, Artificial Sequence
  SARS-CoV-2/Shenzhen/SZTH-004/2020__EPI_ISL_406595 spike protein (1-1211)(I909C_Y1047C)
MFVFLVLLPLVSSQCVNLTTRTQLPPAYTNSFTRGVYYPDKVFRSSVLHSTQDLFLPFFSNVTWFHAIHVSGTNGTKRFDNPVLPFNDGVYFASTEKSNIIRGWIFGTTLDSKTQSLLIVNNATNVVIKVCEFQFCNDPFLGVYYHKNNKSWMESEFRVYSSANNCTFEYVSQPFLMDLEGKQGNFKNLREFVFKNIDGYFKIYSKHTPINLVRDLPQGFSALEPLVDLPIGINITRFQTLLALHRSYLTPGDSSSGWTAGAAAYYVGYLQPRTFLLKYNENGTITDAVDCALDPLSETKCTLKSFTVEKGIYQTSNFRVQPTESIVRFPNITNLCPFGEVFNATRFASVYAWDRKRISNCVAYYSVLYNSASFSTFKCYGVSPTKLNDLCFTNVYADSFVIRGDEVRQIAPGQTGKIADYNYKLPDDFTGCVIAWNSNNLDSKVGGNYNYLYRLFRKSNLKPFERDISTEIYQAGSTPCNGVEGFNCYFPLQSYGFQPTNGVGYQPYRVVVLSFELLHAPATVCGPKKSTNLVKNKCVNFNFNGLTGTGVLTESNKKFLPFQQFGRDIADTTDAVRDPQTLEILDITPCSFGGVSVITPGTNTSNQVAVLYQDVNCTEVPVAIHADQLTPTWRVYSTGSNVFQTRAGCLIGAEHVNNSYECDIPIGAGICASYQTQTNSPRRARSVASQSIIAYTMSLGAENSVAYSNNSIAIPTNFTISVTTEILPVSMTKTSVDCTMYICGDSTECSNLLLQYGSFCTQLNRALTGIAVEQDKNTQEVFAQVKQIYKTPPIKDFGGFNFSQILPDPSKPSKRSFIEDLLFNKVTLADAGFIKQYGDCLGDIAARDLICAQKFNGLTVLPPLLTDEMIAQYTSALLAGTITSGWTFGAGAALQIPFAMQMAYRFNGCGVTQNVLYENQKLIANQFNSAIGKIQDSLSSTASALGKLQDVVNQNAQALNTLVKQLSSNFGAISSVLNDILSRLDKVEAEVQIDRLITGRLQSLQTYVTQQLIRAAEIRASANLAATKMSECVLGQSKRVDFCGKGCHLMSFPQSAPHGVVFLHVTYVPAQEKNFTTAPAICHDGKAHFPREGVFVSNGTHWFVTQRNFYEPQIITTDNTFVSGNCDVVIGIVNNTVYDPLQPELDSFKEELDKYFKNHTSPDVDLGDISGINASVVNIQKEIDRLNEVAKNLNESLIDLQELGKYEQYIK

SEQ ID NO: 2223 - protein, 1211 aa, Artificial Sequence
  SARS-CoV-2/France/IDF0372/2020__EPI_ISL_406596 spike protein (1-1211)(I909C_Y1047C)
MFVFLVLLPLVSSQCVNLTTRTQLPPAYTNSFTRGVYYPDKVFRSSVLHSTQDLFLPFFSNVTWFHAIHVSGTNGTKRFDNPVLPFNDGVYFASTEKSNIIRGWIFGTTLDSKTQSLLIVNNATNVVIKVCEFQFCNDPFLGVYYHKNNKSWMESEFRVYSSANNCTFEYVSQPFLMDLEGKQGNFKNLREFVFKNIDGYFKIYSKHTPINLVRDLPQGFSALEPLVDLPIGINITRFQTLLALHRSYLTPGDSSSGWTAGAAAYYVGYLQPRTFLLKYNENGTITDAVDCALDPLSETKCTLKSFTVEKGIYQTSNFRVQPTESIVRFPNITNLCPFGEVFNATRFASVYAWNRKRISNCVADYSFLYNSASFSTFKCYGVSPTKLNDLCFTNVYADSFVIRGDEVRQIAPGQTGKIADYNYKLPDDFTGCVIAWNSNNLDSKVGGNYNYLYRLFRKSNLKPFERDISTEIYQAGSTPCNGVEGFNCYFPLQSYGFQPTNGVGYQPYRVVVLSFELLHAPATVCGPKKSTNLVKNKCVNFNFNGLTGTGVLTESNKKFLPFQQFGRDIADTTDAVRDPQTLEILDITPCSFGGVSVITPGTNTSNQVAVLYQDVNCTEVPVAIHADQLTPTWRVYSTGSNVFQTRAGCLIGAEHVNNSYECDIPIGAGICASYQTQTNSPRRARSVASQSIIAYTMSLGAENSVAYSNNSIAIPTNFTISVTTEILPVSMTKTSVDCTMYICGDSTECSNLLLQYGSFCTQLNRALTGIAVEQDKNTQEVFAQVKQIYKTPPIKDFGGFNFSQILPDPSKPSKRSFIEDLLFNKVTLADAGFIKQYGDCLGDIAARDLICAQKFNGLTVLPPLLTDEMIAQYTSALLAGTITSGWTFGAGAALQIPFAMQMAYRFNGCGVTQNVLYENQKLIANQFNSAIGKIQDSLSSTASALGKLQDVVNQNAQALNTLVKQLSSNFGAISSVLNDILSRLDKVEAEVQIDRLITGRLQSLQTYVTQQLIRAAEIRASANLAATKMSECVLGQSKRVDFCGKGCHLMSFPQSAPHGVVFLHVTYVPAQEKNFTTAPAICHDGKAHFPREGVFVSNGTHWFVTQRNFYEPQIITTDNTFVSGNCDVVIGIVNNTVYDPLQPELDSFKEELDKYFKNHTSPDVDLGDISGINASVVNIQKEIDRLNEVAKNLNESLIDLQELGKYEQYIK

SEQ ID NO: 2224 - protein, 1211 aa, Artificial Sequence
  SARS-CoV-2/Australia/VIC01/2020__EPI_ISL_406844 spike protein (1-1211)(I909C_Y1047C)
MFVFLVLLPLVSSQCVNLTTRTQLPPAYTNSFTRGVYYPDKVFRSSVLHSTQDLFLPFFSNVTWFHAIHVSGTNGTKRFDNPVLPFNDGVYFASTEKSNIIRGWIFGTTLDSKTQSLLIVNNATNVVIKVCEFQFCNDPFLGVYYHKNNKSWMESEFRVYSSANNCTFEYVSQPFLMDLEGKQGNFKNLREFVFKNIDGYFKIYSKHTPINLVRDLPQGFSALEPLVDLPIGINITRFQTLLALHRRYLTPGDSSSGWTAGAAAYYVGYLQPRTFLLKYNENGTITDAVDCALDPLSETKCTLKSFTVEKGIYQTSNFRVQPTESIVRFPNITNLCPFGEVFNATRFASVYAWNRKRISNCVADYSVLYNSASFSTFKCYGVSPTKLNDLCFTNVYADSFVIRGDEVRQIAPGQTGKIADYNYKLPDDFTGCVIAWNSNNLDSKVGGNYNYLYRLFRKSNLKPFERDISTEIYQAGSTPCNGVEGFNCYFPLQSYGFQPTNGVGYQPYRVVVLSFELLHAPATVCGPKKSTNLVKNKCVNFNFNGLTGTGVLTESNKKFLPFQQFGRDIADTTDAVRDPQTLEILDITPCSFGGVSVITPGTNTSNQVAVLYQDVNCTEVPVAIHADQLTPTWRVYSTGSNVFQTRAGCLIGAEHVNNSYECDIPIGAGICASYQTQTNSPRRARSVASQSIIAYTMSLGAENSVAYSNNSIAIPTNFTISVTTEILPVSMTKTSVDCTMYICGDSTECSNLLLQYGSFCTQLNRALTGIAVEQDKNTQEVFAQVKQIYKTPPIKDFGGFNFSQILPDPSKPSKRSFIEDLLFNKVTLADAGFIKQYGDCLGDIAARDLICAQKFNGLTVLPPLLTDEMIAQYTSALLAGTITSGWTFGAGAALQIPFAMQMAYRFNGCGVTQNVLYENQKLIANQFNSAIGKIQDSLSSTASALGKLQDVVNQNAQALNTLVKQLSSNFGAISSVLNDILSRLDKVEAEVQIDRLITGRLQSLQTYVTQQLIRAAEIRASANLAATKMSECVLGQSKRVDFCGKGCHLMSFPQSAPHGVVFLHVTYVPAQEKNFTTAPAICHDGKAHFPREGVFVSNGTHWFVTQRNFYEPQIITTDNTFVSGNCDVVIGIVNNTVYDPLQPELDSFKEELDKYFKNHTSPDVDLGDISGINASVVNIQKEIDRLNEVAKNLNESLIDLQELGKYEQYIK

SEQ ID NO: 2225 - protein, 1211 aa, Artificial Sequence
  SARS-CoV-2/Germany/BavPat1/2020__EPI_ISL_406862 spike protein (1-1211)(I909C_Y1047C)
MFVFLVLLPLVSSQCVNLTTRTQLPPAYTNSFTRGVYYPDKVFRSSVLHSTQDLFLPFFSNVTWFHAIHVSGTNGTKRFDNPVLPFNDGVYFASTEKSNIIRGWIFGTTLDSKTQSLLIVNNATNVVIKVCEFQFCNDPFLGVYYHKNNKSWMESEFRVYSSANNCTFEYVSQPFLMDLEGKQGNFKNLREFVFKNIDGYFKIYSKHTPINLVRDLPQGFSALEPLVDLPIGINITRFQTLLALHRSYLTPGDSSSGWTAGAAAYYVGYLQPRTFLLKYNENGTITDAVDCALDPLSETKCTLKSFTVEKGIYQTSNFRVQPTESIVRFPNITNLCPFGEVFNATRFASVYAWNRKRISNCVADYSVLYNSASFSTFKCYGVSPTKLNDLCFTNVYADSFVIRGDEVRQIAPGQTGKIADYNYKLPDDFTGCVIAWNSNNLDSKVGGNYNYLYRLFRKSNLKPFERDISTEIYQAGSTPCNGVEGFNCYFPLQSYGFQPTNGVGYQPYRVVVLSFELLHAPATVCGPKKSTNLVKNKCVNFNFNGLTGTGVLTESNKKFLPFQQFGRDIADTTDAVRDPQTLEILDITPCSFGGVSVITPGTNTSNQVAVLYQGVNCTEVPVAIHADQLTPTWRVYSTGSNVFQTRAGCLIGAEHVNNSYECDIPIGAGICASYQTQTNSPRRARSVASQSIIAYTMSLGAENSVAYSNNSIAIPTNFTISVTTEILPVSMTKTSVDCTMYICGDSTECSNLLLQYGSFCTQLNRALTGIAVEQDKNTQEVFAQVKQIYKTPPIKDFGGFNFSQILPDPSKPSKRSFIEDLLFNKVTLADAGFIKQYGDCLGDIAARDLICAQKFNGLTVLPPLLTDEMIAQYTSALLAGTITSGWTFGAGAALQIPFAMQMAYRFNGCGVTQNVLYENQKLIANQFNSAIGKIQDSLSSTASALGKLQDVVNQNAQALNTLVKQLSSNFGAISSVLNDILSRLDKVEAEVQIDRLITGRLQSLQTYVTQQLIRAAEIRASANLAATKMSECVLGQSKRVDFCGKGCHLMSFPQSAPHGVVFLHVTYVPAQEKNFTTAPAICHDGKAHFPREGVFVSNGTHWFVTQRNFYEPQIITTDNTFVSGNCDVVIGIVNNTVYDPLQPELDSFKEELDKYFKNHTSPDVDLGDISGINASVVNIQKEIDRLNEVAKNLNESLIDLQELGKYEQYIK

SEQ ID NO: 2226 - protein, 1211 aa, Artificial Sequence
  SARS-CoV-2/Wuhan/HBCDC-HB-02/2020__EPI_ISL_412978 spike protein (1-1211)(I909C_Y1047C)
MFVFLVLLPLVSSQCVNLTTRTQLPPAYTNSFTRGVYYPDKVFRSSVLHSTQDLFLPFFSNVTWFHAIHVSGTNGTKRFDNPVLPFNDGVYFASTEKSNIIRGWIFGTTLDSKTQSLLIVNNATNVVIKVCEFQFCNDPFLGVYYHKNNKSWMESEFRVYSSANNCTFEYVSQPFLMDLEGKQGNFKNLREFVFKNIDGYFKIYSKHTPINLVRDLPQGFSALEPLVDLPIGINITRFQTLLALHRSYLTPGDSSSGWTAGAAAYYVGYLQPRTFLLKYNENGTITDAVDCALDPLSETKCTLKSFTVEKGIYQTSNFRVQPTESIVRFPNITNLCPFGEVFNATRFASVYAWNRKRISNCVADYSVLYNSASFSTFKCYGVSPTKLNDLCFTNVYADSFVIRGDEVRQIAPGQTGKIADYNYKLPDDFTGCVIAWNSNNLDSKVGGNYNYLYRLFRKSNLKPFERDISTEIYQAGSTPCNGVEGFNCYFPLQSYGFQPTNGVGYQPYRVVVLSFELLHAPATVCGPKKSTNLVKNKCVNFNFNGLTGTGVLTESNKKFLPFQQFGRDIADTTDAVRDPQTLEILDITPCSFGGVSVITPGTNTSNQVAVLYQDVNCTEVPVAIHADQLTPTWRVYSTGSNVFQTRAGCLIGAEHVNNSYECDIPIGAGICASYQTQTNSPRRARSVASQSIIAYTMSLGAENSVAYSNNSIAIPTNFTISVTTEILPVSMTKTSVDCTMYICGDSTECSNFLLQYGSFCTQLNRALTGIAVEQDKNTQEVFAQVKQIYKTPPIKDFGGFNFSQILPDPSKPSKRSFIEDLLFNKVTLADAGFIKQYGDCLGDIAARDLICAQKFNGLTVLPPLLTDEMIAQYTSALLAGTITSGWTFGAGAALQIPFAMQMAYRFNGCGVTQNVLYENQKLIANQFNSAIGKIQDSLSSTASALGKLQDVVNQNAQALNTLVKQLSSNFGAISSVLNDILSRLDKVEAEVQIDRLITGRLQSLQTYVTQQLIRAAEIRASANLAATKMSECVLGQSKRVDFCGKGCHLMSFPQSAPHGVVFLHVTYVPAQEKNFTTAPAICHDGKAHFPREGVFVSNGTHWFVTQRNFYEPQIITTDNTFVSGNCDVVIGIVNNTVYDPLQPELDSFKEELDKYFKNHTSPDVDLGDISGINASVVNIQKEIDRLNEVAKNLNESLIDLQELGKYEQYIK

SEQ ID NO: 2227 - protein, 1211 aa, Artificial Sequence
  SARS-CoV-2/Australia/QLD02/2020__EPI_ISL_407896 spike protein (1-1211)(I909C_Y1047C)
MFVFLVLLPLVSSQCVNLTTRTQLPPAYTNSFTRGVYYPDKVFRSSVLHSTQDLFLPFFSNVTWFHAIHVSGTNGTKRFDNPVLPFNDGVYFASTEKSNIIRGWIFGTTLDSKTQSLLIVNNATNVVIKVCEFQFCNDPFLGVYYHKNNKSWMESEFRVYSSANNCTFEYVSQPFLMDLEGKQGNFKNLREFVFKNIDGYFKIYSKHTPINLVRDLPQGFSALEPLVDLPIGINITRFQTLLALHRSYLTPGDSSSGWTAGAAAYYVGYLQPRTFLLKYNENGTITDAVDCALDPLSETKCTLKSFTVEKGIYQTSNFRVQPTESIVRFPNITNLCPFGEVFNATRFASVYAWNRKRISNCVADYSVLYNSASFSTFKCYGVSPTKLNDLCFTNVYADSFVIRGDEVRQIAPGQTGKIADYNYKLPDDFTGCVIAWNSNNLDSKVGGNYNYLYRLFRKSNLKPFERDISTEIYQAGSTPCNGVEGFNCYFPLQSYGFQPTNGVGYQPYRVVVLSFELLHAPATVCGPKKSTNLVKNKCVNFNFNGLTGTGVLTESNKKFLPFQQFGRDIADTTDAVRDPQTLEILDITPCSFGGVSVITPGTNTSNQVAVLYQDVNCTEVPVAIHADQLTPTWRVYSTGSNVFQTRAGCLIGAEHVNNSYECDIPIGAGICASYQTQTNSPRRARSVASQSIIAYTMSLGAENSVAYSNNSIAIPTNFTISVTTEILPVSMTKTSVDCTMYICGDSTECSNLLLQYGSFCTQLNRALTGIAVEQDKNTQEVFAQVKQIYKTPPIKDFGGFNFSQILPDPSKPSKRSFIEDLLFNKVTLADAGFIKQYGDCLGDIAARDLICAQKFNGLTVLPPLLTDEMIAQYTSALLAGTITSGWTFGAGAALQIPFAMQMAYRFNGCGVTQNVLYENQKLIANQFNSAIGKIQDSLSSTASALGKLQDVVNQNAQALNTLVKQLSSNFGAISSVLNDILSRLDKVEAEVQIDRLITGRLQSLQTYVTQQLIRAAEIRASANLAATKMSECVLGQSKRVDFCGKGCHLMSFPQSAPHGVVFLHVTYVPAQEKNFTTAPAICHDGKAHFPREGVFVSNGTHWFVTQRNFYEPQIITTDNTFVSGNCDVVIGIVNNTVYDPLQLELDSFKEELDKYFKNHTSPDVDLGDISGINASVVNIQKEIDRLNEVAKNLNESLIDLQELGKYEQYIK

SEQ ID NO: 2228 - protein, 1211 aa, Artificial Sequence
  SARS-CoV-2/India/1-31/2020__EPI_ISL_413523 spike protein (1-1211)(I909C_Y1047C)
MFVFLVLLPLVSSQCVNLTTRTQLPPAYTNSFTRGVYYPDKVFRSSVLHSTQDLFLPFFSNVTWFHAIHVSGTNGTKRFDNPVLPFNDGVYFASTEKSNIIRGWIFGTTLDSKTQSLLIVNNATNVVIKVCEFQFCNDPFLGVYYHKNNKSWMESEFRVYSSANNCTFEYVSQPFLMDLEGKQGNFKNLREFVFKNIDGYFKIYSKHTPINLVRDLPQGFSALEPLVDLPIGINITRFQTLLALHRSYLTPGDSSSGWTAGAAAYYVGYLQPRTFLLKYNENGTITDAVDCALDPLSETKCTLKSFTVEKGIYQTSNFRVQPTESIVRFPNITNLCPFGEVFNATRFASVYAWNRKRISNCVADYSVLYNSASFSTFKCYGVSPTKLNDLCFTNVYADSFVIRGDEVRQIAPGQTGKIADYNYKLPDDFTGCVIAWNSNNLDSKVGGNYNYLYRLFRKSNLKPFERDISTEIYQAGSTPCNGVEGFNCYFPLQSYGFQPTNGVGYQPYRVVVLSFELLHAPATVCGPKKSTNLVKNKCVNFNFNGLTGTGVLTESNKKFLPFQQFGRDIADTTDAVRDPQTLEILDITPCSFGGVSVITPGTNTSNQVAVLYQDVNCTEVPVAIHADQLTPTWRVYSTGSNVFQTRAGCLIGAEHVNNSYECDIPIGAGICASYQTQTNSPRRARSVASQSIIAYTMSLGAENSVAYSNNSIAIPTNFTISVTTEILPVSMTKTSVDCTMYICGDSTECSNLLLQYGSFCTQLNRALTGIAVEQDKNTQEVFAQVKQIYKTPPIKDFGGFNFSQILPDPSKPSKRSFIEDLLFNKVTLADAGFIKQYGDCLGDIAARDLICAQKFNGLTVLPPLLTDEMIAQYTSALLAGTITSGWTFGAGAALQIPFAMQMAYRFNGCGVTQNVLYENQKLIANQFNSVIGKIQDSLSSTASALGKLQDVVNQNAQALNTLVKQLSSNFGAISSVLNDILSRLDKVEAEVQIDRLITGRLQSLQTYVTQQLIRAAEIRASANLAATKMSECVLGQSKRVDFCGKGCHLMSFPQSAPHGVVFLHVTYVPAQEKNFTTAPAICHDGKAHFPREGVFVSNGTHWFVTQRNFYEPQIITTDNTFVSGNCDVVIGIVNNTVYDPLQPELDSFKEELDKYFKNHTSPDVDLGDISGINASVVNIQKEIDRLNEVAKNLNESLIDLQELGKYEQYIK

SEQ ID NO: 2229 - protein, 1211 aa, Artificial Sequence
  SARS-CoV-2/Guangdong/GD2020087-P0008/2020__EPI_ISL_413863 spike protein (1-1211)(I909C_Y1047C)
MFVFLVLLPLVSSQCVNLTTRTQLPPAYTNSFTRGVYYPDKVFRSSVLHSTQDLFLPFFSNVTWFHAIHVSGTNGTKRFDNPVLPFNDGVYFASTEKSNIIRGWIFGTTLDSKTQSLLIVNNATNVVIKVCEFQFCNDPFLGVYYHKNNKSWMESEFRVYSSANNCTFEYVSQPFLMDLEGKQGNFKNLREFVFKNIDGYFKIYSKHTPINLVRDLPQGFSALEPLVDLPIGINITRFQTLLALHRSYLTPGDSSSGWTAGAAAYYVGYLQPRTFLLKYNENGTITDAVDCALDPLSETKCTLKSFTVEKGIYQTSNFRVQPTESIVRFPNITNLCPFGEVFNATRFASVYAWNRKRISNCVADYSVLYNSASFSTFKCYGVSPTKLNDLCFTNVYADSFVIRGDEVREIAPGQTGKIADYNYKLPDDFTGCVIAWNSNNLDSKVGGNYNYLYRLFRKSNLKPFERDISTEIYQAGSTPCNGVEGFNCYFPLQSYGFQPTNGVGYQPYRVVVLSFELLHAPATVCGPKKSTNLVKNKCVNFNFNGLTGTGVLTESNKKFLPFQQFGRDIADTTDAVRDPQTLEILDITPCSFGGVSVITPGTNTSNQVAVLYQDVNCTEVPVAIHADQLTPTWRVYSTGSNVFQTRAGCLIGAEHVNNSYECDIPIGAGICASYQTQTNSPRRARSVASQSIIAYTMSLGAENSVAYSNNSIAIPTNFTISVTTEILPVSMTKTSVDCTMYICGDSTECSNLLLQYGSFCTQLNRALTGIAVEQDKNTQEVFAQVKQIYKTPPIKDFGGFNFSQILPDPSKPSKRSFIEDLLFNKVTLADAGFIKQYGDCLGDIAARDLICAQKFNGLTVLPPLLTDEMIAQYTSALLAGTITSGWTFGAGAALQIPFAMQMAYRFNGCGVTQNVLYENQKLIANQFNSAIGKIQDSLSSTASALGKLQDVVNQNAQALNTLVKQLSSNFGAISSVLNDILSRLDKVEAEVQIDRLITGRLQSLQTYVTQQLIRAAEIRASANLAATKMSECVLGQSKRVDFCGKGCHLMSFPQSAPHGVVFLHVTYVPAQEKNFTTAPAICHDGKAHFPREGVFVSNGTHWFVTQRNFYEPQIITTDNTFVSGNCDVVIGIVNNTVYDPLQPELDSFKEELDKYFKNHTSPDVDLGDISGINASVVNIQKEIDRLNEVAKNLNESLIDLQELGKYEQYIK

SEQ ID NO: 2230 - protein, 1211 aa, Artificial Sequence
  SARS-CoV-2/Sweden/01/2020__EPI_ISL_411951 spike protein (1-1211)(I909C_Y1047C)
MFVFLVLLPLVSSQCVNLTTRTQLPPAYTNSFTRGVYYPDKVFRSSVLHSTQDLFLPFFSNVTWFHAIHVSGTNGTKRFDNPVLPFNDGVYFASTEKSNIIRGWIFGTTLDSKTQSLLIVNNATNVVIKVCEFQFCNDPFLGVYYHKNNKSWMESEFRVYSSANNCTFEYVSQPFLMDLEGKQGNFKNLREFVFKNIDGYFKIYSKHTPINLVRDLPQGFSALEPLVDLPIGINITRFQTLLALHRSYLTPGDSSSGWTAGAAAYYVGYLQPRTFLLKYNENGTITDAVDCALDPLSETKCTLKSFTVEKGIYQTSNFRVQPTESIVRFPNITNLCPFGEVFNATRFASVYAWNRKRISNCVADYSVLYNSASFSTFKCYGVSPTKLNDLCFTNVYADSFVIRGDEVRQIAPGQTGKIADYNYKLPDDFTGCVIAWNSNNLDSKVGGNYNYLYRLFRKSNLKPFERDISTEIYQAGSTPCNGVEGFNCYFPLQSYGFQPTNGVGYQPYRVVVLSFELLHAPATVCGPKKSTNLVKNKCVNFNFNGLTGTGVLTESNKKFLPFQQFGRDIADTTDAVRDPQTLEILDITPCSFGGVSVITPGTNTSNQVAVLYQDVNCTEVPVAIHADQLTPTWRVYSTGSNVFQTRAGCLIGAEHVNNSYECDIPIGAGICASYQTQTNSPRRARSVASQSIIAYTMSLGAENSVAYSNNSIAIPTNFTISVTTEILPVSMTKTSVDCTMYICGDSTECSNLLLQYGSFCTQLNRALTGIAVEQDKNTQEVFAQVKQIYKTPPIKDCGGFNFSQILPDPSKPSKRSFIEDLLFNKVTLADAGFIKQYGDCLGDIAARDLICAQKFNGLTVLPPLLTDEMIAQYTSALLAGTITSGWTFGAGAALQIPFAMQMAYRFNGCGVTQNVLYENQKLIANQFNSAIGKIQDSLSSTASALGKLQDVVNQNAQALNTLVKQLSSNFGAISSVLNDILSRLDKVEAEVQIDRLITGRLQSLQTYVTQQLIRAAEIRASANLAATKMSECVLGQSKRVDFCGKGCHLMSFPQSAPHGVVFLHVTYVPAQEKNFTTAPAICHDGKAHFPREGVFVSNGTHWFVTQRNFYEPQIITTDNTFVSGNCDVVIGIVNNTVYDPLQPELDSFKEELDKYFKNHTSPDVDLGDISGINASVVNIQKEIDRLNEVAKNLNESLIDLQELGKYEQYIK

SEQ ID NO: 2231 - protein, 1211 aa, Artificial Sequence
  SARS-CoV-2/Tianmen/HBCDC-HB-07/2020__EPI_ISL_412983 spike protein (1-1211)(I909C_Y1047C)
MFVFLVLLPLVSSQCVNLTTRTQLPPAYTNSFTRGVYYPDKVFRSSVLHSTQDLFLPFFSNVTWFHAIHVSGTNGTKRFDNPVLPFNDGVYFASTEKSNIIRGWIFGTTLDSKTQSLLIVNNATNVVIKVCEFQFCNDPFLGVYYHKNNKSWMESEFRVYSSANNCTFEYVSQPFLMDLEGKQGNFKNLREFVFKNIDGYFKIYSKHTPINLVRDLPQGFSALEPLVDLPIGINITRFQTLLALHRSYLTPGDSSSGWTAGAAAYYVGYLQPRTFLLKYNENGTITDAVDCALDPLSETKCTLKSFTVEKGIYQTSNFRVQPTESIVRFPNITNLCPFGEVFNATRFASVYAWNRKRISNCVADYSVLYNSASFSTFKCYGVSPTKLNDLCFTNVYADSFVIRGDEVRQIAPGQTGKIADYNYKLPDDFTGCVIAWNSNNLDSKVGGNYNYLYRLFRKSNLKPFERDISTEIYQAGSTPCNGVEGFNCYFPLQSYGFQPTNGVGYQPYRVVVLSFELLHAPATVCGPKKSTNLVKNKCVNFNFNGLTGTGVLTESNKKFLPFQQFGRDIADTTDAVRDPQTLEILDITPCSFGGVSVITPGTNTSNQVAVLYQDLNCTEVPVAIHADQLTPTWRVYSTGSNVFQTRAGCLIGAEHVNNSYECDIPIGAGICASYQTQTNSPRRARSVASQSIIAYTMSLGAENSVAYSNNSIAIPTNFTISVTTEILPVSMTKTSVDCTMYICGDSTECSNLLLQYGSFCTQLNRALTGIAVEQDKNTQEVFAQVKQIYKTPPIKDFGGFNFSQILPDPSKPSKRSFIEDLLFNKVTLADAGFIKQYGDCLGDIAARDLICAQKFNGLTVLPPLLTDEMIAQYTSALLAGTITSGWTFGAGAALQIPFAMQMAYRFNGCGVTQNVLYENQKLIANQFNSAIGKIQDSLSSTASALGKLQDVVNQNAQALNTLVKQLSSNFGAISSVLNDILSRLDKVEAEVQIDRLITGRLQSLQTYVTQQLIRAAEIRASANLAATKMSECVLGQSKRVDFCGKGCHLMSFPQSAPHGVVFLHVTYVPAQEKNFTTAPAICHDGKAHFPREGVFVSNGTHWFVTQRNFYEPQIITTDNTFVSGNCDVVIGIVNNTVYDPLQPELDSFKEELDKYFKNHTSPDVDLGDISGINASVVNIQKEIDRLNEVAKNLNESLIDLQELGKYEQYIK

SEQ ID NO: 2232 - protein, 1211 aa, Artificial Sequence
  SARS-CoV-2/Hong Kong/case42_VM20002493/2020__EPI_ISL_414527 spike protein (1-1211)(I909C_Y1047C)
MFVFLVLLPLVSSQCVNLTTRTQLPPAYTNSFTRGVYYPDKVFRSSVLHSTQDLFLPFFSNVTWFHAIHVSGTNGTKRFDNPVLPFNDGVYFASTEKSNIIRGWIFGTTLDSKTQSLLIVNNATNVVIKVCEFQFCNDPFLGVYYHKNNKSWMESEFRVYSSANNCTFEYVSQPFLMDLEGKQGNFKNLREFVFKNIDGYFKIYSKHTPINLVRDLPQGFSALEPLVDLPIGINITRFQTLLALHRSYLTPGDSSSGWTAGAAAYYVGYLQPRTFLLKYNENGTITDAVDCALDPLSETKCTLKSFTVEKGIYQTSNFRVQPTESIVRFPNITNLCPFGEVFNATRFASVYAWNRKRISNCVADYSVLYNSASFSTFKCYGVSPTKLNDLCFTNVYADSFVIRGDEVRQIAPGQTGKIADYNYKLPDDFTGCVIAWNSNNLDSKVGGNYNYLYRLFRKSNLKPFERDISTEIYQAGSTPCNGVEGFNCYFPLQSYGFQPTNGVGYQPYRVVVLSFELLHAPATVCGPKKSTNLVKNKCVNFNFNGLTGTGVLTESNKKFLPFQQFGRDIADTTDAVRDPQTLEILDITPCSFGGVSVITPGTNTSNQVAVLYQDVNCTEVPVAIHADQLTPTWRVYSTGSNVFQTRAGCLIGAEHVNNSYECDIPIGAGICASYQTQTNSPRRARSVASQSIIAYTMSLGAENSVAYSNNSIAIPTNFAISVTTEILPVSMTKTSVDCTMYICGDSTECSNLLLQYGSFCTQLNRALTGIAVEQDKNTQEVFAQVKQIYKTPPIKDFGGFNFSQILPDPSKPSKRSFIEDLLFNKVTLADAGFIKQYGDCLGDIAARDLICAQKFNGLTVLPPLLTDEMIAQYTSALLAGTITSGWTFGAGAALQIPFAMQMAYRFNGCGVTQNVLYENQKLIANQFNSAIGKIQDSLSSTASALGKLQDVVNQNAQALNTLVKQLSSNFGAISSVLNDILSRLDKVEAEVQIDRLITGRLQSLQTYVTQQLIRAAEIRASANLAATKMSECVLGQSKRVDFCGKGCHLMSFPQSAPHGVVFLHVTYVPAQEKNFTTAPAICHDGKAHFPREGVFVSNGTHWFVTQRNFYEPQIITTDNTFVSGNCDVVIGIVNNTVYDPLQPELDSFKEELDKYFKNHTSPDVDLGDISGINASVVNIQKEIDRLNEVAKNLNESLIDLQELGKYEQYIK

SEQ ID NO: 2233 - protein, 1211 aa, Artificial Sequence
  SARS-CoV-2/USA/CruiseA-23/2020__EPI_ISL_414482 spike protein (1-1211)(I909C_Y1047C)
MFVFLVLLPLVSSQCVNLTTRTQLPPAYTNSFTRGVYYPDKVFRSSVLHSTQDLFLPFFSNVTWFHAIHVSGTNGTKRFDNPVLPFNDGVYFASTEKSNIIRGWIFGTTLDSKTQSLLIVNNATNVVIKVCEFQFCNDPFLGVYYHKNNKSWMESEFRVYSSANNCTFEYVSQPFLMDLEVKQGNFKNLREFVFKNIDGYFKIYSKHTPINLVRDLPQGFSALEPLVDLPIGINITRFQTLLALHRSYLTPGDSSSGWTAGAAAYYVGYLQPRTFLLKYNENGTITDAVDCALDPLSETKCTLKSFTVEKGIYQTSNFRVQPTESIVRFPNITNLCPFGEVFNATRFASVYAWNRKRISNCVADYSVLYNSASFSTFKCYGVSPTKLNDLCFTNVYADSFVIRGDEVRQIAPGQTGKIADYNYKLPDDFTGCVIAWNSNNLDSKVGGNYNYLYRLFRKSNLKPFERDISTEIYQAGSTPCNGVEGFNCYFPLQSYGFQPTNGVGYQPYRVVVLSFELLHAPATVCGPKKSTNLVKNKCVNFNFNGLTGTGVLTESNKKFLPFQQFGRDIADTTDAVRDPQTLEILDITPCSFGGVSVITPGTNTSNQVAVLYQDVNCTEVPVAIHADQLTPTWRVYSTGSNVFQTRAGCLIGAEHVNNSYECDIPIGAGICASYQTQTNSPRRARSVASQSIIAYTMSLGAENSVAYSNNSIAIPTNFTISVTTEILPVSMTKTSVDCTMYICGDSTECSNLLLQYGSFCTQLNRALTGIAVEQDKNTQEVFAQVKQIYKTPPIKDFGGFNFSQILPDPSKPSKRSFIEDLLFNKVTLADAGFIKQYGDCLGDIAARDLICAQKFNGLTVLPPLLTDEMIAQYTSALLAGTITSGWTFGAGAALQIPFAMQMAYRFNGCGVTQNVLYENQKLIANQFNSAIGKIQDSLSSTASALGKLQDVVNQNAQALNTLVKQLSSNFGAISSVLNDILSRLDKVEAEVQIDRLITGRLQSLQTYVTQQLIRAAEIRASANLAATKMSECVLGQSKRVDFCGKGCHLMSFPQSAPHGVVFLHVTYVPAQEKNFTTAPAICHDGKAHFPREGVFVSNGTHWFVTQRNFYEPQIITTDNTFVSGNCDVVIGIVNNTVYDPLQPELDSFKEELDKYFKNHTSPDVDLGDISGINASVVNIQKEIDRLNEVAKNLNESLIDLQELGKYEQYIK

SEQ ID NO: 2234 - protein, 1211 aa, Artificial Sequence
  SARS-CoV-2/Hong Kong/case85_VM20002868/2020__EPI_ISL_414519 spike protein (1-1211)(I909C_Y1047C)
MFVFLVLVPLVSSQCVNLTTRTQLPPAYTNSFTRGVYYPDKVFRSSVLHSTQDLFLPFFSNVTWFHAIHVSGTNGTKRFDNPVLPFNDGVYFASTEKSNIIRGWIFGTTLDSKTQSLLIVNNATNVVIKVCEFQFCNDPFLGVYYHKNNKSWMESEFRVYSSANNCTFEYVSQPFLMDLEGKQGNFKNLREFVFKNIDGYFKIYSKHTPINLVRDLPQGFSALEPLVDLPIGINITRFQTLLALHRSYLTPGDSSSGWTAGAAAYYVGYLQPRTFLLKYNENGTITDAVDCALDPLSETKCTLKSFTVEKGIYQTSNFRVQPTESIVRFPNITNLCPFGEVFNATRFASVYAWNRKRISNCVADYSVLYNSASFSTFKCYGVSPTKLNDLCFTNVYADSFVIRGDEVRQIAPGQTGKIADYNYKLPDDFTGCVIAWNSNNLDSKVGGNYNYLYRLFRKSNLKPFERDISTEIYQAGSTPCNGVEGFNCYFPLQSYGFQPTNGVGYQPYRVVVLSFELLHAPATVCGPKKSTNLVKNKCVNFNFNGLTGTGVLTESNKKFLPFQQFGRDIADTTDAVRDPQTLEILDITPCSFGGVSVITPGTNTSNQVAVLYQDVNCTEVPVAIHADQLTPTWRVYSTGSNVFQTRAGCLIGAEHVNNSYECDIPIGAGICASYQTQTNSPRRARSVASQSIIAYTMSLGAENSVAYSNNSIAIPTNFTISVTTEILPVSMTKTSVDCTMYICGDSTECSNLLLQYGSFCTQLNRALTGIAVEQDKNTQEVFAQVKQIYKTPPIKDFGGFNFSQILPDPSKPSKRSFIEDLLFNKVTLADAGFIKQYGDCLGDIAARDLICAQKFNGLTVLPPLLTDEMIAQYTSALLAGTITSGWTFGAGAALQIPFAMQMAYRFNGCGVTQNVLYENQKLIANQFNSAIGKIQDSLSSTASALGKLQDVVNQNAQALNTLVKQLSSNFGAISSVLNDILSRLDKVEAEVQIDRLITGRLQSLQTYVTQQLIRAAEIRASANLAATKMSECVLGQSKRVDFCGKGCHLMSFPQSAPHGVVFLHVTYVPAQEKNFTTAPAICHDGKAHFPREGVFVSNGTHWFVTQRNFYEPQIITTDNTFVSGNCDVVIGIVNNTVYDPLQPELDSFKEELDKYFKNHTSPDVDLGDISGINASVVNIQKEIDRLNEVAKNLNESLIDLQELGKYEQYIK

SEQ ID NO: 2235 - protein, 1211 aa, Artificial Sequence; identical to SEQ ID NO: 2225
  SARS-CoV-2/England/200990660/2020__EPI_ISL_414523 spike protein (1-1211)(I909C_Y1047C)

SEQ ID NO: 2236 - protein, 1211 aa, Artificial Sequence
  SARS-CoV-2/Australia/NSW09/2020__EPI_ISL_413595 spike protein (1-1211)(I909C_Y1047C)
MFVFLVLLPLVSSQCVNLTTRTQLPPAYTNSFTRGVYYPDKVFRSSVLHSTQDLFLPFFSNVTWFHAIHVSGTNGTKRFDNPVLPFNDGVYFASTEKSNIIRGWIFGTTLDSKTQSLLIVNNATNVVIKVCEFQFCNDPFLGVYYHKNNKSWMESEFRVYSSANNCTFEYVSQPFLMDLEGKQGNFKNLREFVFKNIDGYFKIYSKHTPINLVRDLPQGFSALEPLVDLPIGINITRFQTLLALHRSYLTPGDSSSGWTAGAAAYYVGYLQPRTFLLKYNENGTITDAVDCALDPLSETKCTLKSFTVEKGIYQTSNFRVQPTESIVRFPNITNLCPFGEVFNATRFASVYAWNRKRISNCVADYSVLYNSASFSTFKCYGVSPTKLNDLCFTNVYADSFVIRGDEVRQIAPGQTGKIADYNYKLPDDFTGCVIAWNSNNLDSKVGGNYNYLYRLFRKSNLKPFERDISTEIYQAGSTPCNGVEGFNCYFPLQSYGFQPTNGVGYQPYRVVVLSFELLHAPATVCGPKKSTNLVKNKCVNFNFNGLTGTGVLTESNKKFLPFQQFGRDIADTTDAVRDPQTLEILDITPCSFGGVSVITPGTNTSNQVAVLYQDVNCTEVPVAIHADQLTPTWRVYSTGSNVFQTRAGCLIGAEHVNNSYECDIPIGAGICASYQTQTNSPRRARSVASQSIIAYTMSLGAENSVAYSNNSIAIPTNFTISVTTEILPVSMTKTSVDCTMYICGDSTECSNLLLQYGSFCTQLNRALTGIAVEQDKNTQEVFAQVKQIYKTPPIKDFGGFNFSQILPDPSKPSKRSFIEDLLFNKVTLADAGFIKQYGDCLGDIAARDLICAQKFNGLTVLPPLLTDEMIAQYTSALLAGTITSGWTFGAGAALQIPFAMQMAYRFNGCGVTQNVLYENQKLIANQFNSAIGKIQDSLSFTASALGKLQDVVNQNAQALNTLVKQLSSNFGAISSVLNDILSRLDKVEAEVQIDRLITGRLQSLQTYVTQQLIRAAEIRASANLAATKMSECVLGQSKRVDFCGKGCHLMSFPQSAPHGVVFLHVTYVPAQEKNFTTAPAICHDGKAHFPREGVFVSNGTHWFVTQRNFYEPQIITTDNTFVSGNCDVVIGIVNNTVYDPLQPELDSFKEELDKYFKNHTSPDVDLGDISGINASVVNIQKEIDRLNEVAKNLNESLIDLQELGKYEQYIK

SEQ ID NO: 2237 - protein, 1211 aa, Artificial Sequence; identical to SEQ ID NO: 2217
  SARS-CoV-2/Australia/NSW10/2020__EPI_ISL_413596 spike protein (1-1211)(I909C_Y1047C)

SEQ ID NO: 2238 - protein, 1211 aa, Artificial Sequence
  SARS-CoV-2/Switzerland/1000477797/2020__EPI_ISL_413023 spike protein (1-1211)(I909C_Y1047C)
MFVFLVLLPLVSSQCVNLTTRTQLPPAYTNSFTRGVYYPDKVFRSSVLHSTQDLFLPFFSNVTWFHAIHVSGTNGTKRFDNPVLPFNDGVYFASTEKSNIIRGWIFGTTLDSKTQSLLIVNNATNVVIKVCEFQFCNDPFLGVYYHKNNKSWMESEFRVYSSANNCTFEYVSQPFLMDLEGKQGNFKNLREFVFKNIDGYFNIYSKHTPINLVRDLPQGFSALEPLVDLPIGINITRFQTLLALHRSYLTPGDSSSGWTAGAAAYYVGYLQPRTFLLKYNENGTITDAVDCALDPLSETKCTLKSFTVEKGIYQTSNFRVQPTESIVRFPNITNLCPFGEVFNATRFASVYAWNRKRISNCVADYSVLYNSASFSTFKCYGVSPTKLNDLCFTNVYADSFVIRGDEVRQIAPGQTGKIADYNYKLPDDFTGCVIAWNSNNLDSKVGGNYNYLYRLFRKSNLKPFERDISTEIYQAGSTPCNGVEGFNCYFPLQSYGFQPTNGVGYQPYRVVVLSFELLHAPATVCGPKKSTNLVKNKCVNFNFNGLTGTGVLTESNKKFLPFQQFGRDIADTTDAVRDPQTLEILDITPCSFGGVSVITPGTNTSNQVAVLYQGVNCTEVPVAIHADQLTPTWRVYSTGSNVFQTRAGCLIGAEHVNNSYECDIPIGAGICASYQTQTNSPRRARSVASQSIIAYTMSLGAENSVAYSNNSIAIPTNFTISVTTEILPVSMTKTSVDCTMYICGDSTECSNLLLQYGSFCTQLNRALTGIAVEQDKNTQEVFAQVKQIYKTPPIKDFGGFNFSQILPDPSKPSKRSFIEDLLFNKVTLADAGFIKQYGDCLGDIAARDLICAQKFNGLTVLPPLLTDEMIAQYTSALLAGTITSGWTFGAGAALQIPFAMQMAYRFNGCGVTQNVLYENQKLIANQFNSAIGKIQDSLSSTASALGKLQDVVNQNAQALNTLVKQLSSNFGAISSVLNDILSRLDKVEAEVQIDRLITGRLQSLQTYVTQQLIRAAEIRASANLAATKMSECVLGQSKRVDFCGKGCHLMSFPQSAPHGVVFLHVTYVPAQEKNFTTAPAICHDGKAHFPREGVFVSNGTHWFVTQRNFYEPQIITTDNTFVSGNCDVVIGIVNNTVYDPLQPELDSFKEELDKYFKNHTSPDVDLGDISGINASVVNIQKEIDRLNEVAKNLNESLIDLQELGKYEQYIK

SEQ ID NO: 2239 - protein, 1211 aa, Artificial Sequence
  SARS-CoV-2/Belgium/BA-02291/2020__EPI_ISL_415159 spike protein (1-1211)(I909C_Y1047C)
MFVFLVLLPLVSSQCVNLTTRTQLPPAYTNSFTRGVYYPDKVFRSSVLHSTQDLFLPFFSNVTWFHAIHVSGTNGTKRFDNPVLPFNDGVYFASTEKSNIIRGWIFGTTLDSKTQSLLIVNNATNVVIKVCEFQFCNDPFLGVYYHKNNKSWMESEFRVYSSANNCTFEYVSQPFLMDLEGKQGNFKNLREFVFKNIDGYFKIYSKHTPINLVRDLPQGFSALEPLVDLPIGINITRFQTLLALHRSYLTPGDSSSGWTAGAAAYYVGYLQPRTFLLKYNENGTITDAVDCALDPLSETKCTLKSFTVEKGIYQTSNFRVQPTESIVRFPNITNLCPFGEVFNATRFASVYAWNRKRISNCVADYSVLYNSASFSTFKCYGVSPTKLNDLCFTNVYADSFVIRGDEVRQIAPGQTGKIADYNYKLPDDFTGCVIAWNSNNLDSKVGGNYNYLYRLFRRSNLKPFERDISTEIYQAGSTPCNGVEGFNCYFPLQSYGFQPTNGVGYQPYRVVVLSFELLPAPATVCGPKKSTNLVKNKCVNFNFNGLTGTGVLTESNKKFLPFQQFGRDIADTTDAVRDPQTLEILDITPCSFGGVSVITPGTNTSNQVAVLYQGVNCTEVPVAIHADQLTPTWRVYSTGSNVFQTRAGCLIGAEHVNNSYECDIPIGAGICASYQTQTNSPRRARSVASQSIIAYTMSLGAENSVAYSNNSIAIPTNFTISVTTEILPVSMTKTSVDCTMYICGDSTECSNLLLQYGSFCTQLNRALTGIAVEQDKNTQEVFAQVKQIYKTPPIKDFGGFNFSQILPDPSKPSKRSFIEDLLFNKVTLADAGFIKQYGDCLGDIAARDLICAQKFNGLTVLPPLLTDEMIAQYTSALLAGTITSGWTFGAGAALQIPFAMQMAYRFNGCGVTQNVLYENQKLIANQFNSAIGKIQDSLSSAAPALGKLQDVVNQNAQALNTLVKQLSSNFGAISSVLNDILSRLDKVEAEVQIDRLITGRLQSLQTYVTQQLIRAAEIRASANLAATKMSECVLGQSKRVDFCGKGCHLMSFPQSAPHGVVFLHVTYVPAQEKNFTTAPAICHDGKAHFPREGVFVSNGTHWFVTQRNFYEPQIITTDNTFVSGNCDVVIGIVNNTVYDPLQPELDSFKEELDKYFKNHTSPDVDLGDISGINASVVNIQKEIDRLNEVAKNLNESLIDLQELGKYEQYIK

SEQ ID NO: 2240 - protein, 1211 aa, Artificial Sequence
  SARS-CoV-2/USA/WA8-UW5/2020__EPI_ISL_413486 spike protein (1-1211)(I909C_Y1047C)
MFVFLVLLPLVSSQCVNLTTRTQLPPAYTNSFTRGVYYPDKVFRSSVLHSTQDLFLPFFSNVTWFHAIHVSGTNGTKRFDNPVLPFNDGVYFASTEKSNIIRGWIFGTTLDSKTQSLLIVNNATNVVIKVCEFQFCNDPFLGVYYHKNNKSWMESEFRVYSSANNCTFEYVSQPFLMDLEGKQGNFKNLREFVFKNIDGYFKIYSKHTPINLVRDLPQGFSALEPLVDLPIGINITRFQTLLALHRSYLTPGDSSSGWTAGAAAYYVGYLQPRTFLLKYNENGTITDAVDCALDPLSETKCTLKSFTVEKGIYQTSNFRVQPTESIVRFPNITNLCPFGEVFNATRFASVYAWNRKRISNCVADYSVLYNSASFSTFKCYGVSPTKLNDLCFTNVYADSFVIRGDEVRQIAPGQTGKIADYNYKLPDDFTGCVIAWNSNNLDSKVGGNYNYLYRLFRKSNLKPFERDISTEIYQAGSTPCNGVEGFNCYFPLQSYGFQPTNGVGYQPYRVVVLSFELLHAPATVCGPKKSTNLVKNKCVNFNFNGLTGTGVLTESNKKFLPFQQFGRDIADTTDAVRDPQTLEILDITPCSFGGVSVITPGTNTSNQVAVLYQDVNCTEVPVAIHADQLTPTWRVYSTGSNVFQTRAGCLIGAEYVNNSYECDIPIGAGICASYQTQTNSPRRARSVASQSIIAYTMSLGAENSVAYSNNSIAIPTNFTISVTTEILPVSMTKTSVDCTMYICGDSTECSNLLLQYGSFCTQLNRALTGIAVEQDKNTQEVFAQVKQIYKTPPIKDFGGFNFSQILPDPSKPSKRSFIEDLLFNKVTLADAGFIKQYGDCLGDIAARDLICAQKFNGLTVLPPLLTDEMIAQYTSALLAGTITSGWTFGAGAALQIPFAMQMAYRFNGCGVTQNVLYENQKLIANQFNSAIGKIQDSLSSTASALGKLQDVVNQNAQALNTLVKQLSSNFGAISSVLNDILSRLDKVEAEVQIDRLITGRLQSLQTYVTQQLIRAAEIRASANLAATKMSECVLGQSKRVDFCGKGCHLMSFPQSAPHGVVFLHVTYVPAQEKNFTTAPAICHDGKAHFPREGVFVSNGTHWFVTQRNFYEPQIITTDNTFVSGNCDVVIGIVNNTVYDPLQPELDSFKEELDKYFKNHTSPDVDLGDISGINASVVNIQKEIDRLNEVAKNLNESLIDLQELGKYEQYIK

SEQ ID NO: 2241 - protein, 1211 aa, Artificial Sequence
  SARS-CoV-2/England/20102000506/2020__EPI_ISL_415147 spike protein (1-1211)(I909C_Y1047C)
MFVFLVLLPLVSSQCVNLTTRTQLPPAYTNSFTRGVYYPDKVFRSSVLHSTQDLFLPFFSNVTWFHAIHVSGTNGTKRFDNPVLPFNDGVYFASTEKSNIIRGWIFGTTLDSKTQSLLIVNNATNVVIKVCEFQFCNDPFLGVYYHKNNKSWMESEFRVYSSANNCTFEYVSQPFLMDLEGKQGNFKNLREFVFKNIDGYFKIYSKHTPINLVRDLPQGFSALEPLVDLPIGINITRFQTLLALHRSYLTPGDSSSGWTAGAAAYYVGYLQPRTFLLKYNENGTITDAVDCALDPLSETKCTLKSFTVEKGIYQTSNFRVQPTESIVRFPNITNLCPFGEVFNATRFASVYAWNRKRISNCVADYSVLYNSASFSTFKCYGVSPTKLNDLCFTNVYADSFVIRGDEVRQIAPGQTGKIADYNYKLPDDFTGCVIAWNSNNLDSKVGGNYNYLYRLFRKSNLKPFERDISTEIYQAGSTPCNGVEGFNCYFPLQSYGFQPTNGVGYQPYRVVVLSFELLHAPATVCGPKKSTNLVKNKCVNFNFNGLTGTGVLTESNKKFLPFQQFGRDIADTTDAVRDPQTLEILDITPCSFGGVSVITPGTNTSNQVAVLYQGVNCTEVPVAIHADQLTPTWRVYSTGSNVFQTRAGCLIGAEHVNNSYECDIPIGAGICASYQTQTNSPRRARSVASQSIIAYTMSLGAENSVAYSNNSIAIPTNFTISVTTEILPVSMTKTSVDCTMYICGDSTECSNLLLQYGSFCTQLNRALTGIAVEQDKNTQEVFAQVKQIYKTPPIKDFGGFNFSQILPDPSKPSKRSFIEDLLFNKVTLADAGFIKQYGYCLGDIAARDLICAQKFNGLTVLPPLLTDEMIAQYTSALLAGTITSGWTFGAGAALQIPFAMQMAYRFNGCGVTQNVLYENQKLIANQFNSAIGKIQDSLSSTASALGKLQDVVNQNAQALNTLVKQLSSNFGAISSVLNDILSRLDKVEAEVQIDRLITGRLQSLQTYVTQQLIRAAEIRASANLAATKMSECVLGQSKRVDFCGKGCHLMSFPQSAPHGVVFLHVTYVPAQEKNFTTAPAICHDGKAHFPREGVFVSNGTHWFVTQRNFYEPQIITTDNTFVSGNCDVVIGIVNNTVYDPLQPELDSFKEELDKYFKNHTSPDVDLGDISGINASVVNIQKEIDRLNEVAKNLNESLIDLQELGKYEQYIK

SEQ ID NO: 2242 - protein, 1211 aa, Artificial Sequence
  SARS-CoV-2/Belgium/VAG-03013/2020__EPI_ISL_415155 spike protein (1-1211)(I909C_Y1047C)
MFVFLVLLPLVSSQCVNLTTRTQLPPAYTNSFTRGVYYPDKVFRSSVLHSTQDLFLPFFSNVTWFHAIHVSGTNGTKRFDNPVLPFNDGVYFASTEKSNIIRGWIFGTTLDSKTQSLLIVNNATNVVIKVCEFQFCNDPFLGVYYHKNNKSWMESEFRVYSSANNCTFEYVSQPFLMDLEGKQGNFKNLREFVFKNIDGYFKIYSKHTPINLVRDLPQGFSALEPLVDLPIGINITRFQTLLALHRSYLTPGDSSSGWTAGAAAYYVGYLQPRTFLLKYNENGTITDAVDCALDPLSETKCTLKSFTVEKGIYQTSNFRVQPTESIVRFPNITNLCPFGEVFNATRFASVYAWNRKRISNCVADYSVLYNSASFSTFKCYGVSPTKLNDLCFTNVYADSFVIRGDEVRQIAPGQTGKIADYNYKLPDDFTGCVIAWNSNNLDSKVGGNYNYLYRLFRKSNLKPFERDISTEIYQAGSTPCNGVEGFNCYFPLQSYGFQPTNGVGYQPYRVVVLSFELLHAPATVCGPKKSTNLVKNKCVNFNFNGLTGTGVLTESNKKFLPFQQFGRDIADTTDAVRDPQTLEILDITPCSFGGVSVITPGTNTSNQVAVLYQGVNCTEVPVAIHADQLTPTWRVYSTGSNVFQTRAGCLIGAEHVNNSYECDIPIGAGICASYQTQTNSPRRARSVASQSIIAYTMSLGAENSVAYSNNSIAIPTNFTISVTTEILPVSMTKTSVDCTMYICGDSTECSNLLLQYGSFCTQLNRALTGIAVEQDKNTQEVFAQVKQIYKTPPIKDFGGFNFSQILPDPSKPSKRSFIEDLLFNKVTLADAGFIKQYGDCLGDIAARDLICAQKFNGLTVLPPLLTDEMIAQYTSALLAGTITSGWTFGAGAALQIPFAMQMAYRFNGCGVTQNVLYENQKLIANQFNSAIGKIQDSLSSTATALGKLQDVVNQNAQALNTLVKQLSSNFGAISSVLNDILSRLDKVEAEVQIDRLITGRLQSLQTYVTQQLIRAAEIRASANLAATKMSECVLGQSKRVDFCGKGCHLMSFPQSAPHGVVFLHVTYVPAQEKNFTTAPAICHDGKAHFPREGVFVSNGTHWFVTQRNFYEPQIITTDNTFVSGNCDVVIGIVNNTVYDPLQPELDSFKEELDKYFKNHTSPDVDLGDISGINASVVNIQKEIDRLNEVAKNLNESLIDLQELGKYEQYIK

SEQ ID NO: 2243 - protein, 1211 aa, Artificial Sequence
  SARS-CoV-2/Belgium/BC-03016/2020__EPI_ISL_415157 spike protein (1-1211)(I909C_Y1047C)
MFVFLVLLPLVSSQCVNLTTRTQLPPAYTNSFTRGVYYPDKVFRSSVLHSTQDLFLPFFSNVTWFHAIHVSGTNGTKRFDNPVLPFNDGVYFASTEKSNIIRGWIFGTTLDSKTQSLLIVNNATNVVIKVCEFQFCNDPFLGVYYHKNNKSWMESEFRVYSSANNCTFEYVSQPFLMDLEGKQGNFKNLREFVFKNIDGYFKIYSKHTPINLVRDLPQGFSALEPLVDLPIGINITRFQTLLALHRSYLTPGDSSSGWTAGAAAYYVGYLQPRTFLLKYNENGTITDAVDCALDPLSETKCTLKSFTVEKGIYQTSNFRVQPTESIVRFPNITNLCPFGEVFNATRFASVYAWNRKRISNCVADYSVLYNSASFSTFKCYGVSPTKLNDLCFTNVYADSFVIRGDEVRQIAPGQTGKIADYNYKLPDDFTGCVIAWNSNNLDSKVGGNYNYLYRLFRKSNLKPFERDISTEIYQAGSTPCNGVEGFNCYFPLQSYGFQPTNGVGYQPYRVVVLSFELLHAPATVCGPKKSTNLVKNKCVNFNFNGLTGTGVLTESNKKFLPFQQFGRDIADTTDAVRDPQTLEILDITPCSFGGVSVITPGTNTSNQVAVLYQGVNCTEVPVAIHADQLTPTWRVYSTGSNVFQTRAGCLIGAEHVNNSYECDIPIGAGICASYQTQTNSPRRARSVASQSIIAYTMSLGAENSVAYSNNSIAIPTNFTISVTTEILPVSMTKTSVDCTMYICGDSTECSNLLLQYGSFCTQLNRALTGIAVEQDKNTQEVFAQVKQIYKTPPIKDFGGFNFSQILPDPSKPSKRSFIEDLLFNKVTLADAGFIKQYGDCLGDIAARDLICAQKFNGLTVLPPLLTDEMIAQYTSALLAGTITSGWTFGAGAALQIPFAMQMAYRFNGCGVTQNVLYENQKLIANQFNSAIGKIQDSLSSTAPALGKLQDVVNQNAQALNTLVKQLSSNFGAISSVLNDILSRLDKVEAEVQIDRLITGRLQSLQTYVTQQLIRAAEIRASANLAATKMSECVLGQSKRVDFCGKGCHLMSFPQSAPHGVVFLHVTYVPAQEKNFTTAPAICHDGKAHFPREGVFVSNGTHWFVTQRNFYEPQIITTDNTFVSGNCDVVIGIVNNTVYDPLQPELDSFKEELDKYFKNHTSPDVDLGDISGINASVVNIQKEIDRLNEVAKNLNESLIDLQELGKYEQYIK

SEQ ID NO: 2244 - protein, 1211 aa, Artificial Sequence
  SARS-CoV-2/Germany/BavPat3/2020__EPI_ISL_414521 spike protein (1-1211)(I909C_Y1047C)
MFVFLVLLPLVSSQCVNLTTRTQLPPAYTNSFTRGVYYPDKVFRSSVLHSTQDLFLPFFSNVTWFHAIHVSGTNGTKRFDNPVLPFNDGVYFASTEKSNIIRGWIFGTTLDSKTQSLLIVNNATNVVIKVCEFQFCNDPFLGVYYHKNNKSWMESEFRVYSSANNCTFEYVSQPFLMDLEGKQGNFKNLREFVFKNIDGYFKIYSKHTPINLVRDLPQGFSALEPLVDLPIGINITRFQTLLALHRSYLTPGDSSSGWTAGAAAYYVGYLQPRTFLLKYNENGTITDAVDCALDPLSETKCTLKSFTVEKGIYQTSNFRVQPTESIVRFPNITNLCPFGEVFNATRFASVYAWNRKRISNCVADYSVLYNSASFSTFKCYGVSPTKLNDLCFTNVYADSFVIRGDEVRQIAPGQTGKIADYNYKLPDDFTGCVIAWNSNNLDSKVGGNYNYLYRLFRKSNLKPFERDISTEIYQAGSTPCNGVEGFNCYFPLQSYGFQPTNGVGYQPYRVVVLSFELLHAPATVCGPKKSTNLVKNKCVNFNFNGLTGTGVLTESNKKFLPFQQFGRDIADTTDAVRDPQTLEILDITPCSFGGVSVITPGTNTSNQVAVLYQDVNCTEVPVAIHADQLTPTWRVYSTGSNVFQTRAGCLIGAEHVNNSYECDIPIGAGICASYQTQTNSPRRARSVASQSIIAYTMSLGAENSVAYSNNSIAIPTNFTISVTTEILPVSMTKTSVDCTMYICGDSTECSNLLLQYGSFCTQLNRALTGIAVEQDKNTQQVFAQVKQIYKTPPIKDFGGFNFSQILPDPSKPSKRSFIEDLLFNKVTLADAGFIKQYGDCLGDIAARDLICAQKFNGLTVLPPLLTDEMIAQYTSALLAGTITSGWTFGAGAALQIPFAMQMAYRFNGCGVTQNVLYENQKLIANQFNSAIGKIQDSLSSTASALGKLQDVVNQNAQALNTLVKQLSSNFGAISSVLNDILSRLDKVEAEVQIDRLITGRLQSLQTYVTQQLIRAAEIRASANLAATKMSECVLGQSKRVDFCGKGCHLMSFPQSAPHGVVFLHVTYVPAQEKNFTTAPAICHDGKAHFPREGVFVSNGTHWFVTQRNFYEPQIITTDNTFVSGNCDVVIGIVNNTVYDPLQPELDSFKEELDKYFKNHTSPDVDLGDISGINASVVNIQKEIDRLNEVAKNLNESLIDLQELGKYEQYIK

SEQ ID NO: 2245 - protein, 1211 aa, Artificial Sequence
  SARS-CoV-2/France/HF1805/2020__EPI_ISL_414628 spike protein (1-1211)(I909C_Y1047C)
MFVFLVLLPLVSSQCVNLTTRTQLPPAYTNSFTRGVYYPDKVFRSSVLHSTQDLFLPFFSNVTWFHAIHVSGTNGTKRFDNPVLPFNDGVYFASTEKSNIIRGWIFGTTLDSKTQSLLIVNNATNVVIKVCEFQFCNDPFLGVYYHKNNKSWMESEFRVYSSANNCTFEYVSQPFLMDLEGKQGNFKNLREFVFKNIDGYFKIYSKHTPINLVRDLPQGFSALEPLVDLPIGINITRFQTLLALHRSYLTPGDSSSGWTAGAAAYYVGYLQPRTFLLKYNENGTITDAVDCALDPLSETKCTLKSFTVEKGIYQTSNFRVQPTESIVRFPNITNLCPFGEVFNATRFASVYAWNRKRISNCVADYSVLYNSASFSTFKCYGVSPTKLNDLCFTNVYADSFVIRGDEVRQIAPGQTGKIADYNYKLPDDFTGCVIAWNSNNLDSKVGGNYNYLYRLFRKSNLKPFERDISTEIYQAGSTPCNGVEGFNCYFPLQSYGFQPTNGVGYQPYRVVVLSFELLHAPATVCGPKKSTNLVKNKCVNFNFNGLTGTGVLTESNKKFLPFQQFGRDIADTTDAVRDPQTLEILDITPCSFGGVSVITPGTNTSNQVAVLYQGVNCTEVPVAIHADQLTPTWRVYSTGSNVFQTRAGCLIGAEHVNNSYECDIPIGAGICASYQTQTNSPRRARSVASQSIIAYTMSLGAENSVAYSNNSIAIPTNFTISVTTEILPVSMTKTSVDCTMYICGDSTECSNLLLQYGSFCTQLNRALTGIAVEQDKNTQEVFAQVKQIYKTPPIKDFGGFNFSQILPDPSKPSKRSFIEDLLFNKVTLADAGFIKQYGDCLGDIAARDLICAQKFNGLTVLPPLLTDEMIAQYTSALLAGTITSGWTFGAGAALQIPFAMQMAYRFNGCGVTQNVLYENQKLIANQFNSAIGKIQDSLSSTASALGKLQDVVNQNAQALNTLVKQLSSNFGAISSVLNDILSRLDKVEAEVQIDRLITGRLQSLQTYVTQQLIRAAEIRASANLAATKMSECVLGQSKRVDFCGKGCHLMSFPQSAPHGVVFLHVTYVPAQEKNFTTAPAICHDGKAHFPREGVFVSNGTHWFVTQRNFYEPQIITTDNTFVSGNCDVVIGVVNNTVYDPLQPELDSFKEELDKYFKNHTSPDVDLGDISGINASVVNIQKEIDRLNEVAKNLNESLIDLQELGKYEQYIK

SEQ ID NO: 2246 - protein, 1211 aa, Artificial Sequence
  SARS-CoV-2/Netherlands/ZuidHolland_9/2020__EPI_ISL_414445 spike protein (1-1211)(I909C_Y1047C)
MFVFLVLLPLVSSQCVNLTTRTQLPPAYTNSFTRGVYYPDKVFRSSVLHSTQDLFLPFFSNVTWFHAIHVSGTNGTKRFDNPVLPFNDGVYFASTEKSNIIRGWIFGTTLDSKTQSLLIVNNATNVVIKVCEFQFCNDPFLGVYYHKNNKSWMESEFRVYSSANNCTFEYVSQPFLMDLEGKQGNFKNLREFVFKNIDGYFKIYSKHTPINLVRDLPQGFSALEPLVDLPIGINITRFQTLLALHRSYLTPGDSSSGWTAGAAAYYVGYLQPRTFLLKYNENGTITDAVDCALDPLSETKCTLKSFTVEKGIYQTSNFRVQPTESIVRFPNITNLCPFGEVFNATRFASVYAWNRKRISNCVADYSVLYNSASFSTFKCYGVSPTKLNDLCFTNVYADSFVIRGDEVRQIAPGQTGKIADYNYKLPDDFTGCVIAWNSNNLDSKVGGNYNYLYRLFRKSNLKPFERDISTEIYQAGSTPCNGVEGFNCYFPLQSYGFQPTNGVGYQPYRVVVLSFELLHAPATVCGPKKSTNLVKNKCVNFNFNGLTGTGVLTESNKKFLPFQQFGRDIADTTDAVRDPQTLEILDITPCSFGGVSVITPGTNTSNQVAVLYQGVNCTEVPVAIHADQLTPTWRVYSTGSNVFQTRAGCLIGAEHVNNSYECDIPIGAGICASYQTQTNSPRRARSVASQSIIAYTMSLGAENSVAYSNNSIAIPTNFTISVTTEILPVSMTKTSVDCTMYICGDSTECSNLLLQYGSFCTQLNRALTGIAVEQDKNTQEVFAQVKQIYKTPPIKDFGGFNFSQILPDPSKPSKRSFIEDLLFNKVTLADAGFIKQYGDCLGDIAARDLICVQKFNGLTVLPPLLTDEMIAQYTSALLAGTITSGWTFGAGAALQIPFAMQMAYRFNGCGVTQNVLYENQKLIANQFNSAIGKIQDSLSSTASALGKLQDVVNQNAQALNTLVKQLSSNFGAISSVLNDILSRLDKVEAEVQIDRLITGRLQSLQTYVTQQLIRAAEIRASANLAATKMSECVLGQSKRVDFCGKGCHLMSFPQSAPHGVVFLHVTYVPAQEKNFTTAPAICHDGKAHFPREGVFVSNGTHWFVTQRNFYEPQIITTDNTFVSGNCDVVIGIVNNTVYDPLQPELDSFKEELDKYFKNHTSPDVDLGDISGINASVVNIQKEIDRLNEVAKNLNESLIDLQELGKYEQYIK

SEQ ID NO: 2247 - protein, 1211 aa, Artificial Sequence
  SARS-CoV-2/Finland/FIN03032020A/2020__EPI_ISL_413602 spike protein (1-1211)(I909C_Y1047C)
MFVFLVLLPLVSSQCVNLTTRTQLPPAYTNSFTRGVYYPDKVFRSSVLHSTQDLFLPFFSNVTWFHAIHVSGTNGTKRFDNPVLPFNDGVYFASTEKSNIIRGWIFGTTLDSKTQSLLIVNNATNVVIKVCEFQFCNDPFLGVYYHKNNKSWMESEFRVYSSANNCTFEYVSQPFLMDLEGKQGNFKNLREFVFKNIDGYFKIYSKHTPINLVRDLPQGFSALEPLVDLPIGINITRFQTLLALHRSYLTPGDSSSGWTAGAAAYYVGYLQPRTFLLKYNENGTITDAVDCALDPLSETKCTLKSFTVEKGIYQTSNFRVQPTESIVRFPNITNLCPFGEVFNATRFASVYAWNRKRISNCVADYSVLYNSASFSTFKCYGVSPTKLNDLCFTNVYADSFVIRGDEVRQIAPGQTGKIADYNYKLPDDFTGCVISWNSNNLDSKVGGNYNYLYRLFRKSNLKPFERDISTEIYQAGSTPCNGVEGFNCYFPLQSYGFQPTNGVGYQPYRVVVLSFELLHAPATVCGPKKSTNLVKNKCVNFNFNGLTGTGVLTESNKKFLPFQQFGRDIADTTDAVRDPQTLEILDITPCSFGGVSVITPGTNTSNQVAVLYQGVNCTEVPVAIHADQLTPTWRVYSTGSNVFQTRAGCLIGAEHVNNSYECDIPIGAGICASYQTQTNSPRRARSVASQSIIAYTMSLGAENSVAYSNNSIAIPTNFTISVTTEILPVSMTKTSVDCTMYICGDSTECSNLLLQYGSFCTQLNRALTGIAVEQDKNTQEVFAQVKQIYKTPPIKDFGGFNFSQILPDPSKPSKRSFIEDLLFNKVTLADAGFIKQYGDCLGDIAARDLICAQKFNGLTVLPPLLTDEMIAQYTSALLAGTITSGWTFGAGAALQIPFAMQMAYRFNGCGVTQNVLYENQKLIANQFNSAIGKIQDSLSSTASALGKLQDVVNQNAQALNTLVKQLSSNFGAISSVLNDILSRLDKVEAEVQIDRLITGRLQSLQTYVTQQLIRAAEIRASANLAATKMSECVLGQSKRVDFCGKGCHLMSFPQSAPHGVVFLHVTYVPAQEKNFTTAPAICHDGKAHFPREGVFVSNGTHWFVTQRNFYEPQIITTDNTFVSGNCDVVIGIVNNTVYDPLQPELDSFKEELDKYFKNHTSPDVDLGDISGINASVVNIQKEIDRLNEVAKNLNESLIDLQELGKYEQYIK

SEQ ID NO: 2248 - protein, 1211 aa, Artificial Sequence
  SARS-CoV-2/France/GE1977/2020__EPI_ISL_414632 spike protein (1-1211)(I909C_Y1047C)
MFVFLVLLPLVSSQCVNLTTRTQLPPAYTNSFTRGVYYPDKVFRSSVLHSTQDLFLPFFSNVTWFHAIHVSGTNGTKRFDNPVLPFNDGVYFASTEKSNIIRGWIFGTTLDSKTQSLLIVNNATNVVIKVCEFQFCNDPFLGVYYHKNNKSWMESEFRVYSSANNCTFEYVSQPFLMDLEGKQGNFKNLREFVFKNIDGYFKIYSKHTPINLVRDLPQGFSALEPLVDLPIGINITRFQTLLALHRSYLTPGDSSSGWTAGAAAYYVGYLQPRTFLLKYNENGTITDAVDCALDPLSETKCTLKSFTVEKGIYQTSNFRVQPTESIVRFPNITNLCPFGEVFNATRFASVYAWNRKRISNCVADYSVLYNSASFSTFKCYGVSPTKLNDLCFTNVYADSFVIRGDEVRQIAPGQTGKIADYNYKLPDDFTGCVIAWNSNNLDSKVGGNYNYLYRLFRKSNLKPFERDISTEIYQAGSTPCNGVEGFNCYFPLQSYGFQPTNGVGYQPYRVVVLSFELLHAPATVCGPKKSTNLVKNKCVNFNFNGLTGTGVLTESNKKFLPFQQFGRDIADTTDAVRDPQTLEILDITPCSFGGVSVITPGTNTSNQVAVLYQGVNCTEVPVAIHADQLTPTWRVYSTGSNVFQTRAGCLIGAEHVNNSYECDIPIGAGICASYQTQTNSPRRARSVASQSIIAYTMSLGAENSVAYSNNSIAIPTNFTISVTTEILPVSMTKTSVDCTMYICGDSTECSNLLLQYGSFCTQLNRALTGIAVEQDKNTQEVFAQVKQIYKTPPIKDFGGFNFSQILPDPSKPSKRSFIEDLLFNKVTLADAGFIKQYGDCLGDIAARDLICAQKFNGLTVLPPLLTDEMIAQYTSALLAGTITSGWTFGAGAALQIPFAMQMAYRFNGCGVTQNVLYENQKLIANQFNSAIGKIQDSLFSTASALGKLQDVVNQNAQALNTLVKQLSSNFGAISSVLNDILSRLDKVEAEVQIDRLITGRLQSLQTYVTQQLIRAAEIRASANLAATKMSECVLGQSKRVDFCGKGCHLMSFPQSAPHGVVFLHVTYVPAQEKNFTTAPAICHDGKAHFPREGVFVSNGTHWFVTQRNFYEPQIITTDNTFVSGNCDVVIGIVNNTVYDPLQPELDSFKEELDKYFKNHTSPDVDLGDISGINASVVNIQKEIDRLNEVAKNLNESLIDLQELGKYEQYIK

SEQ ID NO: 2249 - protein, 1211 aa, Artificial Sequence
  SARS-CoV-2/Finland/FIN-313/2020__EPI_ISL_414641 spike protein (1-1211)(I909C_Y1047C)
MFVFLVLLPLVSSQCVNLTTRTQLPPAYTNSFTRGVYYPDKVFRSSVLHSTQDLFLPFFSNVTWFHAIHVSGTNGTKRFDNPVLPFNDGVYFASTEKSNIIRGWIFGTTLDSKTQSLLIVNNATNVVIKVCEFQFCNDPFLGVYYHKNNKSWMESEFRVYSSANNCTFEYVSQPFLMDLEGKQGNFKNLREFVFKNIDGYFKIYSKHTPINLVRDLPQGFSALEPLVDLPIGINITRFKTLLALHRSYLTPGDSSSGWTAGAAAYYVGYLQPRTFLLKYNENGTITDAVDCALDPLSETKCTLKSFTVEKGIYQTSNFRVQPTESIVRFPNITNLCPFGEVFNATRFASVYAWNRKRISNCVADYSVLYNSASFSTFKCYGVSPTKLNDLCFTNVYADSFVIRGDEVRQIAPGQTGKIADYNYKLPDDFTGCVIAWNSNNLDSKVGGNYNYLYRLFRKSNLKPFERDISTEIYQAGSTPCNGVEGFNCYFPLQSYGFQPTNGVGYQPYRVVVLSFELLHAPATVCGPKKSTNLVKNKCVNFNFNGLTGTGVLTESNKKFLPFQQFGRDIADTTDAVRDPQTLEILDITPCSFGGVSVITPGTNTSNQVAVLYQGVNCTEVPVAIHADQLTPTWRVYSTGSNVFQTRAGCLIGAEHVNNSYECDIPIGAGICASYQTQTNSPRRARSVASQSIIAYTMSLGAENSVAYSNNSIAIPTNFTISVTTEILPVSMTKTSVDCTMYICGDSTECSNLLLQYGSFCTQLNRALTGIAVEQDKNTQEVFAQVKQIYKTPPIKDFGGFNFSQILPDPSKPSKRSFIEDLLFNKVTLADAGFIKQYGDCLGDIAARDLICAQKFNGLTVLPPLLTDEMIAQYTSALLAGTITSGWTFGAGAALQIPFAMQMAYRFNGCGVTQNVLYENQKLIANQFNSAIGKIQDSLSSTASALGKLQDVVNQNAQALNTLVKQLSSNFGAISSVLNDILSRLDKVEAEVQIDRLITGRLQSLQTYVTQQLIRAAEIRASANLAATKMSECVLGQSKRVDFCGKGCHLMSFPQSAPHGVVFLHVTYVPAQEKNFTTAPAICHDGKAHFPREGVFVSNGTHWFVTQRNFYEPQIITTDNTFVSGNCDVVIGIVNNTVYDPLQPELDSFKEELDKYFKNHTSPDVDLGDISGINASVVNIQKEIDRLNEVAKNLNESLIDLQELGKYEQYIK

SEQ ID NO: 2250 - protein, 1211 aa, Artificial Sequence
  SARS-CoV-2/Netherlands/ZuidHolland_2/2020__EPI_ISL_414556 spike protein (1-1211)(I909C_Y1047C)
MFVFLVLLPLVSSQCVNLTTRTQLPPAYTNSFTRGVYYPDKVFRSSVLHSTQDLFLPFFSNVTWFHAIHVSGTNGTKRFDNPVLPFNDGVYFASTEKSNIIRGWIFGTTLDSKTQSLLIVNNATNVVIKVCEFQFCNDPFLGVYYHKNNKSWMESEFRVYSSANNCTFEYVSQPFLMDLEGKQGNFKNLREFVFKNIDGYFKIYSKHTPINLVRDLPQGFSALEPLVDLPIGINITRFQTLLALHRSYLTPGDSSSGWTAGAAAYYVGYLQPRTFLLKYNENGTITDAVDCALDPLSETKCTLKSFTVEKGIYQTSNFRVQPTESIVRFPNITNLCPFGEVFNATRFASVYAWNRKRISNCVADYSVLYNSASFSTFKCYGVSPTKLNDLCFTNVYADSFVIRGDEVRQIAPGQTGKIADYNYKLPDDFTGCVIAWNSNNLDSKVGGNYNYLYRLFRKSNLKPFERDISTEIYQAGSTPCNGVEGFNCYFPLQSYGFQPTNGVGYQPYRVVVLSFELLHAPATVCGPKKSTNLVKNKCVNFNFNGLTGTGVLTESNKKFLPFQQFGRDIADTTDAVRDPQTLEILDITPCSFGGVSVITPGTNTSNQVAVLYQGVNCTEVPVAIHADQLTPTWRVYSTGSNVFQTRAGCLIGAEHVNNSYECDIPIGAGICASYQTQTNSPRRARSVASQSIIAYTMSLGAENSVAYSNNSIAIPTNFTISVTTEILPVSMTKTSVDCTMYICGDSTECSNLLLQYGSFCTQLNRALTGIALEQDKNTQEVFAQVKQIYKTPPIKDFGGFNFSQILPDPSKPSKRSFIEDLLFNKVTLADAGFIKQYGDCLGDIAARDLICAQKFNGLTVLPPLLTDEMIAQYTSALLAGTITSGWTFGAGAALQIPFAMQMAYRFNGCGVTQNVLYENQKLIANQFNSAIGKIQDSLSSTASALGKLQDVVNQNAQALNTLVKQLSSNFGAISSVLNDILSRLDKVEAEVQIDRLITGRLQSLQTYVTQQLIRAAEIRASANLAATKMSECVLGQSKRVDFCGKGCHLMSFPQSAPHGVVFLHVTYVPAQEKNFTTAPAICHDGKAHFPREGVFVSNGTHWFVTQRNFYEPQIITTDNTFVSGNCDVVIGIVNNTVYDPLQPELDSFKEELDKYFKNHTSPDVDLGDISGINASVVNIQKEIDRLNEVAKNLNESLIDLQELGKYEQYIK

SEQ ID NO: 2251 - protein, 1211 aa, Artificial Sequence
  SARS-CoV-2/USA/WA-UW31/2020__EPI_ISL_414618 spike protein (1-1211)(I909C_Y1047C)
MFVFLVLLPLVSSQCVNLTTRTQLPPAYTNSFTRGVYYPDKVFRSSVLHSTQDLFLPFFSNVTWFHAIHVSGTNGTKRFDNPVLPFNDGVYFASTEKSNIIRGWIFGTTLDSKTQSLLIVNNATNVVIKVCEFQFCNDPFLGVYYHKNNKSWMESEFRVYSSANNCTFEYVSQPFLMDLEGKQGNFKNLREFVFKNIDGYFKIYSKHTPINLVRDLPQGFSALEPLVDLPIGINITRFQTLLALHRSYLTPGDSSSGWTAGAAAYYVGYLQPRTFLLKYNENGTITDAVDCALDPLSETKCTLKSFTVEKGIYQTSNFRVQPTESIVRFPNITNLCPFGEVFNATRFASVYAWNRKRISNCVADYSVLYNSASFSTFKCYGVSPTKLNDLCFTNVYADSFVIRGDEVRQIAPGQTGKIADYNYKLPDDFTGCVIAWNSNNLDSKVGGNYNYLYRLFRKSNLKPFERDISTEIYQAGSTPCNGAEGFNCYFPLQSYGFQPTNGVGYQPYRVVVLSFELLHAPATVCGPKKSTNLVKNKCVNFNFNGLTGTGVLTESNKKFLPFQQFGRDIADTTDAVRDPQTLEILDITPCSFGGVSVITPGTNTSNQVAVLYQDVNCTEVPVAIHADQLTPTWRVYSTGSNVFQTRAGCLIGAEHVNNSYECDIPIGAGICASYQTQTNSPRRARSVASQSIIAYTMSLGAENSVAYSNNSIAIPTNFTISVTTEILPVSMTKTSVDCTMYICGDSTECSNLLLQYGSFCTQLNRALTGIAVEQDKNTQEVFAQVKQIYKTPPIKDFGGFNFSQILPDPSKPSKRSFIEDLLFNKVTLADAGFIKQYGDCLGDIAARDLICAQKFNGLTVLPPLLTDEMIAQYTSALLAGTITSGWTFGAGAALQIPFAMQMAYRFNGCGVTQNVLYENQKLIANQFNSAIGKIQDSLSSTASALGKLQDVVNQNAQALNTLVKQLSSNFGAISSVLNDILSRLDKVEAEVQIDRLITGRLQSLQTYVTQQLIRAAEIRASANLAATKMSECVLGQSKRVDFCGKGCHLMSFPQSAPHGVVFLHVTYVPAQEKNFTTAPAICHDGKAHFPREGVFVSNGTHWFVTQRNFYEPQIITTDNTFVSGNCDVVIGIVNNTVYDPLQPELDSFKEELDKYFKNHTSPDVDLGDISGINASVVNIQKEIDRLNEVAKNLNESLIDLQELGKYEQYIK

SEQ ID NO: 2252 - protein, 1211 aa, Artificial Sequence
  SARS-CoV-2/South Korea/SNU01/2020__EPI_ISL_411929 spike protein (1-1211)(I909C_Y1047C)
MFVFLVLLPLVSSQCVNLTTRTQLPPAYTNSFTRGVYYPDKVFRSSVLHSTQDLFLPFFSNVTWFHAIHVSGTNGTKRFDNPVLPFNDGVYFASTEKSNIIRGWIFGTTLDSKTQSLLIVNNATNVVIKVCEFQFCNDPFLGVYYHKNNKSWMESEFRVYSSANNCTFEYVSQPFLMDLEGKQGNFKNLREFVFKNIDGYFKIYSKHTPINLVRDLPQGFWALEPLVDLPIGINITRFQTLLALHRSYLTPGDSSSGWTAGAAAYYVGYLQPRTFLLKYNENGTITDAVDCALDPLSETKCTLKSFTVEKGIYQTSNFRVQPTESIVRFPNITNLCPFGEVFNATRFASVYAWNRKRISNCVADYSVLYNSASFSTFKCYGVSPTKLNDLCFTNVYADSFVIRGDEVRQIAPGQTGKIADYNYKLPDDFTGCVIAWNSNNLDSKVGGNYNYLYRLFRKSNLKPFERDISTEIYQAGSTPCNGVEGFNCYFPLQSYGFQPTNGVGYQPYRVVVLSFELLHAPATVCGPKKSTNLVKNKCVNFNFNGLTGTGVLTESNKKFLPFQQFGRDIADTTDAVRDPQTLEILDITPCSFGGVSVITPGTNTSNQVAVLYQDVNCTEVPVAIHADQLTPTWRVYSTGSNVFQTRAGCLIGAEHVNNSYECDIPIGAGICASYQTQTNSPRRARSVASQSIIAYTMSLGAENSVAYSNNSIAIPTNFTISVTTEILPVSMTKTSVDCTMYICGDSTECSNLLLQYGSFCTQLNRALTGIAVEQDKNTQEVFAQVKQIYKTPPIKDFGGFNFSQILPDPSKPSKRSFIEDLLFNKVTLADAGFIKQYGDCLGDIAARDLICAQKFNGLTVLPPLLTDEMIAQYTSALLAGTITSGWTFGAGAALQIPFAMQMAYRFNGCGVTQNVLYENQKLIANQFNSAIGKIQDSLSSTASALGKLQDVVNQNAQALNTLVKQLSSNFGAISSVLNDILSRLDKVEAEVQIDRLITGRLQSLQTYVTQQLIRAAEIRASANLAATKMSECVLGQSKRVDFCGKGCHLMSFPQSAPHGVVFLHVTYVPAQEKNFTTAPAICHDGKAHFPREGVFVSNGTHWFVTQRNFYEPQIITTDNTFVSGNCDVVIGIVNNTVYDPLQPELDSFKEELDKYFKNHTSPDVDLGDISGINASVVNIQKEIDRLNEVAKNLNESLIDLQELGKYEQYIK

SEQ ID NO: 2253 - protein, 1211 aa, Artificial Sequence
  SARS-CoV-2/China/WF0004/2020__EPI_ISL_413694 spike protein (1-1211)(I909C_Y1047C)
MFVFLVLLPLVSSQCVNLTTRTQLPPAYTNSFTRGVYYPDKVFRSSVLHSTQDLFLPFFSNVTWFHAIHVSGTNGTKRFDNPVLPFNDGVYFASTEKSNIIRGWIFGTTLDSKTQSLLIVNNATNVVIKVCEFQFCNDPFLGVYYHKNNKSWTESEFRVYSSANNCTFEYVSQPFLMDLEGKQGNFKNLREFVFKNIDGYFKIYSKHTPINLVRDLPQGFSALEPLVDLPIGINITRFQTLLALHRSYLTPGDSSSGWTAGAAAYYVGYLQPRTFLLKYNENGTITDAVDCALDPLSETKCTLKSFTVEKGIYQTSNFRVQPTESIVRFPNITNLCPFGEVFNATRFASVYAWNRKRISNCVADYSVLYNSASFSTFKCYGVSPTKLNDLCFTNVYADSFVIRGDEVRQIAPGQTGKIADYNYKLPDDFTGCVIAWNSNNLDSKVGGNYNYLYRLFRKSNLKPFERDISTEIYQAGSTPCNGVEGFNCYFPLQSYGFQPTNGVGYQPYRVVVLSFELLHAPATVCGPKKSTNLVKNKCVNFNFNGLTGTGVLTESNKKFLPFQQFGRDIADTTDAVRDPQTLEILDITPCSFGGVSVITPGTNTSNQVAVLYQDVNCTEVPVAIHADQLTPTWRVYSTGSNVFQTRAGCLIGAEHVNNSYECDIPIGAGICASYQTQTNSPRRARSVASQSIIAYTMSLGAENSVAYSNNSIAIPTNFTISVTTEILPVSMTKTSVDCTMYICGDSTECSNLLLQYGSFCTQLNRALTGIAVEQDKNTQEVFAQVKQIYKTPPIKDFGGFNFSQILPDPSKPSKRSFIEDLLFNKVTLADAGFIKQYGDCLGDIAARDLICAQKFNGLTVLPPLLTDEMIAQYTSALLAGTITSGWTFGAGAALQIPFAMQMAYRFNGCGVTQNVLYENQKLIANQFNSAIGKIQDSLSSTASALGKLQDVVNQNAQALNTLVKQLSSNFGAISSVLNDILSRLDKVEAEVQIDRLITGRLQSLQTYVTQQLIRAAEIRASANLAATKMSECVLGQSKRFDFCGKGCHLMSFPQSAPHGVVFLHVTYVPAQEKNFTTAPAICHDGKAHFPREGVFVSNGTHWFVTQRNFYEPQIITTDNTFVSGNCDVVIGIVNNTVYDPLQPELDSFKEELDKYFKNHTSPDVDLGDISGINASVVNIQKEIDRLNEVAKNLNESLIDLQELGKYEQYIK

SEQ ID NO: 2254 - protein, 1211 aa, Artificial Sequence
  SARS-CoV-2/China/WF0028/2020__EPI_ISL_413791 spike protein (1-1211)(I909C_Y1047C)
MFVFLVLLPLVSSQCVNLTTRTQLPPAYTNSFTRGVYYPDKVFRSSVLHSTQDLFLPFFSNVTWFHAIHVSGTNGTKRFDNPVLPFNDGVYFASTEKSNIIRGWIFGTTLDSKTQSLLIVNNATNVVIKVCEFQFCNDPFLGVYYHKNNKSWMESEFRVYSSANNCTFEYVSQPFLMDLEGKQGNFKNLREFVFKNIDGYFKIYSKHTPINLVRDLPQGFSALEPLVDLPIGINITRFQTLLALHRSYLTPGDSSSGWTAGAAAYYVGYLQPRTFLLKYNENGTITDAVDCALDPLSETKCTLKSFTVEKGIYQTSNFRVQPTESIVRFPNITNLCPFGEVFNATRFASVYAWNRKRISNCVADYSVLYNSASFSTFKCYGVSPTKLNDLCFTNVYADSFVIRGDEVRQIAPGQTGKIADYNYKLPDDFTGCVIAWNSNNLDSKVGGNYNYLYRLFRKSNLKPFERDISTEIYQAGSTPCNGVEGFNCYFPLQSYGFQPTNGVGYQPYRVVVLSFELLHAPATVCGPKKSTNLVKNKCVNFNFNGLTGTGVLTESNKKFLPFQQFGRDIADTTDAVRDPQTLEILDITPCSFGGVSVITPGTNTSNQVAVLYQDVNCTEVPVAIHADQLTPTWRVYSTGSNVFQTRAGCLIGAEHVNNSYECDIPIGAGICASYQTQTNSPRRARSVASQSIIAYTMSLGAENSVAYSNNSIAIPTNFTISVTTEILPVSMTKTSVDCTMYICGDSTECSNLLLQYGSFCTQLNRALTGIAVEQDKNTQEVFAQVKQIYKTPPIKDFGGFNFSQILPDPSKPSKRSFIEDLLFNKVTLADAGFIKQYGDCLGDIAARDLICAQKFNGLTVLPPLLTDEMIAQYTSALLAGTITSGWTFGAGAALQIPFAMQMAYRFNGCGVTQNVLYENQKLIANQFNSAIGKIQDSLSSTASALGKLQDVVNQNAQALNTLVKQLSSNFGAISSVLNDILSRLDKVEAEVQIDRLITGRLQSLQTYVTQQLIRAAEIRASANLAATKMSECVLGQSKRVDFCGKGCHLMSFPQSAPHGVVFLHVTYVPAQEKNFTTAPAICHDGKAHFPREGVFVSNGTHWFVTQRNFYEPQIITTDNTFVSGNCDVVIGIVNNTVYDPLQPELESFKEELDKYFKNHTSPDVDLGDISGINASVVNIQKEIDRLNEVAKNLNESLIDLQELGKYEQYIK

SEQ ID NO: 2255 - protein, 1211 aa, Artificial Sequence
  SARS-CoV-2/2019-nCoV/USA-CruiseA-18/2020__MT159716.1 spike protein (1-1211)(I909C_Y1047C)
MFVFLVLLPLVSSQCVNLTTRTQLPPAYTNSFTRGVYYPDKVFRSSVLHSTQDLFLPFFSNVTWFHAIHVSGTNGTKRFDNPVLPFNDGVYFASTEKSNIIRGWIFGTTLDSKTQSLLIVNNATNVVIKVCEFQFCNDPFLGVYYHKNNKSWMESELRVYSSANNCTFEYVSQPFLMDLEGKQGNFKNLREFVFKNIDGYFKIYSKHTPINLVRDLPQGFSALEPLVDLPIGINITRFQTLLALHRSYLTPGDSSSGWTAGAAAYYVGYLQPRTFLLKYNENGTITDAVDCALDPLSETKCTLKSFTVEKGIYQTSNFRVQPTESIVRFPNITNLCPFGEVFNATRFASVYAWNRKRISNCVADYSVLYNSASFSTFKCYGVSPTKLNDLCFTNVYADSFVIRGDEVRQIAPGQTGKIADYNYKLPDDFTGCVIAWNSNNLDSKVGGNYNYLYRLFRKSNLKPFERDISTEIYQAGSTPCNGVEGFNCYFPLQSYGFQPTNGVGYQPYRVVVLSFELLHAPATVCGPKKSTNLVKNKCVNFNFNGLTGTGVLTESNKKFLPFQQFGRDIADTTDAVRDPQTLEILDITPCSFGGVSVITPGTNTSNQVAVLYQDVNCTEVPVAIHADQLTPTWRVYSTGSNVFQTRAGCLIGAEHVNNSYECDIPIGAGICASYQTQTNSPRRARSVASQSIIAYTMSLGAENSVAYSNNSIAIPTNFTISVTTEILPVSMTKTSVDCTMYICGDSTECSNLLLQYGSFCTQLNRALTGIAVEQDKNTQEVFAQVKQIYKTPPIKDFGGFNFSQILPDPSKPSKRSFIEDLLFNKVTLADAGFIKQYGDCLGDIAARDLICAQKFNGLTVLPPLLTDEMIAQYTSALLAGTITSGWTFGAGAALQIPFAMQMAYRFNGCGVTQNVLYENQKLIANQFNSAIGKIQDSLSSTASALGKLQDVVNQNAQALNTLVKQLSSNFGAISSVLNDILSRLDKVEAEVQIDRLITGRLQSLQTYVTQQLIRAAEIRASANLAATKMSECVLGQSKRVDFCGKGCHLMSFPQSAPHGVVFLHVTYVPAQEKNFTTAPAICHDGKAHFPREGVFVSNGTHWFVTQRNFYEPQIITTDNTFVSGNCDVVIGIVNNTVYDPLQPELDSFKEELDKYFKNHTSPDVDLGDISGINASVVNIQKEIDRLNEVAKNLNESLIDLQELGKYEQYIK

SEQ ID NO: 2256 - protein, 1211 aa, Artificial Sequence
  SARS-CoV-2/SARS-CoV-2/Yunnan-01/human/2020/CHN__MT049951.1 spike protein (1-1211)(I909C_Y1047C)
MFVFLVLLPLVSSQCVNLTTRTQLPPANTNSFTRGVYYPDKVFRSSVLHSTQDLFLPFFSNVTWFHAIHVSGTNGTKRFDNPVLPFNDGVYFASTEKSNIIRGWIFGTTLDSKTQSLLIVNNATNVVIKVCEFQFCNDPFLGVYYHKNNKSWMESEFRVYSSANNCTFEYVSQPFLMDLEGKQGNFKNLREFVFKNIDGYFKIYSKHTPINLVRDLPQGFSALEPLVDLPIGINITRFQTLLALHRSYLTPGDSSSGWTAGAAAYYVGYLQPRTFLLKYNENGTITDAVDCALDPLSETKCTLKSFTVEKGIYQTSNFRVQPTESIVRFPNITNLCPFGEVFNATRFASVYAWNRKRISNCVADYSVLYNSASFSTFKCYGVSPTKLNDLCFTNVYADSFVIRGDEVRQIAPGQTGKIADYNYKLPDDFTGCVIAWNSNNLDSKVGGNYNYLYRLFRKSNLKPFERDISTEIYQAGSTPCNGVEGFNCYFPLQSYGFQPTNGVGYQPYRVVVLSFELLHAPATVCGPKKSTNLVKNKCVNFNFNGLTGTGVLTESNKKFLPFQQFGRDIADTTDAVRDPQTLEILDITPCSFGGVSVITPGTNTSNQVAVLYQDVNCTEVPVAIHADQLTPTWRVYSTGSNVFQTRAGCLIGAEHVNNSYECDIPIGAGICASYQTQTNSPRRARSVASQSIIAYTMSLGAENSVAYSNNSIAIPTNFTISVTTEILPVSMTKTSVDCTMYICGDSTECSNLLLQYGSFCTQLNRALTGIAVEQDKNTQEVFAQVKQIYKTPPIKDFGGFNFSQILPDPSKPSKRSFIEDLLFNKVTLADAGFIKQYGDCLGDIAARDLICAQKFNGLTVLPPLLTDEMIAQYTSALLAGTITSGWTFGAGAALQIPFAMQMAYRFNGCGVTQNVLYENQKLIANQFNSAIGKIQDSLSSTASALGKLQDVVNQNAQALNTLVKQLSSNFGAISSVLNDILSRLDKVEAEVQIDRLITGRLQSLQTYVTQQLIRAAEIRASANLAATKMSECVLGQSKRVDFCGKGCHLMSFPQSAPHGVVFLHVTYVPAQEKNFTTAPAICHDGKAHFPREGVFVSNGTHWFVTQRNFYEPQIITTDNTFVSGNCDVVIGIVNNTVYDPLQPELDSFKEELDKYFKNHTSPDVDLGDISGINASVVNIQKEIDRLNEVAKNLNESLIDLQELGKYEQYIK

SEQ ID NO: 2257 - protein, 1211 aa, Artificial Sequence
  SARS-CoV-2/USA/WA-UW292/2020__EPI_ISL_418077 spike protein (1-1211)(I909C_Y1047C)
MFVFLVLLPLVSSQCVNLTTRTQLPPAYTNSFTRGVYYPDKVFRSSVLHSTQDLFLPFFSNVTWFHAIHVSGTNGTKRFDNPVLPFNDGVYFASTEKSNIIRGWIFGTTLDSKTQSLLIVNNATNVVIKVCEFQFCNDPFLGVYYHKNNKSWMESEFRVYSSANNCTFEYVSQPFLMDLEGKQGNFKNLREFVFKNIDGYFKIYSKHTPINLVRDLPQGFSALEPLVDLPIGINITRFQTLLALHRSYLTPGDSSSGWTAGAAAYYVGYLQPRTFLLKYNENGTITDAVDCALDPLSETKCTLKSFTVEKGIYQTSNFRVQPTESIVRFPNITNLCPFGEVFNATRFASVYAWNRKRISNCVADYSVLYNSASFSTFKCYGVSPTKLNDLCFTNVYADSFVIRGDEVRQIAPGQTGKIADYNYKLPDDFTGCVIAWNSNNLDSKVGGNYNYLYRLFRKSNLKPFERDISTEIYQASSTPCNGVEGFNCYFPLQSYGFQPTNGVGYQPYRVVVLSFELLHAPATVCGPKKSTNLVKNKCVNFNFNGLTGTGVLTESNKKFLPFQQFGRDIADTTDAVRDPQTLEILDITPCSFGGVSVITPGTNTSNQVAVLYQDVNCTEVPVAIHADQLTPTWRVYSTGSNVFQTRAGCLIGAEHVNNSYECDIPIGAGICASYQTQTNSPRRARSVASQSIIAYTMSLGAENSVAYSNNSIAIPTNFTISVTTEILPVSMTKTSVDCTMYICGDSTECSNLLLQYGSFCTQLNRALTGIAVEQDKNTQEVFAQVKQIYKTPPIKDFGGFNFSQILPDPSKPSKRSFIEDLLFNKVTLADAGFIKQYGDCLGDIAARDLICAQKFNGLTVLPPLLTDEMIAQYTSALLAGTITSGWTFGAGAALQIPFAMQMAYRFNGCGVTQNVLYENQKLIANQFNSAIGKIQDSLSSTASALGKLQDVVNQNAQALNTLVKQLSSNFGAISSVLNDILSRLDKVEAEVQIDRLITGRLQSLQTYVTQQLIRAAEIRASANLAATKMSECVLGQSKRVDFCGKGCHLMSFPQSAPHGVVFLHVTYVPAQEKNFTTAPAICHDGKAHFPREGVFVSNGTHWFVTQRNFYEPQIITTDNTFVSGNCDVVIGIVNNTVYDPLQPELDSFKEELDKYFKNHTSPDVDLGDISGINASVVNIQKEIDRLNEVAKNLNESLIDLQELGKYEQYIK

SEQ ID NO: 2258 - protein, 1211 aa, Artificial Sequence
  SARS-CoV-2/Iceland/192/2020__EPI_ISL_417819 spike protein (1-1211)(I909C_Y1047C)
MFVFFVLLPLVSSQCVNLTTRTQLPPAYTNSFTRGVYYPDKVFRSSVLHSTQDLFLPFFSNVTWFHAIHVSGTNGTKRFDNPVLPFNDGVYFASTEKSNIIRGWIFGTTLDSKTQSLLIVNNATNVVIKVCEFQFCNDPFLGVYYHKNNKSWMESEFRVYSSANNCTFEYVSQPFLMDLEGKQGNFKNLREFVFKNIDGYFKIYSKHTPINLVRDLPQGFSALEPLVDLPIGINITRFQTLLALHRSYLTPGDSSSGWTAGAAAYYVGYLQPRTFLLKYNENGTITDAVDCALDPLSETKCTLKSFTVEKGIYQTSNFRVQPTESIVRFPNITNLCPFGEVFNATRFASVYAWNRKRISNCVADYSVLYNSASFSTFKCYGVSPTKLNDLCFTNVYADSFVIRGDEVRQIAPGQTGKIADYNYKLPDDFTGCVIAWNSNNLDSKVGGNYNYLYRLFRKSNLKPFERDISTEIYQAGSTPCNGVEGFNCYFPLQSYGFQPTNGVGYQPYRVVVLSFELLHAPATVCGPKKSTNLVKNKCVNFNFNGLTGTGVLTESNKKFLPFQQFGRDIADTTDAVRDPQTLEILDITPCSFGGVSVITPGTNTSNQVAVLYQGVNCTEVPVAIHADQLTPTWRVYSTGSNVFQTRAGCLIGAEHVNNSYECDIPIGAGICASYQTQTNSPRRARSVASQSIIAYTMSLGAENSVAYSNNSIAIPTNFTISVTTEILPVSMTKTSVDCTMYICGDSTECSNLLLQYGSFCTQLNRALTGIAVEQDKNTQEVFAQVKQIYKTPPIKDFGGFNFSQILPDPSKPSKRSFIEDLLFNKVTLADAGFIKQYGDCLGDIAARDLICAQKFNGLTVLPPLLTDEMIAQYTSALLAGTITSGWTFGAGAALQIPFAMQMAYRFNGCGVTQNVLYENQKLIANQFNSAIGKIQDSLSSTASALGKLQDVVNQNAQALNTLVKQLSSNFGAISSVLNDILSRLDKVEAEVQIDRLITGRLQSLQTYVTQQLIRAAEIRASANLAATKMSECVLGQSKRVDFCGKGCHLMSFPQSAPHGVVFLHVTYVPAQEKNFTTAPAICHDGKAHFPREGVFVSNGTHWFVTQRNFYEPQIITTDNTFVSGNCDVVIGIVNNTVYDPLQPELDSFKEELDKYFKNHTSPDVDLGDISGINASVVNIQKEIDRLNEVAKNLNESLIDLQELGKYEQYIK

SEQ ID NO: 2259 - protein, 1211 aa, Artificial Sequence
  SARS-CoV-2/Belgium/ULG-6939/2020__EPI_ISL_417020 spike protein (1-1211)(I909C_Y1047C)
MFVFLVLLPLVSSQCVNLTTRTQLPPAYTNSFTRGVYYPDKVFRSSVLHSTQDLFLPFFSNVTWFHAIHVSGTNGTKRFDNPVLPFNDGVYFASTEKSNIIRGWIFGTTLDSKTQSLLIVNNATNVVIKVCEFQFCNDPFLGVYYHKNNKSWMESEFRVYSSANNCTFEYVSQPFLMDLEGKQGNFKNLREFVFKNIDGYFKIYSKHTPINLVRDLPQGFSALEPLVDLPIGINITRFQTLLALHRSYLTPGDSSSGWTAGAAAYYVGYLQPRTFLLKYNENGTITDAVDCALDPLSETKCTLKSFTVEKGIYQTSNFRVQPTESIVRFPNITNLCPFGEVFNATRFASVYAWNRKRISNCVADYSVLYNSASFSTFKCYGVSPTKLNDLCFTNVYADSFVIRGDEVRQIAPGQTGKIADYNYKLPDDFTGCVIAWNSNNLDSKVGGNYNYLYRLFRKSNLKPFERDISTEIYQAGSTPCNGVEGFNCYFPLQSYGFQPTNGVGYQPYRVVVLSFELLHAPATVCGPKKSTNLVKNKCVNFNFNGLTGTGVLTESNKKFLPFQQFGRDIADTTDAVRDPQTLEILDITPCSFGGVSVITPGTNTSNQVAVLYQGVNCTEVPVAIHADQLTPTWRVYSTGSNVFQTRAGCLIGAEHVNNSYECDIPIGAGICASYQTQTNSPRRARSVASQSIIAYTMSLGAENSVVYSNNSIAIPTNFTISVTTEILPVSMTKTSVDCTMYICGDSTECSNLLLQYGSFCTQLNRALTGIAVEQDKNTQEVFAQVKQIYKTPPIKDFGGFNFSQILPDPSKPSKRSFIEDLLFNKVTLADAGFIKQYGDCLGDIAARDLICAQKFNGLTVLPPLLTDEMIAQYTSALLAGTITSGWTFGAGAALQIPFAMQMAYRFNGCGVTQNVLYENQKLIANQFNSAIGKIQDSLSSTASALGKLQDVVNQNAQALNTLVKQLSSNFGAISSVLNDILSRLDKVEAEVQIDRLITGRLQSLQTYVTQQLIRAAEIRASANLAATKMSECVLGQSKRVDFCGKGCHLMSFPQSAPHGVVFLHVTYVPAQEKNFTTAPAICHDGKAHFPREGVFVSNGTHWFVTQRNFYEPQIITTDNTFVSGNCDVVIGIVNNTVYDPLQPELDSFKEELDKYFKNHTSPDVDLGDISGINASVVNIQKEIDRLNEVAKNLNESLIDLQELGKYEQYIK

SEQ ID NO: 2260 - protein, 1211 aa, Artificial Sequence
  SARS-CoV-2/France/HF2496/2020__EPI_ISL_418231 spike protein (1-1211)(I909C_Y1047C)
MFVFLVLLPLVSSQCVNLTTRTQLPPAYTNSFTRGVYYPDKVFRSSVLHSTQDLFLPFFSNVTWFHAIHVSGTNGTKRFDNPVLPFNDGVYFASTEKSNIIRGWIFGTTLDSKTQSLLIVNNATNVVIKVCEFQFCNDPFLGVYYHKNNKSWMESEFRVYSSANNCTFEYVSQPFLMDLEGKQGNFKNLREFVFKNIDGYFKIYSKHTPINLVRDLPQGFSALEPLVDLPIGINITRFQTLLALHRSYLTPGDSSSGWTAGAAAYYVGYLQPRTFLLKYNENGTITDAVDCALDPLSETKCTLKSFTVEKGIYQTSNFRVQPTESIVRFPNITNLCPFGEVFNATRFASVYAWNRKRISNCVADYSVLYNSASFSTFKCYGVSPTKLNDLCFTNVYADSFVIRGDEVRQIAPGQTGKIADYNYKLPDDFTGCVIAWNSNNLDSKVGGNYNYLYRLFRKSNLKPFERDISTEIYQAGSTPCNGVEGFNCYFPLQSYGFQPTNGVGYQPYRVVVLSFELLHAPATVCGPKKSTNLVKNKCVNFNFNGLTGTGVLTESNKKFLPFQQFGRDIADTTDAVRDPQTLEILDITPCSFGGVSVITPGTNTSNQVAVLYQGVNCTEVPVAIHADQLTPTWRVYSTGSNVFQTRAGCLIGAEHVNNSYECDIPIGAGICASYQTQTNSPRRARSVASQSIIAYTMSLGAENSVAYSNNSIAIPTNFTISVTTEILPVSMTKTSVDCTMYICGDSTECSNLLLQYGSFCTQLNRALTGIAVEQDKNTQEVFAQVKQIYKTPPIKDFGGFNFSQILPDPSKPSKRSFIEDLLFNKVTLADAGFIKQYGDCLGDIVARDLICAQKFNGLTVLPPLLTDEMIAQYTSALLAGTITSGWTFGAGAALQIPFAMQMAYRFNGCGVTQNVLYENQKLIANQFNSAIGKIQDSLSSTASALGKLQDVVNQNAQALNTLVKQLSSNFGAISSVLNDILSRLDKVEAEVQIDRLITGRLQSLQTYVTQQLIRAAEIRASANLAATKMSECVLGQSKRVDFCGKGCHLMSFPQSAPHGVVFLHVTYVPAQEKNFTTAPAICHDGKAHFPREGVFVSNGTHWFVTQRNFYEPQIITTDNTFVSGNCDVVIGIVNNTVYDPLQPELDSFKEELDKYFKNHTSPDVDLGDISGINASVVNIQKEIDRLNEVAKNLNESLIDLQELGKYEQYIK

SEQ ID NO: 2261 - protein, 1211 aa, Artificial Sequence
  SARS-CoV-2/USA/WA-UW291/2020__EPI_ISL_418076 spike protein (1-1211)(I909C_Y1047C)
MFVFLVLLPLVSSQCVNLTTRTQLPPAYTNSFTRGVYYPDKVFRSSVLHSTQDLFLPFFSNVTWFHAIHVSGTNGTKRFDNPVLPFNDGVYFASTEKSNIIRGWIFGTTLDSKTQSLLIVNNATNVVIKVCEFQFCNDPFLGVYYHKNNKSWMESEFRVYSSANNCTFEYVSQPFLMDLEGKQGNFKNLREFVFKNIDGYFKIYSKHTPINLVRDLPQGFSALEPLVDLPIGINITRFQTLLALHRSYLTPGDSSSGWTAGAAAYYVGYLQPRTFLLKYNENGTITDAVDCALDPLSETKCTLKSFTVEKGIYQTSNFRVQPTESIVRFPNITNLCPFGEVFNATRFASVYAWNRKRISNCVADYSVLYNSASFSTFKCYGVSPTKLNDLCFTNVYADSFVIRGDEVRQIAPGQTGKIADYNYKLPDDFTGCVIAWNSNNLDSKVGGNYNYLYRLFRKSNLKPFERDISTEIYQAGSTPCNGVEGFNCYFPLQSYGFQPTNGVGYQPYRVVVLSFELLHAPATVCGPKKSTNLVKNKCVNFNFNGLTGTGVLTESNKKFLPFQQFGRDIADTTDAVRDPQTLEILDITPCSFGGVSVITPGTNTSNQVAVLYQGVNCTEVPVAIHADQLTPTWRVYSTGSNVFQTRAGCLIGAEHVNNSYECDIPIGAGICASYQTQTNSPRRARSVASQSIIAYTMSLGAENSVAYSNNSIAIPTNFTISVTTEILPVSMTKTSVDCTMYICGDSTECSNLLLQYGSFCTQLNRALTGIAVEQDKNTQEVFAQVKQIYKTPPIKDFGGFNFSQILPDPSKPSKRSFIEDLLFNKVTLADAGFIKQYGDCLGDIAARDLICAQKFNGLTVLPPLLTDEMIAQYTSALLAGTITSGWTFGAGAALQIPFAMQMAYRFNGCGVTQNVLYENQKLIANQFNSAIGKIQYSLSSTASALGKLQDVVNQNAQALNTLVKQLSSNFGAISSVLNDILSRLDKVEAEVQIDRLITGRLQSLQTYVTQQLIRAAEIRASANLAATKMSECVLGQSKRVDFCGKGCHLMSFPQSAPHGVVFLHVTYVPAQEKNFTTAPAICHDGKAHFPREGVFVSNGTHWFVTQRNFYEPQIITTDNTFVSGNCDVVIGIVNNTVYDPLQPELDSFKEELDKYFKNHTSPDVDLGDISGINASVVNIQKEIDRLNEVAKNLNESLIDLQELGKYEQYIK

SEQ ID NO: 2262 - protein, 1211 aa, Artificial Sequence; identical to SEQ ID NO: 2225
  SARS-CoV-2/Portugal/PT0034/2020__EPI_ISL_418019 spike protein (1-1211)(I909C_Y1047C)

SEQ ID NO: 2263 - protein, 1211 aa, Artificial Sequence
  SARS-CoV-2/Iceland/202/2020__EPI_ISL_417750 spike protein (1-1211)(I909C_Y1047C)
MFVFLVLLPLVSSQCVNLTTRTQLPPAYTNSFTRGVYYPDKVFRSSVLHSTQDLFLPFFSNVTWFHAIHVSGTNGTKRFDNPVLPFNDGVYFASTEKSNIIRGWIFGTTLDSKTQSLLIVNNATNVVIKVCEFQFCNDPFLGVYYHKNNKSWMESEFRVYSSANNCTFEYVSQPFLMDLEGKQGNFKNLREFVFKNIDGYFKIYSKHTPINLVRDLPQGFSALEPLVDLPIGINITRFQTLLALHRSYLTPGDSSSGWTAGAAAYYVGYLQPRTFLLKYNENGTITDAVDCALDPLSETKCTLKSFTVEKGIYQTSNFRVQPTESIVRFPNITNLCPFGEVFNATRFASVYAWNRKRISNCVADYSVLYNSASFSTFKCYGVSPTKLNDLCFTNVYADSFVIRGDEVRQIAPGQTGKIADYNYKLPDDFTGCVIAWNSNNLDSKVGGNYNYLYRLFRKSNLKPFERDISTEIYQAGSTPCNGVEGFNCYFPLQSYGFQPTNGVGYQPYRVVVLSFELLHAPATVCGPKKSTNLVKNKCVNFNFNGLTGTGVLTESNKKFLPFQQFGRDIADTTDAVRDPQTLEILDITPCSFGGVSVITPGTNTSNQVAVLYQDVNCTEVPVAIHADQLTPTWRVYSTGSNVFQTRAGCLIGAEHVNNSYECDIPIGAGICASYQTQTNSPRRARSVASQSIIAYTMSLGAENSVAYSNNSIAIPTNFTISVTTEILPVSMTKTSVDCTMYICGDSTECSNLLLQYGSFCTQLNRALTGIAVEQDKNTQEVFAQVKQIYKTPPIKDFGGFNFSQILPDPSKPSKRSFIEDLLFNKVTLADAGFIKQYGDCLGDIAARDLICAQKFNGLTVLPPLLTDEMIAQYTSALLAGTITSGWTFGAGAALQIPFAMQMAYRFNGCGVTQNVLYENQKLIANQFNSAIGKIQDSLSSTASALGKLQDVVNQNAQALNTLVKQLSSNFGAISSVLNDILSRLDKVEAEVQIDRLITGRLQSLQTYVTQQLIRAAEIRASANLAATKMSECVLGQSKRVDFCGKGCHLMSFPQSAPHGVVFLHVTYVPAQEKNFTTAPAICHDGKAHFPREGVFVSNGTHWFVTQRNFYEPQIITTDNTFVSGNCDVVIGIVNNTVYDPLQPELDSFKEELDKYFKNHTSPDVDLGDIPGINASVVNIQKEIDRLNEVAKNLNESLIDLQELGKYEQYIK

SEQ ID NO: 2264 - protein, 1211 aa, Artificial Sequence
  SARS-CoV-2/USA/WA-UW261/2020__EPI_ISL_418046 spike protein (1-1211)(I909C_Y1047C)
MFVFLVLLPLVSSQCVNLTTRTQLPPAYTNSFTRGVYYPDKVFRSSVLHSTQDLFLPFFSNVTWFHAIHVSGTNGTKRFDNPVLPFNDGVYFASTEKSNIIRGWIFGTTLDSKTQSLLIVNNATNVVIKVCEFQFCNDPFLGVYYHKNNKSWMESEFRVYSSANNCTFEYVSQPFLMDLEGKQGNFKNLREFVFKNIDGYFKIYSKHTPINLVRDLPQGFSALEPLVDLPIGINITRFQTLLALHRSYLTPGDSSSGWTAGAAAYYVGYLQPRTFLLKYNENGTITDAVDCALDPLSETKCTLKSFTVEKGIYQTSNFRVQPTESIVRFPNITNLCPFGEVFNATRFTSVYAWNRKRISNCVADYSVLYNSASFSTFKCYGVSPTKLNDLCFTNVYADSFVIRGDEVRQIAPGQTGKIADYNYKLPDDFTGCVIAWNSNNLDSKVGGNYNYLYRLFRKSNLKPFERDISTEIYQAGSTPCNGVEGFNCYFPLQSYGFQPTNGVGYQPYRVVVLSFELLHAPATVCGPKKSTNLVKNKCVNFNFNGLTGTGVLTESNKKFLPFQQFGRDIADTTDAVRDPQTLEILDITPCSFGGVSVITPGTNTSNQVAVLYQDVNCTEVPVAIHADQLTPTWRVYSTGSNVFQTRAGCLIGAEHVNNSYECDIPIGAGICASYQTQTNSPRRARSVASQSIIAYTMSLGAENSVAYSNNSIAIPTNFTISVTTEILPVSMTKTSVDCTMYICGDSTECSNLLLQYGSFCTQLNRALTGIAVEQDKNTQEVFAQVKQIYKTPPIKDFGGFNFSQILPDPSKPSKRSFIEDLLFNKVTLADAGFIKQYGDCLGDIAARDLICAQKFNGLTVLPPLLTDEMIAQYTSALLAGTITSGWTFGAGAALQIPFAMQMAYRFNGCGVTQNVLYENQKLIANQFNSAIGKIQDSLSSTASALGKLQDVVNQNAQALNTLVKQLSSNFGAISSVLNDILSRLDKVEAEVQIDRLITGRLQSLQTYVTQQLIRAAEIRASANLAATKMSECVLGQSKRVDFCGKGCHLMSFPQSAPHGVVFLHVTYVPAQEKNFTTAPAICHDGKAHFPREGVFVSNGTHWFVTQRNFYEPQIITTDNTFVSGNCDVVIGIVNNTVYDPLQPELDSFKEELDKYFKNHTSPDVDLGDISGINASVVNIQKEIDRLNEVAKNLNESLIDLQELGKYEQYIK

SEQ ID NO: 2265 - protein, 1211 aa, Artificial Sequence
  SARS-CoV-2/Portugal/PT0035/2020__EPI_ISL_418020 spike protein (1-1211)(I909C_Y1047C)
MFVFLVLLPLVSSQCVNLTTRTQLPPAYTNSFTRGVYYPDKVFRSSVLHSTQDLFLPFFSNVTWFHAIHVSGTNGTKRFDNPVLPFNDGVYFASTEKSNIIRGWIFGTTLDSKTQSLLIVNNATNVVIKVCEFQFCNDPFLGVYYHKNNKSWMESEFRVYSSANNCTFEYVSQPFLMDLEGKQGNFKNLREFVFKNIDGYFKIYSKHTPINLVRDLPQGFSALEPLVDLPIGINITRFQTLLALHRSYLTPGDSSSGWTAGAAAYYVGYLQPRTFLLKYNENGTITDAVDCALDPLSETKCTLKSFTVEKGIYQTSNFRVQPTESIVRFPNITNLCPFGEVFNATRFASVYAWNRKRISNCVADYSVLYNSASFSTFKCYGVSPTKLNDLCFTNVYADSFVIRGDEVRQIAPGQTGKIADYNYKLPDDFTGCVIAWNSNNLDSKVGGNYNYLYRLFRKSNLKPFERDISTEIYQAGSTPCNGVEGFNCYFPLQSYGFQPTNGVGYQPYRVVVLSFELLHAPATVCGPKKSTNLVKNKCVNFNFNGLTGTGVLTESNKKFLPFQQFGRDIADTTDAVRDPQTLEILDITPCSFGGVSVITPGTNTSNQVAVLYQDVNCTEVPVAIHADQLTPTWRVYSTGSNVFQTRAGCLIGAEHVNNSYECDIPIGAGICASYQTQTNSPRRARSVASQSIIAYTMSLGAENSVAYSNNSIAIPTNFTISVTTEILPVSMTKTSVDCTMYICGDSTECSNLLLQYGSFCTQLNRALTGIAVEQDKNTQEVFAQVKQIYKTPPIKDFGGFNFSQILPDPSKPSKRSFIEDLLFNKVTLADAGFIKQYGDCLGDISARDLICAQKFNGLTVLPPLLTDEMIAQYTSALLAGTITSGWTFGAGAALQIPFAMQMAYRFNGCGVTQNVLYENQKLIANQFNSAIGKIQDSLSSTASALGKLQDVVNQNAQALNTLVKQLSSNFGAISSVLNDILSRLDKVEAEVQIDRLITGRLQSLQTYVTQQLIRAAEIRASANLAATKMSECVLGQSKRVDFCGKGCHLMSFPQSAPHGVVFLHVTYVPAQEKNFTTAPAICHDGKAHFPREGVFVSNGTHWFVTQRNFYEPQIITTDNTFVSGNCDVVIGIVNNTVYDPLQPELDSFKEELDKYFKNHTSPDVDLGDISGINASVVNIQKEIDRLNEVAKNLNESLIDLQELGKYEQYIK

SEQ ID NO: 2266 - protein, 1211 aa, Artificial Sequence
  SARS-CoV-2/USA/NY-NYUMC7/2020__EPI_ISL_418192 spike protein (1-1211)(I909C_Y1047C)
MFVFLVLLPLVSSQCVNLTTRTQLPPAYTNSFTRGVYYPDKVFRSSVLHSTQDLFLPFFSNVTWFHAIHVSGTNGTKRFDNPVLPFNDGVYFASTEKSNIIRGWIFGTTLDSKTQSLLIVNNATNVVIKVCEFQFCNDPFLGVYHHKNNKSWMESEFRVYSSANNCTFEYVSQPFLMDLEGKQGNFKNLREFVFKNIDGYFKIYSKHTPINLVRDLPQGFSALEPLVDLPIGINITRFQTLLALHRSYLTPGDSSSGWTAGAAAYYVGYLQPRTFLLKYNENGTITDAVDCALDPLSETKCTLKSFTVEKGIYQTSNFRVQPTESIVRFPNITNLCPFGEVFNATRFASVYAWNRKRISNCVADYSVLYNSASFSTFKCYGVSPTKLNDLCFTNVYADSFVIRGDEVRQIAPGQTGKIADYNYKLPDDFTGCVIAWNSNNLDSKVGGNYNYLYRLFRKSNLKPFERDISTEIYQAGSTPCNGVEGFNCYFPLQSYGFQPTNGVGYQPYRVVVLSFELLHAPATVCGPKKSTNLVKNKCVNFNFNGLTGTGVLTESNKKFLPFQQFGRDIADTTDAVRDPQTLEILDITPCSFGGVSVITPGTNTSNQVAVLYQGVNCTEVPVAIHADQLTPTWRVYSTGSNVFQTRAGCLIGAEHVNNSYECDIPIGAGICASYQTQTNSPRRARSVASQSIIAYTMSLGAENSVAYSNNSIAIPTNFTISVTTEILPVSMTKTSVDCTMYICGDSTECSNLLLQYGSFCTQLNRALTGIAVEQDKNTQEVFAQVKQIYKTPPIKDFGGFNFSQILPDPSKPSKRSFIEDLLFNKVTLADAGFIKQYGDCLGDIAARDLICAQKFNGLTVLPPLLTDEMIAQYTSALLAGTITSGWTFGAGAALQIPFAMQMAYRFNGCGVTQNVLYENQKLIANQFNSAIGKIQDSLSSTASALGKLQDVVNQNAQALNTLVKQLSSNFGAISSVLNDILSRLDKVEAEVQIDRLITGRLQSLQTYVTQQLIRAAEIRASANLAATKMSECVLGQSKRVDFCGKGCHLMSFPQSAPHGVVFLHVTYVPAQEKNFTTAPAICHDGKAHFPREGVFVSNGTHWFVTQRNFYEPQIITTDNTFVSGNCDVVIGIVNNTVYDPLQPELDSFKEELDKYFKNHTSPDVDLGDISGINASVVNIQKEIDRLNEVAKNLNESLIDLQELGKYEQYIK

SEQ ID NO: 2267 - protein, 1211 aa, Artificial Sequence
  SARS-CoV-2/Iceland/189/2020__EPI_ISL_417709 spike protein (1-1211)(I909C_Y1047C)
MFVFLVLLPLVSSQCVNLTTRTQLPPAYTNSFTRGVYYPDKVFRSSVLHSTQDLFLPFFSNVTWFHAIHVSGTNGTKRFDNPVLPFNDGVYFASTEKSNIIRGWIFGTTLDSKTQSLLIVNNATNVVIKVCEFQFCNDPFLGVYYHKNNKSWMESEFRVYSSANNCTFEYVSQPFLMDLEGKQGNFKNLREFVFKNIDGYFKIYSKHTPINLVRDLPQGFSALEPLVDLPIGINITRFQTLLALHRSYLTPGDSSSGWTAGAAAYYVGYLQPRTFLLKYNENGTITDAVDCALDPLSETKCTLKSFTVEKGIYQTSNFRVQPTESIVRFPNITNLCPFGEVFNATRFASVYAWNRKRISNCVADYSVLYNSASFSTFKCYGVSPTKLNDLCFTNVYADSFVIRGDEVRQIAPGQTGKIADYNYKLPDDFTGCVIAWNSNNLDSKVGGNYNYLYRLFRKSNLKPFERDISTEIYQAGSTPCNGVEGFNCYFPLQSYGFQPTNGVGYQPYRVVVLSFELLHAPATVCGPKKSTNLVKNKCVNFNFNGLTGTGVLTESNKKFLPFQQFGRDIADTTDAVRDPQTLEILDITPCSFGGVSVITPGTNTSNQVAVLYQGVNCTEVPVAIHADQLTPTWRVYSTGSNVFQTRAGCLIGAEHVNNSYECDIPIGAGICASYQTQTNSPRRARSVASQSIIAYTMSLGAENSVAYSNNSIAIPTNFTISVTTEILPVSMTKTSVDCTMYICGDSTECSNLLLQYGSFCTQLNRALTGIAVEQDKNTQEVFAQVKQIYKTPPIKDFGGFNFSQILPDPSKPSKRSFIEDLLFNKVTLADAGFTKQYGDCLGDIAARDLICAQKFNGLTVLPPLLTDEMIAQYTSALLAGTITSGWTFGAGAALQIPFAMQMAYRFNGCGVTQNVLYENQKLIANQFNSAIGKIQDSLSSTASALGKLQDVVNQNAQALNTLVKQLSSNFGAISSVLNDILSRLDKVEAEVQIDRLITGRLQSLQTYVTQQLIRAAEIRASANLAATKMSECVLGQSKRVDFCGKGCHLMSFPQSAPHGVVFLHVTYVPAQEKNFTTAPAICHDGKAHFPREGVFVSNGTHWFVTQRNFYEPQIITTDNTFVSGNCDVVIGIVNNTVYDPLQPELDSFKEELDKYFKNHTSPDVDLGDISGINASVVNIQKEIDRLNEVAKNLNESLIDLQELGKYEQYIK

SEQ ID NO: 2268 - protein, 1211 aa, Artificial Sequence
  SARS-CoV-2/Australia/NSW56/2020__EPI_ISL_417408 spike protein (1-1211)(I909C_Y1047C)
MFVFLVLLPLVSSQCVNLTTRTQLPPAYTNSFTRGVYYPDKVFRSSVLHSTQDLFLPFFSNVTWFHAIHVSGTNGTKRFDNPVLPFNDGVYFASTEKSNIIRGWIFGTTLDSKTQSLLIVNNATNVVIKVCEFQFCNDPFLGVYYHKNNKSWMESEFRVYSSANNCTFEYVSQPFLMDLEGKQGNFKNLREFVFKNIDGYFKIYSKHTPINLVRDLPQGFSALEPLVDLPIGINITRFQTLLALHRSYLTPGDSSSGWTAGAAAYYVGYLQPRTFLLKYNENGTITDAVDCALDPLSETKCTLKSFTVEKGIYQTSNFRVQPTESIVRFPNITNLCPFGEVFNATRFASVYAWNRKRISNCVADYSVLYNSASFSTFKCYGVSPTKLNDLCFTNVYADSFVIRGDEVRQIAPGQTGKIADYNYKLPDDFTGCVIAWNSNNLDSKVGGNYNYLYRLFRKSNLKPFERDISTEIYQAGSTPCNGVEGFNCYFPLQSYGFQPTNGVGYQPYRVVVLSFELLHAPATVCGPKKSTNLVKNKCVNFNFNGLTGTGVLTESNKKFLPFQQFGRDIADTTDAVRDPQTLEILDITPCSFGGVSVITPGTNTSNQVAVLYQDVNCTEVPVAIHADQLTPTWRVYSTGSNVFQTRAGCLIGAEHVNNSYECDIPIGAGICASYQTQTNSPRRARSVASQSIIAYTMSLGAENSVAYSNNSIAIPTNFTISVTTEILPVSMTKTSVDCTMYICGDSTECSNLLLQYGSFCTQLNRALTGIAVEQDKNTQEVFAQVKQIYKTPPIKDFGGFNFSQILPDSSKPSKRSFIEDLLFNKVTLADAGFIKQYGDCLGDIAARDLICAQKFNGLTVLPPLLTDEMIAQYTSALLAGTITSGWTFGAGAALQIPFAMQMAYRFNGCGVTQNVLYENQKLIANQFNSAIGKIQDSLSSTASALGKLQDVVNQNAQALNTLVKQLSSNFGAISSVLNDILSRLDKVEAEVQIDRLITGRLQSLQTYVTQQLIRAAEIRASANLAATKMSECVLGQSKRVDFCGKGCHLMSFPQSAPHGVVFLHVTYVPAQEKNFTTAPAICHDGKAHFPREGVFVSNGTHWFVTQRNFYEPQIITTDNTFVSGNCDVVIGIVNNTVYDPLQPELDSFKEELDKYFKNHTSPDVDLGDISGINASVVNIQKEIDRLNEVAKNLNESLIDLQELGKYEQYIK

SEQ ID NO: 2269 - protein, 1211 aa, Artificial Sequence
  SARS-CoV-2/Iceland/280/2020__EPI_ISL_417608 spike protein (1-1211)(I909C_Y1047C)
MFVFLVLLPLVSSQCVNLTTRTQLPPAYTNSFTRGVYYPDKVFRSSVLHSTQDLFLPFFSNVTWFHAIHVSGTNGTKRFDNPVLPFNDGVYFASTEKSNIIRGWIFGTTLDSKTQSLLIVNNATNVVIKVCEFQFCNDPFLGVYYHKNNKSWMESEFRVYSSANNCTFEYVSQPFLMDLEGKQGNFKNLREFVFKNIDGYFKIYSKHTPINLVRDLPQGFSALEPLVDLPIGINITRFQTLLALHRSYLTPGDSSSGWTAGAAAYYVGYLQPRTFLLKYNENGTITDAVDCALDPLSETKCTLKSFTVEKGIYQTSNFRVQPTESIVRFPNITNLCPFGEVFNATRFASVYAWNRKRISNCVADYSVLYNSASFSTFKCYGVSPTKLNDLCFTNVYADSFVIRGDEVRQIAPGQTGKIADYNYKLPDDFTGCVIAWNSNNLDSKVGGNYNYLYRLFRKSNLKPFERDISTEIYQAGSTPCNGVEGFNCYFPLQSYGFQPTNGVGYQPYRVVVLSFELLHAPATVCGPKKSTNLVKNKCVNFNFNGLTGTGVLTESNKKFLPFQQFGRDIADTTDAVRDPQTLEILDITPCSFGGVSVITPGTNTSNQVAVLYQGVNCTEVPVAIHADQLTPTWRVYSTGSNVFQTRAGCLIGAEHVNNSYECDIPIGAGICASYHTQTNSPRRARSVASQSIIAYTMSLGAENSVAYSNNSIAIPTNFTISVTTEILPVSMTKTSVDCTMYICGDSTECSNLLLQYGSFCTQLNRALTGIAVEQDKNTQEVFAQVKQIYKTPPIKDFGGFNFSQILPDPSKPSKRSFIEDLLFNKVTLADAGFIKQYGDCLGDIAARDLICAQKFNGLTVLPPLLTDEMIAQYTSALLAGTITSGWTFGAGAALQIPFAMQMAYRFNGCGVTQNVLYENQKLIANQFNSAIGKIQDSLSSTASALGKLQDVVNQNAQALNTLVKQLSSNFGAISSVLNDILSRLDKVEAEVQIDRLITGRLQSLQTYVTQQLIRAAEIRASANLAATKMSECVLGQSKRVDFCGKGCHLMSFPQSAPHGVVFLHVTYVPAQEKNFTTAPAICHDGKAHFPREGVFVSNGTHWFVTQRNFYEPQIITTDNTFVSGNCDVVIGIVNNTVYDPLQPELDSFKEELDKYFKNHTSPDVDLGDISGINASVVNIQKEIDRLNEVAKNLNESLIDLQELGKYEQYIK

SEQ ID NO: 2270 - protein, 1211 aa, Artificial Sequence; identical to SEQ ID NO: 2225
  SARS-CoV-2/Iceland/247/2020__EPI_ISL_417575 spike protein (1-1211)(I909C_Y1047C)

SEQ ID NO: 2271 - protein, 1211 aa, Artificial Sequence
  SARS-CoV-2/Iceland/238/2020__EPI_ISL_417566 spike protein (1-1211)(I909C_Y1047C)
MFVFLVLLPLVSSQCVNLTTRTQLPPAYTNSFTRGVYYPDKVFRSSVLHSTQDLFLPFFSNVTWFHAIHVSGTNGTKRFDNPVLPFNDGVYFASTEKSNIIRGWIFGTTLDSKTQSLLIVNNATNVVIKVCEFQFCNDPFLGVYYHKNNKSWMESEFRVYSSANNCTFEYVSQPFLMDLEGKQGNFKNLREFVFKNIDGYFKIYSKHTPINLVRDLPQGFSALEPLVDLPIGINITRFQTLLALHRSYLTPGDSSSGWTAGAAAYYVGYLQPRTFLLKYNENGTITDAVDCALDPLSETKCTLKSFTVEKGIYQTSNFRVQPTESIVRFPNITNLCPFGEVFNATRFASVYAWNRKRISNCVADYSVLYNSASFSTFKCYGVSPTKLNDLCFTNVYADSFVIRGDEVRQIAPGQTGKIADYNYKLPDDFTGCVIAWNSNNLDSKVGGNYNYLYRLFRKSNLKPFERDISTEIYQAGSTPCNGVEGFNCYFPLQSYGFQPTNGVGYQPYRVVVLSFELLHAPATVCGPKKSTNLVKNKCVNFNFNGLTGTGVLTESNKKFLPFQQFGRDIADTTDAVRDPQTLEILDITPCSFGGVSVITPGTNTSNQVAVLYQGVNCTEVPVAIHADQLTPTWRVYSTGSNVFQTRAGCLIGAEHVNNSYECDIPIGAGICASYQTQTNSPRRARSVASQSIIAYTMSLGAENSVAYSNNSIAIPTNFTISVTTEILPVSMTKTSVDCTMYICGDSTECSNLLLQYGSFCTQLNRALTGIAVEQDKNTQEVFAQVKQIYKTPPIKDFGGFNFSQILPDPSKPSKRSFIEDLLFNKVTLADVGFIKQYGDCLGDIAARDLICAQKFNGLTVLPPLLTDEMIAQYTSALLAGTITSGWTFGAGAALQIPFAMQMAYRFNGCGVTQNVLYENQKLIANQFNSAIGKIQDSLSSTASALGKLQDVVNQNAQALNTLVKQLSSNFGAISSVLNDILSRLDKVEAEVQIDRLITGRLQSLQTYVTQQLIRAAEIRASANLAATKMSECVLGQSKRVDFCGKGCHLMSFPQSAPHGVVFLHVTYVPAQEKNFTTAPAICHDGKAHFPREGVFVSNGTHWFVTQRNFYEPQIITTDNTFVSGNCDVVIGIVNNTVYDPLQPELDSFKEELDKYFKNHTSPDVDLGDISGINASVVNIQKEIDRLNEVAKNLNESLIDLQELGKYEQYIK

SEQ ID NO: 2272 - protein, 1211 aa, Artificial Sequence
  SARS-CoV-2/Greece/16/2020__EPI_ISL_418265 spike protein (1-1211)(I909C_Y1047C)
MFVFLVLLPLVSSQCVNLTTRTQLPPAYTNSFTRGVYYPDKVFRSSVLHSTQDLFLPFFSNVTWFHAIHVSGTNGTKRFDNPVLPFNDGVYFASTEKSNIIRGWIFGTTLDSKTQSLLIVNNATNVVIKVCEFQFCNDPFLGVYYHKNNKSWMESEFRVYSSANNCTFEYVSQPFLMDLEGKQGNFKNLREFVFKNVDGYFKIYSKHTPINLVRDLPQGFSALEPLVDLPIGINITRFQTLLALHRSYLTPGDSSSGWTAGAAAYYVGYLQPRTFLLKYNENGTITDAVDCALDPLSETKCTLKSFTVEKGIYQTSNFRVQPTESIVRFPNITNLCPFGEVFNATRFASVYAWNRKRISNCVADYSVLYNSASFSTFKCYGVSPTKLNDLCFTNVYADSFVIRGDEVRQIAPGQTGKIADYNYKLPDDFTGCVIAWNSNNLDSKVGGNYNYLYRLFRKSNLKPFERDISTEIYQAGSTPCNGVEGFNCYFPLQSYGFQPTNGVGYQPYRVVVLSFELLHAPATVCGPKKSTNLVKNKCVNFNFNGLTGTGVLTESNKKFLPFQQFGRDIADTTDAVRDPQTLEILDITPCSFGGVSVITPGTNTSNQVAVLYQDVNCTEVPVAIHADQLTPTWRVYSTGSNVFQTRAGCLIGAEHVNNSYECDIPIGAGICASYQTQTNSPRRARSVASQSIIAYTMSLGAENSVAYSNNSIAIPTNFTISVTTEILPVSMTKTSVDCTMYICGDSTECSNLLLQYGSFCTQLNRALTGIAVEQDKNTQEVFAQVKQIYKTPPIKDFGGFNFSQILPDPSKPSKRSFIEDLLFNKVTLADAGFIKQYGDCLGDIAARDLICAQKFNGLTVLPPLLTDEMIAQYTSALLAGTITSGWTFGAGAALQIPFAMQMAYRFNGCGVTQNVLYENQKLIANQFNSAIGKIQDSLSSTASALGKLQDVVNQNAQALNTLVKQLSSNFGAISSVLNDILSRLDKVEAEVQIDRLITGRLQSLQTYVTQQLIRAAEIRASANLAATKMSECVLGQSKRVDFCGKGCHLMSFPQSAPHGVVFLHVTYVPAQEKNFTTAPAICHDGKAHFPREGVFVSNGTHWFVTQRNFYEPQIITTDNTFVSGNCDVVIGIVNNTVYDPLQPELDSFKEELDKYFKNHTSPDVDLGDISGINASVVNIQKEIDRLNEVAKNLNESLIDLQELGKYEQYIK

SEQ ID NO: 2273 - protein, 1211 aa, Artificial Sequence
  SARS-CoV-2/Iceland/319/2020__EPI_ISL_417648 spike protein (1-1211)(I909C_Y1047C)
MFVFLVLLPLVSSQCVNLTTRTQLPPAYTNSFTRGVYYPDKVFRSSVLHSTQDLFLPFFSNVTWFHAIHVSGTNGTKRFDNPVLPFNDGVYFASTEKSNIIRGWIFGTTLDSKTQSLLIVNNATNVVIKVCEFQFCNDPFLGVYYHKNNKSWMESEFRVYSSANNCTFEYVSQPFLIDLEGKQGNFKNLREFVFKNIDGYFKIYSKHTPINLVRDLPQGFSALEPLVDLPIGINITRFQTLLALHRSYLTPGDSSSGWTAGAAAYYVGYLQPRTFLLKYNENGTITDAVDCALDPLSETKCTLKSFTVEKGIYQTSNFRVQPTESIVRFPNITNLCPFGEVFNATRFASVYAWNRKRISNCVADYSVLYNSASFSTFKCYGVSPTKLNDLCFTNVYADSFVIRGDEVRQIAPGQTGKIADYNYKLPDDFTGCVIAWNSNNLDSKVGGNYNYLYRLFRKSNLKPFERDISTEIYQAGSTPCNGVEGFNCYFPLQSYGFQPTNGVGYQPYRVVVLSFELLHAPATVCGPKKSTNLVKNKCVNFNFNGLTGTGVLTESNKKFLPFQQFGRDIADTTDAVRDPQTLEILDITPCSFGGVSVITPGTNTSNQVAVLYQGVNCTEVPVAIHADQLTPTWRVYSTGSNVFQTRAGCLIGAEHVNNSYECDIPIGAGICASYQTQTNSPRRARSVASQSIIAYTMSLGAENSVAYSNNSIAIPTNFTISVTTEILPVSMTKTSVDCTMYICGDSTECSNLLLQYGSFCTQLNRALTGIAVEQDKNTQEVFAQVKQIYKTPPIKDFGGFNFSQILPDPSKPSKRSFIEDLLFNKVTLADAGFIKQYGDCLGDIAARDLICAQKFNGLTVLPPLLTDEMIAQYTSALLAGTITSGWTFGAGAALQIPFAMQMAYRFNGCGVTQNVLYENQKLIANQFNSAIGKIQDSLSSTASALGKLQDVVNQNAQALNTLVKQLSSNFGAISSVLNDILSRLDKVEAEVQIDRLITGRLQSLQTYVTQQLIRAAEIRASANLAATKMSECVLGQSKRVDFCGKGCHLMSFPQSAPHGVVFLHVTYVPAQEKNFTTAPAICHDGKAHFPREGVFVSNGTHWFVTQRNFYEPQIITTDNTFVSGNCDVVIGIVNNTVYDPLQPELDSFKEELDKYFKNHTSPDVDLGDISGINASVVNIQKEIDRLNEVAKNLNESLIDLQELGKYEQYIK

SEQ ID NO: 2274 - protein, 1211 aa, Artificial Sequence
  SARS-CoV-2/Congo/94/2020__EPI_ISL_417947 spike protein (1-1211)(I909C_Y1047C)
MFVFLVLLPLVSSQCVNLTTRTQLPPAYTNSFTRGVYYPDKVFRSSVLHSTQDLFLPFFSNVTWFHAIHVSGTNGTKRFDNPVLPFNDGVYFASTEKSNIIRGWIFGTTLDSKTQSLLIVNNATNVVIKVCEFQFCNDPFLGVYYHKNNKSWMESEFRVYSSANNCTFEYVSQPFLMDLEGKQGNFKNLREFVFKNIDGYFKIYSKHTPINLVRDLPQGFSALEPLVDLPIGINITRFQTLLALHRSYLTPGDSSSGWTAGAAAYYVGYLQPRTFLLKYNENGTITDAVDCALDPLSETKCTLKSFTVEKGIYQTSNFRVQPTESIVRFPNITNLCPFGEVFNATRFASVYAWNRKRISNCVADYSVLYNSASFSTFKCYGVSPTKLNDLCFTNVYADSFVIRGDEVRQIAPGQTGKIADYNYKLPDDFTGCVIAWNSNNLDSKVGGNYNYLYRLFRKSNLKPFERDISTEIYQAGSTPCNGVEGFNCYFPLQSYGFQPTNGVGYQPYRVVVLSFELLHAPATVCGPKKSTNLVKNKCVNFNFNGLTGTGVLTESNKKFLPFQQFGRDIADTTDAVRDPQTLEILDITPCSFGGVSVITPGTNTSNQVAVLYQGVNCTEVPVAIHADQLTPTWRVYSTGSNVFQTRAGCLIGAEHVNNSYECDIPIGAGICASYQTQTNSPRRARSVASQSIIAYTMSLGAENSVAYSNNSIAIPTNFTISVTTEILPVSMTKTSVDCTMYICGDSTECSNLLLQYGSFCTQLNRALTGIAVEQDKNTQEVFAQVKQIYKTPPIKDFGGFNFSQILPDPSKPSKRSFIEDILFNKVTLADAGFIKQYGDCLGDIAARDLICAQKFNGLTVLPPLLTDEMIAQYTSALLAGTITSGWTFGAGAALQIPFAMQMAYRFNGCGVTQNVLYENQKLIANQFNSAIGKIQDSLSSTASALGKLQDVVNQNAQALNTLVKQLSSNFGAISSVLNDILSRLDKVEAEVQIDRLITGRLQSLQTYVTQQLIRAAEIRASANLAATKMSECVLGQSKRVDFCGKGCHLMSFPQSAPHGVVFLHVTYVPAQEKNFTTAPAICHDGKAHFPREGVFVSNGTHWFVTQRNFYEPQIITTDNTFVSGNCDVVIGIVNNTVYDPLQPELDSFKEELDKYFKNHTSPDVDLGDISGINASVVNIQKEIDRLNEVAKNLNESLIDLQELGKYEQYIK

SEQ ID NO: 2275 - protein, 1211 aa, Artificial Sequence
  SARS-CoV-2/Congo/158/2020__EPI_ISL_417950 spike protein (1-1211)(I909C_Y1047C)
MFVFLVLLPLVSSQCVNLTTRTQLPPAYTNSFTRGVYYPDKVFRSSVLHSTQDLFLPFFSNVTWFHAIHVSGTNGTKRFDNPVLPFNDGVYFASTEKSNIIRGWIFGTTLDSKTQSLLIVNNATNVVIKVCEFQFCNDPFLGVYYHKNNKSWMESEFRVYSSANNCTFEYVSQPFLMDLEGKQGNFKNLREFVFKNIDGYFKIYSKHTPINLVRDLPQGFSALEPLVDLPIGINITRFQTLLALHRSYLTPGDSSSGWTAGAAAYYVGYLQPRTFLLKYNENGTITDAVDCALDPLSETKCTLKSFTVEKGIYQTSNFRVQPTESIVRFPNITNLCPFGEVFNATRFASVYAWNRKRISNCVADYSVLYNSASFSTFKCYGVSPTKLNDLCFTNVYADSFVIRGDEVRQIAPGQTGKIADYNYKLPDDFTGCVIAWNSNNLDSKVGGNYNYLYRLFRKSNLKPFERDISTEIYQAGSTPCNGVEGFNCYFPLQSYGFQPTNGVGYQPYRVVVLSFELLHAPATVCGPKKSTNLVKNKCVNFNFNGLTGTGVLTESNKKFLPFQQFGRDIADTTDAVRDPQTLEILDITPCSFGGVSVITPGTNTSNQVAVLYQDVNCTEVPVAIHADQLTPTWRVYSTGSNVFQTRAGCLIGAEHVNNSYECDIPIGAGICASYQTQTNSPRRARSVASQSIIAYTMSLGAENSVAYSNNSIAIPTNFTISVTTEILPVSMTKTSVDCTMYICGDSTECSNLLLQYGSFCTQLNRALTGIAVEQDKNTQEVFAQVKQIYKTPPIKDFGGFNFSQILPDPSKPSKRSFIEDLLFNKVTLADAGFIKQYGDCLGDIAARDLICAQKFNGLTVLPPLLTDEMIAQYTSALLAGTITSGWTFGAGAALQIPFAMQMAYRFNGCGVTQNVLYENQKLIANQFNSAIGKIQDSLSSTASALGKLQDVVNQNAQALNTLVKQLSSNFGAISSVLNDILSRLDKVEAEVQIDRLITGRLQSLQTYVTQQLIRAAEIRASANLAATKMSECVLGQSKRVDFCGKGCHLMSFPQSAPHGVVFLHVTYVPAQEKNFTTAPAICHDGKAHFPREGVFVSNGTHWFVTQRNFYEPQIITTDNTFLSGNCDVVIGIVNNTVYDPLQPELDSFKEELDKYFKNHTSPDVDLGDISGINASVVNIQKEIDRLNEVAKNLNESLIDLQELGKYEQYIK

SEQ ID NO: 2276 - protein, 1211 aa, Artificial Sequence
  SARS-CoV-2/USA/UT-00034/2020__EPI_ISL_417977 spike protein (1-1211)(I909C_Y1047C)
MFVFLVLLPLVSSQCVNLTTRTQLPPAYTNSFTRGVYYPDKVFRSSVLHSTQDLFLPFFSNVTWFHAIHVSGTNGTKRFDNPVLPFNDGVYFASTEKSNIIRGWIFGTTLDSKTQSLLIVNNATNVVIKVCEFQFCNDPFLGVYYYKNNKSWMESEFRVYSSANNCTFEYVSQPFLMDLEGKQGNFKNLREFVFKNIDGYFKIYSKHTPINLVRDLPQGFSALEPLVDLPIGINITRFQTLLALHRSYLTPGDSSSGWTAGAAAYYVGYLQPRTFLLKYNENGTITDAVDCALDPLSETKCTLKSFTVEKGIYQTSNFRVQPTESIVRFPNITNLCPFGEVFNATRFASVYAWNRKRISNCVADYSVLYNSASFSTFKCYGVSPTKLNDLCFTNVYADSFVIRGDEVRQIAPGQTGKIADYNYKLPDDFTGCVIAWNSNNLDSKVGGNYNYLYRLFRKSNLKPFERDISTEIYQAGSTPCNGVEGFNCYFPLQSYGFQPTNGVGYQPYRVVVLSFELLHAPATVCGPKKSTNLVKNKCVNFNFNGLTGTGVLTESNKKFLPFQQFGRDIADTTDAVRDPQTLEILDITPCSFGGVSVITPGTNTSNQVAVLYQGVNCTEVPVAIHADQLTPTWRVYSTGSNVFQTRAGCLIGAEHVNNSYECDIPIGAGICASYQTQTNSPRRARSVASQSIIAYTMSLGAENSVAYSNNSIAIPTNFTISVTTEILPVSMTKTSVDCTMYICGDSTECSNLLLQYGSFCTQLNRALTGIAVEQDKNTQEVFAQVKQIYKTPPIKDFGGFNFSQILPDPSKPSKRSFIEDLLFNKVTLADAGFIKQYGDCLGDIAARDLICAQKFNGLTVLPPLLTDEMIAQYTSALLAGTITSGWTFGAGAALQIPFAMQMAYRFNGCGVTQNVLYENQKLIANQFNSAIGKIQDSLSSTASALGKLQDVVNQNAQALNTLVKQLSSNFGAISSVLNDILSRLDKVEAEVQIDRLITGRLQSLQTYVTQQLIRAAEIRASANLAATKMSECVLGQSKRVDFCGKGCHLMSFPQSAPHGVVFLHVTYVPAQEKNFTTAPAICHDGKAHFPREGVFVSNGTHWFVTQRNFYEPQIITTDNTFVSGNCDVVIGIVNNTVYDPLQPELDSFKEELDKYFKNHTSPDVDLGDISGINASVVNIQKEIDRLNEVAKNLNESLIDLQELGKYEQYIK

SEQ ID NO: 2277 - protein, 1211 aa, Artificial Sequence
  SARS-CoV-2/USA/UT-00033/2020__EPI_ISL_417976 spike protein (1-1211)(I909C_Y1047C)
MFVFLVLLPLVSSQCVNLTTRTQLPPAYTNSFTRGVYYPDKVFRSSVLHSTQDLFLPFFSNVTWFHAIHVSGTNGTKRFDNPVLPFNDGVYFASTEKSNIIRGWIFGTTLDSKTQSLLIVNNATNVVIKVCEFQFCNDPFLGVYYHKNNKSWMESEFRVYSSANNCTFEYVSQPFLMDLEGKQGNFKNLREFVFKNIDGYFKIYSKHTPINLVRDLPQGFSALEPLVDLPIGINITRFQTLLALHRSYLTPGDSSSGLTAGAAAYYVGYLQPRTFLLKYNENGTITDAVDCALDPLSETKCTLKSFTVEKGIYQTSNFRVQPTESIVRFPNITNLCPFGEVFNATRFASVYAWNRKRISNCVADYSVLYNSASFSTFKCYGVSPTKLNDLCFTNVYADSFVIRGDEVRQIAPGQTGKIADYNYKLPDDFTGCVIAWNSNNLDSKVGGNYNYLYRLFRKSNLKPFERDISTEIYQAGSTPCNGVEGFNCYFPLQSYGFQPTNGVGYQPYRVVVLSFELLHAPATVCGPKKSTNLVKNKCVNFNFNGLTGTGVLTESNKKFLPFQQFGRDIADTTDAVRDPQTLEILDITPCSFGGVSVITPGTNTSNQVAVLYQGVNCTEVPVAIHADQLTPTWRVYSTGSNVFQTRAGCLIGAEHVNNSYECDIPIGAGICASYQTQTNSPRRARSVASQSIIAYTMSLGAENSVAYSNNSIAIPTNFTISVTTEILPVSMTKTSVDCTMYICGDSTECSNLLLQYGSFCTQLNRALTGIAVEQDKNTQEVFAQVKQIYKTPPIKDFGGFNFSQILPDPSKPSKRSFIEDLLFNKVTLADAGFIKQYGDCLGDIAARDLICAQKFNGLTVLPPLLTDEMIAQYTSALLAGTITSGWTFGAGAALQIPFAMQMAYRFNGCGVTQNVLYENQKLIANQFNSAIGKIQDSLSSTASALGKLQDVVNQNAQALNTLVKQLSSNFGAISSVLNDILSRLDKVEAEVQIDRLITGRLQSLQTYVTQQLIRAAEIRASANLAATKMSECVLGQSKRVDFCGKGCHLMSFPQSAPHGVVFLHVTYVPAQEKNFTTAPAICHDGKAHFPREGVFVSNGTHWFVTQRNFYEPQIITTDNTFVSGNCDVVIGIVNNTVYDPLQPELDSFKEELDKYFKNHTSPDVDLGDISGINASVVNIQKEIDRLNEVAKNLNESLIDLQELGKYEQYIK

SEQ ID NO: 2278 - protein, 1211 aa, Artificial Sequence
  SARS-CoV-2/USA/WI-13/2020__EPI_ISL_417516 spike protein (1-1211)(I909C_Y1047C)
MFVFLVLLPLVSSQCVNLTTRTQLPPAYTNSFTRGVYYPDKVFRSSVLHSTQDLFLPFFSNVTWFHAIHVSGTNGTKRFDNPVLPFNDGVYFASTEKSNIIRGWIFGTTLDSKTQSLLIVNNATNVVIKVCEFQFCNDPFLGVYYHKNNKSWMESEFRVYSSANNCTFEYVSQPFLMDLEGKQGNFKNLREFVFKNIDGYFKIYSKHTPINLVRDLPQGFSALEPLVDLPIGINITRFQTLLALHRSYLTPGDSSSGWTAGAAAYYVGYLQPRTFLLKYNENGTITDAVDCALDPLSETKCTLKSFTVEKGIYQTSNFRVLPTESIVRFPNITNLCPFGEVFNATRFASVYAWNRKRISNCVADYSVLYNSASFSTFKCYGVSPTKLNDLCFTNVYADSFVIRGDEVRQIAPGQTGKIADYNYKLPDDFTGCVIAWNSNNLDSKVGGNYNYLYRLFRKSNLKPFERDISTEIYQAGSTPCNGVEGFNCYFPLQSYGFQPTNGVGYQPYRVVVLSFELLHAPATVCGPKKSTNLVKNKCVNFNFNGLTGTGVLTESNKKFLPFQQFGRDIADTTDAVRDPQTLEILDITPCSFGGVSVITPGTNTSNQVAVLYQGVNCTEVPVAIHADQLTPTWRVYSTGSNVFQTRAGCLIGAEHVNNSYECDIPIGAGICASYQTQTNSPRRARSVASQSIIAYTMSLGAENSVAYSNNSIAIPTNFTISVTTEILPVSMTKTSVDCTMYICGDSTECSNLLLQYGSFCTQLNRALTGIAVEQDKNTQEVFAQVKQIYKTPPIKDFGGFNFSQILPDPSKPSKRSFIEDLLFNKVTLADAGFIKQYGDCLGDIAARDLICAQKFNGLTVLPPLLTDEMIAQYTSALLAGTITSGWTFGAGAALQIPFAMQMAYRFNGCGVTQNVLYENQKLIANQFNSAIGKIQDSLSSTASALGKLQDVVNQNAQALNTLVKQLSSNFGAISSVLNDILSRLDKVEAEVQIDRLITGRLQSLQTYVTQQLIRAAEIRASANLAATKMSECVLGQSKRVDFCGKGCHLMSFPQSAPHGVVFLHVTYVPAQEKNFTTAPAICHDGKAHFPREGVFVSNGTHWFVTQRNFYEPQIITTDNTFVSGNCDVVIGIVNNTVYDPLQPELDSFKEELDKYFKNHTSPDVDLGDISGINASVVNIQKEIDRLNEVAKNLNESLIDLQELGKYEQYIK

SEQ ID NO: 2279 - protein, 1210 aa, Artificial Sequence
  SARS-CoV-2/India/1-27/2020__EPI_ISL_413522 spike protein (1-1210)(I908C_Y1046C)
MFVFLVLLPLVSSQCVNLTTRTQLPPAYTNSFTRGVYYPDKVFRSSVLHSTQDLFLPFFSNVTWFHAIHVSGTNGTKRFDNPVLPFNDGVYFASTEKSNIIRGWIFGTTLDSKTQSLLIVNNATNVVIKVCEFQFCNDPFLGVYHKNNKSWMESEFRVYSSANNCTFEYVSQPFLMDLEGKQGNFKNLREFVFKNIDGYFKIYSKHTPINLVRDLPQGFSALEPLVDLPIGINITRFQTLLALHRSYLTPGDSSSGWTAGAAAYYVGYLQPRTFLLKYNENGTITDAVDCALDPLSETKCTLKSFTVEKGIYQTSNFRVQPTESIVRFPNITNLCPFGEVFNATRFASVYAWNRKRISNCVADYSVLYNSASFSTFKCYGVSPTKLNDLCFTNVYADSFVIRGDEVIQIAPGQTGKIADYNYKLPDDFTGCVIAWNSNNLDSKVGGNYNYLYRLFRKSNLKPFERDISTEIYQAGSTPCNGVEGFNCYFPLQSYGFQPTNGVGYQPYRVVVLSFELLHAPATVCGPKKSTNLVKNKCVNFNFNGLTGTGVLTESNKKFLPFQQFGRDIADTTDAVRDPQTLEILDITPCSFGGVSVITPGTNTSNQVAVLYQDVNCTEVPVAIHADQLTPTWRVYSTGSNVFQTRAGCLIGAEHVNNSYECDIPIGAGICASYQTQTNSPRRARSVASQSIIAYTMSLGAENSVAYSNNSIAIPTNFTISVTTEILPVSMTKTSVDCTMYICGDSTECSNLLLQYGSFCTQLNRALTGIAVEQDKNTQEVFAQVKQIYKTPPIKDFGGFNFSQILPDPSKPSKRSFIEDLLFNKVTLADAGFIKQYGDCLGDIAARDLICAQKFNGLTVLPPLLTDEMIAQYTSALLAGTITSGWTFGAGAALQIPFAMQMAYRFNGCGVTQNVLYENQKLIANQFNSAIGKIQDSLSSTASALGKLQDVVNQNAQALNTLVKQLSSNFGAISSVLNDILSRLDKVEAEVQIDRLITGRLQSLQTYVTQQLIRAAEIRASANLAATKMSECVLGQSKRVDFCGKGCHLMSFPQSAPHGVVFLHVTYVPAQEKNFTTAPAICHDGKAHFPREGVFVSNGTHWFVTQRNFYEPQIITTDNTFVSGNCDVVIGIVNNTVYDPLQPELDSFKEELDKYFKNHTSPDVDLGDISGINASVVNIQKEIDRLNEVAKNLNESLIDLQELGKYEQYIK

SEQ ID NO: 2280 - protein, 1205 aa, Artificial Sequence
  SARS-CoV-2/pangolin/Guangxi/P4L/2017__EPI_ISL_410538 spike protein (1-1205)(I903C_Y1041C)
MFVFLFVLPLVSSQCVNLTTRTGIPPGYTNSSTRGVYYPDKVFRSSILHLTQDLFLPFFSNVTWFNTINYQGGFKKFDNPVLPFNDGVYFASTEKSNIIRGWIFGTTLDARTQSLLIVNNATNVVIKVCEFQFCTDPFLGVYYHNNNKTWVENEFRVYSSANNCTFEYISQPFLMDLEGKQGNFKNLREFVFKNVDGYFKIYSKHTPIDLVRDLPRGFAALEPLVDLPIGINITRFQTLLALHRSYLTPGNLESGWTTGAAAYYVGYLQQRTFLLSYNQNGTITDAVDCSLDPLSETKCTLKSLTVEKGIYQTSNFRVQPTISIVRFPNITNLCPFGEVFNASKFASVYAWNRKRISNCVADYSVLYNSTSFSTFKCYGVSPTKLNDLCFTNVYADSFVVKGDEVRQIAPGQTGVIADYNYKLPDDFTGCVIAWNSVKQDALTGGNYGYLYRLFRKSKLKPFERDISTEIYQAGSTPCNGQVGLNCYYPLERYGFHPTTGVNYQPFRVVVLSFELLNGPATVCGPKLSTTLVKDKCVNFNFNGLTGTGVLTTSKKQFLPFQQFGRDISDTTDAVRDPQTLEILDITPCSFGGVSVITPGTNTSNQVAVLYQDVNCTEVPMAIHAEQLTPAWRVYSAGANVFQTRAGCLVGAEHVNNSYECDIPVGAGICASYHSMSSLRSVNQRSIIAYTMSLGAENSVAYSNNSIAIPTNFTISVTTEILPVSMTKTSVDCTMYICGDSIECSNLLLQYGSFCTQLNRALTGIAVEQDKNTQEVFAQVKQIYKTPPIKDFGGFNFSQILPDPSKPSKRSFIEDLLFNKVTLADAGFIKQYGDCLGDIAARDLICAQKFNGLTVLPPLLTDEMIAQYTSALLAGTITSGWTFGAGAALQIPFAMQMAYRFNGCGVTQNVLYENQKLIANQFNSAIGKIQDSLSSTASALGKLQDVVNQNAQALNTLVKQLSSNFGAISSVLNDILSRLDKVEAEVQIDRLITGRLQSLQTYVTQQLIRAAEIRASANLAATKMSECVLGQSKRVDFCGKGCHLMSFPQSAPHGVVFLHVTYVPAQEKNFTTAPAICHEGKAHFPREGVFVSNGTHWFITQRNFYEPQIITTDNTFVSGSCDVVIGIVNNTVYDPLQPELDSFKEELDKYFKNHTSPDVDLGDISGINASVVNIQKEIDRLNEVAKNLNESPIDLQELGKYEQYIK

SEQ ID NO: 2281 - protein, 1205 aa, Artificial Sequence
  SARS-CoV-2/pangolin/Guangxi/P5L/2017__EPI_ISL_410540 spike protein (1-1205)(I903C_Y1041C)
MFVFLFVLPLVSSQCVNLTTRTGIPPGYTNSSTRGVYYPDKVFRSSILHLTQDLFLPFFSNVTWFNTINYQGGFKKFDNPVLPFNDGVYFASTEKSNIIRGWIFGTTLDARTQSLLIVNNATNVVIKVCEFQFCTDPFLGVYYHNNNKTWVENEFRVYSSANNCTFEYISQPFLMDLEGKQGNFKNLREFVFKNVDGYFKIYSKHTPIDLVRDLPRGFAALEPLVDLPIGINITRFQTLLALHRSYLTPGKLESGWTTGAAAYYVGYLQQRTFLLSYNQNGTITDAVDCSLDPLSETKCTLKSLTVEKGIYQTSNFRVQPTISIVRFPNITNLCPFGEVFNASKFASVYAWNRKRISNCVADYSVLYNSTSFSTFKCYGVSPTKLNDLCFTNVYADSFVVKGDEVRQIAPGQTGVIADYNYKLPDDFTGCVIAWNSVKQDALTGGNYGYLYRLFRKSKLKPFERDISTEIYQAGSTPCNGQVGLNCYYPLERYGFHPTTGVNYQPFRVVVLSFELLNGPATVCGPKLSTTLVKDKCVNFNFNGLTGTGVLTTSKKQFLPFQQFGRDISDTTDAVRDPQTLEILDITPCSFGGVSVITPGTNTSNQVAVLYQDVNCTEVPMAIHAEQLTPAWRVYSAGANVFQTRAGCLVGAEHVNNSYECDIPVGAGICASYHSMSSFRSVNQRSIIAYTMSLGAENSVAYSNNSIAIPTNFTISVTTEILPVSMTKTSVDCTMYICGDSIECSNLLLQYGSFCTQLNRALTGIAVEQDKNTQEVFAQVKQIYKTPPIKDFGGFNFSQILPDPSKPSKRSFIEDLLFNKVTLADAGFIKQYGDCLGDIAARDLICAQKFNGLTVLPPLLTDEMIAQYTSALLAGTITSGWTFGAGAALQIPFAMQMAYRFNGCGVTQNVLYENQKLIANQFNSAIGKIQDSLSSTASALGKLQDVVNQNAQALNTLVKQLSSNFGAISSVLNDILSRLDKVEAEVQIDRLITGRLQSLQTYVTQQLIRAAEIRASANLAATKMSECVLGQSKRVDFCGKGCHLMSFPQSAPHGVVFLHVTYVPAQEKNFTTAPAICHEGKAHFPREGVFVSNGTHWFITQRNFYEPQIITTDNTFVSGSCDVVIGIVNNTVYDPLQPELDSFKEELDKYFKNHTSPDVDLGDISGINASVVNIQKEIDRLNEVAKNLNESLIDLQELGKYEQYIK

SEQ ID NO: 2282 - protein, 1205 aa, Artificial Sequence
  SARS-CoV-2/pangolin/Guangxi/P5E/2017__EPI_ISL_410541 spike protein (1-1205)(I903C_Y1041C)
MFVFLFVLPLVSSQCVNLTTRTGIPPGYTNSSTRGVYYPDKVFRSSILHLTQDLFLPFFSNVTWFNTITYQGGSKKFDNPVLPFNDGVYFASTEKSNIIRGWIFGTTLDARTQSLLIVNNATNVVIKVCEFQFCTDPFLGVYYHNNNKTWVENEFRVYSSANNCTFEYISQPFLMDLEGKQGNFKNLREFVFKNVDGYFKIYSKHTPIDLVRDLPRGFAALEPLVDLPIGINITRFQTLLALHRSYLTPGKLESGWTTGAAAYYVGYLQQRTFLLSYNQNGTITDAVDCSLDPLSETKCTLKSLTVEKGIYQTSNFRVQPTISIVRFPNITNLCPFGEVFNASKFASVYAWNRKRISNCVADYSVLYNSTSFSTFKCYGVSPTKLNDLCFTNVYADSFVVKGDEVRQIAPGQTGVIADYNYKLPDDFTGCVIAWNSVKQDALTGDNYGYLYRLFRKSKLKPFERDISTEIYQAGSTPCNGQVGLNCYYPLERYGFHPTTGVNYQPFRVVVLSFELLNGPATVCGPKLSTTLVKDKCVNFNFNGLTGTGVLTTSKKQFLPFQQFGRDISDTTDAVRDPQTLEILDITPCSFGGVSVITPGTNTSNQVAVLYQDVNCTEVPMAIHAEQLTPAWRVYSAGANVFQTRAGCLVGAEHVNNSYECDIPVGAGICASYHSMSSFRSVNQRSIIAYTMSLGAENSVAYSNNSIAIPTNFTISVTTEILPVSMTKTSVDCTMYICGDSIECSNLLLQYGSFCTQLNRALTGIAVEQDKNTQEVFAQVKQIYKTPPIKDFGGFNFSQILPDPSKPSKRSFIEDLLFNKVTLADAGFIKQYGDCLGDIAARDLICAQKFNGLTVLPPLLTDEMIAQYTSALLAGTITSGWTFGAGAALQIPFAMQMAYRFNGCGVTQNVLYENQKLIANQFNSAIGKIQDSLSSTASALGKLQDVVNQNAQALNTLVKQLSSNFGAISSVLNDILSRLDKVEAEVQIDRLITGRLQSLQTYVTQQLIRAAEIRASANLAATKMSECVLGQSKRVDFCGKGCHLMSFPQSAPHGVVFLHVTYVPAQEKNFTTAPAICHEGKAHFPREGVFVSNGTHWFITQRNFYEPQIITTDNTFVSGSCDVVIGIVNNTVYDPLQPELDSFKEELDKYFKNHTSPDVDLGDISGINASVVNIQKEIDRLNEVAKNLNESLIDLQELGKYEQYIK

SEQ ID NO: 2283 - protein, 1203 aa, Artificial Sequence
  SARS-CoV-2/pangolin/Guangxi/P1E/2017__EPI_ISL_410539 spike protein (1-1203)(I901C_Y1039C)
MFVFLFVLPLVSSQCVNLTTRTGIQPGYTNSSTRGVYYPDKVFRSSILHLTQDLFLPFFSNVTWFNTINYQGGFKKFDNPVLPFNDGVYFASTEKSNIIRGWIFGTTLDARTQSLLIVNNATNVVIKVCEFQFCTDPFLGVYYHNNNKTWVENEFRVYSSANNCTFEYISQPFLMDLEGKQGNFKNLREFVFKNVDGYFKIYSKHTPIDLVRDLPRGFAALEPLVDLPIGINITRFQTLLALHRSYLTPGKLESGWTTGAAAYYVGYLQQRTFLLSYNQNGTITDAVDCSLDPLSETKCTLKSLTVEKGIYQTSNFRVQPTISIVRFPNITNLCPFGEVFNASKFASVYAWNRKRISNCVADYSVLYNSTSFSTFKCYGVSPTKLNDLCFTNVYADSFVVKGDEVRQIAPGQTGVIADYNYKLPDDFTGCVIAWNSVKQDALTGGNYLYRLFRKSKLKPFERDISTEIYQAGSTPCNGQVGLNCYYPLERYGFHPTTGVNYQPFRVVVLSFELLNGPATVCGPKLSTTLVKDKCVNFNFNGLTGTGVLTTSKKQFLPFQQFGRDISDTTDAVRDPQTLEILDITPCSFGGVSVITPGTNTSNQVAVLYQDVNCTEVPMAIHAEQLTPAWRVYSAGANVFQTRAGCLVGAEHVNNSYECDIPVGAGICASYHSMSSLRSVNQRSIIAYTMSLGAENSVAYSNNSIAIPTNFTISVTTEILPVSMTKTSVDCTMYICGDSIECSNLLLQYGSFCTQLNRALTGIAVEQDKNTQEVFAQVKQIYKTPPIKDFGGFNFSQILPDPSKPSKRSFIEDLLFNKVTLADAGFIKQYGDCLGDIAARDLICAQKFNGLTVLPPLLTDEMIAQYTSALLAGTITSGWTFGAGAALQIPFAMQMAYRFNGCGVTQNVLYENQKLIANQFNSAIGKIQDSLSSTASALGKLQDVVNQNAQALNTLVKQLSSNFGAISSVLNDILSRLDKVEAEVQIDRLITGRLQSLQTYVTQQLIRAAEIRASANLAATKMSECVLGQSKRVDFCGKGCHLMSFPQSAPHGVVFLHVTYVPAQEKNFTTAPAICHEGKAHFPREGVFVSNGTHWFITQRNFYEPQIITTDNTFVSGSCDVVIGIVNNTVYDPLQPELDSFKEELDKYFKNHTSPDVDLGDISGINASVVNIQKEIDRLNEVAKNLNESLIDLQELGKYEQYIK

SEQ ID NO: 2284 - protein, 1211 aa, Artificial Sequence
  SARS-CoV-2/Wuhan/WIV05/2019__EPI_ISL_402128 spike protein (1-1211)(Q965C_S1003C)
MFVFLVLLPLVSSQCVNLTTRTQLPPAYTNSFTRGVYYPDKVFRSSVLHSTQDLFLPFFSNVTWFHAIHVSGTNGTKRFDNPVLPFNDGVYFASTEKSNIIRGWIFGTTLDSKTQSLLIVNNATNVVIKVCEFQFCNDPFLGVYYHKNNKSWMESEFRVYSSANNCTFEYVSQPFLMDLEGKQGNFKNLREFVFKNIDGYFKIYSKHTPINLVRDLPQGFSALEPLVDLPIGINITRFQTLLALHRSYLTPGDSSSGWTAGAAAYYVGYLQPRTFLLKYNENGTITDAVDCALDPLSETKCTLKSFTVEKGIYQTSNFRVQPTESIVRFPNITNLCPFGEVFNATRFASVYAWNRKRISNCVADYSVLYNSASFSTFKCYGVSPTKLNDLCFTNVYADSFVIRGDEVRQIAPGQTGKIADYNYKLPDDFTGCVIAWNSNNLDSKVGGNYNYLYRLFRKSNLKPFERDISTEIYQAGSTPCNGVEGFNCYFPLQSYGFQPTNGVGYQPYRVVVLSFELLHAPATVCGPKKSTNLVKNKCVNFNFNGLTGTGVLTESNKKFLPFQQFGRDIADTTDAVRDPQTLEILDITPCSFGGVSVITPGTNTSNQVAVLYQDVNCTEVPVAIHADQLTPTWRVYSTGSNVFQTRAGCLIGAEHVNNSYECDIPIGAGICASYQTQTNSPRRARSVASQSIIAYTMSLGAENSVAYSNNSIAIPTNFTISVTTEILPVSMTKTSVDCTMYICGDSTECSNLLLQYGSFCTQLNRALTGIAVEQDKNTQEVFAQVKQIYKTPPIKDFGGFNFSQILPDPSKPSKRSFIEDLLFNKVTLADAGFIKQYGDCLGDIAARDLICAQKFNGLTVLPPLLTDEMIAQYTSALLAGTITSGWTFGAGAALQIPFAMQMAYRFNGIGVTQNVLYENQKLIANQFNSAIGKIQDSLSSTASALGKLQDVVNQNAQALNTLVKCLSSNFGAISSVLNDILSRLDKVEAEVQIDRLITGRLQCLQTYVTQQLIRAAEIRASANLAATKMSECVLGQSKRVDFCGKGYHLMSFPQSAPHGVVFLHVTYVPAQEKNFTTAPAICHDGKAHFPREGVFVSNGTHWFVTQRNFYEPQIITTDNTFVSGNCDVVIGIVNNTVYDPLQPELDSFKEELDKYFKNHTSPDVDLGDISGINASVVNIQKEIDRLNEVAKNLNESLIDLQELGKYEQYIK

SEQ ID NO: 2285 - protein, 1207 aa, Artificial Sequence
  SARS-CoV-2/bat/Yunnan/RaTG13/2013__EPI_ISL_402131 spike protein (1-1207)(Q961C_S999C)
MFVFLVLLPLVSSQCVNLTTRTQLPPAYTNSSTRGVYYPDKVFRSSVLHLTQDLFLPFFSNVTWFHAIHVSGTNGIKRFDNPVLPFNDGVYFASTEKSNIIRGWIFGTTLDSKTQSLLIVNNATNVVIKVCEFQFCNDPFLGVYYHKNNKSWMESEFRVYSSANNCTFEYVSQPFLMDLEGKQGNFKNLREFVFKNIDGYFKIYSKHTPINLVRDLPPGFSALEPLVDLPIGINITRFQTLLALHRSYLTPGDSSSGWTAGAAAYYVGYLQPRTFLLKYNENGTITDAVDCALDPLSETKCTLKSFTVEKGIYQTSNFRVQPTDSIVRFPNITNLCPFGEVFNATTFASVYAWNRKRISNCVADYSVLYNSTSFSTFKCYGVSPTKLNDLCFTNVYADSFVITGDEVRQIAPGQTGKIADYNYKLPDDFTGCVIAWNSKHIDAKEGGNFNYLYRLFRKANLKPFERDISTEIYQAGSKPCNGQTGLNCYYPLYRYGFYPTDGVGHQPYRVVVLSFELLNAPATVCGPKKSTNLVKNKCVNFNFNGLTGTGVLTESNKKFLPFQQFGRDIADTTDAVRDPQTLEILDITPCSFGGVSVITPGTNASNQVAVLYQDVNCTEVPVAIHADQLTPTWRVYSTGSNVFQTRAGCLIGAEHVNNSYECDIPIGAGICASYQTQTNSRSVASQSIIAYTMSLGAENSVAYSNNSIAIPTNFTISVTTEILPVSMTKTSVDCTMYICGDSTECSNLLLQYGSFCTQLNRALTGIAVEQDKNTQEVFAQVKQIYKTPPIKDFGGFNFSQILPDPSKPSKRSFIEDLLFNKVTLADAGFIKQYGDCLGDIAARDLICAQKFNGLTVLPPLLTDEMIAQYTSALLAGTITSGWTFGAGAALQIPFAMQMAYRFNGIGVTQNVLYENQKLIANQFNSAIGKIQDSLSSTASALGKLQDVVNQNAQALNTLVKCLSSNFGAISSVLNDILSRLDKVEAEVQIDRLITGRLQCLQTYVTQQLIRAAEIRASANLAATKMSECVLGQSKRVDFCGKGYHLMSFPQSAPHGVVFLHVTYVPAQEKNFTTAPAICHDGKAHFPREGVFVSNGTHWFVTQRNFYEPQIITTDNTFVSGSCDVVIGIVNNTVYDPLQPELDSFKEELDKYFKNHTSPDVDLGDISGINASVVNIQKEIDRLNEVAKNLNESLIDLQELGKYEQYIK

SEQ ID NO: 2286 - protein, 1211 aa, Artificial Sequence
  SARS-CoV-2/Wuhan/HBCDC-HB-01/2019__EPI_ISL_402132 spike protein (1-1211)(Q965C_S1003C)
MFVFLVLLPLVSSQCVNLTTRTQLPPAYTNSITRGVYYPDKVFRSSVLHSTQDLFLPFFSNVTWFHAIHVSGTNGTKRFDNPVLPFNDGVYFASTEKSNIIRGWIFGTTLDSKTQSLLIVNNATNVVIKVCEFQFCNDPFLGVYYHKNNKSWMESEFRVYSSANNCTFEYVSQPFLMDLEGKQGNFKNLREFVFKNIDGYFKIYSKHTPINLVRDLPQGFSALEPLVDLPIGINITRFQTLLALHRSYLTPGDSSSGWTAGAAAYYVGYLQPRTFLLKYNENGTITDAVDCALDPLSETKCTLKSFTVEKGIYQTSNFRVQPTESIVRFPNITNLCPFGEVFNATRFASVYAWNRKRISNCVADYSVLYNSASFSTFKCYGVSPTKLNDLCFTNVYADSFVIRGDEVRQIAPGQTGKIADYNYKLPDDFTGCVIAWNSNNLDSKVGGNYNYLYRLFRKSNLKPFERDISTEIYQAGSTPCNGVEGFNCYFPLQSYGFQPTNGVGYQPYRVVVLSFELLHAPATVCGPKKSTNLVKNKCVNFNFNGLTGTGVLTESNKKFLPFQQFGRDIADTTDAVRDPQTLEILDITPCSFGGVSVITPGTNTSNQVAVLYQDVNCTEVPVAIHADQLTPTWRVYSTGSNVFQTRAGCLIGAEHVNNSYECDIPIGAGICASYQTQTNSPRRARSVASQSIIAYTMSLGAENSVAYSNNSIAIPTNFTISVTTEILPVSMTKTSVDCTMYICGDSTECSNLLLQYGSFCTQLNRALTGIAVEQDKNTQEVFAQVKQIYKTPPIKDFGGFNFSQILPDPSKPSKRSFIEDLLFNKVTLADAGFIKQYGDCLGDIAARDLICAQKFNGLTVLPPLLTDEMIAQYTSALLAGTITSGWTFGAGAALQIPFAMQMAYRFNGIGVTQNVLYENQKLIANQFNSAIGKIQDSLSSTASALGKLQDVVNQNAQALNTLVKCLSSNFGAISSVLNDILSRLDKVEAEVQIDRLITGRLQCLQTYVTQQLIRAAEIRASANLAATKMSECVLGQSKRVDFCGKGYHLMSFPQSAPHGVVFLHVTYVPAQEKNFTTAPAICHDGKAHFPREGVFVSNGTHWFVTQRNFYEPQIITTDNTFVSGNCDVVIGIVNNTVYDPLQPELDSFKEELDKYFKNHTSPDVDLGDISGINASVVNIQKEIDRLNEVAKNLNESLIDLQELGKYEQYIK

SEQ ID NO: 2287 - protein, 1211 aa, Artificial Sequence
  SARS-CoV-2/Guangdong/20SF028/2020__EPI_ISL_403936 spike protein (1-1211)(Q965C_S1003C)
MFVFLVLLPLVSSQCVNLTTRTQLPPAYTNSFTRGVYYPDKVFRSSVLYSTQDLFLPFFSNVTWFHAIHVSGTNGTKRFDNPVLPFNDGVYFASTEKSNIIRGWIFGTTLDSKTQSLLIVNNATNVVIKVCEFQFCNDPFLGVYYHKNNKSWMESEFRVYSSANNCTFEYVSQPFLMDLEGKQGNFKNLREFVFKNIDGYFKIYSKHTPINLVRDLPQGFSALEPLVDLPIGINITRFQTLLALHRSYLTPGDSSSGWTAGAAAYYVGYLQPRTFLLKYNENGTITDAVDCALDPLSETKCTLKSFTVEKGIYQTSNFRVQPTESIVRFPNITNLCPFGEVFNATRFASVYAWNRKRISNCVADYSVLYNSASFSTFKCYGVSPTKLNDLCFTNVYADSFVIRGDEVRQIAPGQTGKIADYNYKLPDDFTGCVIAWNSNNLDSKVGGNYNYLYRLFRKSNLKPFERDISTEIYQAGSTPCNGVEGFNCYFPLQSYGFQPTNGVGYQPYRVVVLSFELLHAPATVCGPKKSTNLVKNKCVNFNFNGLTGTGVLTESNKKFLPFQQFGRDIADTTDAVRDPQTLEILDITPCSFGGVSVITPGTNTSNQVAVLYQDVNCTEVPVAIHADQLTPTWRVYSTGSNVFQTRAGCLIGAEHVNNSYECDIPIGAGICASYQTQTNSPRRARSVASQSIIAYTMSLGAENSVAYSNNSIAIPTNFTISVTTEILPVSMTKTSVDCTMYICGDSTECSNLLLQYGSFCTQLNRALTGIAVEQDKNTQEVFAQVKQIYKTPPIKDFGGFNFSQILPDPSKPSKRSFIEDLLFNKVTLADAGFIKQYGDCLGDIAARDLICAQKFNGLTVLPPLLTDEMIAQYTSALLAGTITSGWTFGAGAALQIPFAMQMAYRFNGIGVTQNVLYENQKLIANQFNSAIGKIQDSLSSTASALGKLQDVVNQNAQALNTLVKCLSSNFGAISSVLNDILSRLDKVEAEVQIDRLITGRLQCLQTYVTQQLIRAAEIRASANLAATKMSECVLGQSKRVDFCGKGYHLMSFPQSAPHGVVFLHVTYVPAQEKNFTTAPAICHDGKAHFPREGVFVSNGTHWFVTQRNFYEPQIITTDNTFVSGNCDVVIGIVNNTVYDPLQPELDSFKEELDKYFKNHTSPDVDLGDISGINASVVNIQKEIDRLNEVAKNLNESLIDLQELGKYEQYIK

SEQ ID NO: 2288 - protein, 1211 aa, Artificial Sequence
  SARS-CoV-2/Shenzhen/SZTH-001/2020__EPI_ISL_406592 spike protein (1-1211)(Q965C_S1003C)
MFVFLVLLPLVSSQCVNLTTRTQLPPAYTNSFTRGVYYPDKVFRSSVLHSTQDLFLPFFSNVTWFHAIHVSGTNGTKRFDNPVLPFNDGVYFASTEKSNIIRGWIFGTTLDSKTQSLLIVNNATNVVIKVCEFQFCNDPFLGVYYHKNNKSWMESEFRVYSSANNCTFEYVSQPFLMDLEGKQGNFKNLREFVFKNIDGYFKIYSKHTPINLVRDLPQGFSALEPLVDLPIGINITRFQTLLALHRSYLTPGDSSSGWTAGAAAYYVGYLQPRTFLLKYNENGTITDAVDCALDPLSETKCTLKSFTVEKGIYQTSNFRVQPTESIVRFPNITNLCPFGEVFNATRFASVYAWNRKRISNCVADYSVLYNSASFSTFKCYGVSPTKLNDLCFTNVYADSFVIRGDEVRQIAPGQTGKIADYNYKLPDDFTGCVIAWNSNNLDSKVGGNYNYLYRLFRKSNLKPFERDISTEIYQAGSTPCNGVEGFNCYFPLQSYGFQPTNGVGYQPYRVVVLSFELLHAPATVCGPKKSTNLVKNKCVNFNFNGLTGTGVLTESNKKFLPFQQFGRDIADTTDAVRDPQTLEILDITPCSFGGVSVITPGTNTSNQVAVLYQDVNCTEVPVAIHADQLTPTWRVYSTGSNVFQTRAGCLIGAEHVNNSYECDIPIGAGICASYQTQTNSPRRARSVASQSIIAYTMSLGAENSVAYSNNSIAIPTNFTISVTTEILPVSMTKTSVDCTMYICGDSTECSNLLLQYGSFCTQLNRALTGIAVEQDKNTQEVFAQVKQIYKTPPIKDFGGFNFSQILPDPSKPSKRSFIEDLLFNKVTLADAGFIKQYGDCLGDIAARDLICAQKFNGLTVLPPLLTDEMIAQYTSALLAGTITSGWTFGAGAALQIPFAMQMAYRFNGIGVTQNVLYENQKLIANQFNSAIGKIQDSLSSTASALGKLQDVVNQNAQALNTLVKCLSSNFGAISSVLNDILSRLDKVEAEVQIDRLITGRLQCLQTYVTQQLIRAAEIRASANLAATKMSECVLGQSKRVDFCGKGYHLMSFPQSAPHGVVFLHVTYVPAQEKNFTTAPAICHDGKAHFPREGVFVSNGTHWFVTQRNFYEPQIITTDNTFVSGNCDVLIGIVNNTVYDPLQPELDSFKEELDKYFKNHTSPDVDLGDISGINASVVNIQKEIDRLNEVAKNLNESLIDLQELGKYEQYIK

SEQ ID NO: 2289 - protein, 1211 aa, Artificial Sequence
  SARS-CoV-2/Shenzhen/SZTH-004/2020__EPI_ISL_406595 spike protein (1-1211)(Q965C_S1003C)
MFVFLVLLPLVSSQCVNLTTRTQLPPAYTNSFTRGVYYPDKVFRSSVLHSTQDLFLPFFSNVTWFHAIHVSGTNGTKRFDNPVLPFNDGVYFASTEKSNIIRGWIFGTTLDSKTQSLLIVNNATNVVIKVCEFQFCNDPFLGVYYHKNNKSWMESEFRVYSSANNCTFEYVSQPFLMDLEGKQGNFKNLREFVFKNIDGYFKIYSKHTPINLVRDLPQGFSALEPLVDLPIGINITRFQTLLALHRSYLTPGDSSSGWTAGAAAYYVGYLQPRTFLLKYNENGTITDAVDCALDPLSETKCTLKSFTVEKGIYQTSNFRVQPTESIVRFPNITNLCPFGEVFNATRFASVYAWDRKRISNCVAYYSVLYNSASFSTFKCYGVSPTKLNDLCFTNVYADSFVIRGDEVRQIAPGQTGKIADYNYKLPDDFTGCVIAWNSNNLDSKVGGNYNYLYRLFRKSNLKPFERDISTEIYQAGSTPCNGVEGFNCYFPLQSYGFQPTNGVGYQPYRVVVLSFELLHAPATVCGPKKSTNLVKNKCVNFNFNGLTGTGVLTESNKKFLPFQQFGRDIADTTDAVRDPQTLEILDITPCSFGGVSVITPGTNTSNQVAVLYQDVNCTEVPVAIHADQLTPTWRVYSTGSNVFQTRAGCLIGAEHVNNSYECDIPIGAGICASYQTQTNSPRRARSVASQSIIAYTMSLGAENSVAYSNNSIAIPTNFTISVTTEILPVSMTKTSVDCTMYICGDSTECSNLLLQYGSFCTQLNRALTGIAVEQDKNTQEVFAQVKQIYKTPPIKDFGGFNFSQILPDPSKPSKRSFIEDLLFNKVTLADAGFIKQYGDCLGDIAARDLICAQKFNGLTVLPPLLTDEMIAQYTSALLAGTITSGWTFGAGAALQIPFAMQMAYRFNGIGVTQNVLYENQKLIANQFNSAIGKIQDSLSSTASALGKLQDVVNQNAQALNTLVKCLSSNFGAISSVLNDILSRLDKVEAEVQIDRLITGRLQCLQTYVTQQLIRAAEIRASANLAATKMSECVLGQSKRVDFCGKGYHLMSFPQSAPHGVVFLHVTYVPAQEKNFTTAPAICHDGKAHFPREGVFVSNGTHWFVTQRNFYEPQIITTDNTFVSGNCDVVIGIVNNTVYDPLQPELDSFKEELDKYFKNHTSPDVDLGDISGINASVVNIQKEIDRLNEVAKNLNESLIDLQELGKYEQYIK

SEQ ID NO: 2290 - protein, 1211 aa, Artificial Sequence
  SARS-CoV-2/France/IDF0372/2020__EPI_ISL_406596 spike protein (1-1211)(Q965C_S1003C)
MFVFLVLLPLVSSQCVNLTTRTQLPPAYTNSFTRGVYYPDKVFRSSVLHSTQDLFLPFFSNVTWFHAIHVSGTNGTKRFDNPVLPFNDGVYFASTEKSNIIRGWIFGTTLDSKTQSLLIVNNATNVVIKVCEFQFCNDPFLGVYYHKNNKSWMESEFRVYSSANNCTFEYVSQPFLMDLEGKQGNFKNLREFVFKNIDGYFKIYSKHTPINLVRDLPQGFSALEPLVDLPIGINITRFQTLLALHRSYLTPGDSSSGWTAGAAAYYVGYLQPRTFLLKYNENGTITDAVDCALDPLSETKCTLKSFTVEKGIYQTSNFRVQPTESIVRFPNITNLCPFGEVFNATRFASVYAWNRKRISNCVADYSFLYNSASFSTFKCYGVSPTKLNDLCFTNVYADSFVIRGDEVRQIAPGQTGKIADYNYKLPDDFTGCVIAWNSNNLDSKVGGNYNYLYRLFRKSNLKPFERDISTEIYQAGSTPCNGVEGFNCYFPLQSYGFQPTNGVGYQPYRVVVLSFELLHAPATVCGPKKSTNLVKNKCVNFNFNGLTGTGVLTESNKKFLPFQQFGRDIADTTDAVRDPQTLEILDITPCSFGGVSVITPGTNTSNQVAVLYQDVNCTEVPVAIHADQLTPTWRVYSTGSNVFQTRAGCLIGAEHVNNSYECDIPIGAGICASYQTQTNSPRRARSVASQSIIAYTMSLGAENSVAYSNNSIAIPTNFTISVTTEILPVSMTKTSVDCTMYICGDSTECSNLLLQYGSFCTQLNRALTGIAVEQDKNTQEVFAQVKQIYKTPPIKDFGGFNFSQILPDPSKPSKRSFIEDLLFNKVTLADAGFIKQYGDCLGDIAARDLICAQKFNGLTVLPPLLTDEMIAQYTSALLAGTITSGWTFGAGAALQIPFAMQMAYRFNGIGVTQNVLYENQKLIANQFNSAIGKIQDSLSSTASALGKLQDVVNQNAQALNTLVKCLSSNFGAISSVLNDILSRLDKVEAEVQIDRLITGRLQCLQTYVTQQLIRAAEIRASANLAATKMSECVLGQSKRVDFCGKGYHLMSFPQSAPHGVVFLHVTYVPAQEKNFTTAPAICHDGKAHFPREGVFVSNGTHWFVTQRNFYEPQIITTDNTFVSGNCDVVIGIVNNTVYDPLQPELDSFKEELDKYFKNHTSPDVDLGDISGINASVVNIQKEIDRLNEVAKNLNESLIDLQELGKYEQYIK

SEQ ID NO: 2291 - protein, 1211 aa, Artificial Sequence
  SARS-CoV-2/Australia/VIC01/2020__EPI_ISL_406844 spike protein (1-1211)(Q965C_S1003C)
MFVFLVLLPLVSSQCVNLTTRTQLPPAYTNSFTRGVYYPDKVFRSSVLHSTQDLFLPFFSNVTWFHAIHVSGTNGTKRFDNPVLPFNDGVYFASTEKSNIIRGWIFGTTLDSKTQSLLIVNNATNVVIKVCEFQFCNDPFLGVYYHKNNKSWMESEFRVYSSANNCTFEYVSQPFLMDLEGKQGNFKNLREFVFKNIDGYFKIYSKHTPINLVRDLPQGFSALEPLVDLPIGINITRFQTLLALHRRYLTPGDSSSGWTAGAAAYYVGYLQPRTFLLKYNENGTITDAVDCALDPLSETKCTLKSFTVEKGIYQTSNFRVQPTESIVRFPNITNLCPFGEVFNATRFASVYAWNRKRISNCVADYSVLYNSASFSTFKCYGVSPTKLNDLCFTNVYADSFVIRGDEVRQIAPGQTGKIADYNYKLPDDFTGCVIAWNSNNLDSKVGGNYNYLYRLFRKSNLKPFERDISTEIYQAGSTPCNGVEGFNCYFPLQSYGFQPTNGVGYQPYRVVVLSFELLHAPATVCGPKKSTNLVKNKCVNFNFNGLTGTGVLTESNKKFLPFQQFGRDIADTTDAVRDPQTLEILDITPCSFGGVSVITPGTNTSNQVAVLYQDVNCTEVPVAIHADQLTPTWRVYSTGSNVFQTRAGCLIGAEHVNNSYECDIPIGAGICASYQTQTNSPRRARSVASQSIIAYTMSLGAENSVAYSNNSIAIPTNFTISVTTEILPVSMTKTSVDCTMYICGDSTECSNLLLQYGSFCTQLNRALTGIAVEQDKNTQEVFAQVKQIYKTPPIKDFGGFNFSQILPDPSKPSKRSFIEDLLFNKVTLADAGFIKQYGDCLGDIAARDLICAQKFNGLTVLPPLLTDEMIAQYTSALLAGTITSGWTFGAGAALQIPFAMQMAYRFNGIGVTQNVLYENQKLIANQFNSAIGKIQDSLSSTASALGKLQDVVNQNAQALNTLVKCLSSNFGAISSVLNDILSRLDKVEAEVQIDRLITGRLQCLQTYVTQQLIRAAEIRASANLAATKMSECVLGQSKRVDFCGKGYHLMSFPQSAPHGVVFLHVTYVPAQEKNFTTAPAICHDGKAHFPREGVFVSNGTHWFVTQRNFYEPQIITTDNTFVSGNCDVVIGIVNNTVYDPLQPELDSFKEELDKYFKNHTSPDVDLGDISGINASVVNIQKEIDRLNEVAKNLNESLIDLQELGKYEQYIK

SEQ ID NO: 2292 - protein, 1211 aa, Artificial Sequence
  SARS-CoV-2/Germany/BavPat1/2020__EPI_ISL_406862 spike protein (1-1211)(Q965C_S1003C)
MFVFLVLLPLVSSQCVNLTTRTQLPPAYTNSFTRGVYYPDKVFRSSVLHSTQDLFLPFFSNVTWFHAIHVSGTNGTKRFDNPVLPFNDGVYFASTEKSNIIRGWIFGTTLDSKTQSLLIVNNATNVVIKVCEFQFCNDPFLGVYYHKNNKSWMESEFRVYSSANNCTFEYVSQPFLMDLEGKQGNFKNLREFVFKNIDGYFKIYSKHTPINLVRDLPQGFSALEPLVDLPIGINITRFQTLLALHRSYLTPGDSSSGWTAGAAAYYVGYLQPRTFLLKYNENGTITDAVDCALDPLSETKCTLKSFTVEKGIYQTSNFRVQPTESIVRFPNITNLCPFGEVFNATRFASVYAWNRKRISNCVADYSVLYNSASFSTFKCYGVSPTKLNDLCFTNVYADSFVIRGDEVRQIAPGQTGKIADYNYKLPDDFTGCVIAWNSNNLDSKVGGNYNYLYRLFRKSNLKPFERDISTEIYQAGSTPCNGVEGFNCYFPLQSYGFQPTNGVGYQPYRVVVLSFELLHAPATVCGPKKSTNLVKNKCVNFNFNGLTGTGVLTESNKKFLPFQQFGRDIADTTDAVRDPQTLEILDITPCSFGGVSVITPGTNTSNQVAVLYQGVNCTEVPVAIHADQLTPTWRVYSTGSNVFQTRAGCLIGAEHVNNSYECDIPIGAGICASYQTQTNSPRRARSVASQSIIAYTMSLGAENSVAYSNNSIAIPTNFTISVTTEILPVSMTKTSVDCTMYICGDSTECSNLLLQYGSFCTQLNRALTGIAVEQDKNTQEVFAQVKQIYKTPPIKDFGGFNFSQILPDPSKPSKRSFIEDLLFNKVTLADAGFIKQYGDCLGDIAARDLICAQKFNGLTVLPPLLTDEMIAQYTSALLAGTITSGWTFGAGAALQIPFAMQMAYRFNGIGVTQNVLYENQKLIANQFNSAIGKIQDSLSSTASALGKLQDVVNQNAQALNTLVKCLSSNFGAISSVLNDILSRLDKVEAEVQIDRLITGRLQCLQTYVTQQLIRAAEIRASANLAATKMSECVLGQSKRVDFCGKGYHLMSFPQSAPHGVVFLHVTYVPAQEKNFTTAPAICHDGKAHFPREGVFVSNGTHWFVTQRNFYEPQIITTDNTFVSGNCDVVIGIVNNTVYDPLQPELDSFKEELDKYFKNHTSPDVDLGDISGINASVVNIQKEIDRLNEVAKNLNESLIDLQELGKYEQYIK

SEQ ID NO: 2293 - protein, 1211 aa, Artificial Sequence
  SARS-CoV-2/Wuhan/HBCDC-HB-02/2020__EPI_ISL_412978 spike protein (1-1211)(Q965C_S1003C)
MFVFLVLLPLVSSQCVNLTTRTQLPPAYTNSFTRGVYYPDKVFRSSVLHSTQDLFLPFFSNVTWFHAIHVSGTNGTKRFDNPVLPFNDGVYFASTEKSNIIRGWIFGTTLDSKTQSLLIVNNATNVVIKVCEFQFCNDPFLGVYYHKNNKSWMESEFRVYSSANNCTFEYVSQPFLMDLEGKQGNFKNLREFVFKNIDGYFKIYSKHTPINLVRDLPQGFSALEPLVDLPIGINITRFQTLLALHRSYLTPGDSSSGWTAGAAAYYVGYLQPRTFLLKYNENGTITDAVDCALDPLSETKCTLKSFTVEKGIYQTSNFRVQPTESIVRFPNITNLCPFGEVFNATRFASVYAWNRKRISNCVADYSVLYNSASFSTFKCYGVSPTKLNDLCFTNVYADSFVIRGDEVRQIAPGQTGKIADYNYKLPDDFTGCVIAWNSNNLDSKVGGNYNYLYRLFRKSNLKPFERDISTEIYQAGSTPCNGVEGFNCYFPLQSYGFQPTNGVGYQPYRVVVLSFELLHAPATVCGPKKSTNLVKNKCVNFNFNGLTGTGVLTESNKKFLPFQQFGRDIADTTDAVRDPQTLEILDITPCSFGGVSVITPGTNTSNQVAVLYQDVNCTEVPVAIHADQLTPTWRVYSTGSNVFQTRAGCLIGAEHVNNSYECDIPIGAGICASYQTQTNSPRRARSVASQSIIAYTMSLGAENSVAYSNNSIAIPTNFTISVTTEILPVSMTKTSVDCTMYICGDSTECSNFLLQYGSFCTQLNRALTGIAVEQDKNTQEVFAQVKQIYKTPPIKDFGGFNFSQILPDPSKPSKRSFIEDLLFNKVTLADAGFIKQYGDCLGDIAARDLICAQKFNGLTVLPPLLTDEMIAQYTSALLAGTITSGWTFGAGAALQIPFAMQMAYRFNGIGVTQNVLYENQKLIANQFNSAIGKIQDSLSSTASALGKLQDVVNQNAQALNTLVKCLSSNFGAISSVLNDILSRLDKVEAEVQIDRLITGRLQCLQTYVTQQLIRAAEIRASANLAATKMSECVLGQSKRVDFCGKGYHLMSFPQSAPHGVVFLHVTYVPAQEKNFTTAPAICHDGKAHFPREGVFVSNGTHWFVTQRNFYEPQIITTDNTFVSGNCDVVIGIVNNTVYDPLQPELDSFKEELDKYFKNHTSPDVDLGDISGINASVVNIQKEIDRLNEVAKNLNESLIDLQELGKYEQYIK

SEQ ID NO: 2294 - protein, 1211 aa, Artificial Sequence
  SARS-CoV-2/Australia/QLD02/2020__EPI_ISL_407896 spike protein (1-1211)(Q965C_S1003C)
MFVFLVLLPLVSSQCVNLTTRTQLPPAYTNSFTRGVYYPDKVFRSSVLHSTQDLFLPFFSNVTWFHAIHVSGTNGTKRFDNPVLPFNDGVYFASTEKSNIIRGWIFGTTLDSKTQSLLIVNNATNVVIKVCEFQFCNDPFLGVYYHKNNKSWMESEFRVYSSANNCTFEYVSQPFLMDLEGKQGNFKNLREFVFKNIDGYFKIYSKHTPINLVRDLPQGFSALEPLVDLPIGINITRFQTLLALHRSYLTPGDSSSGWTAGAAAYYVGYLQPRTFLLKYNENGTITDAVDCALDPLSETKCTLKSFTVEKGIYQTSNFRVQPTESIVRFPNITNLCPFGEVFNATRFASVYAWNRKRISNCVADYSVLYNSASFSTFKCYGVSPTKLNDLCFTNVYADSFVIRGDEVRQIAPGQTGKIADYNYKLPDDFTGCVIAWNSNNLDSKVGGNYNYLYRLFRKSNLKPFERDISTEIYQAGSTPCNGVEGFNCYFPLQSYGFQPTNGVGYQPYRVVVLSFELLHAPATVCGPKKSTNLVKNKCVNFNFNGLTGTGVLTESNKKFLPFQQFGRDIADTTDAVRDPQTLEILDITPCSFGGVSVITPGTNTSNQVAVLYQDVNCTEVPVAIHADQLTPTWRVYSTGSNVFQTRAGCLIGAEHVNNSYECDIPIGAGICASYQTQTNSPRRARSVASQSIIAYTMSLGAENSVAYSNNSIAIPTNFTISVTTEILPVSMTKTSVDCTMYICGDSTECSNLLLQYGSFCTQLNRALTGIAVEQDKNTQEVFAQVKQIYKTPPIKDFGGFNFSQILPDPSKPSKRSFIEDLLFNKVTLADAGFIKQYGDCLGDIAARDLICAQKFNGLTVLPPLLTDEMIAQYTSALLAGTITSGWTFGAGAALQIPFAMQMAYRFNGIGVTQNVLYENQKLIANQFNSAIGKIQDSLSSTASALGKLQDVVNQNAQALNTLVKCLSSNFGAISSVLNDILSRLDKVEAEVQIDRLITGRLQCLQTYVTQQLIRAAEIRASANLAATKMSECVLGQSKRVDFCGKGYHLMSFPQSAPHGVVFLHVTYVPAQEKNFTTAPAICHDGKAHFPREGVFVSNGTHWFVTQRNFYEPQIITTDNTFVSGNCDVVIGIVNNTVYDPLQLELDSFKEELDKYFKNHTSPDVDLGDISGINASVVNIQKEIDRLNEVAKNLNESLIDLQELGKYEQYIK

SEQ ID NO: 2295 - protein, 1211 aa, Artificial Sequence
  SARS-CoV-2/India/1-31/2020__EPI_ISL_413523 spike protein (1-1211)(Q965C_S1003C)
MFVFLVLLPLVSSQCVNLTTRTQLPPAYTNSFTRGVYYPDKVFRSSVLHSTQDLFLPFFSNVTWFHAIHVSGTNGTKRFDNPVLPFNDGVYFASTEKSNIIRGWIFGTTLDSKTQSLLIVNNATNVVIKVCEFQFCNDPFLGVYYHKNNKSWMESEFRVYSSANNCTFEYVSQPFLMDLEGKQGNFKNLREFVFKNIDGYFKIYSKHTPINLVRDLPQGFSALEPLVDLPIGINITRFQTLLALHRSYLTPGDSSSGWTAGAAAYYVGYLQPRTFLLKYNENGTITDAVDCALDPLSETKCTLKSFTVEKGIYQTSNFRVQPTESIVRFPNITNLCPFGEVFNATRFASVYAWNRKRISNCVADYSVLYNSASFSTFKCYGVSPTKLNDLCFTNVYADSFVIRGDEVRQIAPGQTGKIADYNYKLPDDFTGCVIAWNSNNLDSKVGGNYNYLYRLFRKSNLKPFERDISTEIYQAGSTPCNGVEGFNCYFPLQSYGFQPTNGVGYQPYRVVVLSFELLHAPATVCGPKKSTNLVKNKCVNFNFNGLTGTGVLTESNKKFLPFQQFGRDIADTTDAVRDPQTLEILDITPCSFGGVSVITPGTNTSNQVAVLYQDVNCTEVPVAIHADQLTPTWRVYSTGSNVFQTRAGCLIGAEHVNNSYECDIPIGAGICASYQTQTNSPRRARSVASQSIIAYTMSLGAENSVAYSNNSIAIPTNFTISVTTEILPVSMTKTSVDCTMYICGDSTECSNLLLQYGSFCTQLNRALTGIAVEQDKNTQEVFAQVKQIYKTPPIKDFGGFNFSQILPDPSKPSKRSFIEDLLFNKVTLADAGFIKQYGDCLGDIAARDLICAQKFNGLTVLPPLLTDEMIAQYTSALLAGTITSGWTFGAGAALQIPFAMQMAYRFNGIGVTQNVLYENQKLIANQFNSVIGKIQDSLSSTASALGKLQDVVNQNAQALNTLVKCLSSNFGAISSVLNDILSRLDKVEAEVQIDRLITGRLQCLQTYVTQQLIRAAEIRASANLAATKMSECVLGQSKRVDFCGKGYHLMSFPQSAPHGVVFLHVTYVPAQEKNFTTAPAICHDGKAHFPREGVFVSNGTHWFVTQRNFYEPQIITTDNTFVSGNCDVVIGIVNNTVYDPLQPELDSFKEELDKYFKNHTSPDVDLGDISGINASVVNIQKEIDRLNEVAKNLNESLIDLQELGKYEQYIK

SEQ ID NO: 2296 - protein, 1211 aa, Artificial Sequence
  SARS-CoV-2/Guangdong/GD2020087-P0008/2020__EPI_ISL_413863 spike protein (1-1211)(Q965C_S1003C)
MFVFLVLLPLVSSQCVNLTTRTQLPPAYTNSFTRGVYYPDKVFRSSVLHSTQDLFLPFFSNVTWFHAIHVSGTNGTKRFDNPVLPFNDGVYFASTEKSNIIRGWIFGTTLDSKTQSLLIVNNATNVVIKVCEFQFCNDPFLGVYYHKNNKSWMESEFRVYSSANNCTFEYVSQPFLMDLEGKQGNFKNLREFVFKNIDGYFKIYSKHTPINLVRDLPQGFSALEPLVDLPIGINITRFQTLLALHRSYLTPGDSSSGWTAGAAAYYVGYLQPRTFLLKYNENGTITDAVDCALDPLSETKCTLKSFTVEKGIYQTSNFRVQPTESIVRFPNITNLCPFGEVFNATRFASVYAWNRKRISNCVADYSVLYNSASFSTFKCYGVSPTKLNDLCFTNVYADSFVIRGDEVREIAPGQTGKIADYNYKLPDDFTGCVIAWNSNNLDSKVGGNYNYLYRLFRKSNLKPFERDISTEIYQAGSTPCNGVEGFNCYFPLQSYGFQPTNGVGYQPYRVVVLSFELLHAPATVCGPKKSTNLVKNKCVNFNFNGLTGTGVLTESNKKFLPFQQFGRDIADTTDAVRDPQTLEILDITPCSFGGVSVITPGTNTSNQVAVLYQDVNCTEVPVAIHADQLTPTWRVYSTGSNVFQTRAGCLIGAEHVNNSYECDIPIGAGICASYQTQTNSPRRARSVASQSIIAYTMSLGAENSVAYSNNSIAIPTNFTISVTTEILPVSMTKTSVDCTMYICGDSTECSNLLLQYGSFCTQLNRALTGIAVEQDKNTQEVFAQVKQIYKTPPIKDFGGFNFSQILPDPSKPSKRSFIEDLLFNKVTLADAGFIKQYGDCLGDIAARDLICAQKFNGLTVLPPLLTDEMIAQYTSALLAGTITSGWTFGAGAALQIPFAMQMAYRFNGIGVTQNVLYENQKLIANQFNSAIGKIQDSLSSTASALGKLQDVVNQNAQALNTLVKCLSSNFGAISSVLNDILSRLDKVEAEVQIDRLITGRLQCLQTYVTQQLIRAAEIRASANLAATKMSECVLGQSKRVDFCGKGYHLMSFPQSAPHGVVFLHVTYVPAQEKNFTTAPAICHDGKAHFPREGVFVSNGTHWFVTQRNFYEPQIITTDNTFVSGNCDVVIGIVNNTVYDPLQPELDSFKEELDKYFKNHTSPDVDLGDISGINASVVNIQKEIDRLNEVAKNLNESLIDLQELGKYEQYIK

SEQ ID NO: 2297 - protein, 1211 aa, Artificial Sequence
  SARS-CoV-2/Sweden/01/2020__EPI_ISL_411951 spike protein (1-1211)(Q965C_S1003C)
MFVFLVLLPLVSSQCVNLTTRTQLPPAYTNSFTRGVYYPDKVFRSSVLHSTQDLFLPFFSNVTWFHAIHVSGTNGTKRFDNPVLPFNDGVYFASTEKSNIIRGWIFGTTLDSKTQSLLIVNNATNVVIKVCEFQFCNDPFLGVYYHKNNKSWMESEFRVYSSANNCTFEYVSQPFLMDLEGKQGNFKNLREFVFKNIDGYFKIYSKHTPINLVRDLPQGFSALEPLVDLPIGINITRFQTLLALHRSYLTPGDSSSGWTAGAAAYYVGYLQPRTFLLKYNENGTITDAVDCALDPLSETKCTLKSFTVEKGIYQTSNFRVQPTESIVRFPNITNLCPFGEVFNATRFASVYAWNRKRISNCVADYSVLYNSASFSTFKCYGVSPTKLNDLCFTNVYADSFVIRGDEVRQIAPGQTGKIADYNYKLPDDFTGCVIAWNSNNLDSKVGGNYNYLYRLFRKSNLKPFERDISTEIYQAGSTPCNGVEGFNCYFPLQSYGFQPTNGVGYQPYRVVVLSFELLHAPATVCGPKKSTNLVKNKCVNFNFNGLTGTGVLTESNKKFLPFQQFGRDIADTTDAVRDPQTLEILDITPCSFGGVSVITPGTNTSNQVAVLYQDVNCTEVPVAIHADQLTPTWRVYSTGSNVFQTRAGCLIGAEHVNNSYECDIPIGAGICASYQTQTNSPRRARSVASQSIIAYTMSLGAENSVAYSNNSIAIPTNFTISVTTEILPVSMTKTSVDCTMYICGDSTECSNLLLQYGSFCTQLNRALTGIAVEQDKNTQEVFAQVKQIYKTPPIKDCGGFNFSQILPDPSKPSKRSFIEDLLFNKVTLADAGFIKQYGDCLGDIAARDLICAQKFNGLTVLPPLLTDEMIAQYTSALLAGTITSGWTFGAGAALQIPFAMQMAYRFNGIGVTQNVLYENQKLIANQFNSAIGKIQDSLSSTASALGKLQDVVNQNAQALNTLVKCLSSNFGAISSVLNDILSRLDKVEAEVQIDRLITGRLQCLQTYVTQQLIRAAEIRASANLAATKMSECVLGQSKRVDFCGKGYHLMSFPQSAPHGVVFLHVTYVPAQEKNFTTAPAICHDGKAHFPREGVFVSNGTHWFVTQRNFYEPQIITTDNTFVSGNCDVVIGIVNNTVYDPLQPELDSFKEELDKYFKNHTSPDVDLGDISGINASVVNIQKEIDRLNEVAKNLNESLIDLQELGKYEQYIK

SEQ ID NO: 2298 - protein, 1211 aa, Artificial Sequence
  SARS-CoV-2/Tianmen/HBCDC-HB-07/2020__EPI_ISL_412983 spike protein (1-1211)(Q965C_S1003C)
MFVFLVLLPLVSSQCVNLTTRTQLPPAYTNSFTRGVYYPDKVFRSSVLHSTQDLFLPFFSNVTWFHAIHVSGTNGTKRFDNPVLPFNDGVYFASTEKSNIIRGWIFGTTLDSKTQSLLIVNNATNVVIKVCEFQFCNDPFLGVYYHKNNKSWMESEFRVYSSANNCTFEYVSQPFLMDLEGKQGNFKNLREFVFKNIDGYFKIYSKHTPINLVRDLPQGFSALEPLVDLPIGINITRFQTLLALHRSYLTPGDSSSGWTAGAAAYYVGYLQPRTFLLKYNENGTITDAVDCALDPLSETKCTLKSFTVEKGIYQTSNFRVQPTESIVRFPNITNLCPFGEVFNATRFASVYAWNRKRISNCVADYSVLYNSASFSTFKCYGVSPTKLNDLCFTNVYADSFVIRGDEVRQIAPGQTGKIADYNYKLPDDFTGCVIAWNSNNLDSKVGGNYNYLYRLFRKSNLKPFERDISTEIYQAGSTPCNGVEGFNCYFPLQSYGFQPTNGVGYQPYRVVVLSFELLHAPATVCGPKKSTNLVKNKCVNFNFNGLTGTGVLTESNKKFLPFQQFGRDIADTTDAVRDPQTLEILDITPCSFGGVSVITPGTNTSNQVAVLYQDLNCTEVPVAIHADQLTPTWRVYSTGSNVFQTRAGCLIGAEHVNNSYECDIPIGAGICASYQTQTNSPRRARSVASQSIIAYTMSLGAENSVAYSNNSIAIPTNFTISVTTEILPVSMTKTSVDCTMYICGDSTECSNLLLQYGSFCTQLNRALTGIAVEQDKNTQEVFAQVKQIYKTPPIKDFGGFNFSQILPDPSKPSKRSFIEDLLFNKVTLADAGFIKQYGDCLGDIAARDLICAQKFNGLTVLPPLLTDEMIAQYTSALLAGTITSGWTFGAGAALQIPFAMQMAYRFNGIGVTQNVLYENQKLIANQFNSAIGKIQDSLSSTASALGKLQDVVNQNAQALNTLVKCLSSNFGAISSVLNDILSRLDKVEAEVQIDRLITGRLQCLQTYVTQQLIRAAEIRASANLAATKMSECVLGQSKRVDFCGKGYHLMSFPQSAPHGVVFLHVTYVPAQEKNFTTAPAICHDGKAHFPREGVFVSNGTHWFVTQRNFYEPQIITTDNTFVSGNCDVVIGIVNNTVYDPLQPELDSFKEELDKYFKNHTSPDVDLGDISGINASVVNIQKEIDRLNEVAKNLNESLIDLQELGKYEQYIK

SEQ ID NO: 2299 - protein, 1211 aa, Artificial Sequence
  SARS-CoV-2/Hong Kong/case42_VM20002493/2020__EPI_ISL_414527 spike protein (1-1211)(Q965C_S1003C)
MFVFLVLLPLVSSQCVNLTTRTQLPPAYTNSFTRGVYYPDKVFRSSVLHSTQDLFLPFFSNVTWFHAIHVSGTNGTKRFDNPVLPFNDGVYFASTEKSNIIRGWIFGTTLDSKTQSLLIVNNATNVVIKVCEFQFCNDPFLGVYYHKNNKSWMESEFRVYSSANNCTFEYVSQPFLMDLEGKQGNFKNLREFVFKNIDGYFKIYSKHTPINLVRDLPQGFSALEPLVDLPIGINITRFQTLLALHRSYLTPGDSSSGWTAGAAAYYVGYLQPRTFLLKYNENGTITDAVDCALDPLSETKCTLKSFTVEKGIYQTSNFRVQPTESIVRFPNITNLCPFGEVFNATRFASVYAWNRKRISNCVADYSVLYNSASFSTFKCYGVSPTKLNDLCFTNVYADSFVIRGDEVRQIAPGQTGKIADYNYKLPDDFTGCVIAWNSNNLDSKVGGNYNYLYRLFRKSNLKPFERDISTEIYQAGSTPCNGVEGFNCYFPLQSYGFQPTNGVGYQPYRVVVLSFELLHAPATVCGPKKSTNLVKNKCVNFNFNGLTGTGVLTESNKKFLPFQQFGRDIADTTDAVRDPQTLEILDITPCSFGGVSVITPGTNTSNQVAVLYQDVNCTEVPVAIHADQLTPTWRVYSTGSNVFQTRAGCLIGAEHVNNSYECDIPIGAGICASYQTQTNSPRRARSVASQSIIAYTMSLGAENSVAYSNNSIAIPTNFAISVTTEILPVSMTKTSVDCTMYICGDSTECSNLLLQYGSFCTQLNRALTGIAVEQDKNTQEVFAQVKQIYKTPPIKDFGGFNFSQILPDPSKPSKRSFIEDLLFNKVTLADAGFIKQYGDCLGDIAARDLICAQKFNGLTVLPPLLTDEMIAQYTSALLAGTITSGWTFGAGAALQIPFAMQMAYRFNGIGVTQNVLYENQKLIANQFNSAIGKIQDSLSSTASALGKLQDVVNQNAQALNTLVKCLSSNFGAISSVLNDILSRLDKVEAEVQIDRLITGRLQCLQTYVTQQLIRAAEIRASANLAATKMSECVLGQSKRVDFCGKGYHLMSFPQSAPHGVVFLHVTYVPAQEKNFTTAPAICHDGKAHFPREGVFVSNGTHWFVTQRNFYEPQIITTDNTFVSGNCDVVIGIVNNTVYDPLQPELDSFKEELDKYFKNHTSPDVDLGDISGINASVVNIQKEIDRLNEVAKNLNESLIDLQELGKYEQYIK

SEQ ID NO: 2300 - protein, 1211 aa, Artificial Sequence
  SARS-CoV-2/USA/CruiseA-23/2020__EPI_ISL_414482 spike protein (1-1211)(Q965C_S1003C)
MFVFLVLLPLVSSQCVNLTTRTQLPPAYTNSFTRGVYYPDKVFRSSVLHSTQDLFLPFFSNVTWFHAIHVSGTNGTKRFDNPVLPFNDGVYFASTEKSNIIRGWIFGTTLDSKTQSLLIVNNATNVVIKVCEFQFCNDPFLGVYYHKNNKSWMESEFRVYSSANNCTFEYVSQPFLMDLEVKQGNFKNLREFVFKNIDGYFKIYSKHTPINLVRDLPQGFSALEPLVDLPIGINITRFQTLLALHRSYLTPGDSSSGWTAGAAAYYVGYLQPRTFLLKYNENGTITDAVDCALDPLSETKCTLKSFTVEKGIYQTSNFRVQPTESIVRFPNITNLCPFGEVFNATRFASVYAWNRKRISNCVADYSVLYNSASFSTFKCYGVSPTKLNDLCFTNVYADSFVIRGDEVRQIAPGQTGKIADYNYKLPDDFTGCVIAWNSNNLDSKVGGNYNYLYRLFRKSNLKPFERDISTEIYQAGSTPCNGVEGFNCYFPLQSYGFQPTNGVGYQPYRVVVLSFELLHAPATVCGPKKSTNLVKNKCVNFNFNGLTGTGVLTESNKKFLPFQQFGRDIADTTDAVRDPQTLEILDITPCSFGGVSVITPGTNTSNQVAVLYQDVNCTEVPVAIHADQLTPTWRVYSTGSNVFQTRAGCLIGAEHVNNSYECDIPIGAGICASYQTQTNSPRRARSVASQSIIAYTMSLGAENSVAYSNNSIAIPTNFTISVTTEILPVSMTKTSVDCTMYICGDSTECSNLLLQYGSFCTQLNRALTGIAVEQDKNTQEVFAQVKQIYKTPPIKDFGGFNFSQILPDPSKPSKRSFIEDLLFNKVTLADAGFIKQYGDCLGDIAARDLICAQKFNGLTVLPPLLTDEMIAQYTSALLAGTITSGWTFGAGAALQIPFAMQMAYRFNGIGVTQNVLYENQKLIANQFNSAIGKIQDSLSSTASALGKLQDVVNQNAQALNTLVKCLSSNFGAISSVLNDILSRLDKVEAEVQIDRLITGRLQCLQTYVTQQLIRAAEIRASANLAATKMSECVLGQSKRVDFCGKGYHLMSFPQSAPHGVVFLHVTYVPAQEKNFTTAPAICHDGKAHFPREGVFVSNGTHWFVTQRNFYEPQIITTDNTFVSGNCDVVIGIVNNTVYDPLQPELDSFKEELDKYFKNHTSPDVDLGDISGINASVVNIQKEIDRLNEVAKNLNESLIDLQELGKYEQYIK

SEQ ID NO: 2301 - protein, 1211 aa, Artificial Sequence
  SARS-CoV-2/Hong Kong/case85_VM20002868/2020__EPI_ISL_414519 spike protein (1-1211)(Q965C_S1003C)
MFVFLVLVPLVSSQCVNLTTRTQLPPAYTNSFTRGVYYPDKVFRSSVLHSTQDLFLPFFSNVTWFHAIHVSGTNGTKRFDNPVLPFNDGVYFASTEKSNIIRGWIFGTTLDSKTQSLLIVNNATNVVIKVCEFQFCNDPFLGVYYHKNNKSWMESEFRVYSSANNCTFEYVSQPFLMDLEGKQGNFKNLREFVFKNIDGYFKIYSKHTPINLVRDLPQGFSALEPLVDLPIGINITRFQTLLALHRSYLTPGDSSSGWTAGAAAYYVGYLQPRTFLLKYNENGTITDAVDCALDPLSETKCTLKSFTVEKGIYQTSNFRVQPTESIVRFPNITNLCPFGEVFNATRFASVYAWNRKRISNCVADYSVLYNSASFSTFKCYGVSPTKLNDLCFTNVYADSFVIRGDEVRQIAPGQTGKIADYNYKLPDDFTGCVIAWNSNNLDSKVGGNYNYLYRLFRKSNLKPFERDISTEIYQAGSTPCNGVEGFNCYFPLQSYGFQPTNGVGYQPYRVVVLSFELLHAPATVCGPKKSTNLVKNKCVNFNFNGLTGTGVLTESNKKFLPFQQFGRDIADTTDAVRDPQTLEILDITPCSFGGVSVITPGTNTSNQVAVLYQDVNCTEVPVAIHADQLTPTWRVYSTGSNVFQTRAGCLIGAEHVNNSYECDIPIGAGICASYQTQTNSPRRARSVASQSIIAYTMSLGAENSVAYSNNSIAIPTNFTISVTTEILPVSMTKTSVDCTMYICGDSTECSNLLLQYGSFCTQLNRALTGIAVEQDKNTQEVFAQVKQIYKTPPIKDFGGFNFSQILPDPSKPSKRSFIEDLLFNKVTLADAGFIKQYGDCLGDIAARDLICAQKFNGLTVLPPLLTDEMIAQYTSALLAGTITSGWTFGAGAALQIPFAMQMAYRFNGIGVTQNVLYENQKLIANQFNSAIGKIQDSLSSTASALGKLQDVVNQNAQALNTLVKCLSSNFGAISSVLNDILSRLDKVEAEVQIDRLITGRLQCLQTYVTQQLIRAAEIRASANLAATKMSECVLGQSKRVDFCGKGYHLMSFPQSAPHGVVFLHVTYVPAQEKNFTTAPAICHDGKAHFPREGVFVSNGTHWFVTQRNFYEPQIITTDNTFVSGNCDVVIGIVNNTVYDPLQPELDSFKEELDKYFKNHTSPDVDLGDISGINASVVNIQKEIDRLNEVAKNLNESLIDLQELGKYEQYIK

SEQ ID NO: 2302 - protein, 1211 aa, Artificial Sequence; identical to SEQ ID NO: 2292
  SARS-CoV-2/England/200990660/2020__EPI_ISL_414523 spike protein (1-1211)(Q965C_S1003C)

SEQ ID NO: 2303 - protein, 1211 aa, Artificial Sequence
  SARS-CoV-2/Australia/NSW09/2020__EPI_ISL_413595 spike protein (1-1211)(Q965C_S1003C)
MFVFLVLLPLVSSQCVNLTTRTQLPPAYTNSFTRGVYYPDKVFRSSVLHSTQDLFLPFFSNVTWFHAIHVSGTNGTKRFDNPVLPFNDGVYFASTEKSNIIRGWIFGTTLDSKTQSLLIVNNATNVVIKVCEFQFCNDPFLGVYYHKNNKSWMESEFRVYSSANNCTFEYVSQPFLMDLEGKQGNFKNLREFVFKNIDGYFKIYSKHTPINLVRDLPQGFSALEPLVDLPIGINITRFQTLLALHRSYLTPGDSSSGWTAGAAAYYVGYLQPRTFLLKYNENGTITDAVDCALDPLSETKCTLKSFTVEKGIYQTSNFRVQPTESIVRFPNITNLCPFGEVFNATRFASVYAWNRKRISNCVADYSVLYNSASFSTFKCYGVSPTKLNDLCFTNVYADSFVIRGDEVRQIAPGQTGKIADYNYKLPDDFTGCVIAWNSNNLDSKVGGNYNYLYRLFRKSNLKPFERDISTEIYQAGSTPCNGVEGFNCYFPLQSYGFQPTNGVGYQPYRVVVLSFELLHAPATVCGPKKSTNLVKNKCVNFNFNGLTGTGVLTESNKKFLPFQQFGRDIADTTDAVRDPQTLEILDITPCSFGGVSVITPGTNTSNQVAVLYQDVNCTEVPVAIHADQLTPTWRVYSTGSNVFQTRAGCLIGAEHVNNSYECDIPIGAGICASYQTQTNSPRRARSVASQSIIAYTMSLGAENSVAYSNNSIAIPTNFTISVTTEILPVSMTKTSVDCTMYICGDSTECSNLLLQYGSFCTQLNRALTGIAVEQDKNTQEVFAQVKQIYKTPPIKDFGGFNFSQILPDPSKPSKRSFIEDLLFNKVTLADAGFIKQYGDCLGDIAARDLICAQKFNGLTVLPPLLTDEMIAQYTSALLAGTITSGWTFGAGAALQIPFAMQMAYRFNGIGVTQNVLYENQKLIANQFNSAIGKIQDSLSFTASALGKLQDVVNQNAQALNTLVKCLSSNFGAISSVLNDILSRLDKVEAEVQIDRLITGRLQCLQTYVTQQLIRAAEIRASANLAATKMSECVLGQSKRVDFCGKGYHLMSFPQSAPHGVVFLHVTYVPAQEKNFTTAPAICHDGKAHFPREGVFVSNGTHWFVTQRNFYEPQIITTDNTFVSGNCDVVIGIVNNTVYDPLQPELDSFKEELDKYFKNHTSPDVDLGDISGINASVVNIQKEIDRLNEVAKNLNESLIDLQELGKYEQYIK

SEQ ID NO: 2304 - protein, 1211 aa, Artificial Sequence; identical to SEQ ID NO: 2284
  SARS-CoV-2/Australia/NSW10/2020__EPI_ISL_413596 spike protein (1-1211)(Q965C_S1003C)

SEQ ID NO: 2305 - protein, 1211 aa, Artificial Sequence
  SARS-CoV-2/Switzerland/1000477797/2020__EPI_ISL_413023 spike protein (1-1211)(Q965C_S1003C)
MFVFLVLLPLVSSQCVNLTTRTQLPPAYTNSFTRGVYYPDKVFRSSVLHSTQDLFLPFFSNVTWFHAIHVSGTNGTKRFDNPVLPFNDGVYFASTEKSNIIRGWIFGTTLDSKTQSLLIVNNATNVVIKVCEFQFCNDPFLGVYYHKNNKSWMESEFRVYSSANNCTFEYVSQPFLMDLEGKQGNFKNLREFVFKNIDGYFNIYSKHTPINLVRDLPQGFSALEPLVDLPIGINITRFQTLLALHRSYLTPGDSSSGWTAGAAAYYVGYLQPRTFLLKYNENGTITDAVDCALDPLSETKCTLKSFTVEKGIYQTSNFRVQPTESIVRFPNITNLCPFGEVFNATRFASVYAWNRKRISNCVADYSVLYNSASFSTFKCYGVSPTKLNDLCFTNVYADSFVIRGDEVRQIAPGQTGKIADYNYKLPDDFTGCVIAWNSNNLDSKVGGNYNYLYRLFRKSNLKPFERDISTEIYQAGSTPCNGVEGFNCYFPLQSYGFQPTNGVGYQPYRVVVLSFELLHAPATVCGPKKSTNLVKNKCVNFNFNGLTGTGVLTESNKKFLPFQQFGRDIADTTDAVRDPQTLEILDITPCSFGGVSVITPGTNTSNQVAVLYQGVNCTEVPVAIHADQLTPTWRVYSTGSNVFQTRAGCLIGAEHVNNSYECDIPIGAGICASYQTQTNSPRRARSVASQSIIAYTMSLGAENSVAYSNNSIAIPTNFTISVTTEILPVSMTKTSVDCTMYICGDSTECSNLLLQYGSFCTQLNRALTGIAVEQDKNTQEVFAQVKQIYKTPPIKDFGGFNFSQILPDPSKPSKRSFIEDLLFNKVTLADAGFIKQYGDCLGDIAARDLICAQKFNGLTVLPPLLTDEMIAQYTSALLAGTITSGWTFGAGAALQIPFAMQMAYRFNGIGVTQNVLYENQKLIANQFNSAIGKIQDSLSSTASALGKLQDVVNQNAQALNTLVKCLSSNFGAISSVLNDILSRLDKVEAEVQIDRLITGRLQCLQTYVTQQLIRAAEIRASANLAATKMSECVLGQSKRVDFCGKGYHLMSFPQSAPHGVVFLHVTYVPAQEKNFTTAPAICHDGKAHFPREGVFVSNGTHWFVTQRNFYEPQIITTDNTFVSGNCDVVIGIVNNTVYDPLQPELDSFKEELDKYFKNHTSPDVDLGDISGINASVVNIQKEIDRLNEVAKNLNESLIDLQELGKYEQYIK

SEQ ID NO: 2306 - protein, 1211 aa, Artificial Sequence
  SARS-CoV-2/Belgium/BA-02291/2020__EPI_ISL_415159 spike protein (1-1211)(Q965C_S1003C)
MFVFLVLLPLVSSQCVNLTTRTQLPPAYTNSFTRGVYYPDKVFRSSVLHSTQDLFLPFFSNVTWFHAIHVSGTNGTKRFDNPVLPFNDGVYFASTEKSNIIRGWIFGTTLDSKTQSLLIVNNATNVVIKVCEFQFCNDPFLGVYYHKNNKSWMESEFRVYSSANNCTFEYVSQPFLMDLEGKQGNFKNLREFVFKNIDGYFKIYSKHTPINLVRDLPQGFSALEPLVDLPIGINITRFQTLLALHRSYLTPGDSSSGWTAGAAAYYVGYLQPRTFLLKYNENGTITDAVDCALDPLSETKCTLKSFTVEKGIYQTSNFRVQPTESIVRFPNITNLCPFGEVFNATRFASVYAWNRKRISNCVADYSVLYNSASFSTFKCYGVSPTKLNDLCFTNVYADSFVIRGDEVRQIAPGQTGKIADYNYKLPDDFTGCVIAWNSNNLDSKVGGNYNYLYRLFRRSNLKPFERDISTEIYQAGSTPCNGVEGFNCYFPLQSYGFQPTNGVGYQPYRVVVLSFELLPAPATVCGPKKSTNLVKNKCVNFNFNGLTGTGVLTESNKKFLPFQQFGRDIADTTDAVRDPQTLEILDITPCSFGGVSVITPGTNTSNQVAVLYQGVNCTEVPVAIHADQLTPTWRVYSTGSNVFQTRAGCLIGAEHVNNSYECDIPIGAGICASYQTQTNSPRRARSVASQSIIAYTMSLGAENSVAYSNNSIAIPTNFTISVTTEILPVSMTKTSVDCTMYICGDSTECSNLLLQYGSFCTQLNRALTGIAVEQDKNTQEVFAQVKQIYKTPPIKDFGGFNFSQILPDPSKPSKRSFIEDLLFNKVTLADAGFIKQYGDCLGDIAARDLICAQKFNGLTVLPPLLTDEMIAQYTSALLAGTITSGWTFGAGAALQIPFAMQMAYRFNGIGVTQNVLYENQKLIANQFNSAIGKIQDSLSSAAPALGKLQDVVNQNAQALNTLVKCLSSNFGAISSVLNDILSRLDKVEAEVQIDRLITGRLQCLQTYVTQQLIRAAEIRASANLAATKMSECVLGQSKRVDFCGKGYHLMSFPQSAPHGVVFLHVTYVPAQEKNFTTAPAICHDGKAHFPREGVFVSNGTHWFVTQRNFYEPQIITTDNTFVSGNCDVVIGIVNNTVYDPLQPELDSFKEELDKYFKNHTSPDVDLGDISGINASVVNIQKEIDRLNEVAKNLNESLIDLQELGKYEQYIK

SEQ ID NO: 2307 - protein, 1211 aa, Artificial Sequence
  SARS-CoV-2/USA/WA8-UW5/2020__EPI_ISL_413486 spike protein (1-1211)(Q965C_S1003C)
MFVFLVLLPLVSSQCVNLTTRTQLPPAYTNSFTRGVYYPDKVFRSSVLHSTQDLFLPFFSNVTWFHAIHVSGTNGTKRFDNPVLPFNDGVYFASTEKSNIIRGWIFGTTLDSKTQSLLIVNNATNVVIKVCEFQFCNDPFLGVYYHKNNKSWMESEFRVYSSANNCTFEYVSQPFLMDLEGKQGNFKNLREFVFKNIDGYFKIYSKHTPINLVRDLPQGFSALEPLVDLPIGINITRFQTLLALHRSYLTPGDSSSGWTAGAAAYYVGYLQPRTFLLKYNENGTITDAVDCALDPLSETKCTLKSFTVEKGIYQTSNFRVQPTESIVRFPNITNLCPFGEVFNATRFASVYAWNRKRISNCVADYSVLYNSASFSTFKCYGVSPTKLNDLCFTNVYADSFVIRGDEVRQIAPGQTGKIADYNYKLPDDFTGCVIAWNSNNLDSKVGGNYNYLYRLFRKSNLKPFERDISTEIYQAGSTPCNGVEGFNCYFPLQSYGFQPTNGVGYQPYRVVVLSFELLHAPATVCGPKKSTNLVKNKCVNFNFNGLTGTGVLTESNKKFLPFQQFGRDIADTTDAVRDPQTLEILDITPCSFGGVSVITPGTNTSNQVAVLYQDVNCTEVPVAIHADQLTPTWRVYSTGSNVFQTRAGCLIGAEYVNNSYECDIPIGAGICASYQTQTNSPRRARSVASQSIIAYTMSLGAENSVAYSNNSIAIPTNFTISVTTEILPVSMTKTSVDCTMYICGDSTECSNLLLQYGSFCTQLNRALTGIAVEQDKNTQEVFAQVKQIYKTPPIKDFGGFNFSQILPDPSKPSKRSFIEDLLFNKVTLADAGFIKQYGDCLGDIAARDLICAQKFNGLTVLPPLLTDEMIAQYTSALLAGTITSGWTFGAGAALQIPFAMQMAYRFNGIGVTQNVLYENQKLIANQFNSAIGKIQDSLSSTASALGKLQDVVNQNAQALNTLVKCLSSNFGAISSVLNDILSRLDKVEAEVQIDRLITGRLQCLQTYVTQQLIRAAEIRASANLAATKMSECVLGQSKRVDFCGKGYHLMSFPQSAPHGVVFLHVTYVPAQEKNFTTAPAICHDGKAHFPREGVFVSNGTHWFVTQRNFYEPQIITTDNTFVSGNCDVVIGIVNNTVYDPLQPELDSFKEELDKYFKNHTSPDVDLGDISGINASVVNIQKEIDRLNEVAKNLNESLIDLQELGKYEQYIK

SEQ ID NO: 2308 - protein, 1211 aa, Artificial Sequence
  SARS-CoV-2/England/20102000506/2020__EPI_ISL_415147 spike protein (1-1211)(Q965C_S1003C)
MFVFLVLLPLVSSQCVNLTTRTQLPPAYTNSFTRGVYYPDKVFRSSVLHSTQDLFLPFFSNVTWFHAIHVSGTNGTKRFDNPVLPFNDGVYFASTEKSNIIRGWIFGTTLDSKTQSLLIVNNATNVVIKVCEFQFCNDPFLGVYYHKNNKSWMESEFRVYSSANNCTFEYVSQPFLMDLEGKQGNFKNLREFVFKNIDGYFKIYSKHTPINLVRDLPQGFSALEPLVDLPIGINITRFQTLLALHRSYLTPGDSSSGWTAGAAAYYVGYLQPRTFLLKYNENGTITDAVDCALDPLSETKCTLKSFTVEKGIYQTSNFRVQPTESIVRFPNITNLCPFGEVFNATRFASVYAWNRKRISNCVADYSVLYNSASFSTFKCYGVSPTKLNDLCFTNVYADSFVIRGDEVRQIAPGQTGKIADYNYKLPDDFTGCVIAWNSNNLDSKVGGNYNYLYRLFRKSNLKPFERDISTEIYQAGSTPCNGVEGFNCYFPLQSYGFQPTNGVGYQPYRVVVLSFELLHAPATVCGPKKSTNLVKNKCVNFNFNGLTGTGVLTESNKKFLPFQQFGRDIADTTDAVRDPQTLEILDITPCSFGGVSVITPGTNTSNQVAVLYQGVNCTEVPVAIHADQLTPTWRVYSTGSNVFQTRAGCLIGAEHVNNSYECDIPIGAGICASYQTQTNSPRRARSVASQSIIAYTMSLGAENSVAYSNNSIAIPTNFTISVTTEILPVSMTKTSVDCTMYICGDSTECSNLLLQYGSFCTQLNRALTGIAVEQDKNTQEVFAQVKQIYKTPPIKDFGGFNFSQILPDPSKPSKRSFIEDLLFNKVTLADAGFIKQYGYCLGDIAARDLICAQKFNGLTVLPPLLTDEMIAQYTSALLAGTITSGWTFGAGAALQIPFAMQMAYRFNGIGVTQNVLYENQKLIANQFNSAIGKIQDSLSSTASALGKLQDVVNQNAQALNTLVKCLSSNFGAISSVLNDILSRLDKVEAEVQIDRLITGRLQCLQTYVTQQLIRAAEIRASANLAATKMSECVLGQSKRVDFCGKGYHLMSFPQSAPHGVVFLHVTYVPAQEKNFTTAPAICHDGKAHFPREGVFVSNGTHWFVTQRNFYEPQIITTDNTFVSGNCDVVIGIVNNTVYDPLQPELDSFKEELDKYFKNHTSPDVDLGDISGINASVVNIQKEIDRLNEVAKNLNESLIDLQELGKYEQYIK

SEQ ID NO: 2309 - protein, 1211 aa, Artificial Sequence
  SARS-CoV-2/Belgium/VAG-03013/2020__EPI_ISL_415155 spike protein (1-1211)(Q965C_S1003C)
MFVFLVLLPLVSSQCVNLTTRTQLPPAYTNSFTRGVYYPDKVFRSSVLHSTQDLFLPFFSNVTWFHAIHVSGTNGTKRFDNPVLPFNDGVYFASTEKSNIIRGWIFGTTLDSKTQSLLIVNNATNVVIKVCEFQFCNDPFLGVYYHKNNKSWMESEFRVYSSANNCTFEYVSQPFLMDLEGKQGNFKNLREFVFKNIDGYFKIYSKHTPINLVRDLPQGFSALEPLVDLPIGINITRFQTLLALHRSYLTPGDSSSGWTAGAAAYYVGYLQPRTFLLKYNENGTITDAVDCALDPLSETKCTLKSFTVEKGIYQTSNFRVQPTESIVRFPNITNLCPFGEVFNATRFASVYAWNRKRISNCVADYSVLYNSASFSTFKCYGVSPTKLNDLCFTNVYADSFVIRGDEVRQIAPGQTGKIADYNYKLPDDFTGCVIAWNSNNLDSKVGGNYNYLYRLFRKSNLKPFERDISTEIYQAGSTPCNGVEGFNCYFPLQSYGFQPTNGVGYQPYRVVVLSFELLHAPATVCGPKKSTNLVKNKCVNFNFNGLTGTGVLTESNKKFLPFQQFGRDIADTTDAVRDPQTLEILDITPCSFGGVSVITPGTNTSNQVAVLYQGVNCTEVPVAIHADQLTPTWRVYSTGSNVFQTRAGCLIGAEHVNNSYECDIPIGAGICASYQTQTNSPRRARSVASQSIIAYTMSLGAENSVAYSNNSIAIPTNFTISVTTEILPVSMTKTSVDCTMYICGDSTECSNLLLQYGSFCTQLNRALTGIAVEQDKNTQEVFAQVKQIYKTPPIKDFGGFNFSQILPDPSKPSKRSFIEDLLFNKVTLADAGFIKQYGDCLGDIAARDLICAQKFNGLTVLPPLLTDEMIAQYTSALLAGTITSGWTFGAGAALQIPFAMQMAYRFNGIGVTQNVLYENQKLIANQFNSAIGKIQDSLSSTATALGKLQDVVNQNAQALNTLVKCLSSNFGAISSVLNDILSRLDKVEAEVQIDRLITGRLQCLQTYVTQQLIRAAEIRASANLAATKMSECVLGQSKRVDFCGKGYHLMSFPQSAPHGVVFLHVTYVPAQEKNFTTAPAICHDGKAHFPREGVFVSNGTHWFVTQRNFYEPQIITTDNTFVSGNCDVVIGIVNNTVYDPLQPELDSFKEELDKYFKNHTSPDVDLGDISGINASVVNIQKEIDRLNEVAKNLNESLIDLQELGKYEQYIK

SEQ ID NO: 2310 - protein, 1211 aa, Artificial Sequence
  SARS-CoV-2/Belgium/BC-03016/2020__EPI_ISL_415157 spike protein (1-1211)(Q965C_S1003C)
MFVFLVLLPLVSSQCVNLTTRTQLPPAYTNSFTRGVYYPDKVFRSSVLHSTQDLFLPFFSNVTWFHAIHVSGTNGTKRFDNPVLPFNDGVYFASTEKSNIIRGWIFGTTLDSKTQSLLIVNNATNVVIKVCEFQFCNDPFLGVYYHKNNKSWMESEFRVYSSANNCTFEYVSQPFLMDLEGKQGNFKNLREFVFKNIDGYFKIYSKHTPINLVRDLPQGFSALEPLVDLPIGINITRFQTLLALHRSYLTPGDSSSGWTAGAAAYYVGYLQPRTFLLKYNENGTITDAVDCALDPLSETKCTLKSFTVEKGIYQTSNFRVQPTESIVRFPNITNLCPFGEVFNATRFASVYAWNRKRISNCVADYSVLYNSASFSTFKCYGVSPTKLNDLCFTNVYADSFVIRGDEVRQIAPGQTGKIADYNYKLPDDFTGCVIAWNSNNLDSKVGGNYNYLYRLFRKSNLKPFERDISTEIYQAGSTPCNGVEGFNCYFPLQSYGFQPTNGVGYQPYRVVVLSFELLHAPATVCGPKKSTNLVKNKCVNFNFNGLTGTGVLTESNKKFLPFQQFGRDIADTTDAVRDPQTLEILDITPCSFGGVSVITPGTNTSNQVAVLYQGVNCTEVPVAIHADQLTPTWRVYSTGSNVFQTRAGCLIGAEHVNNSYECDIPIGAGICASYQTQTNSPRRARSVASQSIIAYTMSLGAENSVAYSNNSIAIPTNFTISVTTEILPVSMTKTSVDCTMYICGDSTECSNLLLQYGSFCTQLNRALTGIAVEQDKNTQEVFAQVKQIYKTPPIKDFGGFNFSQILPDPSKPSKRSFIEDLLFNKVTLADAGFIKQYGDCLGDIAARDLICAQKFNGLTVLPPLLTDEMIAQYTSALLAGTITSGWTFGAGAALQIPFAMQMAYRFNGIGVTQNVLYENQKLIANQFNSAIGKIQDSLSSTAPALGKLQDVVNQNAQALNTLVKCLSSNFGAISSVLNDILSRLDKVEAEVQIDRLITGRLQCLQTYVTQQLIRAAEIRASANLAATKMSECVLGQSKRVDFCGKGYHLMSFPQSAPHGVVFLHVTYVPAQEKNFTTAPAICHDGKAHFPREGVFVSNGTHWFVTQRNFYEPQIITTDNTFVSGNCDVVIGIVNNTVYDPLQPELDSFKEELDKYFKNHTSPDVDLGDISGINASVVNIQKEIDRLNEVAKNLNESLIDLQELGKYEQYIK

SEQ ID NO: 2311 - protein, 1211 aa, Artificial Sequence
  SARS-CoV-2/Germany/BavPat3/2020__EPI_ISL_414521 spike protein (1-1211)(Q965C_S1003C)
MFVFLVLLPLVSSQCVNLTTRTQLPPAYTNSFTRGVYYPDKVFRSSVLHSTQDLFLPFFSNVTWFHAIHVSGTNGTKRFDNPVLPFNDGVYFASTEKSNIIRGWIFGTTLDSKTQSLLIVNNATNVVIKVCEFQFCNDPFLGVYYHKNNKSWMESEFRVYSSANNCTFEYVSQPFLMDLEGKQGNFKNLREFVFKNIDGYFKIYSKHTPINLVRDLPQGFSALEPLVDLPIGINITRFQTLLALHRSYLTPGDSSSGWTAGAAAYYVGYLQPRTFLLKYNENGTITDAVDCALDPLSETKCTLKSFTVEKGIYQTSNFRVQPTESIVRFPNITNLCPFGEVFNATRFASVYAWNRKRISNCVADYSVLYNSASFSTFKCYGVSPTKLNDLCFTNVYADSFVIRGDEVRQIAPGQTGKIADYNYKLPDDFTGCVIAWNSNNLDSKVGGNYNYLYRLFRKSNLKPFERDISTEIYQAGSTPCNGVEGFNCYFPLQSYGFQPTNGVGYQPYRVVVLSFELLHAPATVCGPKKSTNLVKNKCVNFNFNGLTGTGVLTESNKKFLPFQQFGRDIADTTDAVRDPQTLEILDITPCSFGGVSVITPGTNTSNQVAVLYQDVNCTEVPVAIHADQLTPTWRVYSTGSNVFQTRAGCLIGAEHVNNSYECDIPIGAGICASYQTQTNSPRRARSVASQSIIAYTMSLGAENSVAYSNNSIAIPTNFTISVTTEILPVSMTKTSVDCTMYICGDSTECSNLLLQYGSFCTQLNRALTGIAVEQDKNTQQVFAQVKQIYKTPPIKDFGGFNFSQILPDPSKPSKRSFIEDLLFNKVTLADAGFIKQYGDCLGDIAARDLICAQKFNGLTVLPPLLTDEMIAQYTSALLAGTITSGWTFGAGAALQIPFAMQMAYRFNGIGVTQNVLYENQKLIANQFNSAIGKIQDSLSSTASALGKLQDVVNQNAQALNTLVKCLSSNFGAISSVLNDILSRLDKVEAEVQIDRLITGRLQCLQTYVTQQLIRAAEIRASANLAATKMSECVLGQSKRVDFCGKGYHLMSFPQSAPHGVVFLHVTYVPAQEKNFTTAPAICHDGKAHFPREGVFVSNGTHWFVTQRNFYEPQIITTDNTFVSGNCDVVIGIVNNTVYDPLQPELDSFKEELDKYFKNHTSPDVDLGDISGINASVVNIQKEIDRLNEVAKNLNESLIDLQELGKYEQYIK

SEQ ID NO: 2312 - protein, 1211 aa, Artificial Sequence
  SARS-CoV-2/France/HF1805/2020__EPI_ISL_414628 spike protein (1-1211)(Q965C_S1003C)
MFVFLVLLPLVSSQCVNLTTRTQLPPAYTNSFTRGVYYPDKVFRSSVLHSTQDLFLPFFSNVTWFHAIHVSGTNGTKRFDNPVLPFNDGVYFASTEKSNIIRGWIFGTTLDSKTQSLLIVNNATNVVIKVCEFQFCNDPFLGVYYHKNNKSWMESEFRVYSSANNCTFEYVSQPFLMDLEGKQGNFKNLREFVFKNIDGYFKIYSKHTPINLVRDLPQGFSALEPLVDLPIGINITRFQTLLALHRSYLTPGDSSSGWTAGAAAYYVGYLQPRTFLLKYNENGTITDAVDCALDPLSETKCTLKSFTVEKGIYQTSNFRVQPTESIVRFPNITNLCPFGEVFNATRFASVYAWNRKRISNCVADYSVLYNSASFSTFKCYGVSPTKLNDLCFTNVYADSFVIRGDEVRQIAPGQTGKIADYNYKLPDDFTGCVIAWNSNNLDSKVGGNYNYLYRLFRKSNLKPFERDISTEIYQAGSTPCNGVEGFNCYFPLQSYGFQPTNGVGYQPYRVVVLSFELLHAPATVCGPKKSTNLVKNKCVNFNFNGLTGTGVLTESNKKFLPFQQFGRDIADTTDAVRDPQTLEILDITPCSFGGVSVITPGTNTSNQVAVLYQGVNCTEVPVAIHADQLTPTWRVYSTGSNVFQTRAGCLIGAEHVNNSYECDIPIGAGICASYQTQTNSPRRARSVASQSIIAYTMSLGAENSVAYSNNSIAIPTNFTISVTTEILPVSMTKTSVDCTMYICGDSTECSNLLLQYGSFCTQLNRALTGIAVEQDKNTQEVFAQVKQIYKTPPIKDFGGFNFSQILPDPSKPSKRSFIEDLLFNKVTLADAGFIKQYGDCLGDIAARDLICAQKFNGLTVLPPLLTDEMIAQYTSALLAGTITSGWTFGAGAALQIPFAMQMAYRFNGIGVTQNVLYENQKLIANQFNSAIGKIQDSLSSTASALGKLQDVVNQNAQALNTLVKCLSSNFGAISSVLNDILSRLDKVEAEVQIDRLITGRLQCLQTYVTQQLIRAAEIRASANLAATKMSECVLGQSKRVDFCGKGYHLMSFPQSAPHGVVFLHVTYVPAQEKNFTTAPAICHDGKAHFPREGVFVSNGTHWFVTQRNFYEPQIITTDNTFVSGNCDVVIGVVNNTVYDPLQPELDSFKEELDKYFKNHTSPDVDLGDISGINASVVNIQKEIDRLNEVAKNLNESLIDLQELGKYEQYIK

SEQ ID NO: 2313 - protein, 1211 aa, Artificial Sequence
  SARS-CoV-2/Netherlands/ZuidHolland_9/2020__EPI_ISL_414445 spike protein (1-1211)(Q965C_S1003C)
MFVFLVLLPLVSSQCVNLTTRTQLPPAYTNSFTRGVYYPDKVFRSSVLHSTQDLFLPFFSNVTWFHAIHVSGTNGTKRFDNPVLPFNDGVYFASTEKSNIIRGWIFGTTLDSKTQSLLIVNNATNVVIKVCEFQFCNDPFLGVYYHKNNKSWMESEFRVYSSANNCTFEYVSQPFLMDLEGKQGNFKNLREFVFKNIDGYFKIYSKHTPINLVRDLPQGFSALEPLVDLPIGINITRFQTLLALHRSYLTPGDSSSGWTAGAAAYYVGYLQPRTFLLKYNENGTITDAVDCALDPLSETKCTLKSFTVEKGIYQTSNFRVQPTESIVRFPNITNLCPFGEVFNATRFASVYAWNRKRISNCVADYSVLYNSASFSTFKCYGVSPTKLNDLCFTNVYADSFVIRGDEVRQIAPGQTGKIADYNYKLPDDFTGCVIAWNSNNLDSKVGGNYNYLYRLFRKSNLKPFERDISTEIYQAGSTPCNGVEGFNCYFPLQSYGFQPTNGVGYQPYRVVVLSFELLHAPATVCGPKKSTNLVKNKCVNFNFNGLTGTGVLTESNKKFLPFQQFGRDIADTTDAVRDPQTLEILDITPCSFGGVSVITPGTNTSNQVAVLYQGVNCTEVPVAIHADQLTPTWRVYSTGSNVFQTRAGCLIGAEHVNNSYECDIPIGAGICASYQTQTNSPRRARSVASQSIIAYTMSLGAENSVAYSNNSIAIPTNFTISVTTEILPVSMTKTSVDCTMYICGDSTECSNLLLQYGSFCTQLNRALTGIAVEQDKNTQEVFAQVKQIYKTPPIKDFGGFNFSQILPDPSKPSKRSFIEDLLFNKVTLADAGFIKQYGDCLGDIAARDLICVQKFNGLTVLPPLLTDEMIAQYTSALLAGTITSGWTFGAGAALQIPFAMQMAYRFNGIGVTQNVLYENQKLIANQFNSAIGKIQDSLSSTASALGKLQDVVNQNAQALNTLVKCLSSNFGAISSVLNDILSRLDKVEAEVQIDRLITGRLQCLQTYVTQQLIRAAEIRASANLAATKMSECVLGQSKRVDFCGKGYHLMSFPQSAPHGVVFLHVTYVPAQEKNFTTAPAICHDGKAHFPREGVFVSNGTHWFVTQRNFYEPQIITTDNTFVSGNCDVVIGIVNNTVYDPLQPELDSFKEELDKYFKNHTSPDVDLGDISGINASVVNIQKEIDRLNEVAKNLNESLIDLQELGKYEQYIK

SEQ ID NO: 2314 - protein, 1211 aa, Artificial Sequence
  SARS-CoV-2/Finland/FIN03032020A/2020__EPI_ISL_413602 spike protein (1-1211)(Q965C_S1003C)
MFVFLVLLPLVSSQCVNLTTRTQLPPAYTNSFTRGVYYPDKVFRSSVLHSTQDLFLPFFSNVTWFHAIHVSGTNGTKRFDNPVLPFNDGVYFASTEKSNIIRGWIFGTTLDSKTQSLLIVNNATNVVIKVCEFQFCNDPFLGVYYHKNNKSWMESEFRVYSSANNCTFEYVSQPFLMDLEGKQGNFKNLREFVFKNIDGYFKIYSKHTPINLVRDLPQGFSALEPLVDLPIGINITRFQTLLALHRSYLTPGDSSSGWTAGAAAYYVGYLQPRTFLLKYNENGTITDAVDCALDPLSETKCTLKSFTVEKGIYQTSNFRVQPTESIVRFPNITNLCPFGEVFNATRFASVYAWNRKRISNCVADYSVLYNSASFSTFKCYGVSPTKLNDLCFTNVYADSFVIRGDEVRQIAPGQTGKIADYNYKLPDDFTGCVISWNSNNLDSKVGGNYNYLYRLFRKSNLKPFERDISTEIYQAGSTPCNGVEGFNCYFPLQSYGFQPTNGVGYQPYRVVVLSFELLHAPATVCGPKKSTNLVKNKCVNFNFNGLTGTGVLTESNKKFLPFQQFGRDIADTTDAVRDPQTLEILDITPCSFGGVSVITPGTNTSNQVAVLYQGVNCTEVPVAIHADQLTPTWRVYSTGSNVFQTRAGCLIGAEHVNNSYECDIPIGAGICASYQTQTNSPRRARSVASQSIIAYTMSLGAENSVAYSNNSIAIPTNFTISVTTEILPVSMTKTSVDCTMYICGDSTECSNLLLQYGSFCTQLNRALTGIAVEQDKNTQEVFAQVKQIYKTPPIKDFGGFNFSQILPDPSKPSKRSFIEDLLFNKVTLADAGFIKQYGDCLGDIAARDLICAQKFNGLTVLPPLLTDEMIAQYTSALLAGTITSGWTFGAGAALQIPFAMQMAYRFNGIGVTQNVLYENQKLIANQFNSAIGKIQDSLSSTASALGKLQDVVNQNAQALNTLVKCLSSNFGAISSVLNDILSRLDKVEAEVQIDRLITGRLQCLQTYVTQQLIRAAEIRASANLAATKMSECVLGQSKRVDFCGKGYHLMSFPQSAPHGVVFLHVTYVPAQEKNFTTAPAICHDGKAHFPREGVFVSNGTHWFVTQRNFYEPQIITTDNTFVSGNCDVVIGIVNNTVYDPLQPELDSFKEELDKYFKNHTSPDVDLGDISGINASVVNIQKEIDRLNEVAKNLNESLIDLQELGKYEQYIK

SEQ ID NO: 2315 - protein, 1211 aa, Artificial Sequence
  SARS-CoV-2/France/GE1977/2020__EPI_ISL_414632 spike protein (1-1211)(Q965C_S1003C)
MFVFLVLLPLVSSQCVNLTTRTQLPPAYTNSFTRGVYYPDKVFRSSVLHSTQDLFLPFFSNVTWFHAIHVSGTNGTKRFDNPVLPFNDGVYFASTEKSNIIRGWIFGTTLDSKTQSLLIVNNATNVVIKVCEFQFCNDPFLGVYYHKNNKSWMESEFRVYSSANNCTFEYVSQPFLMDLEGKQGNFKNLREFVFKNIDGYFKIYSKHTPINLVRDLPQGFSALEPLVDLPIGINITRFQTLLALHRSYLTPGDSSSGWTAGAAAYYVGYLQPRTFLLKYNENGTITDAVDCALDPLSETKCTLKSFTVEKGIYQTSNFRVQPTESIVRFPNITNLCPFGEVFNATRFASVYAWNRKRISNCVADYSVLYNSASFSTFKCYGVSPTKLNDLCFTNVYADSFVIRGDEVRQIAPGQTGKIADYNYKLPDDFTGCVIAWNSNNLDSKVGGNYNYLYRLFRKSNLKPFERDISTEIYQAGSTPCNGVEGFNCYFPLQSYGFQPTNGVGYQPYRVVVLSFELLHAPATVCGPKKSTNLVKNKCVNFNFNGLTGTGVLTESNKKFLPFQQFGRDIADTTDAVRDPQTLEILDITPCSFGGVSVITPGTNTSNQVAVLYQGVNCTEVPVAIHADQLTPTWRVYSTGSNVFQTRAGCLIGAEHVNNSYECDIPIGAGICASYQTQTNSPRRARSVASQSIIAYTMSLGAENSVAYSNNSIAIPTNFTISVTTEILPVSMTKTSVDCTMYICGDSTECSNLLLQYGSFCTQLNRALTGIAVEQDKNTQEVFAQVKQIYKTPPIKDFGGFNFSQILPDPSKPSKRSFIEDLLFNKVTLADAGFIKQYGDCLGDIAARDLICAQKFNGLTVLPPLLTDEMIAQYTSALLAGTITSGWTFGAGAALQIPFAMQMAYRFNGIGVTQNVLYENQKLIANQFNSAIGKIQDSLFSTASALGKLQDVVNQNAQALNTLVKCLSSNFGAISSVLNDILSRLDKVEAEVQIDRLITGRLQCLQTYVTQQLIRAAEIRASANLAATKMSECVLGQSKRVDFCGKGYHLMSFPQSAPHGVVFLHVTYVPAQEKNFTTAPAICHDGKAHFPREGVFVSNGTHWFVTQRNFYEPQIITTDNTFVSGNCDVVIGIVNNTVYDPLQPELDSFKEELDKYFKNHTSPDVDLGDISGINASVVNIQKEIDRLNEVAKNLNESLIDLQELGKYEQYIK

SEQ ID NO: 2316 - protein, 1211 aa, Artificial Sequence
  SARS-CoV-2/Finland/FIN-313/2020__EPI_ISL_414641 spike protein (1-1211)(Q965C_S1003C)
MFVFLVLLPLVSSQCVNLTTRTQLPPAYTNSFTRGVYYPDKVFRSSVLHSTQDLFLPFFSNVTWFHAIHVSGTNGTKRFDNPVLPFNDGVYFASTEKSNIIRGWIFGTTLDSKTQSLLIVNNATNVVIKVCEFQFCNDPFLGVYYHKNNKSWMESEFRVYSSANNCTFEYVSQPFLMDLEGKQGNFKNLREFVFKNIDGYFKIYSKHTPINLVRDLPQGFSALEPLVDLPIGINITRFKTLLALHRSYLTPGDSSSGWTAGAAAYYVGYLQPRTFLLKYNENGTITDAVDCALDPLSETKCTLKSFTVEKGIYQTSNFRVQPTESIVRFPNITNLCPFGEVFNATRFASVYAWNRKRISNCVADYSVLYNSASFSTFKCYGVSPTKLNDLCFTNVYADSFVIRGDEVRQIAPGQTGKIADYNYKLPDDFTGCVIAWNSNNLDSKVGGNYNYLYRLFRKSNLKPFERDISTEIYQAGSTPCNGVEGFNCYFPLQSYGFQPTNGVGYQPYRVVVLSFELLHAPATVCGPKKSTNLVKNKCVNFNFNGLTGTGVLTESNKKFLPFQQFGRDIADTTDAVRDPQTLEILDITPCSFGGVSVITPGTNTSNQVAVLYQGVNCTEVPVAIHADQLTPTWRVYSTGSNVFQTRAGCLIGAEHVNNSYECDIPIGAGICASYQTQTNSPRRARSVASQSIIAYTMSLGAENSVAYSNNSIAIPTNFTISVTTEILPVSMTKTSVDCTMYICGDSTECSNLLLQYGSFCTQLNRALTGIAVEQDKNTQEVFAQVKQIYKTPPIKDFGGFNFSQILPDPSKPSKRSFIEDLLFNKVTLADAGFIKQYGDCLGDIAARDLICAQKFNGLTVLPPLLTDEMIAQYTSALLAGTITSGWTFGAGAALQIPFAMQMAYRFNGIGVTQNVLYENQKLIANQFNSAIGKIQDSLSSTASALGKLQDVVNQNAQALNTLVKCLSSNFGAISSVLNDILSRLDKVEAEVQIDRLITGRLQCLQTYVTQQLIRAAEIRASANLAATKMSECVLGQSKRVDFCGKGYHLMSFPQSAPHGVVFLHVTYVPAQEKNFTTAPAICHDGKAHFPREGVFVSNGTHWFVTQRNFYEPQIITTDNTFVSGNCDVVIGIVNNTVYDPLQPELDSFKEELDKYFKNHTSPDVDLGDISGINASVVNIQKEIDRLNEVAKNLNESLIDLQELGKYEQYIK

SEQ ID NO: 2317 - protein, 1211 aa, Artificial Sequence
  SARS-CoV-2/Netherlands/ZuidHolland_2/2020__EPI_ISL_414556 spike protein (1-1211)(Q965C_S1003C)
MFVFLVLLPLVSSQCVNLTTRTQLPPAYTNSFTRGVYYPDKVFRSSVLHSTQDLFLPFFSNVTWFHAIHVSGTNGTKRFDNPVLPFNDGVYFASTEKSNIIRGWIFGTTLDSKTQSLLIVNNATNVVIKVCEFQFCNDPFLGVYYHKNNKSWMESEFRVYSSANNCTFEYVSQPFLMDLEGKQGNFKNLREFVFKNIDGYFKIYSKHTPINLVRDLPQGFSALEPLVDLPIGINITRFQTLLALHRSYLTPGDSSSGWTAGAAAYYVGYLQPRTFLLKYNENGTITDAVDCALDPLSETKCTLKSFTVEKGIYQTSNFRVQPTESIVRFPNITNLCPFGEVFNATRFASVYAWNRKRISNCVADYSVLYNSASFSTFKCYGVSPTKLNDLCFTNVYADSFVIRGDEVRQIAPGQTGKIADYNYKLPDDFTGCVIAWNSNNLDSKVGGNYNYLYRLFRKSNLKPFERDISTEIYQAGSTPCNGVEGFNCYFPLQSYGFQPTNGVGYQPYRVVVLSFELLHAPATVCGPKKSTNLVKNKCVNFNFNGLTGTGVLTESNKKFLPFQQFGRDIADTTDAVRDPQTLEILDITPCSFGGVSVITPGTNTSNQVAVLYQGVNCTEVPVAIHADQLTPTWRVYSTGSNVFQTRAGCLIGAEHVNNSYECDIPIGAGICASYQTQTNSPRRARSVASQSIIAYTMSLGAENSVAYSNNSIAIPTNFTISVTTEILPVSMTKTSVDCTMYICGDSTECSNLLLQYGSFCTQLNRALTGIALEQDKNTQEVFAQVKQIYKTPPIKDFGGFNFSQILPDPSKPSKRSFIEDLLFNKVTLADAGFIKQYGDCLGDIAARDLICAQKFNGLTVLPPLLTDEMIAQYTSALLAGTITSGWTFGAGAALQIPFAMQMAYRFNGIGVTQNVLYENQKLIANQFNSAIGKIQDSLSSTASALGKLQDVVNQNAQALNTLVKCLSSNFGAISSVLNDILSRLDKVEAEVQIDRLITGRLQCLQTYVTQQLIRAAEIRASANLAATKMSECVLGQSKRVDFCGKGYHLMSFPQSAPHGVVFLHVTYVPAQEKNFTTAPAICHDGKAHFPREGVFVSNGTHWFVTQRNFYEPQIITTDNTFVSGNCDVVIGIVNNTVYDPLQPELDSFKEELDKYFKNHTSPDVDLGDISGINASVVNIQKEIDRLNEVAKNLNESLIDLQELGKYEQYIK

SEQ ID NO: 2318 - protein, 1211 aa, Artificial Sequence
  SARS-CoV-2/USA/WA-UW31/2020__EPI_ISL_414618 spike protein (1-1211)(Q965C_S1003C)
MFVFLVLLPLVSSQCVNLTTRTQLPPAYTNSFTRGVYYPDKVFRSSVLHSTQDLFLPFFSNVTWFHAIHVSGTNGTKRFDNPVLPFNDGVYFASTEKSNIIRGWIFGTTLDSKTQSLLIVNNATNVVIKVCEFQFCNDPFLGVYYHKNNKSWMESEFRVYSSANNCTFEYVSQPFLMDLEGKQGNFKNLREFVFKNIDGYFKIYSKHTPINLVRDLPQGFSALEPLVDLPIGINITRFQTLLALHRSYLTPGDSSSGWTAGAAAYYVGYLQPRTFLLKYNENGTITDAVDCALDPLSETKCTLKSFTVEKGIYQTSNFRVQPTESIVRFPNITNLCPFGEVFNATRFASVYAWNRKRISNCVADYSVLYNSASFSTFKCYGVSPTKLNDLCFTNVYADSFVIRGDEVRQIAPGQTGKIADYNYKLPDDFTGCVIAWNSNNLDSKVGGNYNYLYRLFRKSNLKPFERDISTEIYQAGSTPCNGAEGFNCYFPLQSYGFQPTNGVGYQPYRVVVLSFELLHAPATVCGPKKSTNLVKNKCVNFNFNGLTGTGVLTESNKKFLPFQQFGRDIADTTDAVRDPQTLEILDITPCSFGGVSVITPGTNTSNQVAVLYQDVNCTEVPVAIHADQLTPTWRVYSTGSNVFQTRAGCLIGAEHVNNSYECDIPIGAGICASYQTQTNSPRRARSVASQSIIAYTMSLGAENSVAYSNNSIAIPTNFTISVTTEILPVSMTKTSVDCTMYICGDSTECSNLLLQYGSFCTQLNRALTGIAVEQDKNTQEVFAQVKQIYKTPPIKDFGGFNFSQILPDPSKPSKRSFIEDLLFNKVTLADAGFIKQYGDCLGDIAARDLICAQKFNGLTVLPPLLTDEMIAQYTSALLAGTITSGWTFGAGAALQIPFAMQMAYRFNGIGVTQNVLYENQKLIANQFNSAIGKIQDSLSSTASALGKLQDVVNQNAQALNTLVKCLSSNFGAISSVLNDILSRLDKVEAEVQIDRLITGRLQCLQTYVTQQLIRAAEIRASANLAATKMSECVLGQSKRVDFCGKGYHLMSFPQSAPHGVVFLHVTYVPAQEKNFTTAPAICHDGKAHFPREGVFVSNGTHWFVTQRNFYEPQIITTDNTFVSGNCDVVIGIVNNTVYDPLQPELDSFKEELDKYFKNHTSPDVDLGDISGINASVVNIQKEIDRLNEVAKNLNESLIDLQELGKYEQYIK

SEQ ID NO: 2319 - protein, 1211 aa, Artificial Sequence
  SARS-CoV-2/South Korea/SNU01/2020__EPI_ISL_411929 spike protein (1-1211)(Q965C_S1003C)
MFVFLVLLPLVSSQCVNLTTRTQLPPAYTNSFTRGVYYPDKVFRSSVLHSTQDLFLPFFSNVTWFHAIHVSGTNGTKRFDNPVLPFNDGVYFASTEKSNIIRGWIFGTTLDSKTQSLLIVNNATNVVIKVCEFQFCNDPFLGVYYHKNNKSWMESEFRVYSSANNCTFEYVSQPFLMDLEGKQGNFKNLREFVFKNIDGYFKIYSKHTPINLVRDLPQGFWALEPLVDLPIGINITRFQTLLALHRSYLTPGDSSSGWTAGAAAYYVGYLQPRTFLLKYNENGTITDAVDCALDPLSETKCTLKSFTVEKGIYQTSNFRVQPTESIVRFPNITNLCPFGEVFNATRFASVYAWNRKRISNCVADYSVLYNSASFSTFKCYGVSPTKLNDLCFTNVYADSFVIRGDEVRQIAPGQTGKIADYNYKLPDDFTGCVIAWNSNNLDSKVGGNYNYLYRLFRKSNLKPFERDISTEIYQAGSTPCNGVEGFNCYFPLQSYGFQPTNGVGYQPYRVVVLSFELLHAPATVCGPKKSTNLVKNKCVNFNFNGLTGTGVLTESNKKFLPFQQFGRDIADTTDAVRDPQTLEILDITPCSFGGVSVITPGTNTSNQVAVLYQDVNCTEVPVAIHADQLTPTWRVYSTGSNVFQTRAGCLIGAEHVNNSYECDIPIGAGICASYQTQTNSPRRARSVASQSIIAYTMSLGAENSVAYSNNSIAIPTNFTISVTTEILPVSMTKTSVDCTMYICGDSTECSNLLLQYGSFCTQLNRALTGIAVEQDKNTQEVFAQVKQIYKTPPIKDFGGFNFSQILPDPSKPSKRSFIEDLLFNKVTLADAGFIKQYGDCLGDIAARDLICAQKFNGLTVLPPLLTDEMIAQYTSALLAGTITSGWTFGAGAALQIPFAMQMAYRFNGIGVTQNVLYENQKLIANQFNSAIGKIQDSLSSTASALGKLQDVVNQNAQALNTLVKCLSSNFGAISSVLNDILSRLDKVEAEVQIDRLITGRLQCLQTYVTQQLIRAAEIRASANLAATKMSECVLGQSKRVDFCGKGYHLMSFPQSAPHGVVFLHVTYVPAQEKNFTTAPAICHDGKAHFPREGVFVSNGTHWFVTQRNFYEPQIITTDNTFVSGNCDVVIGIVNNTVYDPLQPELDSFKEELDKYFKNHTSPDVDLGDISGINASVVNIQKEIDRLNEVAKNLNESLIDLQELGKYEQYIK

SEQ ID NO: 2320 - protein, 1211 aa, Artificial Sequence
  SARS-CoV-2/China/WF0004/2020__EPI_ISL_413694 spike protein (1-1211)(Q965C_S1003C)
MFVFLVLLPLVSSQCVNLTTRTQLPPAYTNSFTRGVYYPDKVFRSSVLHSTQDLFLPFFSNVTWFHAIHVSGTNGTKRFDNPVLPFNDGVYFASTEKSNIIRGWIFGTTLDSKTQSLLIVNNATNVVIKVCEFQFCNDPFLGVYYHKNNKSWTESEFRVYSSANNCTFEYVSQPFLMDLEGKQGNFKNLREFVFKNIDGYFKIYSKHTPINLVRDLPQGFSALEPLVDLPIGINITRFQTLLALHRSYLTPGDSSSGWTAGAAAYYVGYLQPRTFLLKYNENGTITDAVDCALDPLSETKCTLKSFTVEKGIYQTSNFRVQPTESIVRFPNITNLCPFGEVFNATRFASVYAWNRKRISNCVADYSVLYNSASFSTFKCYGVSPTKLNDLCFTNVYADSFVIRGDEVRQIAPGQTGKIADYNYKLPDDFTGCVIAWNSNNLDSKVGGNYNYLYRLFRKSNLKPFERDISTEIYQAGSTPCNGVEGFNCYFPLQSYGFQPTNGVGYQPYRVVVLSFELLHAPATVCGPKKSTNLVKNKCVNFNFNGLTGTGVLTESNKKFLPFQQFGRDIADTTDAVRDPQTLEILDITPCSFGGVSVITPGTNTSNQVAVLYQDVNCTEVPVAIHADQLTPTWRVYSTGSNVFQTRAGCLIGAEHVNNSYECDIPIGAGICASYQTQTNSPRRARSVASQSIIAYTMSLGAENSVAYSNNSIAIPTNFTISVTTEILPVSMTKTSVDCTMYICGDSTECSNLLLQYGSFCTQLNRALTGIAVEQDKNTQEVFAQVKQIYKTPPIKDFGGFNFSQILPDPSKPSKRSFIEDLLFNKVTLADAGFIKQYGDCLGDIAARDLICAQKFNGLTVLPPLLTDEMIAQYTSALLAGTITSGWTFGAGAALQIPFAMQMAYRFNGIGVTQNVLYENQKLIANQFNSAIGKIQDSLSSTASALGKLQDVVNQNAQALNTLVKCLSSNFGAISSVLNDILSRLDKVEAEVQIDRLITGRLQCLQTYVTQQLIRAAEIRASANLAATKMSECVLGQSKRFDFCGKGYHLMSFPQSAPHGVVFLHVTYVPAQEKNFTTAPAICHDGKAHFPREGVFVSNGTHWFVTQRNFYEPQIITTDNTFVSGNCDVVIGIVNNTVYDPLQPELDSFKEELDKYFKNHTSPDVDLGDISGINASVVNIQKEIDRLNEVAKNLNESLIDLQELGKYEQYIK

SEQ ID NO: 2321 - protein, 1211 aa, Artificial Sequence
  SARS-CoV-2/China/WF0028/2020__EPI_ISL_413791 spike protein (1-1211)(Q965C_S1003C)
MFVFLVLLPLVSSQCVNLTTRTQLPPAYTNSFTRGVYYPDKVFRSSVLHSTQDLFLPFFSNVTWFHAIHVSGTNGTKRFDNPVLPFNDGVYFASTEKSNIIRGWIFGTTLDSKTQSLLIVNNATNVVIKVCEFQFCNDPFLGVYYHKNNKSWMESEFRVYSSANNCTFEYVSQPFLMDLEGKQGNFKNLREFVFKNIDGYFKIYSKHTPINLVRDLPQGFSALEPLVDLPIGINITRFQTLLALHRSYLTPGDSSSGWTAGAAAYYVGYLQPRTFLLKYNENGTITDAVDCALDPLSETKCTLKSFTVEKGIYQTSNFRVQPTESIVRFPNITNLCPFGEVFNATRFASVYAWNRKRISNCVADYSVLYNSASFSTFKCYGVSPTKLNDLCFTNVYADSFVIRGDEVRQIAPGQTGKIADYNYKLPDDFTGCVIAWNSNNLDSKVGGNYNYLYRLFRKSNLKPFERDISTEIYQAGSTPCNGVEGFNCYFPLQSYGFQPTNGVGYQPYRVVVLSFELLHAPATVCGPKKSTNLVKNKCVNFNFNGLTGTGVLTESNKKFLPFQQFGRDIADTTDAVRDPQTLEILDITPCSFGGVSVITPGTNTSNQVAVLYQDVNCTEVPVAIHADQLTPTWRVYSTGSNVFQTRAGCLIGAEHVNNSYECDIPIGAGICASYQTQTNSPRRARSVASQSIIAYTMSLGAENSVAYSNNSIAIPTNFTISVTTEILPVSMTKTSVDCTMYICGDSTECSNLLLQYGSFCTQLNRALTGIAVEQDKNTQEVFAQVKQIYKTPPIKDFGGFNFSQILPDPSKPSKRSFIEDLLFNKVTLADAGFIKQYGDCLGDIAARDLICAQKFNGLTVLPPLLTDEMIAQYTSALLAGTITSGWTFGAGAALQIPFAMQMAYRFNGIGVTQNVLYENQKLIANQFNSAIGKIQDSLSSTASALGKLQDVVNQNAQALNTLVKCLSSNFGAISSVLNDILSRLDKVEAEVQIDRLITGRLQCLQTYVTQQLIRAAEIRASANLAATKMSECVLGQSKRVDFCGKGYHLMSFPQSAPHGVVFLHVTYVPAQEKNFTTAPAICHDGKAHFPREGVFVSNGTHWFVTQRNFYEPQIITTDNTFVSGNCDVVIGIVNNTVYDPLQPELESFKEELDKYFKNHTSPDVDLGDISGINASVVNIQKEIDRLNEVAKNLNESLIDLQELGKYEQYIK

SEQ ID NO: 2322 - protein, 1211 aa, Artificial Sequence
  SARS-CoV-2/2019-nCoV/USA-CruiseA-18/2020__MT159716.1 spike protein (1-1211)(Q965C_S1003C)
MFVFLVLLPLVSSQCVNLTTRTQLPPAYTNSFTRGVYYPDKVFRSSVLHSTQDLFLPFFSNVTWFHAIHVSGTNGTKRFDNPVLPFNDGVYFASTEKSNIIRGWIFGTTLDSKTQSLLIVNNATNVVIKVCEFQFCNDPFLGVYYHKNNKSWMESELRVYSSANNCTFEYVSQPFLMDLEGKQGNFKNLREFVFKNIDGYFKIYSKHTPINLVRDLPQGFSALEPLVDLPIGINITRFQTLLALHRSYLTPGDSSSGWTAGAAAYYVGYLQPRTFLLKYNENGTITDAVDCALDPLSETKCTLKSFTVEKGIYQTSNFRVQPTESIVRFPNITNLCPFGEVFNATRFASVYAWNRKRISNCVADYSVLYNSASFSTFKCYGVSPTKLNDLCFTNVYADSFVIRGDEVRQIAPGQTGKIADYNYKLPDDFTGCVIAWNSNNLDSKVGGNYNYLYRLFRKSNLKPFERDISTEIYQAGSTPCNGVEGFNCYFPLQSYGFQPTNGVGYQPYRVVVLSFELLHAPATVCGPKKSTNLVKNKCVNFNFNGLTGTGVLTESNKKFLPFQQFGRDIADTTDAVRDPQTLEILDITPCSFGGVSVITPGTNTSNQVAVLYQDVNCTEVPVAIHADQLTPTWRVYSTGSNVFQTRAGCLIGAEHVNNSYECDIPIGAGICASYQTQTNSPRRARSVASQSIIAYTMSLGAENSVAYSNNSIAIPTNFTISVTTEILPVSMTKTSVDCTMYICGDSTECSNLLLQYGSFCTQLNRALTGIAVEQDKNTQEVFAQVKQIYKTPPIKDFGGFNFSQILPDPSKPSKRSFIEDLLFNKVTLADAGFIKQYGDCLGDIAARDLICAQKFNGLTVLPPLLTDEMIAQYTSALLAGTITSGWTFGAGAALQIPFAMQMAYRFNGIGVTQNVLYENQKLIANQFNSAIGKIQDSLSSTASALGKLQDVVNQNAQALNTLVKCLSSNFGAISSVLNDILSRLDKVEAEVQIDRLITGRLQCLQTYVTQQLIRAAEIRASANLAATKMSECVLGQSKRVDFCGKGYHLMSFPQSAPHGVVFLHVTYVPAQEKNFTTAPAICHDGKAHFPREGVFVSNGTHWFVTQRNFYEPQIITTDNTFVSGNCDVVIGIVNNTVYDPLQPELDSFKEELDKYFKNHTSPDVDLGDISGINASVVNIQKEIDRLNEVAKNLNESLIDLQELGKYEQYIK

SEQ ID NO: 2323 - protein, 1211 aa, Artificial Sequence
  SARS-CoV-2/SARS-CoV-2/Yunnan-01/human/2020/CHN__MT049951.1 spike protein (1-1211)(Q965C_S1003C)
MFVFLVLLPLVSSQCVNLTTRTQLPPANTNSFTRGVYYPDKVFRSSVLHSTQDLFLPFFSNVTWFHAIHVSGTNGTKRFDNPVLPFNDGVYFASTEKSNIIRGWIFGTTLDSKTQSLLIVNNATNVVIKVCEFQFCNDPFLGVYYHKNNKSWMESEFRVYSSANNCTFEYVSQPFLMDLEGKQGNFKNLREFVFKNIDGYFKIYSKHTPINLVRDLPQGFSALEPLVDLPIGINITRFQTLLALHRSYLTPGDSSSGWTAGAAAYYVGYLQPRTFLLKYNENGTITDAVDCALDPLSETKCTLKSFTVEKGIYQTSNFRVQPTESIVRFPNITNLCPFGEVFNATRFASVYAWNRKRISNCVADYSVLYNSASFSTFKCYGVSPTKLNDLCFTNVYADSFVIRGDEVRQIAPGQTGKIADYNYKLPDDFTGCVIAWNSNNLDSKVGGNYNYLYRLFRKSNLKPFERDISTEIYQAGSTPCNGVEGFNCYFPLQSYGFQPTNGVGYQPYRVVVLSFELLHAPATVCGPKKSTNLVKNKCVNFNFNGLTGTGVLTESNKKFLPFQQFGRDIADTTDAVRDPQTLEILDITPCSFGGVSVITPGTNTSNQVAVLYQDVNCTEVPVAIHADQLTPTWRVYSTGSNVFQTRAGCLIGAEHVNNSYECDIPIGAGICASYQTQTNSPRRARSVASQSIIAYTMSLGAENSVAYSNNSIAIPTNFTISVTTEILPVSMTKTSVDCTMYICGDSTECSNLLLQYGSFCTQLNRALTGIAVEQDKNTQEVFAQVKQIYKTPPIKDFGGFNFSQILPDPSKPSKRSFIEDLLFNKVTLADAGFIKQYGDCLGDIAARDLICAQKFNGLTVLPPLLTDEMIAQYTSALLAGTITSGWTFGAGAALQIPFAMQMAYRFNGIGVTQNVLYENQKLIANQFNSAIGKIQDSLSSTASALGKLQDVVNQNAQALNTLVKCLSSNFGAISSVLNDILSRLDKVEAEVQIDRLITGRLQCLQTYVTQQLIRAAEIRASANLAATKMSECVLGQSKRVDFCGKGYHLMSFPQSAPHGVVFLHVTYVPAQEKNFTTAPAICHDGKAHFPREGVFVSNGTHWFVTQRNFYEPQIITTDNTFVSGNCDVVIGIVNNTVYDPLQPELDSFKEELDKYFKNHTSPDVDLGDISGINASVVNIQKEIDRLNEVAKNLNESLIDLQELGKYEQYIK

SEQ ID NO: 2324 - protein, 1211 aa, Artificial Sequence
  SARS-CoV-2/USA/WA-UW292/2020__EPI_ISL_418077 spike protein (1-1211)(Q965C_S1003C)
MFVFLVLLPLVSSQCVNLTTRTQLPPAYTNSFTRGVYYPDKVFRSSVLHSTQDLFLPFFSNVTWFHAIHVSGTNGTKRFDNPVLPFNDGVYFASTEKSNIIRGWIFGTTLDSKTQSLLIVNNATNVVIKVCEFQFCNDPFLGVYYHKNNKSWMESEFRVYSSANNCTFEYVSQPFLMDLEGKQGNFKNLREFVFKNIDGYFKIYSKHTPINLVRDLPQGFSALEPLVDLPIGINITRFQTLLALHRSYLTPGDSSSGWTAGAAAYYVGYLQPRTFLLKYNENGTITDAVDCALDPLSETKCTLKSFTVEKGIYQTSNFRVQPTESIVRFPNITNLCPFGEVFNATRFASVYAWNRKRISNCVADYSVLYNSASFSTFKCYGVSPTKLNDLCFTNVYADSFVIRGDEVRQIAPGQTGKIADYNYKLPDDFTGCVIAWNSNNLDSKVGGNYNYLYRLFRKSNLKPFERDISTEIYQASSTPCNGVEGFNCYFPLQSYGFQPTNGVGYQPYRVVVLSFELLHAPATVCGPKKSTNLVKNKCVNFNFNGLTGTGVLTESNKKFLPFQQFGRDIADTTDAVRDPQTLEILDITPCSFGGVSVITPGTNTSNQVAVLYQDVNCTEVPVAIHADQLTPTWRVYSTGSNVFQTRAGCLIGAEHVNNSYECDIPIGAGICASYQTQTNSPRRARSVASQSIIAYTMSLGAENSVAYSNNSIAIPTNFTISVTTEILPVSMTKTSVDCTMYICGDSTECSNLLLQYGSFCTQLNRALTGIAVEQDKNTQEVFAQVKQIYKTPPIKDFGGFNFSQILPDPSKPSKRSFIEDLLFNKVTLADAGFIKQYGDCLGDIAARDLICAQKFNGLTVLPPLLTDEMIAQYTSALLAGTITSGWTFGAGAALQIPFAMQMAYRFNGIGVTQNVLYENQKLIANQFNSAIGKIQDSLSSTASALGKLQDVVNQNAQALNTLVKCLSSNFGAISSVLNDILSRLDKVEAEVQIDRLITGRLQCLQTYVTQQLIRAAEIRASANLAATKMSECVLGQSKRVDFCGKGYHLMSFPQSAPHGVVFLHVTYVPAQEKNFTTAPAICHDGKAHFPREGVFVSNGTHWFVTQRNFYEPQIITTDNTFVSGNCDVVIGIVNNTVYDPLQPELDSFKEELDKYFKNHTSPDVDLGDISGINASVVNIQKEIDRLNEVAKNLNESLIDLQELGKYEQYIK

SEQ ID NO: 2325 - protein, 1211 aa, Artificial Sequence
  SARS-CoV-2/Iceland/192/2020__EPI_ISL_417819 spike protein (1-1211)(Q965C_S1003C)
MFVFFVLLPLVSSQCVNLTTRTQLPPAYTNSFTRGVYYPDKVFRSSVLHSTQDLFLPFFSNVTWFHAIHVSGTNGTKRFDNPVLPFNDGVYFASTEKSNIIRGWIFGTTLDSKTQSLLIVNNATNVVIKVCEFQFCNDPFLGVYYHKNNKSWMESEFRVYSSANNCTFEYVSQPFLMDLEGKQGNFKNLREFVFKNIDGYFKIYSKHTPINLVRDLPQGFSALEPLVDLPIGINITRFQTLLALHRSYLTPGDSSSGWTAGAAAYYVGYLQPRTFLLKYNENGTITDAVDCALDPLSETKCTLKSFTVEKGIYQTSNFRVQPTESIVRFPNITNLCPFGEVFNATRFASVYAWNRKRISNCVADYSVLYNSASFSTFKCYGVSPTKLNDLCFTNVYADSFVIRGDEVRQIAPGQTGKIADYNYKLPDDFTGCVIAWNSNNLDSKVGGNYNYLYRLFRKSNLKPFERDISTEIYQAGSTPCNGVEGFNCYFPLQSYGFQPTNGVGYQPYRVVVLSFELLHAPATVCGPKKSTNLVKNKCVNFNFNGLTGTGVLTESNKKFLPFQQFGRDIADTTDAVRDPQTLEILDITPCSFGGVSVITPGTNTSNQVAVLYQGVNCTEVPVAIHADQLTPTWRVYSTGSNVFQTRAGCLIGAEHVNNSYECDIPIGAGICASYQTQTNSPRRARSVASQSIIAYTMSLGAENSVAYSNNSIAIPTNFTISVTTEILPVSMTKTSVDCTMYICGDSTECSNLLLQYGSFCTQLNRALTGIAVEQDKNTQEVFAQVKQIYKTPPIKDFGGFNFSQILPDPSKPSKRSFIEDLLFNKVTLADAGFIKQYGDCLGDIAARDLICAQKFNGLTVLPPLLTDEMIAQYTSALLAGTITSGWTFGAGAALQIPFAMQMAYRFNGIGVTQNVLYENQKLIANQFNSAIGKIQDSLSSTASALGKLQDVVNQNAQALNTLVKCLSSNFGAISSVLNDILSRLDKVEAEVQIDRLITGRLQCLQTYVTQQLIRAAEIRASANLAATKMSECVLGQSKRVDFCGKGYHLMSFPQSAPHGVVFLHVTYVPAQEKNFTTAPAICHDGKAHFPREGVFVSNGTHWFVTQRNFYEPQIITTDNTFVSGNCDVVIGIVNNTVYDPLQPELDSFKEELDKYFKNHTSPDVDLGDISGINASVVNIQKEIDRLNEVAKNLNESLIDLQELGKYEQYIK

SEQ ID NO: 2326 - protein, 1211 aa, Artificial Sequence
  SARS-CoV-2/Belgium/ULG-6939/2020__EPI_ISL_417020 spike protein (1-1211)(Q965C_S1003C)
MFVFLVLLPLVSSQCVNLTTRTQLPPAYTNSFTRGVYYPDKVFRSSVLHSTQDLFLPFFSNVTWFHAIHVSGTNGTKRFDNPVLPFNDGVYFASTEKSNIIRGWIFGTTLDSKTQSLLIVNNATNVVIKVCEFQFCNDPFLGVYYHKNNKSWMESEFRVYSSANNCTFEYVSQPFLMDLEGKQGNFKNLREFVFKNIDGYFKIYSKHTPINLVRDLPQGFSALEPLVDLPIGINITRFQTLLALHRSYLTPGDSSSGWTAGAAAYYVGYLQPRTFLLKYNENGTITDAVDCALDPLSETKCTLKSFTVEKGIYQTSNFRVQPTESIVRFPNITNLCPFGEVFNATRFASVYAWNRKRISNCVADYSVLYNSASFSTFKCYGVSPTKLNDLCFTNVYADSFVIRGDEVRQIAPGQTGKIADYNYKLPDDFTGCVIAWNSNNLDSKVGGNYNYLYRLFRKSNLKPFERDISTEIYQAGSTPCNGVEGFNCYFPLQSYGFQPTNGVGYQPYRVVVLSFELLHAPATVCGPKKSTNLVKNKCVNFNFNGLTGTGVLTESNKKFLPFQQFGRDIADTTDAVRDPQTLEILDITPCSFGGVSVITPGTNTSNQVAVLYQGVNCTEVPVAIHADQLTPTWRVYSTGSNVFQTRAGCLIGAEHVNNSYECDIPIGAGICASYQTQTNSPRRARSVASQSIIAYTMSLGAENSVVYSNNSIAIPTNFTISVTTEILPVSMTKTSVDCTMYICGDSTECSNLLLQYGSFCTQLNRALTGIAVEQDKNTQEVFAQVKQIYKTPPIKDFGGFNFSQILPDPSKPSKRSFIEDLLFNKVTLADAGFIKQYGDCLGDIAARDLICAQKFNGLTVLPPLLTDEMIAQYTSALLAGTITSGWTFGAGAALQIPFAMQMAYRFNGIGVTQNVLYENQKLIANQFNSAIGKIQDSLSSTASALGKLQDVVNQNAQALNTLVKCLSSNFGAISSVLNDILSRLDKVEAEVQIDRLITGRLQCLQTYVTQQLIRAAEIRASANLAATKMSECVLGQSKRVDFCGKGYHLMSFPQSAPHGVVFLHVTYVPAQEKNFTTAPAICHDGKAHFPREGVFVSNGTHWFVTQRNFYEPQIITTDNTFVSGNCDVVIGIVNNTVYDPLQPELDSFKEELDKYFKNHTSPDVDLGDISGINASVVNIQKEIDRLNEVAKNLNESLIDLQELGKYEQYIK

SEQ ID NO: 2327 - protein, 1211 aa, Artificial Sequence
  SARS-CoV-2/France/HF2496/2020__EPI_ISL_418231 spike protein (1-1211)(Q965C_S1003C)
MFVFLVLLPLVSSQCVNLTTRTQLPPAYTNSFTRGVYYPDKVFRSSVLHSTQDLFLPFFSNVTWFHAIHVSGTNGTKRFDNPVLPFNDGVYFASTEKSNIIRGWIFGTTLDSKTQSLLIVNNATNVVIKVCEFQFCNDPFLGVYYHKNNKSWMESEFRVYSSANNCTFEYVSQPFLMDLEGKQGNFKNLREFVFKNIDGYFKIYSKHTPINLVRDLPQGFSALEPLVDLPIGINITRFQTLLALHRSYLTPGDSSSGWTAGAAAYYVGYLQPRTFLLKYNENGTITDAVDCALDPLSETKCTLKSFTVEKGIYQTSNFRVQPTESIVRFPNITNLCPFGEVFNATRFASVYAWNRKRISNCVADYSVLYNSASFSTFKCYGVSPTKLNDLCFTNVYADSFVIRGDEVRQIAPGQTGKIADYNYKLPDDFTGCVIAWNSNNLDSKVGGNYNYLYRLFRKSNLKPFERDISTEIYQAGSTPCNGVEGFNCYFPLQSYGFQPTNGVGYQPYRVVVLSFELLHAPATVCGPKKSTNLVKNKCVNFNFNGLTGTGVLTESNKKFLPFQQFGRDIADTTDAVRDPQTLEILDITPCSFGGVSVITPGTNTSNQVAVLYQGVNCTEVPVAIHADQLTPTWRVYSTGSNVFQTRAGCLIGAEHVNNSYECDIPIGAGICASYQTQTNSPRRARSVASQSIIAYTMSLGAENSVAYSNNSIAIPTNFTISVTTEILPVSMTKTSVDCTMYICGDSTECSNLLLQYGSFCTQLNRALTGIAVEQDKNTQEVFAQVKQIYKTPPIKDFGGFNFSQILPDPSKPSKRSFIEDLLFNKVTLADAGFIKQYGDCLGDIVARDLICAQKFNGLTVLPPLLTDEMIAQYTSALLAGTITSGWTFGAGAALQIPFAMQMAYRFNGIGVTQNVLYENQKLIANQFNSAIGKIQDSLSSTASALGKLQDVVNQNAQALNTLVKCLSSNFGAISSVLNDILSRLDKVEAEVQIDRLITGRLQCLQTYVTQQLIRAAEIRASANLAATKMSECVLGQSKRVDFCGKGYHLMSFPQSAPHGVVFLHVTYVPAQEKNFTTAPAICHDGKAHFPREGVFVSNGTHWFVTQRNFYEPQIITTDNTFVSGNCDVVIGIVNNTVYDPLQPELDSFKEELDKYFKNHTSPDVDLGDISGINASVVNIQKEIDRLNEVAKNLNESLIDLQELGKYEQYIK

SEQ ID NO: 2328 - protein, 1211 aa, Artificial Sequence
  SARS-CoV-2/USA/WA-UW291/2020__EPI_ISL_418076 spike protein (1-1211)(Q965C_S1003C)
MFVFLVLLPLVSSQCVNLTTRTQLPPAYTNSFTRGVYYPDKVFRSSVLHSTQDLFLPFFSNVTWFHAIHVSGTNGTKRFDNPVLPFNDGVYFASTEKSNIIRGWIFGTTLDSKTQSLLIVNNATNVVIKVCEFQFCNDPFLGVYYHKNNKSWMESEFRVYSSANNCTFEYVSQPFLMDLEGKQGNFKNLREFVFKNIDGYFKIYSKHTPINLVRDLPQGFSALEPLVDLPIGINITRFQTLLALHRSYLTPGDSSSGWTAGAAAYYVGYLQPRTFLLKYNENGTITDAVDCALDPLSETKCTLKSFTVEKGIYQTSNFRVQPTESIVRFPNITNLCPFGEVFNATRFASVYAWNRKRISNCVADYSVLYNSASFSTFKCYGVSPTKLNDLCFTNVYADSFVIRGDEVRQIAPGQTGKIADYNYKLPDDFTGCVIAWNSNNLDSKVGGNYNYLYRLFRKSNLKPFERDISTEIYQAGSTPCNGVEGFNCYFPLQSYGFQPTNGVGYQPYRVVVLSFELLHAPATVCGPKKSTNLVKNKCVNFNFNGLTGTGVLTESNKKFLPFQQFGRDIADTTDAVRDPQTLEILDITPCSFGGVSVITPGTNTSNQVAVLYQGVNCTEVPVAIHADQLTPTWRVYSTGSNVFQTRAGCLIGAEHVNNSYECDIPIGAGICASYQTQTNSPRRARSVASQSIIAYTMSLGAENSVAYSNNSIAIPTNFTISVTTEILPVSMTKTSVDCTMYICGDSTECSNLLLQYGSFCTQLNRALTGIAVEQDKNTQEVFAQVKQIYKTPPIKDFGGFNFSQILPDPSKPSKRSFIEDLLFNKVTLADAGFIKQYGDCLGDIAARDLICAQKFNGLTVLPPLLTDEMIAQYTSALLAGTITSGWTFGAGAALQIPFAMQMAYRFNGIGVTQNVLYENQKLIANQFNSAIGKIQYSLSSTASALGKLQDVVNQNAQALNTLVKCLSSNFGAISSVLNDILSRLDKVEAEVQIDRLITGRLQCLQTYVTQQLIRAAEIRASANLAATKMSECVLGQSKRVDFCGKGYHLMSFPQSAPHGVVFLHVTYVPAQEKNFTTAPAICHDGKAHFPREGVFVSNGTHWFVTQRNFYEPQIITTDNTFVSGNCDVVIGIVNNTVYDPLQPELDSFKEELDKYFKNHTSPDVDLGDISGINASVVNIQKEIDRLNEVAKNLNESLIDLQELGKYEQYIK

SEQ ID NO: 2329 - protein, 1211 aa, Artificial Sequence; identical to SEQ ID NO: 2292
  SARS-CoV-2/Portugal/PT0034/2020__EPI_ISL_418019 spike protein (1-1211)(Q965C_S1003C)

SEQ ID NO: 2330 - protein, 1211 aa, Artificial Sequence
  SARS-CoV-2/Iceland/202/2020__EPI_ISL_417750 spike protein (1-1211)(Q965C_S1003C)
MFVFLVLLPLVSSQCVNLTTRTQLPPAYTNSFTRGVYYPDKVFRSSVLHSTQDLFLPFFSNVTWFHAIHVSGTNGTKRFDNPVLPFNDGVYFASTEKSNIIRGWIFGTTLDSKTQSLLIVNNATNVVIKVCEFQFCNDPFLGVYYHKNNKSWMESEFRVYSSANNCTFEYVSQPFLMDLEGKQGNFKNLREFVFKNIDGYFKIYSKHTPINLVRDLPQGFSALEPLVDLPIGINITRFQTLLALHRSYLTPGDSSSGWTAGAAAYYVGYLQPRTFLLKYNENGTITDAVDCALDPLSETKCTLKSFTVEKGIYQTSNFRVQPTESIVRFPNITNLCPFGEVFNATRFASVYAWNRKRISNCVADYSVLYNSASFSTFKCYGVSPTKLNDLCFTNVYADSFVIRGDEVRQIAPGQTGKIADYNYKLPDDFTGCVIAWNSNNLDSKVGGNYNYLYRLFRKSNLKPFERDISTEIYQAGSTPCNGVEGFNCYFPLQSYGFQPTNGVGYQPYRVVVLSFELLHAPATVCGPKKSTNLVKNKCVNFNFNGLTGTGVLTESNKKFLPFQQFGRDIADTTDAVRDPQTLEILDITPCSFGGVSVITPGTNTSNQVAVLYQDVNCTEVPVAIHADQLTPTWRVYSTGSNVFQTRAGCLIGAEHVNNSYECDIPIGAGICASYQTQTNSPRRARSVASQSIIAYTMSLGAENSVAYSNNSIAIPTNFTISVTTEILPVSMTKTSVDCTMYICGDSTECSNLLLQYGSFCTQLNRALTGIAVEQDKNTQEVFAQVKQIYKTPPIKDFGGFNFSQILPDPSKPSKRSFIEDLLFNKVTLADAGFIKQYGDCLGDIAARDLICAQKFNGLTVLPPLLTDEMIAQYTSALLAGTITSGWTFGAGAALQIPFAMQMAYRFNGIGVTQNVLYENQKLIANQFNSAIGKIQDSLSSTASALGKLQDVVNQNAQALNTLVKCLSSNFGAISSVLNDILSRLDKVEAEVQIDRLITGRLQCLQTYVTQQLIRAAEIRASANLAATKMSECVLGQSKRVDFCGKGYHLMSFPQSAPHGVVFLHVTYVPAQEKNFTTAPAICHDGKAHFPREGVFVSNGTHWFVTQRNFYEPQIITTDNTFVSGNCDVVIGIVNNTVYDPLQPELDSFKEELDKYFKNHTSPDVDLGDIPGINASVVNIQKEIDRLNEVAKNLNESLIDLQELGKYEQYIK

SEQ ID NO: 2331 - protein, 1211 aa, Artificial Sequence
  SARS-CoV-2/USA/WA-UW261/2020__EPI_ISL_418046 spike protein (1-1211)(Q965C_S1003C)
MFVFLVLLPLVSSQCVNLTTRTQLPPAYTNSFTRGVYYPDKVFRSSVLHSTQDLFLPFFSNVTWFHAIHVSGTNGTKRFDNPVLPFNDGVYFASTEKSNIIRGWIFGTTLDSKTQSLLIVNNATNVVIKVCEFQFCNDPFLGVYYHKNNKSWMESEFRVYSSANNCTFEYVSQPFLMDLEGKQGNFKNLREFVFKNIDGYFKIYSKHTPINLVRDLPQGFSALEPLVDLPIGINITRFQTLLALHRSYLTPGDSSSGWTAGAAAYYVGYLQPRTFLLKYNENGTITDAVDCALDPLSETKCTLKSFTVEKGIYQTSNFRVQPTESIVRFPNITNLCPFGEVFNATRFTSVYAWNRKRISNCVADYSVLYNSASFSTFKCYGVSPTKLNDLCFTNVYADSFVIRGDEVRQIAPGQTGKIADYNYKLPDDFTGCVIAWNSNNLDSKVGGNYNYLYRLFRKSNLKPFERDISTEIYQAGSTPCNGVEGFNCYFPLQSYGFQPTNGVGYQPYRVVVLSFELLHAPATVCGPKKSTNLVKNKCVNFNFNGLTGTGVLTESNKKFLPFQQFGRDIADTTDAVRDPQTLEILDITPCSFGGVSVITPGTNTSNQVAVLYQDVNCTEVPVAIHADQLTPTWRVYSTGSNVFQTRAGCLIGAEHVNNSYECDIPIGAGICASYQTQTNSPRRARSVASQSIIAYTMSLGAENSVAYSNNSIAIPTNFTISVTTEILPVSMTKTSVDCTMYICGDSTECSNLLLQYGSFCTQLNRALTGIAVEQDKNTQEVFAQVKQIYKTPPIKDFGGFNFSQILPDPSKPSKRSFIEDLLFNKVTLADAGFIKQYGDCLGDIAARDLICAQKFNGLTVLPPLLTDEMIAQYTSALLAGTITSGWTFGAGAALQIPFAMQMAYRFNGIGVTQNVLYENQKLIANQFNSAIGKIQDSLSSTASALGKLQDVVNQNAQALNTLVKCLSSNFGAISSVLNDILSRLDKVEAEVQIDRLITGRLQCLQTYVTQQLIRAAEIRASANLAATKMSECVLGQSKRVDFCGKGYHLMSFPQSAPHGVVFLHVTYVPAQEKNFTTAPAICHDGKAHFPREGVFVSNGTHWFVTQRNFYEPQIITTDNTFVSGNCDVVIGIVNNTVYDPLQPELDSFKEELDKYFKNHTSPDVDLGDISGINASVVNIQKEIDRLNEVAKNLNESLIDLQELGKYEQYIK

SEQ ID NO: 2332 - protein, 1211 aa, Artificial Sequence
  SARS-CoV-2/Portugal/PT0035/2020__EPI_ISL_418020 spike protein (1-1211)(Q965C_S1003C)
MFVFLVLLPLVSSQCVNLTTRTQLPPAYTNSFTRGVYYPDKVFRSSVLHSTQDLFLPFFSNVTWFHAIHVSGTNGTKRFDNPVLPFNDGVYFASTEKSNIIRGWIFGTTLDSKTQSLLIVNNATNVVIKVCEFQFCNDPFLGVYYHKNNKSWMESEFRVYSSANNCTFEYVSQPFLMDLEGKQGNFKNLREFVFKNIDGYFKIYSKHTPINLVRDLPQGFSALEPLVDLPIGINITRFQTLLALHRSYLTPGDSSSGWTAGAAAYYVGYLQPRTFLLKYNENGTITDAVDCALDPLSETKCTLKSFTVEKGIYQTSNFRVQPTESIVRFPNITNLCPFGEVFNATRFASVYAWNRKRISNCVADYSVLYNSASFSTFKCYGVSPTKLNDLCFTNVYADSFVIRGDEVRQIAPGQTGKIADYNYKLPDDFTGCVIAWNSNNLDSKVGGNYNYLYRLFRKSNLKPFERDISTEIYQAGSTPCNGVEGFNCYFPLQSYGFQPTNGVGYQPYRVVVLSFELLHAPATVCGPKKSTNLVKNKCVNFNFNGLTGTGVLTESNKKFLPFQQFGRDIADTTDAVRDPQTLEILDITPCSFGGVSVITPGTNTSNQVAVLYQDVNCTEVPVAIHADQLTPTWRVYSTGSNVFQTRAGCLIGAEHVNNSYECDIPIGAGICASYQTQTNSPRRARSVASQSIIAYTMSLGAENSVAYSNNSIAIPTNFTISVTTEILPVSMTKTSVDCTMYICGDSTECSNLLLQYGSFCTQLNRALTGIAVEQDKNTQEVFAQVKQIYKTPPIKDFGGFNFSQILPDPSKPSKRSFIEDLLFNKVTLADAGFIKQYGDCLGDISARDLICAQKFNGLTVLPPLLTDEMIAQYTSALLAGTITSGWTFGAGAALQIPFAMQMAYRFNGIGVTQNVLYENQKLIANQFNSAIGKIQDSLSSTASALGKLQDVVNQNAQALNTLVKCLSSNFGAISSVLNDILSRLDKVEAEVQIDRLITGRLQCLQTYVTQQLIRAAEIRASANLAATKMSECVLGQSKRVDFCGKGYHLMSFPQSAPHGVVFLHVTYVPAQEKNFTTAPAICHDGKAHFPREGVFVSNGTHWFVTQRNFYEPQIITTDNTFVSGNCDVVIGIVNNTVYDPLQPELDSFKEELDKYFKNHTSPDVDLGDISGINASVVNIQKEIDRLNEVAKNLNESLIDLQELGKYEQYIK

SEQ ID NO: 2333 - protein, 1211 aa, Artificial Sequence
  SARS-CoV-2/USA/NY-NYUMC7/2020__EPI_ISL_418192 spike protein (1-1211)(Q965C_S1003C)
MFVFLVLLPLVSSQCVNLTTRTQLPPAYTNSFTRGVYYPDKVFRSSVLHSTQDLFLPFFSNVTWFHAIHVSGTNGTKRFDNPVLPFNDGVYFASTEKSNIIRGWIFGTTLDSKTQSLLIVNNATNVVIKVCEFQFCNDPFLGVYHHKNNKSWMESEFRVYSSANNCTFEYVSQPFLMDLEGKQGNFKNLREFVFKNIDGYFKIYSKHTPINLVRDLPQGFSALEPLVDLPIGINITRFQTLLALHRSYLTPGDSSSGWTAGAAAYYVGYLQPRTFLLKYNENGTITDAVDCALDPLSETKCTLKSFTVEKGIYQTSNFRVQPTESIVRFPNITNLCPFGEVFNATRFASVYAWNRKRISNCVADYSVLYNSASFSTFKCYGVSPTKLNDLCFTNVYADSFVIRGDEVRQIAPGQTGKIADYNYKLPDDFTGCVIAWNSNNLDSKVGGNYNYLYRLFRKSNLKPFERDISTEIYQAGSTPCNGVEGFNCYFPLQSYGFQPTNGVGYQPYRVVVLSFELLHAPATVCGPKKSTNLVKNKCVNFNFNGLTGTGVLTESNKKFLPFQQFGRDIADTTDAVRDPQTLEILDITPCSFGGVSVITPGTNTSNQVAVLYQGVNCTEVPVAIHADQLTPTWRVYSTGSNVFQTRAGCLIGAEHVNNSYECDIPIGAGICASYQTQTNSPRRARSVASQSIIAYTMSLGAENSVAYSNNSIAIPTNFTISVTTEILPVSMTKTSVDCTMYICGDSTECSNLLLQYGSFCTQLNRALTGIAVEQDKNTQEVFAQVKQIYKTPPIKDFGGFNFSQILPDPSKPSKRSFIEDLLFNKVTLADAGFIKQYGDCLGDIAARDLICAQKFNGLTVLPPLLTDEMIAQYTSALLAGTITSGWTFGAGAALQIPFAMQMAYRFNGIGVTQNVLYENQKLIANQFNSAIGKIQDSLSSTASALGKLQDVVNQNAQALNTLVKCLSSNFGAISSVLNDILSRLDKVEAEVQIDRLITGRLQCLQTYVTQQLIRAAEIRASANLAATKMSECVLGQSKRVDFCGKGYHLMSFPQSAPHGVVFLHVTYVPAQEKNFTTAPAICHDGKAHFPREGVFVSNGTHWFVTQRNFYEPQIITTDNTFVSGNCDVVIGIVNNTVYDPLQPELDSFKEELDKYFKNHTSPDVDLGDISGINASVVNIQKEIDRLNEVAKNLNESLIDLQELGKYEQYIK

SEQ ID NO: 2334 - protein, 1211 aa, Artificial Sequence
  SARS-CoV-2/Iceland/189/2020__EPI_ISL_417709 spike protein (1-1211)(Q965C_S1003C)
MFVFLVLLPLVSSQCVNLTTRTQLPPAYTNSFTRGVYYPDKVFRSSVLHSTQDLFLPFFSNVTWFHAIHVSGTNGTKRFDNPVLPFNDGVYFASTEKSNIIRGWIFGTTLDSKTQSLLIVNNATNVVIKVCEFQFCNDPFLGVYYHKNNKSWMESEFRVYSSANNCTFEYVSQPFLMDLEGKQGNFKNLREFVFKNIDGYFKIYSKHTPINLVRDLPQGFSALEPLVDLPIGINITRFQTLLALHRSYLTPGDSSSGWTAGAAAYYVGYLQPRTFLLKYNENGTITDAVDCALDPLSETKCTLKSFTVEKGIYQTSNFRVQPTESIVRFPNITNLCPFGEVFNATRFASVYAWNRKRISNCVADYSVLYNSASFSTFKCYGVSPTKLNDLCFTNVYADSFVIRGDEVRQIAPGQTGKIADYNYKLPDDFTGCVIAWNSNNLDSKVGGNYNYLYRLFRKSNLKPFERDISTEIYQAGSTPCNGVEGFNCYFPLQSYGFQPTNGVGYQPYRVVVLSFELLHAPATVCGPKKSTNLVKNKCVNFNFNGLTGTGVLTESNKKFLPFQQFGRDIADTTDAVRDPQTLEILDITPCSFGGVSVITPGTNTSNQVAVLYQGVNCTEVPVAIHADQLTPTWRVYSTGSNVFQTRAGCLIGAEHVNNSYECDIPIGAGICASYQTQTNSPRRARSVASQSIIAYTMSLGAENSVAYSNNSIAIPTNFTISVTTEILPVSMTKTSVDCTMYICGDSTECSNLLLQYGSFCTQLNRALTGIAVEQDKNTQEVFAQVKQIYKTPPIKDFGGFNFSQILPDPSKPSKRSFIEDLLFNKVTLADAGFTKQYGDCLGDIAARDLICAQKFNGLTVLPPLLTDEMIAQYTSALLAGTITSGWTFGAGAALQIPFAMQMAYRFNGIGVTQNVLYENQKLIANQFNSAIGKIQDSLSSTASALGKLQDVVNQNAQALNTLVKCLSSNFGAISSVLNDILSRLDKVEAEVQIDRLITGRLQCLQTYVTQQLIRAAEIRASANLAATKMSECVLGQSKRVDFCGKGYHLMSFPQSAPHGVVFLHVTYVPAQEKNFTTAPAICHDGKAHFPREGVFVSNGTHWFVTQRNFYEPQIITTDNTFVSGNCDVVIGIVNNTVYDPLQPELDSFKEELDKYFKNHTSPDVDLGDISGINASVVNIQKEIDRLNEVAKNLNESLIDLQELGKYEQYIK

SEQ ID NO: 2335 - protein, 1211 aa, Artificial Sequence
  SARS-CoV-2/Australia/NSW56/2020__EPI_ISL_417408 spike protein (1-1211)(Q965C_S1003C)
MFVFLVLLPLVSSQCVNLTTRTQLPPAYTNSFTRGVYYPDKVFRSSVLHSTQDLFLPFFSNVTWFHAIHVSGTNGTKRFDNPVLPFNDGVYFASTEKSNIIRGWIFGTTLDSKTQSLLIVNNATNVVIKVCEFQFCNDPFLGVYYHKNNKSWMESEFRVYSSANNCTFEYVSQPFLMDLEGKQGNFKNLREFVFKNIDGYFKIYSKHTPINLVRDLPQGFSALEPLVDLPIGINITRFQTLLALHRSYLTPGDSSSGWTAGAAAYYVGYLQPRTFLLKYNENGTITDAVDCALDPLSETKCTLKSFTVEKGIYQTSNFRVQPTESIVRFPNITNLCPFGEVFNATRFASVYAWNRKRISNCVADYSVLYNSASFSTFKCYGVSPTKLNDLCFTNVYADSFVIRGDEVRQIAPGQTGKIADYNYKLPDDFTGCVIAWNSNNLDSKVGGNYNYLYRLFRKSNLKPFERDISTEIYQAGSTPCNGVEGFNCYFPLQSYGFQPTNGVGYQPYRVVVLSFELLHAPATVCGPKKSTNLVKNKCVNFNFNGLTGTGVLTESNKKFLPFQQFGRDIADTTDAVRDPQTLEILDITPCSFGGVSVITPGTNTSNQVAVLYQDVNCTEVPVAIHADQLTPTWRVYSTGSNVFQTRAGCLIGAEHVNNSYECDIPIGAGICASYQTQTNSPRRARSVASQSIIAYTMSLGAENSVAYSNNSIAIPTNFTISVTTEILPVSMTKTSVDCTMYICGDSTECSNLLLQYGSFCTQLNRALTGIAVEQDKNTQEVFAQVKQIYKTPPIKDFGGFNFSQILPDSSKPSKRSFIEDLLFNKVTLADAGFIKQYGDCLGDIAARDLICAQKFNGLTVLPPLLTDEMIAQYTSALLAGTITSGWTFGAGAALQIPFAMQMAYRFNGIGVTQNVLYENQKLIANQFNSAIGKIQDSLSSTASALGKLQDVVNQNAQALNTLVKCLSSNFGAISSVLNDILSRLDKVEAEVQIDRLITGRLQCLQTYVTQQLIRAAEIRASANLAATKMSECVLGQSKRVDFCGKGYHLMSFPQSAPHGVVFLHVTYVPAQEKNFTTAPAICHDGKAHFPREGVFVSNGTHWFVTQRNFYEPQIITTDNTFVSGNCDVVIGIVNNTVYDPLQPELDSFKEELDKYFKNHTSPDVDLGDISGINASVVNIQKEIDRLNEVAKNLNESLIDLQELGKYEQYIK

SEQ ID NO: 2336 - protein, 1211 aa, Artificial Sequence
  SARS-CoV-2/Iceland/280/2020__EPI_ISL_417608 spike protein (1-1211)(Q965C_S1003C)
MFVFLVLLPLVSSQCVNLTTRTQLPPAYTNSFTRGVYYPDKVFRSSVLHSTQDLFLPFFSNVTWFHAIHVSGTNGTKRFDNPVLPFNDGVYFASTEKSNIIRGWIFGTTLDSKTQSLLIVNNATNVVIKVCEFQFCNDPFLGVYYHKNNKSWMESEFRVYSSANNCTFEYVSQPFLMDLEGKQGNFKNLREFVFKNIDGYFKIYSKHTPINLVRDLPQGFSALEPLVDLPIGINITRFQTLLALHRSYLTPGDSSSGWTAGAAAYYVGYLQPRTFLLKYNENGTITDAVDCALDPLSETKCTLKSFTVEKGIYQTSNFRVQPTESIVRFPNITNLCPFGEVFNATRFASVYAWNRKRISNCVADYSVLYNSASFSTFKCYGVSPTKLNDLCFTNVYADSFVIRGDEVRQIAPGQTGKIADYNYKLPDDFTGCVIAWNSNNLDSKVGGNYNYLYRLFRKSNLKPFERDISTEIYQAGSTPCNGVEGFNCYFPLQSYGFQPTNGVGYQPYRVVVLSFELLHAPATVCGPKKSTNLVKNKCVNFNFNGLTGTGVLTESNKKFLPFQQFGRDIADTTDAVRDPQTLEILDITPCSFGGVSVITPGTNTSNQVAVLYQGVNCTEVPVAIHADQLTPTWRVYSTGSNVFQTRAGCLIGAEHVNNSYECDIPIGAGICASYHTQTNSPRRARSVASQSIIAYTMSLGAENSVAYSNNSIAIPTNFTISVTTEILPVSMTKTSVDCTMYICGDSTECSNLLLQYGSFCTQLNRALTGIAVEQDKNTQEVFAQVKQIYKTPPIKDFGGFNFSQILPDPSKPSKRSFIEDLLFNKVTLADAGFIKQYGDCLGDIAARDLICAQKFNGLTVLPPLLTDEMIAQYTSALLAGTITSGWTFGAGAALQIPFAMQMAYRFNGIGVTQNVLYENQKLIANQFNSAIGKIQDSLSSTASALGKLQDVVNQNAQALNTLVKCLSSNFGAISSVLNDILSRLDKVEAEVQIDRLITGRLQCLQTYVTQQLIRAAEIRASANLAATKMSECVLGQSKRVDFCGKGYHLMSFPQSAPHGVVFLHVTYVPAQEKNFTTAPAICHDGKAHFPREGVFVSNGTHWFVTQRNFYEPQIITTDNTFVSGNCDVVIGIVNNTVYDPLQPELDSFKEELDKYFKNHTSPDVDLGDISGINASVVNIQKEIDRLNEVAKNLNESLIDLQELGKYEQYIK

SEQ ID NO: 2337 - protein, 1211 aa, Artificial Sequence; identical to SEQ ID NO: 2292
  SARS-CoV-2/Iceland/247/2020__EPI_ISL_417575 spike protein (1-1211)(Q965C_S1003C)

SEQ ID NO: 2338 - protein, 1211 aa, Artificial Sequence
  SARS-CoV-2/Iceland/238/2020__EPI_ISL_417566 spike protein (1-1211)(Q965C_S1003C)
MFVFLVLLPLVSSQCVNLTTRTQLPPAYTNSFTRGVYYPDKVFRSSVLHSTQDLFLPFFSNVTWFHAIHVSGTNGTKRFDNPVLPFNDGVYFASTEKSNIIRGWIFGTTLDSKTQSLLIVNNATNVVIKVCEFQFCNDPFLGVYYHKNNKSWMESEFRVYSSANNCTFEYVSQPFLMDLEGKQGNFKNLREFVFKNIDGYFKIYSKHTPINLVRDLPQGFSALEPLVDLPIGINITRFQTLLALHRSYLTPGDSSSGWTAGAAAYYVGYLQPRTFLLKYNENGTITDAVDCALDPLSETKCTLKSFTVEKGIYQTSNFRVQPTESIVRFPNITNLCPFGEVFNATRFASVYAWNRKRISNCVADYSVLYNSASFSTFKCYGVSPTKLNDLCFTNVYADSFVIRGDEVRQIAPGQTGKIADYNYKLPDDFTGCVIAWNSNNLDSKVGGNYNYLYRLFRKSNLKPFERDISTEIYQAGSTPCNGVEGFNCYFPLQSYGFQPTNGVGYQPYRVVVLSFELLHAPATVCGPKKSTNLVKNKCVNFNFNGLTGTGVLTESNKKFLPFQQFGRDIADTTDAVRDPQTLEILDITPCSFGGVSVITPGTNTSNQVAVLYQGVNCTEVPVAIHADQLTPTWRVYSTGSNVFQTRAGCLIGAEHVNNSYECDIPIGAGICASYQTQTNSPRRARSVASQSIIAYTMSLGAENSVAYSNNSIAIPTNFTISVTTEILPVSMTKTSVDCTMYICGDSTECSNLLLQYGSFCTQLNRALTGIAVEQDKNTQEVFAQVKQIYKTPPIKDFGGFNFSQILPDPSKPSKRSFIEDLLFNKVTLADVGFIKQYGDCLGDIAARDLICAQKFNGLTVLPPLLTDEMIAQYTSALLAGTITSGWTFGAGAALQIPFAMQMAYRFNGIGVTQNVLYENQKLIANQFNSAIGKIQDSLSSTASALGKLQDVVNQNAQALNTLVKCLSSNFGAISSVLNDILSRLDKVEAEVQIDRLITGRLQCLQTYVTQQLIRAAEIRASANLAATKMSECVLGQSKRVDFCGKGYHLMSFPQSAPHGVVFLHVTYVPAQEKNFTTAPAICHDGKAHFPREGVFVSNGTHWFVTQRNFYEPQIITTDNTFVSGNCDVVIGIVNNTVYDPLQPELDSFKEELDKYFKNHTSPDVDLGDISGINASVVNIQKEIDRLNEVAKNLNESLIDLQELGKYEQYIK

SEQ ID NO: 2339 - protein, 1211 aa, Artificial Sequence
  SARS-CoV-2/Greece/16/2020__EPI_ISL_418265 spike protein (1-1211)(Q965C_S1003C)
MFVFLVLLPLVSSQCVNLTTRTQLPPAYTNSFTRGVYYPDKVFRSSVLHSTQDLFLPFFSNVTWFHAIHVSGTNGTKRFDNPVLPFNDGVYFASTEKSNIIRGWIFGTTLDSKTQSLLIVNNATNVVIKVCEFQFCNDPFLGVYYHKNNKSWMESEFRVYSSANNCTFEYVSQPFLMDLEGKQGNFKNLREFVFKNVDGYFKIYSKHTPINLVRDLPQGFSALEPLVDLPIGINITRFQTLLALHRSYLTPGDSSSGWTAGAAAYYVGYLQPRTFLLKYNENGTITDAVDCALDPLSETKCTLKSFTVEKGIYQTSNFRVQPTESIVRFPNITNLCPFGEVFNATRFASVYAWNRKRISNCVADYSVLYNSASFSTFKCYGVSPTKLNDLCFTNVYADSFVIRGDEVRQIAPGQTGKIADYNYKLPDDFTGCVIAWNSNNLDSKVGGNYNYLYRLFRKSNLKPFERDISTEIYQAGSTPCNGVEGFNCYFPLQSYGFQPTNGVGYQPYRVVVLSFELLHAPATVCGPKKSTNLVKNKCVNFNFNGLTGTGVLTESNKKFLPFQQFGRDIADTTDAVRDPQTLEILDITPCSFGGVSVITPGTNTSNQVAVLYQDVNCTEVPVAIHADQLTPTWRVYSTGSNVFQTRAGCLIGAEHVNNSYECDIPIGAGICASYQTQTNSPRRARSVASQSIIAYTMSLGAENSVAYSNNSIAIPTNFTISVTTEILPVSMTKTSVDCTMYICGDSTECSNLLLQYGSFCTQLNRALTGIAVEQDKNTQEVFAQVKQIYKTPPIKDFGGFNFSQILPDPSKPSKRSFIEDLLFNKVTLADAGFIKQYGDCLGDIAARDLICAQKFNGLTVLPPLLTDEMIAQYTSALLAGTITSGWTFGAGAALQIPFAMQMAYRFNGIGVTQNVLYENQKLIANQFNSAIGKIQDSLSSTASALGKLQDVVNQNAQALNTLVKCLSSNFGAISSVLNDILSRLDKVEAEVQIDRLITGRLQCLQTYVTQQLIRAAEIRASANLAATKMSECVLGQSKRVDFCGKGYHLMSFPQSAPHGVVFLHVTYVPAQEKNFTTAPAICHDGKAHFPREGVFVSNGTHWFVTQRNFYEPQIITTDNTFVSGNCDVVIGIVNNTVYDPLQPELDSFKEELDKYFKNHTSPDVDLGDISGINASVVNIQKEIDRLNEVAKNLNESLIDLQELGKYEQYIK

SEQ ID NO: 2340 - protein, 1211 aa, Artificial Sequence
  SARS-CoV-2/Iceland/319/2020__EPI_ISL_417648 spike protein (1-1211)(Q965C_S1003C)
MFVFLVLLPLVSSQCVNLTTRTQLPPAYTNSFTRGVYYPDKVFRSSVLHSTQDLFLPFFSNVTWFHAIHVSGTNGTKRFDNPVLPFNDGVYFASTEKSNIIRGWIFGTTLDSKTQSLLIVNNATNVVIKVCEFQFCNDPFLGVYYHKNNKSWMESEFRVYSSANNCTFEYVSQPFLIDLEGKQGNFKNLREFVFKNIDGYFKIYSKHTPINLVRDLPQGFSALEPLVDLPIGINITRFQTLLALHRSYLTPGDSSSGWTAGAAAYYVGYLQPRTFLLKYNENGTITDAVDCALDPLSETKCTLKSFTVEKGIYQTSNFRVQPTESIVRFPNITNLCPFGEVFNATRFASVYAWNRKRISNCVADYSVLYNSASFSTFKCYGVSPTKLNDLCFTNVYADSFVIRGDEVRQIAPGQTGKIADYNYKLPDDFTGCVIAWNSNNLDSKVGGNYNYLYRLFRKSNLKPFERDISTEIYQAGSTPCNGVEGFNCYFPLQSYGFQPTNGVGYQPYRVVVLSFELLHAPATVCGPKKSTNLVKNKCVNFNFNGLTGTGVLTESNKKFLPFQQFGRDIADTTDAVRDPQTLEILDITPCSFGGVSVITPGTNTSNQVAVLYQGVNCTEVPVAIHADQLTPTWRVYSTGSNVFQTRAGCLIGAEHVNNSYECDIPIGAGICASYQTQTNSPRRARSVASQSIIAYTMSLGAENSVAYSNNSIAIPTNFTISVTTEILPVSMTKTSVDCTMYICGDSTECSNLLLQYGSFCTQLNRALTGIAVEQDKNTQEVFAQVKQIYKTPPIKDFGGFNFSQILPDPSKPSKRSFIEDLLFNKVTLADAGFIKQYGDCLGDIAARDLICAQKFNGLTVLPPLLTDEMIAQYTSALLAGTITSGWTFGAGAALQIPFAMQMAYRFNGIGVTQNVLYENQKLIANQFNSAIGKIQDSLSSTASALGKLQDVVNQNAQALNTLVKCLSSNFGAISSVLNDILSRLDKVEAEVQIDRLITGRLQCLQTYVTQQLIRAAEIRASANLAATKMSECVLGQSKRVDFCGKGYHLMSFPQSAPHGVVFLHVTYVPAQEKNFTTAPAICHDGKAHFPREGVFVSNGTHWFVTQRNFYEPQIITTDNTFVSGNCDVVIGIVNNTVYDPLQPELDSFKEELDKYFKNHTSPDVDLGDISGINASVVNIQKEIDRLNEVAKNLNESLIDLQELGKYEQYIK

SEQ ID NO: 2341 - protein, 1211 aa, Artificial Sequence
  SARS-CoV-2/Congo/94/2020__EPI_ISL_417947 spike protein (1-1211)(Q965C_S1003C)
MFVFLVLLPLVSSQCVNLTTRTQLPPAYTNSFTRGVYYPDKVFRSSVLHSTQDLFLPFFSNVTWFHAIHVSGTNGTKRFDNPVLPFNDGVYFASTEKSNIIRGWIFGTTLDSKTQSLLIVNNATNVVIKVCEFQFCNDPFLGVYYHKNNKSWMESEFRVYSSANNCTFEYVSQPFLMDLEGKQGNFKNLREFVFKNIDGYFKIYSKHTPINLVRDLPQGFSALEPLVDLPIGINITRFQTLLALHRSYLTPGDSSSGWTAGAAAYYVGYLQPRTFLLKYNENGTITDAVDCALDPLSETKCTLKSFTVEKGIYQTSNFRVQPTESIVRFPNITNLCPFGEVFNATRFASVYAWNRKRISNCVADYSVLYNSASFSTFKCYGVSPTKLNDLCFTNVYADSFVIRGDEVRQIAPGQTGKIADYNYKLPDDFTGCVIAWNSNNLDSKVGGNYNYLYRLFRKSNLKPFERDISTEIYQAGSTPCNGVEGFNCYFPLQSYGFQPTNGVGYQPYRVVVLSFELLHAPATVCGPKKSTNLVKNKCVNFNFNGLTGTGVLTESNKKFLPFQQFGRDIADTTDAVRDPQTLEILDITPCSFGGVSVITPGTNTSNQVAVLYQGVNCTEVPVAIHADQLTPTWRVYSTGSNVFQTRAGCLIGAEHVNNSYECDIPIGAGICASYQTQTNSPRRARSVASQSIIAYTMSLGAENSVAYSNNSIAIPTNFTISVTTEILPVSMTKTSVDCTMYICGDSTECSNLLLQYGSFCTQLNRALTGIAVEQDKNTQEVFAQVKQIYKTPPIKDFGGFNFSQILPDPSKPSKRSFIEDILFNKVTLADAGFIKQYGDCLGDIAARDLICAQKFNGLTVLPPLLTDEMIAQYTSALLAGTITSGWTFGAGAALQIPFAMQMAYRFNGIGVTQNVLYENQKLIANQFNSAIGKIQDSLSSTASALGKLQDVVNQNAQALNTLVKCLSSNFGAISSVLNDILSRLDKVEAEVQIDRLITGRLQCLQTYVTQQLIRAAEIRASANLAATKMSECVLGQSKRVDFCGKGYHLMSFPQSAPHGVVFLHVTYVPAQEKNFTTAPAICHDGKAHFPREGVFVSNGTHWFVTQRNFYEPQIITTDNTFVSGNCDVVIGIVNNTVYDPLQPELDSFKEELDKYFKNHTSPDVDLGDISGINASVVNIQKEIDRLNEVAKNLNESLIDLQELGKYEQYIK

SEQ ID NO: 2342 - protein, 1211 aa, Artificial Sequence
  SARS-CoV-2/Congo/158/2020__EPI_ISL_417950 spike protein (1-1211)(Q965C_S1003C)
MFVFLVLLPLVSSQCVNLTTRTQLPPAYTNSFTRGVYYPDKVFRSSVLHSTQDLFLPFFSNVTWFHAIHVSGTNGTKRFDNPVLPFNDGVYFASTEKSNIIRGWIFGTTLDSKTQSLLIVNNATNVVIKVCEFQFCNDPFLGVYYHKNNKSWMESEFRVYSSANNCTFEYVSQPFLMDLEGKQGNFKNLREFVFKNIDGYFKIYSKHTPINLVRDLPQGFSALEPLVDLPIGINITRFQTLLALHRSYLTPGDSSSGWTAGAAAYYVGYLQPRTFLLKYNENGTITDAVDCALDPLSETKCTLKSFTVEKGIYQTSNFRVQPTESIVRFPNITNLCPFGEVFNATRFASVYAWNRKRISNCVADYSVLYNSASFSTFKCYGVSPTKLNDLCFTNVYADSFVIRGDEVRQIAPGQTGKIADYNYKLPDDFTGCVIAWNSNNLDSKVGGNYNYLYRLFRKSNLKPFERDISTEIYQAGSTPCNGVEGFNCYFPLQSYGFQPTNGVGYQPYRVVVLSFELLHAPATVCGPKKSTNLVKNKCVNFNFNGLTGTGVLTESNKKFLPFQQFGRDIADTTDAVRDPQTLEILDITPCSFGGVSVITPGTNTSNQVAVLYQDVNCTEVPVAIHADQLTPTWRVYSTGSNVFQTRAGCLIGAEHVNNSYECDIPIGAGICASYQTQTNSPRRARSVASQSIIAYTMSLGAENSVAYSNNSIAIPTNFTISVTTEILPVSMTKTSVDCTMYICGDSTECSNLLLQYGSFCTQLNRALTGIAVEQDKNTQEVFAQVKQIYKTPPIKDFGGFNFSQILPDPSKPSKRSFIEDLLFNKVTLADAGFIKQYGDCLGDIAARDLICAQKFNGLTVLPPLLTDEMIAQYTSALLAGTITSGWTFGAGAALQIPFAMQMAYRFNGIGVTQNVLYENQKLIANQFNSAIGKIQDSLSSTASALGKLQDVVNQNAQALNTLVKCLSSNFGAISSVLNDILSRLDKVEAEVQIDRLITGRLQCLQTYVTQQLIRAAEIRASANLAATKMSECVLGQSKRVDFCGKGYHLMSFPQSAPHGVVFLHVTYVPAQEKNFTTAPAICHDGKAHFPREGVFVSNGTHWFVTQRNFYEPQIITTDNTFLSGNCDVVIGIVNNTVYDPLQPELDSFKEELDKYFKNHTSPDVDLGDISGINASVVNIQKEIDRLNEVAKNLNESLIDLQELGKYEQYIK

SEQ ID NO: 2343 - protein, 1211 aa, Artificial Sequence
  SARS-CoV-2/USA/UT-00034/2020__EPI_ISL_417977 spike protein (1-1211)(Q965C_S1003C)
MFVFLVLLPLVSSQCVNLTTRTQLPPAYTNSFTRGVYYPDKVFRSSVLHSTQDLFLPFFSNVTWFHAIHVSGTNGTKRFDNPVLPFNDGVYFASTEKSNIIRGWIFGTTLDSKTQSLLIVNNATNVVIKVCEFQFCNDPFLGVYYYKNNKSWMESEFRVYSSANNCTFEYVSQPFLMDLEGKQGNFKNLREFVFKNIDGYFKIYSKHTPINLVRDLPQGFSALEPLVDLPIGINITRFQTLLALHRSYLTPGDSSSGWTAGAAAYYVGYLQPRTFLLKYNENGTITDAVDCALDPLSETKCTLKSFTVEKGIYQTSNFRVQPTESIVRFPNITNLCPFGEVFNATRFASVYAWNRKRISNCVADYSVLYNSASFSTFKCYGVSPTKLNDLCFTNVYADSFVIRGDEVRQIAPGQTGKIADYNYKLPDDFTGCVIAWNSNNLDSKVGGNYNYLYRLFRKSNLKPFERDISTEIYQAGSTPCNGVEGFNCYFPLQSYGFQPTNGVGYQPYRVVVLSFELLHAPATVCGPKKSTNLVKNKCVNFNFNGLTGTGVLTESNKKFLPFQQFGRDIADTTDAVRDPQTLEILDITPCSFGGVSVITPGTNTSNQVAVLYQGVNCTEVPVAIHADQLTPTWRVYSTGSNVFQTRAGCLIGAEHVNNSYECDIPIGAGICASYQTQTNSPRRARSVASQSIIAYTMSLGAENSVAYSNNSIAIPTNFTISVTTEILPVSMTKTSVDCTMYICGDSTECSNLLLQYGSFCTQLNRALTGIAVEQDKNTQEVFAQVKQIYKTPPIKDFGGFNFSQILPDPSKPSKRSFIEDLLFNKVTLADAGFIKQYGDCLGDIAARDLICAQKFNGLTVLPPLLTDEMIAQYTSALLAGTITSGWTFGAGAALQIPFAMQMAYRFNGIGVTQNVLYENQKLIANQFNSAIGKIQDSLSSTASALGKLQDVVNQNAQALNTLVKCLSSNFGAISSVLNDILSRLDKVEAEVQIDRLITGRLQCLQTYVTQQLIRAAEIRASANLAATKMSECVLGQSKRVDFCGKGYHLMSFPQSAPHGVVFLHVTYVPAQEKNFTTAPAICHDGKAHFPREGVFVSNGTHWFVTQRNFYEPQIITTDNTFVSGNCDVVIGIVNNTVYDPLQPELDSFKEELDKYFKNHTSPDVDLGDISGINASVVNIQKEIDRLNEVAKNLNESLIDLQELGKYEQYIK

SEQ ID NO: 2344 - protein, 1211 aa, Artificial Sequence
  SARS-CoV-2/USA/UT-00033/2020__EPI_ISL_417976 spike protein (1-1211)(Q965C_S1003C)
MFVFLVLLPLVSSQCVNLTTRTQLPPAYTNSFTRGVYYPDKVFRSSVLHSTQDLFLPFFSNVTWFHAIHVSGTNGTKRFDNPVLPFNDGVYFASTEKSNIIRGWIFGTTLDSKTQSLLIVNNATNVVIKVCEFQFCNDPFLGVYYHKNNKSWMESEFRVYSSANNCTFEYVSQPFLMDLEGKQGNFKNLREFVFKNIDGYFKIYSKHTPINLVRDLPQGFSALEPLVDLPIGINITRFQTLLALHRSYLTPGDSSSGLTAGAAAYYVGYLQPRTFLLKYNENGTITDAVDCALDPLSETKCTLKSFTVEKGIYQTSNFRVQPTESIVRFPNITNLCPFGEVFNATRFASVYAWNRKRISNCVADYSVLYNSASFSTFKCYGVSPTKLNDLCFTNVYADSFVIRGDEVRQIAPGQTGKIADYNYKLPDDFTGCVIAWNSNNLDSKVGGNYNYLYRLFRKSNLKPFERDISTEIYQAGSTPCNGVEGFNCYFPLQSYGFQPTNGVGYQPYRVVVLSFELLHAPATVCGPKKSTNLVKNKCVNFNFNGLTGTGVLTESNKKFLPFQQFGRDIADTTDAVRDPQTLEILDITPCSFGGVSVITPGTNTSNQVAVLYQGVNCTEVPVAIHADQLTPTWRVYSTGSNVFQTRAGCLIGAEHVNNSYECDIPIGAGICASYQTQTNSPRRARSVASQSIIAYTMSLGAENSVAYSNNSIAIPTNFTISVTTEILPVSMTKTSVDCTMYICGDSTECSNLLLQYGSFCTQLNRALTGIAVEQDKNTQEVFAQVKQIYKTPPIKDFGGFNFSQILPDPSKPSKRSFIEDLLFNKVTLADAGFIKQYGDCLGDIAARDLICAQKFNGLTVLPPLLTDEMIAQYTSALLAGTITSGWTFGAGAALQIPFAMQMAYRFNGIGVTQNVLYENQKLIANQFNSAIGKIQDSLSSTASALGKLQDVVNQNAQALNTLVKCLSSNFGAISSVLNDILSRLDKVEAEVQIDRLITGRLQCLQTYVTQQLIRAAEIRASANLAATKMSECVLGQSKRVDFCGKGYHLMSFPQSAPHGVVFLHVTYVPAQEKNFTTAPAICHDGKAHFPREGVFVSNGTHWFVTQRNFYEPQIITTDNTFVSGNCDVVIGIVNNTVYDPLQPELDSFKEELDKYFKNHTSPDVDLGDISGINASVVNIQKEIDRLNEVAKNLNESLIDLQELGKYEQYIK

SEQ ID NO: 2345 - protein, 1211 aa, Artificial Sequence
  SARS-CoV-2/USA/WI-13/2020__EPI_ISL_417516 spike protein (1-1211)(Q965C_S1003C)
MFVFLVLLPLVSSQCVNLTTRTQLPPAYTNSFTRGVYYPDKVFRSSVLHSTQDLFLPFFSNVTWFHAIHVSGTNGTKRFDNPVLPFNDGVYFASTEKSNIIRGWIFGTTLDSKTQSLLIVNNATNVVIKVCEFQFCNDPFLGVYYHKNNKSWMESEFRVYSSANNCTFEYVSQPFLMDLEGKQGNFKNLREFVFKNIDGYFKIYSKHTPINLVRDLPQGFSALEPLVDLPIGINITRFQTLLALHRSYLTPGDSSSGWTAGAAAYYVGYLQPRTFLLKYNENGTITDAVDCALDPLSETKCTLKSFTVEKGIYQTSNFRVLPTESIVRFPNITNLCPFGEVFNATRFASVYAWNRKRISNCVADYSVLYNSASFSTFKCYGVSPTKLNDLCFTNVYADSFVIRGDEVRQIAPGQTGKIADYNYKLPDDFTGCVIAWNSNNLDSKVGGNYNYLYRLFRKSNLKPFERDISTEIYQAGSTPCNGVEGFNCYFPLQSYGFQPTNGVGYQPYRVVVLSFELLHAPATVCGPKKSTNLVKNKCVNFNFNGLTGTGVLTESNKKFLPFQQFGRDIADTTDAVRDPQTLEILDITPCSFGGVSVITPGTNTSNQVAVLYQGVNCTEVPVAIHADQLTPTWRVYSTGSNVFQTRAGCLIGAEHVNNSYECDIPIGAGICASYQTQTNSPRRARSVASQSIIAYTMSLGAENSVAYSNNSIAIPTNFTISVTTEILPVSMTKTSVDCTMYICGDSTECSNLLLQYGSFCTQLNRALTGIAVEQDKNTQEVFAQVKQIYKTPPIKDFGGFNFSQILPDPSKPSKRSFIEDLLFNKVTLADAGFIKQYGDCLGDIAARDLICAQKFNGLTVLPPLLTDEMIAQYTSALLAGTITSGWTFGAGAALQIPFAMQMAYRFNGIGVTQNVLYENQKLIANQFNSAIGKIQDSLSSTASALGKLQDVVNQNAQALNTLVKCLSSNFGAISSVLNDILSRLDKVEAEVQIDRLITGRLQCLQTYVTQQLIRAAEIRASANLAATKMSECVLGQSKRVDFCGKGYHLMSFPQSAPHGVVFLHVTYVPAQEKNFTTAPAICHDGKAHFPREGVFVSNGTHWFVTQRNFYEPQIITTDNTFVSGNCDVVIGIVNNTVYDPLQPELDSFKEELDKYFKNHTSPDVDLGDISGINASVVNIQKEIDRLNEVAKNLNESLIDLQELGKYEQYIK

SEQ ID NO: 2346 - protein, 1210 aa, Artificial Sequence
  SARS-CoV-2/India/1-27/2020__EPI_ISL_413522 spike protein (1-1210)(Q964C_S1002C)
MFVFLVLLPLVSSQCVNLTTRTQLPPAYTNSFTRGVYYPDKVFRSSVLHSTQDLFLPFFSNVTWFHAIHVSGTNGTKRFDNPVLPFNDGVYFASTEKSNIIRGWIFGTTLDSKTQSLLIVNNATNVVIKVCEFQFCNDPFLGVYHKNNKSWMESEFRVYSSANNCTFEYVSQPFLMDLEGKQGNFKNLREFVFKNIDGYFKIYSKHTPINLVRDLPQGFSALEPLVDLPIGINITRFQTLLALHRSYLTPGDSSSGWTAGAAAYYVGYLQPRTFLLKYNENGTITDAVDCALDPLSETKCTLKSFTVEKGIYQTSNFRVQPTESIVRFPNITNLCPFGEVFNATRFASVYAWNRKRISNCVADYSVLYNSASFSTFKCYGVSPTKLNDLCFTNVYADSFVIRGDEVIQIAPGQTGKIADYNYKLPDDFTGCVIAWNSNNLDSKVGGNYNYLYRLFRKSNLKPFERDISTEIYQAGSTPCNGVEGFNCYFPLQSYGFQPTNGVGYQPYRVVVLSFELLHAPATVCGPKKSTNLVKNKCVNFNFNGLTGTGVLTESNKKFLPFQQFGRDIADTTDAVRDPQTLEILDITPCSFGGVSVITPGTNTSNQVAVLYQDVNCTEVPVAIHADQLTPTWRVYSTGSNVFQTRAGCLIGAEHVNNSYECDIPIGAGICASYQTQTNSPRRARSVASQSIIAYTMSLGAENSVAYSNNSIAIPTNFTISVTTEILPVSMTKTSVDCTMYICGDSTECSNLLLQYGSFCTQLNRALTGIAVEQDKNTQEVFAQVKQIYKTPPIKDFGGFNFSQILPDPSKPSKRSFIEDLLFNKVTLADAGFIKQYGDCLGDIAARDLICAQKFNGLTVLPPLLTDEMIAQYTSALLAGTITSGWTFGAGAALQIPFAMQMAYRFNGIGVTQNVLYENQKLIANQFNSAIGKIQDSLSSTASALGKLQDVVNQNAQALNTLVKCLSSNFGAISSVLNDILSRLDKVEAEVQIDRLITGRLQCLQTYVTQQLIRAAEIRASANLAATKMSECVLGQSKRVDFCGKGYHLMSFPQSAPHGVVFLHVTYVPAQEKNFTTAPAICHDGKAHFPREGVFVSNGTHWFVTQRNFYEPQIITTDNTFVSGNCDVVIGIVNNTVYDPLQPELDSFKEELDKYFKNHTSPDVDLGDISGINASVVNIQKEIDRLNEVAKNLNESLIDLQELGKYEQYIK

SEQ ID NO: 2347 - protein, 1205 aa, Artificial Sequence
  SARS-CoV-2/pangolin/Guangxi/P4L/2017__EPI_ISL_410538 spike protein (1-1205)(Q959C_S997C)
MFVFLFVLPLVSSQCVNLTTRTGIPPGYTNSSTRGVYYPDKVFRSSILHLTQDLFLPFFSNVTWFNTINYQGGFKKFDNPVLPFNDGVYFASTEKSNIIRGWIFGTTLDARTQSLLIVNNATNVVIKVCEFQFCTDPFLGVYYHNNNKTWVENEFRVYSSANNCTFEYISQPFLMDLEGKQGNFKNLREFVFKNVDGYFKIYSKHTPIDLVRDLPRGFAALEPLVDLPIGINITRFQTLLALHRSYLTPGNLESGWTTGAAAYYVGYLQQRTFLLSYNQNGTITDAVDCSLDPLSETKCTLKSLTVEKGIYQTSNFRVQPTISIVRFPNITNLCPFGEVFNASKFASVYAWNRKRISNCVADYSVLYNSTSFSTFKCYGVSPTKLNDLCFTNVYADSFVVKGDEVRQIAPGQTGVIADYNYKLPDDFTGCVIAWNSVKQDALTGGNYGYLYRLFRKSKLKPFERDISTEIYQAGSTPCNGQVGLNCYYPLERYGFHPTTGVNYQPFRVVVLSFELLNGPATVCGPKLSTTLVKDKCVNFNFNGLTGTGVLTTSKKQFLPFQQFGRDISDTTDAVRDPQTLEILDITPCSFGGVSVITPGTNTSNQVAVLYQDVNCTEVPMAIHAEQLTPAWRVYSAGANVFQTRAGCLVGAEHVNNSYECDIPVGAGICASYHSMSSLRSVNQRSIIAYTMSLGAENSVAYSNNSIAIPTNFTISVTTEILPVSMTKTSVDCTMYICGDSIECSNLLLQYGSFCTQLNRALTGIAVEQDKNTQEVFAQVKQIYKTPPIKDFGGFNFSQILPDPSKPSKRSFIEDLLFNKVTLADAGFIKQYGDCLGDIAARDLICAQKFNGLTVLPPLLTDEMIAQYTSALLAGTITSGWTFGAGAALQIPFAMQMAYRFNGIGVTQNVLYENQKLIANQFNSAIGKIQDSLSSTASALGKLQDVVNQNAQALNTLVKCLSSNFGAISSVLNDILSRLDKVEAEVQIDRLITGRLQCLQTYVTQQLIRAAEIRASANLAATKMSECVLGQSKRVDFCGKGYHLMSFPQSAPHGVVFLHVTYVPAQEKNFTTAPAICHEGKAHFPREGVFVSNGTHWFITQRNFYEPQIITTDNTFVSGSCDVVIGIVNNTVYDPLQPELDSFKEELDKYFKNHTSPDVDLGDISGINASVVNIQKEIDRLNEVAKNLNESPIDLQELGKYEQYIK

SEQ ID NO: 2348 - protein, 1205 aa, Artificial Sequence
  SARS-CoV-2/pangolin/Guangxi/P5L/2017__EPI_ISL_410540 spike protein (1-1205)(Q959C_S997C)
MFVFLFVLPLVSSQCVNLTTRTGIPPGYTNSSTRGVYYPDKVFRSSILHLTQDLFLPFFSNVTWFNTINYQGGFKKFDNPVLPFNDGVYFASTEKSNIIRGWIFGTTLDARTQSLLIVNNATNVVIKVCEFQFCTDPFLGVYYHNNNKTWVENEFRVYSSANNCTFEYISQPFLMDLEGKQGNFKNLREFVFKNVDGYFKIYSKHTPIDLVRDLPRGFAALEPLVDLPIGINITRFQTLLALHRSYLTPGKLESGWTTGAAAYYVGYLQQRTFLLSYNQNGTITDAVDCSLDPLSETKCTLKSLTVEKGIYQTSNFRVQPTISIVRFPNITNLCPFGEVFNASKFASVYAWNRKRISNCVADYSVLYNSTSFSTFKCYGVSPTKLNDLCFTNVYADSFVVKGDEVRQIAPGQTGVIADYNYKLPDDFTGCVIAWNSVKQDALTGGNYGYLYRLFRKSKLKPFERDISTEIYQAGSTPCNGQVGLNCYYPLERYGFHPTTGVNYQPFRVVVLSFELLNGPATVCGPKLSTTLVKDKCVNFNFNGLTGTGVLTTSKKQFLPFQQFGRDISDTTDAVRDPQTLEILDITPCSFGGVSVITPGTNTSNQVAVLYQDVNCTEVPMAIHAEQLTPAWRVYSAGANVFQTRAGCLVGAEHVNNSYECDIPVGAGICASYHSMSSFRSVNQRSIIAYTMSLGAENSVAYSNNSIAIPTNFTISVTTEILPVSMTKTSVDCTMYICGDSIECSNLLLQYGSFCTQLNRALTGIAVEQDKNTQEVFAQVKQIYKTPPIKDFGGFNFSQILPDPSKPSKRSFIEDLLFNKVTLADAGFIKQYGDCLGDIAARDLICAQKFNGLTVLPPLLTDEMIAQYTSALLAGTITSGWTFGAGAALQIPFAMQMAYRFNGIGVTQNVLYENQKLIANQFNSAIGKIQDSLSSTASALGKLQDVVNQNAQALNTLVKCLSSNFGAISSVLNDILSRLDKVEAEVQIDRLITGRLQCLQTYVTQQLIRAAEIRASANLAATKMSECVLGQSKRVDFCGKGYHLMSFPQSAPHGVVFLHVTYVPAQEKNFTTAPAICHEGKAHFPREGVFVSNGTHWFITQRNFYEPQIITTDNTFVSGSCDVVIGIVNNTVYDPLQPELDSFKEELDKYFKNHTSPDVDLGDISGINASVVNIQKEIDRLNEVAKNLNESLIDLQELGKYEQYIK

SEQ ID NO: 2349 - protein, 1205 aa, Artificial Sequence
  SARS-CoV-2/pangolin/Guangxi/P5E/2017__EPI_ISL_410541 spike protein (1-1205)(Q959C_S997C)
MFVFLFVLPLVSSQCVNLTTRTGIPPGYTNSSTRGVYYPDKVFRSSILHLTQDLFLPFFSNVTWFNTITYQGGSKKFDNPVLPFNDGVYFASTEKSNIIRGWIFGTTLDARTQSLLIVNNATNVVIKVCEFQFCTDPFLGVYYHNNNKTWVENEFRVYSSANNCTFEYISQPFLMDLEGKQGNFKNLREFVFKNVDGYFKIYSKHTPIDLVRDLPRGFAALEPLVDLPIGINITRFQTLLALHRSYLTPGKLESGWTTGAAAYYVGYLQQRTFLLSYNQNGTITDAVDCSLDPLSETKCTLKSLTVEKGIYQTSNFRVQPTISIVRFPNITNLCPFGEVFNASKFASVYAWNRKRISNCVADYSVLYNSTSFSTFKCYGVSPTKLNDLCFTNVYADSFVVKGDEVRQIAPGQTGVIADYNYKLPDDFTGCVIAWNSVKQDALTGDNYGYLYRLFRKSKLKPFERDISTEIYQAGSTPCNGQVGLNCYYPLERYGFHPTTGVNYQPFRVVVLSFELLNGPATVCGPKLSTTLVKDKCVNFNFNGLTGTGVLTTSKKQFLPFQQFGRDISDTTDAVRDPQTLEILDITPCSFGGVSVITPGTNTSNQVAVLYQDVNCTEVPMAIHAEQLTPAWRVYSAGANVFQTRAGCLVGAEHVNNSYECDIPVGAGICASYHSMSSFRSVNQRSIIAYTMSLGAENSVAYSNNSIAIPTNFTISVTTEILPVSMTKTSVDCTMYICGDSIECSNLLLQYGSFCTQLNRALTGIAVEQDKNTQEVFAQVKQIYKTPPIKDFGGFNFSQILPDPSKPSKRSFIEDLLFNKVTLADAGFIKQYGDCLGDIAARDLICAQKFNGLTVLPPLLTDEMIAQYTSALLAGTITSGWTFGAGAALQIPFAMQMAYRFNGIGVTQNVLYENQKLIANQFNSAIGKIQDSLSSTASALGKLQDVVNQNAQALNTLVKCLSSNFGAISSVLNDILSRLDKVEAEVQIDRLITGRLQCLQTYVTQQLIRAAEIRASANLAATKMSECVLGQSKRVDFCGKGYHLMSFPQSAPHGVVFLHVTYVPAQEKNFTTAPAICHEGKAHFPREGVFVSNGTHWFITQRNFYEPQIITTDNTFVSGSCDVVIGIVNNTVYDPLQPELDSFKEELDKYFKNHTSPDVDLGDISGINASVVNIQKEIDRLNEVAKNLNESLIDLQELGKYEQYIK

SEQ ID NO: 2350 - protein, 1203 aa, Artificial Sequence
  SARS-CoV-2/pangolin/Guangxi/P1E/2017__EPI_ISL_410539 spike protein (1-1203)(Q957C_S995C)
MFVFLFVLPLVSSQCVNLTTRTGIQPGYTNSSTRGVYYPDKVFRSSILHLTQDLFLPFFSNVTWFNTINYQGGFKKFDNPVLPFNDGVYFASTEKSNIIRGWIFGTTLDARTQSLLIVNNATNVVIKVCEFQFCTDPFLGVYYHNNNKTWVENEFRVYSSANNCTFEYISQPFLMDLEGKQGNFKNLREFVFKNVDGYFKIYSKHTPIDLVRDLPRGFAALEPLVDLPIGINITRFQTLLALHRSYLTPGKLESGWTTGAAAYYVGYLQQRTFLLSYNQNGTITDAVDCSLDPLSETKCTLKSLTVEKGIYQTSNFRVQPTISIVRFPNITNLCPFGEVFNASKFASVYAWNRKRISNCVADYSVLYNSTSFSTFKCYGVSPTKLNDLCFTNVYADSFVVKGDEVRQIAPGQTGVIADYNYKLPDDFTGCVIAWNSVKQDALTGGNYLYRLFRKSKLKPFERDISTEIYQAGSTPCNGQVGLNCYYPLERYGFHPTTGVNYQPFRVVVLSFELLNGPATVCGPKLSTTLVKDKCVNFNFNGLTGTGVLTTSKKQFLPFQQFGRDISDTTDAVRDPQTLEILDITPCSFGGVSVITPGTNTSNQVAVLYQDVNCTEVPMAIHAEQLTPAWRVYSAGANVFQTRAGCLVGAEHVNNSYECDIPVGAGICASYHSMSSLRSVNQRSIIAYTMSLGAENSVAYSNNSIAIPTNFTISVTTEILPVSMTKTSVDCTMYICGDSIECSNLLLQYGSFCTQLNRALTGIAVEQDKNTQEVFAQVKQIYKTPPIKDFGGFNFSQILPDPSKPSKRSFIEDLLFNKVTLADAGFIKQYGDCLGDIAARDLICAQKFNGLTVLPPLLTDEMIAQYTSALLAGTITSGWTFGAGAALQIPFAMQMAYRFNGIGVTQNVLYENQKLIANQFNSAIGKIQDSLSSTASALGKLQDVVNQNAQALNTLVKCLSSNFGAISSVLNDILSRLDKVEAEVQIDRLITGRLQCLQTYVTQQLIRAAEIRASANLAATKMSECVLGQSKRVDFCGKGYHLMSFPQSAPHGVVFLHVTYVPAQEKNFTTAPAICHEGKAHFPREGVFVSNGTHWFITQRNFYEPQIITTDNTFVSGSCDVVIGIVNNTVYDPLQPELDSFKEELDKYFKNHTSPDVDLGDISGINASVVNIQKEIDRLNEVAKNLNESLIDLQELGKYEQYIK

SEQ ID NO: 2351 - protein, 1211 aa, Artificial Sequence
  SARS-CoV-2/Wuhan/WIV05/2019__EPI_ISL_402128 spike protein (1-1211)(F970C_G999C)
MFVFLVLLPLVSSQCVNLTTRTQLPPAYTNSFTRGVYYPDKVFRSSVLHSTQDLFLPFFSNVTWFHAIHVSGTNGTKRFDNPVLPFNDGVYFASTEKSNIIRGWIFGTTLDSKTQSLLIVNNATNVVIKVCEFQFCNDPFLGVYYHKNNKSWMESEFRVYSSANNCTFEYVSQPFLMDLEGKQGNFKNLREFVFKNIDGYFKIYSKHTPINLVRDLPQGFSALEPLVDLPIGINITRFQTLLALHRSYLTPGDSSSGWTAGAAAYYVGYLQPRTFLLKYNENGTITDAVDCALDPLSETKCTLKSFTVEKGIYQTSNFRVQPTESIVRFPNITNLCPFGEVFNATRFASVYAWNRKRISNCVADYSVLYNSASFSTFKCYGVSPTKLNDLCFTNVYADSFVIRGDEVRQIAPGQTGKIADYNYKLPDDFTGCVIAWNSNNLDSKVGGNYNYLYRLFRKSNLKPFERDISTEIYQAGSTPCNGVEGFNCYFPLQSYGFQPTNGVGYQPYRVVVLSFELLHAPATVCGPKKSTNLVKNKCVNFNFNGLTGTGVLTESNKKFLPFQQFGRDIADTTDAVRDPQTLEILDITPCSFGGVSVITPGTNTSNQVAVLYQDVNCTEVPVAIHADQLTPTWRVYSTGSNVFQTRAGCLIGAEHVNNSYECDIPIGAGICASYQTQTNSPRRARSVASQSIIAYTMSLGAENSVAYSNNSIAIPTNFTISVTTEILPVSMTKTSVDCTMYICGDSTECSNLLLQYGSFCTQLNRALTGIAVEQDKNTQEVFAQVKQIYKTPPIKDFGGFNFSQILPDPSKPSKRSFIEDLLFNKVTLADAGFIKQYGDCLGDIAARDLICAQKFNGLTVLPPLLTDEMIAQYTSALLAGTITSGWTFGAGAALQIPFAMQMAYRFNGIGVTQNVLYENQKLIANQFNSAIGKIQDSLSSTASALGKLQDVVNQNAQALNTLVKQLSSNCGAISSVLNDILSRLDKVEAEVQIDRLITCRLQSLQTYVTQQLIRAAEIRASANLAATKMSECVLGQSKRVDFCGKGYHLMSFPQSAPHGVVFLHVTYVPAQEKNFTTAPAICHDGKAHFPREGVFVSNGTHWFVTQRNFYEPQIITTDNTFVSGNCDVVIGIVNNTVYDPLQPELDSFKEELDKYFKNHTSPDVDLGDISGINASVVNIQKEIDRLNEVAKNLNESLIDLQELGKYEQYIK

SEQ ID NO: 2352 - protein, 1207 aa, Artificial Sequence
  SARS-CoV-2/bat/Yunnan/RaTG13/2013__EPI_ISL_402131 spike protein (1-1207)(F966C_G995C)
MFVFLVLLPLVSSQCVNLTTRTQLPPAYTNSSTRGVYYPDKVFRSSVLHLTQDLFLPFFSNVTWFHAIHVSGTNGIKRFDNPVLPFNDGVYFASTEKSNIIRGWIFGTTLDSKTQSLLIVNNATNVVIKVCEFQFCNDPFLGVYYHKNNKSWMESEFRVYSSANNCTFEYVSQPFLMDLEGKQGNFKNLREFVFKNIDGYFKIYSKHTPINLVRDLPPGFSALEPLVDLPIGINITRFQTLLALHRSYLTPGDSSSGWTAGAAAYYVGYLQPRTFLLKYNENGTITDAVDCALDPLSETKCTLKSFTVEKGIYQTSNFRVQPTDSIVRFPNITNLCPFGEVFNATTFASVYAWNRKRISNCVADYSVLYNSTSFSTFKCYGVSPTKLNDLCFTNVYADSFVITGDEVRQIAPGQTGKIADYNYKLPDDFTGCVIAWNSKHIDAKEGGNFNYLYRLFRKANLKPFERDISTEIYQAGSKPCNGQTGLNCYYPLYRYGFYPTDGVGHQPYRVVVLSFELLNAPATVCGPKKSTNLVKNKCVNFNFNGLTGTGVLTESNKKFLPFQQFGRDIADTTDAVRDPQTLEILDITPCSFGGVSVITPGTNASNQVAVLYQDVNCTEVPVAIHADQLTPTWRVYSTGSNVFQTRAGCLIGAEHVNNSYECDIPIGAGICASYQTQTNSRSVASQSIIAYTMSLGAENSVAYSNNSIAIPTNFTISVTTEILPVSMTKTSVDCTMYICGDSTECSNLLLQYGSFCTQLNRALTGIAVEQDKNTQEVFAQVKQIYKTPPIKDFGGFNFSQILPDPSKPSKRSFIEDLLFNKVTLADAGFIKQYGDCLGDIAARDLICAQKFNGLTVLPPLLTDEMIAQYTSALLAGTITSGWTFGAGAALQIPFAMQMAYRFNGIGVTQNVLYENQKLIANQFNSAIGKIQDSLSSTASALGKLQDVVNQNAQALNTLVKQLSSNCGAISSVLNDILSRLDKVEAEVQIDRLITCRLQSLQTYVTQQLIRAAEIRASANLAATKMSECVLGQSKRVDFCGKGYHLMSFPQSAPHGVVFLHVTYVPAQEKNFTTAPAICHDGKAHFPREGVFVSNGTHWFVTQRNFYEPQIITTDNTFVSGSCDVVIGIVNNTVYDPLQPELDSFKEELDKYFKNHTSPDVDLGDISGINASVVNIQKEIDRLNEVAKNLNESLIDLQELGKYEQYIK

SEQ ID NO: 2353 - protein, 1211 aa, Artificial Sequence
  SARS-CoV-2/Wuhan/HBCDC-HB-01/2019__EPI_ISL_402132 spike protein (1-1211)(F970C_G999C)
MFVFLVLLPLVSSQCVNLTTRTQLPPAYTNSITRGVYYPDKVFRSSVLHSTQDLFLPFFSNVTWFHAIHVSGTNGTKRFDNPVLPFNDGVYFASTEKSNIIRGWIFGTTLDSKTQSLLIVNNATNVVIKVCEFQFCNDPFLGVYYHKNNKSWMESEFRVYSSANNCTFEYVSQPFLMDLEGKQGNFKNLREFVFKNIDGYFKIYSKHTPINLVRDLPQGFSALEPLVDLPIGINITRFQTLLALHRSYLTPGDSSSGWTAGAAAYYVGYLQPRTFLLKYNENGTITDAVDCALDPLSETKCTLKSFTVEKGIYQTSNFRVQPTESIVRFPNITNLCPFGEVFNATRFASVYAWNRKRISNCVADYSVLYNSASFSTFKCYGVSPTKLNDLCFTNVYADSFVIRGDEVRQIAPGQTGKIADYNYKLPDDFTGCVIAWNSNNLDSKVGGNYNYLYRLFRKSNLKPFERDISTEIYQAGSTPCNGVEGFNCYFPLQSYGFQPTNGVGYQPYRVVVLSFELLHAPATVCGPKKSTNLVKNKCVNFNFNGLTGTGVLTESNKKFLPFQQFGRDIADTTDAVRDPQTLEILDITPCSFGGVSVITPGTNTSNQVAVLYQDVNCTEVPVAIHADQLTPTWRVYSTGSNVFQTRAGCLIGAEHVNNSYECDIPIGAGICASYQTQTNSPRRARSVASQSIIAYTMSLGAENSVAYSNNSIAIPTNFTISVTTEILPVSMTKTSVDCTMYICGDSTECSNLLLQYGSFCTQLNRALTGIAVEQDKNTQEVFAQVKQIYKTPPIKDFGGFNFSQILPDPSKPSKRSFIEDLLFNKVTLADAGFIKQYGDCLGDIAARDLICAQKFNGLTVLPPLLTDEMIAQYTSALLAGTITSGWTFGAGAALQIPFAMQMAYRFNGIGVTQNVLYENQKLIANQFNSAIGKIQDSLSSTASALGKLQDVVNQNAQALNTLVKQLSSNCGAISSVLNDILSRLDKVEAEVQIDRLITCRLQSLQTYVTQQLIRAAEIRASANLAATKMSECVLGQSKRVDFCGKGYHLMSFPQSAPHGVVFLHVTYVPAQEKNFTTAPAICHDGKAHFPREGVFVSNGTHWFVTQRNFYEPQIITTDNTFVSGNCDVVIGIVNNTVYDPLQPELDSFKEELDKYFKNHTSPDVDLGDISGINASVVNIQKEIDRLNEVAKNLNESLIDLQELGKYEQYIK

SEQ ID NO: 2354 - protein, 1211 aa, Artificial Sequence
  SARS-CoV-2/Guangdong/20SF028/2020__EPI_ISL_403936 spike protein (1-1211)(F970C_G999C)
MFVFLVLLPLVSSQCVNLTTRTQLPPAYTNSFTRGVYYPDKVFRSSVLYSTQDLFLPFFSNVTWFHAIHVSGTNGTKRFDNPVLPFNDGVYFASTEKSNIIRGWIFGTTLDSKTQSLLIVNNATNVVIKVCEFQFCNDPFLGVYYHKNNKSWMESEFRVYSSANNCTFEYVSQPFLMDLEGKQGNFKNLREFVFKNIDGYFKIYSKHTPINLVRDLPQGFSALEPLVDLPIGINITRFQTLLALHRSYLTPGDSSSGWTAGAAAYYVGYLQPRTFLLKYNENGTITDAVDCALDPLSETKCTLKSFTVEKGIYQTSNFRVQPTESIVRFPNITNLCPFGEVFNATRFASVYAWNRKRISNCVADYSVLYNSASFSTFKCYGVSPTKLNDLCFTNVYADSFVIRGDEVRQIAPGQTGKIADYNYKLPDDFTGCVIAWNSNNLDSKVGGNYNYLYRLFRKSNLKPFERDISTEIYQAGSTPCNGVEGFNCYFPLQSYGFQPTNGVGYQPYRVVVLSFELLHAPATVCGPKKSTNLVKNKCVNFNFNGLTGTGVLTESNKKFLPFQQFGRDIADTTDAVRDPQTLEILDITPCSFGGVSVITPGTNTSNQVAVLYQDVNCTEVPVAIHADQLTPTWRVYSTGSNVFQTRAGCLIGAEHVNNSYECDIPIGAGICASYQTQTNSPRRARSVASQSIIAYTMSLGAENSVAYSNNSIAIPTNFTISVTTEILPVSMTKTSVDCTMYICGDSTECSNLLLQYGSFCTQLNRALTGIAVEQDKNTQEVFAQVKQIYKTPPIKDFGGFNFSQILPDPSKPSKRSFIEDLLFNKVTLADAGFIKQYGDCLGDIAARDLICAQKFNGLTVLPPLLTDEMIAQYTSALLAGTITSGWTFGAGAALQIPFAMQMAYRFNGIGVTQNVLYENQKLIANQFNSAIGKIQDSLSSTASALGKLQDVVNQNAQALNTLVKQLSSNCGAISSVLNDILSRLDKVEAEVQIDRLITCRLQSLQTYVTQQLIRAAEIRASANLAATKMSECVLGQSKRVDFCGKGYHLMSFPQSAPHGVVFLHVTYVPAQEKNFTTAPAICHDGKAHFPREGVFVSNGTHWFVTQRNFYEPQIITTDNTFVSGNCDVVIGIVNNTVYDPLQPELDSFKEELDKYFKNHTSPDVDLGDISGINASVVNIQKEIDRLNEVAKNLNESLIDLQELGKYEQYIK

SEQ ID NO: 2355 - protein, 1211 aa, Artificial Sequence
  SARS-CoV-2/Shenzhen/SZTH-001/2020__EPI_ISL_406592 spike protein (1-1211)(F970C_G999C)
MFVFLVLLPLVSSQCVNLTTRTQLPPAYTNSFTRGVYYPDKVFRSSVLHSTQDLFLPFFSNVTWFHAIHVSGTNGTKRFDNPVLPFNDGVYFASTEKSNIIRGWIFGTTLDSKTQSLLIVNNATNVVIKVCEFQFCNDPFLGVYYHKNNKSWMESEFRVYSSANNCTFEYVSQPFLMDLEGKQGNFKNLREFVFKNIDGYFKIYSKHTPINLVRDLPQGFSALEPLVDLPIGINITRFQTLLALHRSYLTPGDSSSGWTAGAAAYYVGYLQPRTFLLKYNENGTITDAVDCALDPLSETKCTLKSFTVEKGIYQTSNFRVQPTESIVRFPNITNLCPFGEVFNATRFASVYAWNRKRISNCVADYSVLYNSASFSTFKCYGVSPTKLNDLCFTNVYADSFVIRGDEVRQIAPGQTGKIADYNYKLPDDFTGCVIAWNSNNLDSKVGGNYNYLYRLFRKSNLKPFERDISTEIYQAGSTPCNGVEGFNCYFPLQSYGFQPTNGVGYQPYRVVVLSFELLHAPATVCGPKKSTNLVKNKCVNFNFNGLTGTGVLTESNKKFLPFQQFGRDIADTTDAVRDPQTLEILDITPCSFGGVSVITPGTNTSNQVAVLYQDVNCTEVPVAIHADQLTPTWRVYSTGSNVFQTRAGCLIGAEHVNNSYECDIPIGAGICASYQTQTNSPRRARSVASQSIIAYTMSLGAENSVAYSNNSIAIPTNFTISVTTEILPVSMTKTSVDCTMYICGDSTECSNLLLQYGSFCTQLNRALTGIAVEQDKNTQEVFAQVKQIYKTPPIKDFGGFNFSQILPDPSKPSKRSFIEDLLFNKVTLADAGFIKQYGDCLGDIAARDLICAQKFNGLTVLPPLLTDEMIAQYTSALLAGTITSGWTFGAGAALQIPFAMQMAYRFNGIGVTQNVLYENQKLIANQFNSAIGKIQDSLSSTASALGKLQDVVNQNAQALNTLVKQLSSNCGAISSVLNDILSRLDKVEAEVQIDRLITCRLQSLQTYVTQQLIRAAEIRASANLAATKMSECVLGQSKRVDFCGKGYHLMSFPQSAPHGVVFLHVTYVPAQEKNFTTAPAICHDGKAHFPREGVFVSNGTHWFVTQRNFYEPQIITTDNTFVSGNCDVLIGIVNNTVYDPLQPELDSFKEELDKYFKNHTSPDVDLGDISGINASVVNIQKEIDRLNEVAKNLNESLIDLQELGKYEQYIK

SEQ ID NO: 2356 - protein, 1211 aa, Artificial Sequence
  SARS-CoV-2/Shenzhen/SZTH-004/2020__EPI_ISL_406595 spike protein (1-1211)(F970C_G999C)
MFVFLVLLPLVSSQCVNLTTRTQLPPAYTNSFTRGVYYPDKVFRSSVLHSTQDLFLPFFSNVTWFHAIHVSGTNGTKRFDNPVLPFNDGVYFASTEKSNIIRGWIFGTTLDSKTQSLLIVNNATNVVIKVCEFQFCNDPFLGVYYHKNNKSWMESEFRVYSSANNCTFEYVSQPFLMDLEGKQGNFKNLREFVFKNIDGYFKIYSKHTPINLVRDLPQGFSALEPLVDLPIGINITRFQTLLALHRSYLTPGDSSSGWTAGAAAYYVGYLQPRTFLLKYNENGTITDAVDCALDPLSETKCTLKSFTVEKGIYQTSNFRVQPTESIVRFPNITNLCPFGEVFNATRFASVYAWDRKRISNCVAYYSVLYNSASFSTFKCYGVSPTKLNDLCFTNVYADSFVIRGDEVRQIAPGQTGKIADYNYKLPDDFTGCVIAWNSNNLDSKVGGNYNYLYRLFRKSNLKPFERDISTEIYQAGSTPCNGVEGFNCYFPLQSYGFQPTNGVGYQPYRVVVLSFELLHAPATVCGPKKSTNLVKNKCVNFNFNGLTGTGVLTESNKKFLPFQQFGRDIADTTDAVRDPQTLEILDITPCSFGGVSVITPGTNTSNQVAVLYQDVNCTEVPVAIHADQLTPTWRVYSTGSNVFQTRAGCLIGAEHVNNSYECDIPIGAGICASYQTQTNSPRRARSVASQSIIAYTMSLGAENSVAYSNNSIAIPTNFTISVTTEILPVSMTKTSVDCTMYICGDSTECSNLLLQYGSFCTQLNRALTGIAVEQDKNTQEVFAQVKQIYKTPPIKDFGGFNFSQILPDPSKPSKRSFIEDLLFNKVTLADAGFIKQYGDCLGDIAARDLICAQKFNGLTVLPPLLTDEMIAQYTSALLAGTITSGWTFGAGAALQIPFAMQMAYRFNGIGVTQNVLYENQKLIANQFNSAIGKIQDSLSSTASALGKLQDVVNQNAQALNTLVKQLSSNCGAISSVLNDILSRLDKVEAEVQIDRLITCRLQSLQTYVTQQLIRAAEIRASANLAATKMSECVLGQSKRVDFCGKGYHLMSFPQSAPHGVVFLHVTYVPAQEKNFTTAPAICHDGKAHFPREGVFVSNGTHWFVTQRNFYEPQIITTDNTFVSGNCDVVIGIVNNTVYDPLQPELDSFKEELDKYFKNHTSPDVDLGDISGINASVVNIQKEIDRLNEVAKNLNESLIDLQELGKYEQYIK

SEQ ID NO: 2357 - protein, 1211 aa, Artificial Sequence
  SARS-CoV-2/France/IDF0372/2020__EPI_ISL_406596 spike protein (1-1211)(F970C_G999C)
MFVFLVLLPLVSSQCVNLTTRTQLPPAYTNSFTRGVYYPDKVFRSSVLHSTQDLFLPFFSNVTWFHAIHVSGTNGTKRFDNPVLPFNDGVYFASTEKSNIIRGWIFGTTLDSKTQSLLIVNNATNVVIKVCEFQFCNDPFLGVYYHKNNKSWMESEFRVYSSANNCTFEYVSQPFLMDLEGKQGNFKNLREFVFKNIDGYFKIYSKHTPINLVRDLPQGFSALEPLVDLPIGINITRFQTLLALHRSYLTPGDSSSGWTAGAAAYYVGYLQPRTFLLKYNENGTITDAVDCALDPLSETKCTLKSFTVEKGIYQTSNFRVQPTESIVRFPNITNLCPFGEVFNATRFASVYAWNRKRISNCVADYSFLYNSASFSTFKCYGVSPTKLNDLCFTNVYADSFVIRGDEVRQIAPGQTGKIADYNYKLPDDFTGCVIAWNSNNLDSKVGGNYNYLYRLFRKSNLKPFERDISTEIYQAGSTPCNGVEGFNCYFPLQSYGFQPTNGVGYQPYRVVVLSFELLHAPATVCGPKKSTNLVKNKCVNFNFNGLTGTGVLTESNKKFLPFQQFGRDIADTTDAVRDPQTLEILDITPCSFGGVSVITPGTNTSNQVAVLYQDVNCTEVPVAIHADQLTPTWRVYSTGSNVFQTRAGCLIGAEHVNNSYECDIPIGAGICASYQTQTNSPRRARSVASQSIIAYTMSLGAENSVAYSNNSIAIPTNFTISVTTEILPVSMTKTSVDCTMYICGDSTECSNLLLQYGSFCTQLNRALTGIAVEQDKNTQEVFAQVKQIYKTPPIKDFGGFNFSQILPDPSKPSKRSFIEDLLFNKVTLADAGFIKQYGDCLGDIAARDLICAQKFNGLTVLPPLLTDEMIAQYTSALLAGTITSGWTFGAGAALQIPFAMQMAYRFNGIGVTQNVLYENQKLIANQFNSAIGKIQDSLSSTASALGKLQDVVNQNAQALNTLVKQLSSNCGAISSVLNDILSRLDKVEAEVQIDRLITCRLQSLQTYVTQQLIRAAEIRASANLAATKMSECVLGQSKRVDFCGKGYHLMSFPQSAPHGVVFLHVTYVPAQEKNFTTAPAICHDGKAHFPREGVFVSNGTHWFVTQRNFYEPQIITTDNTFVSGNCDVVIGIVNNTVYDPLQPELDSFKEELDKYFKNHTSPDVDLGDISGINASVVNIQKEIDRLNEVAKNLNESLIDLQELGKYEQYIK

SEQ ID NO: 2358 - protein, 1211 aa, Artificial Sequence
  SARS-CoV-2/Australia/VIC01/2020__EPI_ISL_406844 spike protein (1-1211)(F970C_G999C)
MFVFLVLLPLVSSQCVNLTTRTQLPPAYTNSFTRGVYYPDKVFRSSVLHSTQDLFLPFFSNVTWFHAIHVSGTNGTKRFDNPVLPFNDGVYFASTEKSNIIRGWIFGTTLDSKTQSLLIVNNATNVVIKVCEFQFCNDPFLGVYYHKNNKSWMESEFRVYSSANNCTFEYVSQPFLMDLEGKQGNFKNLREFVFKNIDGYFKIYSKHTPINLVRDLPQGFSALEPLVDLPIGINITRFQTLLALHRRYLTPGDSSSGWTAGAAAYYVGYLQPRTFLLKYNENGTITDAVDCALDPLSETKCTLKSFTVEKGIYQTSNFRVQPTESIVRFPNITNLCPFGEVFNATRFASVYAWNRKRISNCVADYSVLYNSASFSTFKCYGVSPTKLNDLCFTNVYADSFVIRGDEVRQIAPGQTGKIADYNYKLPDDFTGCVIAWNSNNLDSKVGGNYNYLYRLFRKSNLKPFERDISTEIYQAGSTPCNGVEGFNCYFPLQSYGFQPTNGVGYQPYRVVVLSFELLHAPATVCGPKKSTNLVKNKCVNFNFNGLTGTGVLTESNKKFLPFQQFGRDIADTTDAVRDPQTLEILDITPCSFGGVSVITPGTNTSNQVAVLYQDVNCTEVPVAIHADQLTPTWRVYSTGSNVFQTRAGCLIGAEHVNNSYECDIPIGAGICASYQTQTNSPRRARSVASQSIIAYTMSLGAENSVAYSNNSIAIPTNFTISVTTEILPVSMTKTSVDCTMYICGDSTECSNLLLQYGSFCTQLNRALTGIAVEQDKNTQEVFAQVKQIYKTPPIKDFGGFNFSQILPDPSKPSKRSFIEDLLFNKVTLADAGFIKQYGDCLGDIAARDLICAQKFNGLTVLPPLLTDEMIAQYTSALLAGTITSGWTFGAGAALQIPFAMQMAYRFNGIGVTQNVLYENQKLIANQFNSAIGKIQDSLSSTASALGKLQDVVNQNAQALNTLVKQLSSNCGAISSVLNDILSRLDKVEAEVQIDRLITCRLQSLQTYVTQQLIRAAEIRASANLAATKMSECVLGQSKRVDFCGKGYHLMSFPQSAPHGVVFLHVTYVPAQEKNFTTAPAICHDGKAHFPREGVFVSNGTHWFVTQRNFYEPQIITTDNTFVSGNCDVVIGIVNNTVYDPLQPELDSFKEELDKYFKNHTSPDVDLGDISGINASVVNIQKEIDRLNEVAKNLNESLIDLQELGKYEQYIK

SEQ ID NO: 2359 - protein, 1211 aa, Artificial Sequence
  SARS-CoV-2/Germany/BavPat1/2020__EPI_ISL_406862 spike protein (1-1211)(F970C_G999C)
MFVFLVLLPLVSSQCVNLTTRTQLPPAYTNSFTRGVYYPDKVFRSSVLHSTQDLFLPFFSNVTWFHAIHVSGTNGTKRFDNPVLPFNDGVYFASTEKSNIIRGWIFGTTLDSKTQSLLIVNNATNVVIKVCEFQFCNDPFLGVYYHKNNKSWMESEFRVYSSANNCTFEYVSQPFLMDLEGKQGNFKNLREFVFKNIDGYFKIYSKHTPINLVRDLPQGFSALEPLVDLPIGINITRFQTLLALHRSYLTPGDSSSGWTAGAAAYYVGYLQPRTFLLKYNENGTITDAVDCALDPLSETKCTLKSFTVEKGIYQTSNFRVQPTESIVRFPNITNLCPFGEVFNATRFASVYAWNRKRISNCVADYSVLYNSASFSTFKCYGVSPTKLNDLCFTNVYADSFVIRGDEVRQIAPGQTGKIADYNYKLPDDFTGCVIAWNSNNLDSKVGGNYNYLYRLFRKSNLKPFERDISTEIYQAGSTPCNGVEGFNCYFPLQSYGFQPTNGVGYQPYRVVVLSFELLHAPATVCGPKKSTNLVKNKCVNFNFNGLTGTGVLTESNKKFLPFQQFGRDIADTTDAVRDPQTLEILDITPCSFGGVSVITPGTNTSNQVAVLYQGVNCTEVPVAIHADQLTPTWRVYSTGSNVFQTRAGCLIGAEHVNNSYECDIPIGAGICASYQTQTNSPRRARSVASQSIIAYTMSLGAENSVAYSNNSIAIPTNFTISVTTEILPVSMTKTSVDCTMYICGDSTECSNLLLQYGSFCTQLNRALTGIAVEQDKNTQEVFAQVKQIYKTPPIKDFGGFNFSQILPDPSKPSKRSFIEDLLFNKVTLADAGFIKQYGDCLGDIAARDLICAQKFNGLTVLPPLLTDEMIAQYTSALLAGTITSGWTFGAGAALQIPFAMQMAYRFNGIGVTQNVLYENQKLIANQFNSAIGKIQDSLSSTASALGKLQDVVNQNAQALNTLVKQLSSNCGAISSVLNDILSRLDKVEAEVQIDRLITCRLQSLQTYVTQQLIRAAEIRASANLAATKMSECVLGQSKRVDFCGKGYHLMSFPQSAPHGVVFLHVTYVPAQEKNFTTAPAICHDGKAHFPREGVFVSNGTHWFVTQRNFYEPQIITTDNTFVSGNCDVVIGIVNNTVYDPLQPELDSFKEELDKYFKNHTSPDVDLGDISGINASVVNIQKEIDRLNEVAKNLNESLIDLQELGKYEQYIK

SEQ ID NO: 2360 - protein, 1211 aa, Artificial Sequence
  SARS-CoV-2/Wuhan/HBCDC-HB-02/2020__EPI_ISL_412978 spike protein (1-1211)(F970C_G999C)
MFVFLVLLPLVSSQCVNLTTRTQLPPAYTNSFTRGVYYPDKVFRSSVLHSTQDLFLPFFSNVTWFHAIHVSGTNGTKRFDNPVLPFNDGVYFASTEKSNIIRGWIFGTTLDSKTQSLLIVNNATNVVIKVCEFQFCNDPFLGVYYHKNNKSWMESEFRVYSSANNCTFEYVSQPFLMDLEGKQGNFKNLREFVFKNIDGYFKIYSKHTPINLVRDLPQGFSALEPLVDLPIGINITRFQTLLALHRSYLTPGDSSSGWTAGAAAYYVGYLQPRTFLLKYNENGTITDAVDCALDPLSETKCTLKSFTVEKGIYQTSNFRVQPTESIVRFPNITNLCPFGEVFNATRFASVYAWNRKRISNCVADYSVLYNSASFSTFKCYGVSPTKLNDLCFTNVYADSFVIRGDEVRQIAPGQTGKIADYNYKLPDDFTGCVIAWNSNNLDSKVGGNYNYLYRLFRKSNLKPFERDISTEIYQAGSTPCNGVEGFNCYFPLQSYGFQPTNGVGYQPYRVVVLSFELLHAPATVCGPKKSTNLVKNKCVNFNFNGLTGTGVLTESNKKFLPFQQFGRDIADTTDAVRDPQTLEILDITPCSFGGVSVITPGTNTSNQVAVLYQDVNCTEVPVAIHADQLTPTWRVYSTGSNVFQTRAGCLIGAEHVNNSYECDIPIGAGICASYQTQTNSPRRARSVASQSIIAYTMSLGAENSVAYSNNSIAIPTNFTISVTTEILPVSMTKTSVDCTMYICGDSTECSNFLLQYGSFCTQLNRALTGIAVEQDKNTQEVFAQVKQIYKTPPIKDFGGFNFSQILPDPSKPSKRSFIEDLLFNKVTLADAGFIKQYGDCLGDIAARDLICAQKFNGLTVLPPLLTDEMIAQYTSALLAGTITSGWTFGAGAALQIPFAMQMAYRFNGIGVTQNVLYENQKLIANQFNSAIGKIQDSLSSTASALGKLQDVVNQNAQALNTLVKQLSSNCGAISSVLNDILSRLDKVEAEVQIDRLITCRLQSLQTYVTQQLIRAAEIRASANLAATKMSECVLGQSKRVDFCGKGYHLMSFPQSAPHGVVFLHVTYVPAQEKNFTTAPAICHDGKAHFPREGVFVSNGTHWFVTQRNFYEPQIITTDNTFVSGNCDVVIGIVNNTVYDPLQPELDSFKEELDKYFKNHTSPDVDLGDISGINASVVNIQKEIDRLNEVAKNLNESLIDLQELGKYEQYIK

SEQ ID NO: 2361 - protein, 1211 aa, Artificial Sequence
  SARS-CoV-2/Australia/QLD02/2020__EPI_ISL_407896 spike protein (1-1211)(F970C_G999C)
MFVFLVLLPLVSSQCVNLTTRTQLPPAYTNSFTRGVYYPDKVFRSSVLHSTQDLFLPFFSNVTWFHAIHVSGTNGTKRFDNPVLPFNDGVYFASTEKSNIIRGWIFGTTLDSKTQSLLIVNNATNVVIKVCEFQFCNDPFLGVYYHKNNKSWMESEFRVYSSANNCTFEYVSQPFLMDLEGKQGNFKNLREFVFKNIDGYFKIYSKHTPINLVRDLPQGFSALEPLVDLPIGINITRFQTLLALHRSYLTPGDSSSGWTAGAAAYYVGYLQPRTFLLKYNENGTITDAVDCALDPLSETKCTLKSFTVEKGIYQTSNFRVQPTESIVRFPNITNLCPFGEVFNATRFASVYAWNRKRISNCVADYSVLYNSASFSTFKCYGVSPTKLNDLCFTNVYADSFVIRGDEVRQIAPGQTGKIADYNYKLPDDFTGCVIAWNSNNLDSKVGGNYNYLYRLFRKSNLKPFERDISTEIYQAGSTPCNGVEGFNCYFPLQSYGFQPTNGVGYQPYRVVVLSFELLHAPATVCGPKKSTNLVKNKCVNFNFNGLTGTGVLTESNKKFLPFQQFGRDIADTTDAVRDPQTLEILDITPCSFGGVSVITPGTNTSNQVAVLYQDVNCTEVPVAIHADQLTPTWRVYSTGSNVFQTRAGCLIGAEHVNNSYECDIPIGAGICASYQTQTNSPRRARSVASQSIIAYTMSLGAENSVAYSNNSIAIPTNFTISVTTEILPVSMTKTSVDCTMYICGDSTECSNLLLQYGSFCTQLNRALTGIAVEQDKNTQEVFAQVKQIYKTPPIKDFGGFNFSQILPDPSKPSKRSFIEDLLFNKVTLADAGFIKQYGDCLGDIAARDLICAQKFNGLTVLPPLLTDEMIAQYTSALLAGTITSGWTFGAGAALQIPFAMQMAYRFNGIGVTQNVLYENQKLIANQFNSAIGKIQDSLSSTASALGKLQDVVNQNAQALNTLVKQLSSNCGAISSVLNDILSRLDKVEAEVQIDRLITCRLQSLQTYVTQQLIRAAEIRASANLAATKMSECVLGQSKRVDFCGKGYHLMSFPQSAPHGVVFLHVTYVPAQEKNFTTAPAICHDGKAHFPREGVFVSNGTHWFVTQRNFYEPQIITTDNTFVSGNCDVVIGIVNNTVYDPLQLELDSFKEELDKYFKNHTSPDVDLGDISGINASVVNIQKEIDRLNEVAKNLNESLIDLQELGKYEQYIK

SEQ ID NO: 2362 - protein, 1211 aa, Artificial Sequence
  SARS-CoV-2/India/1-31/2020__EPI_ISL_413523 spike protein (1-1211)(F970C_G999C)
MFVFLVLLPLVSSQCVNLTTRTQLPPAYTNSFTRGVYYPDKVFRSSVLHSTQDLFLPFFSNVTWFHAIHVSGTNGTKRFDNPVLPFNDGVYFASTEKSNIIRGWIFGTTLDSKTQSLLIVNNATNVVIKVCEFQFCNDPFLGVYYHKNNKSWMESEFRVYSSANNCTFEYVSQPFLMDLEGKQGNFKNLREFVFKNIDGYFKIYSKHTPINLVRDLPQGFSALEPLVDLPIGINITRFQTLLALHRSYLTPGDSSSGWTAGAAAYYVGYLQPRTFLLKYNENGTITDAVDCALDPLSETKCTLKSFTVEKGIYQTSNFRVQPTESIVRFPNITNLCPFGEVFNATRFASVYAWNRKRISNCVADYSVLYNSASFSTFKCYGVSPTKLNDLCFTNVYADSFVIRGDEVRQIAPGQTGKIADYNYKLPDDFTGCVIAWNSNNLDSKVGGNYNYLYRLFRKSNLKPFERDISTEIYQAGSTPCNGVEGFNCYFPLQSYGFQPTNGVGYQPYRVVVLSFELLHAPATVCGPKKSTNLVKNKCVNFNFNGLTGTGVLTESNKKFLPFQQFGRDIADTTDAVRDPQTLEILDITPCSFGGVSVITPGTNTSNQVAVLYQDVNCTEVPVAIHADQLTPTWRVYSTGSNVFQTRAGCLIGAEHVNNSYECDIPIGAGICASYQTQTNSPRRARSVASQSIIAYTMSLGAENSVAYSNNSIAIPTNFTISVTTEILPVSMTKTSVDCTMYICGDSTECSNLLLQYGSFCTQLNRALTGIAVEQDKNTQEVFAQVKQIYKTPPIKDFGGFNFSQILPDPSKPSKRSFIEDLLFNKVTLADAGFIKQYGDCLGDIAARDLICAQKFNGLTVLPPLLTDEMIAQYTSALLAGTITSGWTFGAGAALQIPFAMQMAYRFNGIGVTQNVLYENQKLIANQFNSVIGKIQDSLSSTASALGKLQDVVNQNAQALNTLVKQLSSNCGAISSVLNDILSRLDKVEAEVQIDRLITCRLQSLQTYVTQQLIRAAEIRASANLAATKMSECVLGQSKRVDFCGKGYHLMSFPQSAPHGVVFLHVTYVPAQEKNFTTAPAICHDGKAHFPREGVFVSNGTHWFVTQRNFYEPQIITTDNTFVSGNCDVVIGIVNNTVYDPLQPELDSFKEELDKYFKNHTSPDVDLGDISGINASVVNIQKEIDRLNEVAKNLNESLIDLQELGKYEQYIK

SEQ ID NO: 2363 - protein, 1211 aa, Artificial Sequence
  SARS-CoV-2/Guangdong/GD2020087-P0008/2020__EPI_ISL_413863 spike protein (1-1211)(F970C_G999C)
MFVFLVLLPLVSSQCVNLTTRTQLPPAYTNSFTRGVYYPDKVFRSSVLHSTQDLFLPFFSNVTWFHAIHVSGTNGTKRFDNPVLPFNDGVYFASTEKSNIIRGWIFGTTLDSKTQSLLIVNNATNVVIKVCEFQFCNDPFLGVYYHKNNKSWMESEFRVYSSANNCTFEYVSQPFLMDLEGKQGNFKNLREFVFKNIDGYFKIYSKHTPINLVRDLPQGFSALEPLVDLPIGINITRFQTLLALHRSYLTPGDSSSGWTAGAAAYYVGYLQPRTFLLKYNENGTITDAVDCALDPLSETKCTLKSFTVEKGIYQTSNFRVQPTESIVRFPNITNLCPFGEVFNATRFASVYAWNRKRISNCVADYSVLYNSASFSTFKCYGVSPTKLNDLCFTNVYADSFVIRGDEVREIAPGQTGKIADYNYKLPDDFTGCVIAWNSNNLDSKVGGNYNYLYRLFRKSNLKPFERDISTEIYQAGSTPCNGVEGFNCYFPLQSYGFQPTNGVGYQPYRVVVLSFELLHAPATVCGPKKSTNLVKNKCVNFNFNGLTGTGVLTESNKKFLPFQQFGRDIADTTDAVRDPQTLEILDITPCSFGGVSVITPGTNTSNQVAVLYQDVNCTEVPVAIHADQLTPTWRVYSTGSNVFQTRAGCLIGAEHVNNSYECDIPIGAGICASYQTQTNSPRRARSVASQSIIAYTMSLGAENSVAYSNNSIAIPTNFTISVTTEILPVSMTKTSVDCTMYICGDSTECSNLLLQYGSFCTQLNRALTGIAVEQDKNTQEVFAQVKQIYKTPPIKDFGGFNFSQILPDPSKPSKRSFIEDLLFNKVTLADAGFIKQYGDCLGDIAARDLICAQKFNGLTVLPPLLTDEMIAQYTSALLAGTITSGWTFGAGAALQIPFAMQMAYRFNGIGVTQNVLYENQKLIANQFNSAIGKIQDSLSSTASALGKLQDVVNQNAQALNTLVKQLSSNCGAISSVLNDILSRLDKVEAEVQIDRLITCRLQSLQTYVTQQLIRAAEIRASANLAATKMSECVLGQSKRVDFCGKGYHLMSFPQSAPHGVVFLHVTYVPAQEKNFTTAPAICHDGKAHFPREGVFVSNGTHWFVTQRNFYEPQIITTDNTFVSGNCDVVIGIVNNTVYDPLQPELDSFKEELDKYFKNHTSPDVDLGDISGINASVVNIQKEIDRLNEVAKNLNESLIDLQELGKYEQYIK

SEQ ID NO: 2364 - protein, 1211 aa, Artificial Sequence
  SARS-CoV-2/Sweden/01/2020__EPI_ISL_411951 spike protein (1-1211)(F970C_G999C)
MFVFLVLLPLVSSQCVNLTTRTQLPPAYTNSFTRGVYYPDKVFRSSVLHSTQDLFLPFFSNVTWFHAIHVSGTNGTKRFDNPVLPFNDGVYFASTEKSNIIRGWIFGTTLDSKTQSLLIVNNATNVVIKVCEFQFCNDPFLGVYYHKNNKSWMESEFRVYSSANNCTFEYVSQPFLMDLEGKQGNFKNLREFVFKNIDGYFKIYSKHTPINLVRDLPQGFSALEPLVDLPIGINITRFQTLLALHRSYLTPGDSSSGWTAGAAAYYVGYLQPRTFLLKYNENGTITDAVDCALDPLSETKCTLKSFTVEKGIYQTSNFRVQPTESIVRFPNITNLCPFGEVFNATRFASVYAWNRKRISNCVADYSVLYNSASFSTFKCYGVSPTKLNDLCFTNVYADSFVIRGDEVRQIAPGQTGKIADYNYKLPDDFTGCVIAWNSNNLDSKVGGNYNYLYRLFRKSNLKPFERDISTEIYQAGSTPCNGVEGFNCYFPLQSYGFQPTNGVGYQPYRVVVLSFELLHAPATVCGPKKSTNLVKNKCVNFNFNGLTGTGVLTESNKKFLPFQQFGRDIADTTDAVRDPQTLEILDITPCSFGGVSVITPGTNTSNQVAVLYQDVNCTEVPVAIHADQLTPTWRVYSTGSNVFQTRAGCLIGAEHVNNSYECDIPIGAGICASYQTQTNSPRRARSVASQSIIAYTMSLGAENSVAYSNNSIAIPTNFTISVTTEILPVSMTKTSVDCTMYICGDSTECSNLLLQYGSFCTQLNRALTGIAVEQDKNTQEVFAQVKQIYKTPPIKDCGGFNFSQILPDPSKPSKRSFIEDLLFNKVTLADAGFIKQYGDCLGDIAARDLICAQKFNGLTVLPPLLTDEMIAQYTSALLAGTITSGWTFGAGAALQIPFAMQMAYRFNGIGVTQNVLYENQKLIANQFNSAIGKIQDSLSSTASALGKLQDVVNQNAQALNTLVKQLSSNCGAISSVLNDILSRLDKVEAEVQIDRLITCRLQSLQTYVTQQLIRAAEIRASANLAATKMSECVLGQSKRVDFCGKGYHLMSFPQSAPHGVVFLHVTYVPAQEKNFTTAPAICHDGKAHFPREGVFVSNGTHWFVTQRNFYEPQIITTDNTFVSGNCDVVIGIVNNTVYDPLQPELDSFKEELDKYFKNHTSPDVDLGDISGINASVVNIQKEIDRLNEVAKNLNESLIDLQELGKYEQYIK

SEQ ID NO: 2365 - protein, 1211 aa, Artificial Sequence
  SARS-CoV-2/Tianmen/HBCDC-HB-07/2020__EPI_ISL_412983 spike protein (1-1211)(F970C_G999C)
MFVFLVLLPLVSSQCVNLTTRTQLPPAYTNSFTRGVYYPDKVFRSSVLHSTQDLFLPFFSNVTWFHAIHVSGTNGTKRFDNPVLPFNDGVYFASTEKSNIIRGWIFGTTLDSKTQSLLIVNNATNVVIKVCEFQFCNDPFLGVYYHKNNKSWMESEFRVYSSANNCTFEYVSQPFLMDLEGKQGNFKNLREFVFKNIDGYFKIYSKHTPINLVRDLPQGFSALEPLVDLPIGINITRFQTLLALHRSYLTPGDSSSGWTAGAAAYYVGYLQPRTFLLKYNENGTITDAVDCALDPLSETKCTLKSFTVEKGIYQTSNFRVQPTESIVRFPNITNLCPFGEVFNATRFASVYAWNRKRISNCVADYSVLYNSASFSTFKCYGVSPTKLNDLCFTNVYADSFVIRGDEVRQIAPGQTGKIADYNYKLPDDFTGCVIAWNSNNLDSKVGGNYNYLYRLFRKSNLKPFERDISTEIYQAGSTPCNGVEGFNCYFPLQSYGFQPTNGVGYQPYRVVVLSFELLHAPATVCGPKKSTNLVKNKCVNFNFNGLTGTGVLTESNKKFLPFQQFGRDIADTTDAVRDPQTLEILDITPCSFGGVSVITPGTNTSNQVAVLYQDLNCTEVPVAIHADQLTPTWRVYSTGSNVFQTRAGCLIGAEHVNNSYECDIPIGAGICASYQTQTNSPRRARSVASQSIIAYTMSLGAENSVAYSNNSIAIPTNFTISVTTEILPVSMTKTSVDCTMYICGDSTECSNLLLQYGSFCTQLNRALTGIAVEQDKNTQEVFAQVKQIYKTPPIKDFGGFNFSQILPDPSKPSKRSFIEDLLFNKVTLADAGFIKQYGDCLGDIAARDLICAQKFNGLTVLPPLLTDEMIAQYTSALLAGTITSGWTFGAGAALQIPFAMQMAYRFNGIGVTQNVLYENQKLIANQFNSAIGKIQDSLSSTASALGKLQDVVNQNAQALNTLVKQLSSNCGAISSVLNDILSRLDKVEAEVQIDRLITCRLQSLQTYVTQQLIRAAEIRASANLAATKMSECVLGQSKRVDFCGKGYHLMSFPQSAPHGVVFLHVTYVPAQEKNFTTAPAICHDGKAHFPREGVFVSNGTHWFVTQRNFYEPQIITTDNTFVSGNCDVVIGIVNNTVYDPLQPELDSFKEELDKYFKNHTSPDVDLGDISGINASVVNIQKEIDRLNEVAKNLNESLIDLQELGKYEQYIK

SEQ ID NO: 2366 - protein, 1211 aa, Artificial Sequence
  SARS-CoV-2/Hong Kong/case42_VM20002493/2020__EPI_ISL_414527 spike protein (1-1211)(F970C_G999C)
MFVFLVLLPLVSSQCVNLTTRTQLPPAYTNSFTRGVYYPDKVFRSSVLHSTQDLFLPFFSNVTWFHAIHVSGTNGTKRFDNPVLPFNDGVYFASTEKSNIIRGWIFGTTLDSKTQSLLIVNNATNVVIKVCEFQFCNDPFLGVYYHKNNKSWMESEFRVYSSANNCTFEYVSQPFLMDLEGKQGNFKNLREFVFKNIDGYFKIYSKHTPINLVRDLPQGFSALEPLVDLPIGINITRFQTLLALHRSYLTPGDSSSGWTAGAAAYYVGYLQPRTFLLKYNENGTITDAVDCALDPLSETKCTLKSFTVEKGIYQTSNFRVQPTESIVRFPNITNLCPFGEVFNATRFASVYAWNRKRISNCVADYSVLYNSASFSTFKCYGVSPTKLNDLCFTNVYADSFVIRGDEVRQIAPGQTGKIADYNYKLPDDFTGCVIAWNSNNLDSKVGGNYNYLYRLFRKSNLKPFERDISTEIYQAGSTPCNGVEGFNCYFPLQSYGFQPTNGVGYQPYRVVVLSFELLHAPATVCGPKKSTNLVKNKCVNFNFNGLTGTGVLTESNKKFLPFQQFGRDIADTTDAVRDPQTLEILDITPCSFGGVSVITPGTNTSNQVAVLYQDVNCTEVPVAIHADQLTPTWRVYSTGSNVFQTRAGCLIGAEHVNNSYECDIPIGAGICASYQTQTNSPRRARSVASQSIIAYTMSLGAENSVAYSNNSIAIPTNFAISVTTEILPVSMTKTSVDCTMYICGDSTECSNLLLQYGSFCTQLNRALTGIAVEQDKNTQEVFAQVKQIYKTPPIKDFGGFNFSQILPDPSKPSKRSFIEDLLFNKVTLADAGFIKQYGDCLGDIAARDLICAQKFNGLTVLPPLLTDEMIAQYTSALLAGTITSGWTFGAGAALQIPFAMQMAYRFNGIGVTQNVLYENQKLIANQFNSAIGKIQDSLSSTASALGKLQDVVNQNAQALNTLVKQLSSNCGAISSVLNDILSRLDKVEAEVQIDRLITCRLQSLQTYVTQQLIRAAEIRASANLAATKMSECVLGQSKRVDFCGKGYHLMSFPQSAPHGVVFLHVTYVPAQEKNFTTAPAICHDGKAHFPREGVFVSNGTHWFVTQRNFYEPQIITTDNTFVSGNCDVVIGIVNNTVYDPLQPELDSFKEELDKYFKNHTSPDVDLGDISGINASVVNIQKEIDRLNEVAKNLNESLIDLQELGKYEQYIK

SEQ ID NO: 2367 - protein, 1211 aa, Artificial Sequence
  SARS-CoV-2/USA/CruiseA-23/2020__EPI_ISL_414482 spike protein (1-1211)(F970C_G999C)
MFVFLVLLPLVSSQCVNLTTRTQLPPAYTNSFTRGVYYPDKVFRSSVLHSTQDLFLPFFSNVTWFHAIHVSGTNGTKRFDNPVLPFNDGVYFASTEKSNIIRGWIFGTTLDSKTQSLLIVNNATNVVIKVCEFQFCNDPFLGVYYHKNNKSWMESEFRVYSSANNCTFEYVSQPFLMDLEVKQGNFKNLREFVFKNIDGYFKIYSKHTPINLVRDLPQGFSALEPLVDLPIGINITRFQTLLALHRSYLTPGDSSSGWTAGAAAYYVGYLQPRTFLLKYNENGTITDAVDCALDPLSETKCTLKSFTVEKGIYQTSNFRVQPTESIVRFPNITNLCPFGEVFNATRFASVYAWNRKRISNCVADYSVLYNSASFSTFKCYGVSPTKLNDLCFTNVYADSFVIRGDEVRQIAPGQTGKIADYNYKLPDDFTGCVIAWNSNNLDSKVGGNYNYLYRLFRKSNLKPFERDISTEIYQAGSTPCNGVEGFNCYFPLQSYGFQPTNGVGYQPYRVVVLSFELLHAPATVCGPKKSTNLVKNKCVNFNFNGLTGTGVLTESNKKFLPFQQFGRDIADTTDAVRDPQTLEILDITPCSFGGVSVITPGTNTSNQVAVLYQDVNCTEVPVAIHADQLTPTWRVYSTGSNVFQTRAGCLIGAEHVNNSYECDIPIGAGICASYQTQTNSPRRARSVASQSIIAYTMSLGAENSVAYSNNSIAIPTNFTISVTTEILPVSMTKTSVDCTMYICGDSTECSNLLLQYGSFCTQLNRALTGIAVEQDKNTQEVFAQVKQIYKTPPIKDFGGFNFSQILPDPSKPSKRSFIEDLLFNKVTLADAGFIKQYGDCLGDIAARDLICAQKFNGLTVLPPLLTDEMIAQYTSALLAGTITSGWTFGAGAALQIPFAMQMAYRFNGIGVTQNVLYENQKLIANQFNSAIGKIQDSLSSTASALGKLQDVVNQNAQALNTLVKQLSSNCGAISSVLNDILSRLDKVEAEVQIDRLITCRLQSLQTYVTQQLIRAAEIRASANLAATKMSECVLGQSKRVDFCGKGYHLMSFPQSAPHGVVFLHVTYVPAQEKNFTTAPAICHDGKAHFPREGVFVSNGTHWFVTQRNFYEPQIITTDNTFVSGNCDVVIGIVNNTVYDPLQPELDSFKEELDKYFKNHTSPDVDLGDISGINASVVNIQKEIDRLNEVAKNLNESLIDLQELGKYEQYIK

SEQ ID NO: 2368 - protein, 1211 aa, Artificial Sequence
  SARS-CoV-2/Hong Kong/case85_VM20002868/2020__EPI_ISL_414519 spike protein (1-1211)(F970C_G999C)
MFVFLVLVPLVSSQCVNLTTRTQLPPAYTNSFTRGVYYPDKVFRSSVLHSTQDLFLPFFSNVTWFHAIHVSGTNGTKRFDNPVLPFNDGVYFASTEKSNIIRGWIFGTTLDSKTQSLLIVNNATNVVIKVCEFQFCNDPFLGVYYHKNNKSWMESEFRVYSSANNCTFEYVSQPFLMDLEGKQGNFKNLREFVFKNIDGYFKIYSKHTPINLVRDLPQGFSALEPLVDLPIGINITRFQTLLALHRSYLTPGDSSSGWTAGAAAYYVGYLQPRTFLLKYNENGTITDAVDCALDPLSETKCTLKSFTVEKGIYQTSNFRVQPTESIVRFPNITNLCPFGEVFNATRFASVYAWNRKRISNCVADYSVLYNSASFSTFKCYGVSPTKLNDLCFTNVYADSFVIRGDEVRQIAPGQTGKIADYNYKLPDDFTGCVIAWNSNNLDSKVGGNYNYLYRLFRKSNLKPFERDISTEIYQAGSTPCNGVEGFNCYFPLQSYGFQPTNGVGYQPYRVVVLSFELLHAPATVCGPKKSTNLVKNKCVNFNFNGLTGTGVLTESNKKFLPFQQFGRDIADTTDAVRDPQTLEILDITPCSFGGVSVITPGTNTSNQVAVLYQDVNCTEVPVAIHADQLTPTWRVYSTGSNVFQTRAGCLIGAEHVNNSYECDIPIGAGICASYQTQTNSPRRARSVASQSIIAYTMSLGAENSVAYSNNSIAIPTNFTISVTTEILPVSMTKTSVDCTMYICGDSTECSNLLLQYGSFCTQLNRALTGIAVEQDKNTQEVFAQVKQIYKTPPIKDFGGFNFSQILPDPSKPSKRSFIEDLLFNKVTLADAGFIKQYGDCLGDIAARDLICAQKFNGLTVLPPLLTDEMIAQYTSALLAGTITSGWTFGAGAALQIPFAMQMAYRFNGIGVTQNVLYENQKLIANQFNSAIGKIQDSLSSTASALGKLQDVVNQNAQALNTLVKQLSSNCGAISSVLNDILSRLDKVEAEVQIDRLITCRLQSLQTYVTQQLIRAAEIRASANLAATKMSECVLGQSKRVDFCGKGYHLMSFPQSAPHGVVFLHVTYVPAQEKNFTTAPAICHDGKAHFPREGVFVSNGTHWFVTQRNFYEPQIITTDNTFVSGNCDVVIGIVNNTVYDPLQPELDSFKEELDKYFKNHTSPDVDLGDISGINASVVNIQKEIDRLNEVAKNLNESLIDLQELGKYEQYIK

SEQ ID NO: 2369 - protein, 1211 aa, Artificial Sequence; identical to SEQ ID NO: 2359
  SARS-CoV-2/England/200990660/2020__EPI_ISL_414523 spike protein (1-1211)(F970C_G999C)

SEQ ID NO: 2370 - protein, 1211 aa, Artificial Sequence
  SARS-CoV-2/Australia/NSW09/2020__EPI_ISL_413595 spike protein (1-1211)(F970C_G999C)
MFVFLVLLPLVSSQCVNLTTRTQLPPAYTNSFTRGVYYPDKVFRSSVLHSTQDLFLPFFSNVTWFHAIHVSGTNGTKRFDNPVLPFNDGVYFASTEKSNIIRGWIFGTTLDSKTQSLLIVNNATNVVIKVCEFQFCNDPFLGVYYHKNNKSWMESEFRVYSSANNCTFEYVSQPFLMDLEGKQGNFKNLREFVFKNIDGYFKIYSKHTPINLVRDLPQGFSALEPLVDLPIGINITRFQTLLALHRSYLTPGDSSSGWTAGAAAYYVGYLQPRTFLLKYNENGTITDAVDCALDPLSETKCTLKSFTVEKGIYQTSNFRVQPTESIVRFPNITNLCPFGEVFNATRFASVYAWNRKRISNCVADYSVLYNSASFSTFKCYGVSPTKLNDLCFTNVYADSFVIRGDEVRQIAPGQTGKIADYNYKLPDDFTGCVIAWNSNNLDSKVGGNYNYLYRLFRKSNLKPFERDISTEIYQAGSTPCNGVEGFNCYFPLQSYGFQPTNGVGYQPYRVVVLSFELLHAPATVCGPKKSTNLVKNKCVNFNFNGLTGTGVLTESNKKFLPFQQFGRDIADTTDAVRDPQTLEILDITPCSFGGVSVITPGTNTSNQVAVLYQDVNCTEVPVAIHADQLTPTWRVYSTGSNVFQTRAGCLIGAEHVNNSYECDIPIGAGICASYQTQTNSPRRARSVASQSIIAYTMSLGAENSVAYSNNSIAIPTNFTISVTTEILPVSMTKTSVDCTMYICGDSTECSNLLLQYGSFCTQLNRALTGIAVEQDKNTQEVFAQVKQIYKTPPIKDFGGFNFSQILPDPSKPSKRSFIEDLLFNKVTLADAGFIKQYGDCLGDIAARDLICAQKFNGLTVLPPLLTDEMIAQYTSALLAGTITSGWTFGAGAALQIPFAMQMAYRFNGIGVTQNVLYENQKLIANQFNSAIGKIQDSLSFTASALGKLQDVVNQNAQALNTLVKQLSSNCGAISSVLNDILSRLDKVEAEVQIDRLITCRLQSLQTYVTQQLIRAAEIRASANLAATKMSECVLGQSKRVDFCGKGYHLMSFPQSAPHGVVFLHVTYVPAQEKNFTTAPAICHDGKAHFPREGVFVSNGTHWFVTQRNFYEPQIITTDNTFVSGNCDVVIGIVNNTVYDPLQPELDSFKEELDKYFKNHTSPDVDLGDISGINASVVNIQKEIDRLNEVAKNLNESLIDLQELGKYEQYIK

SEQ ID NO: 2371 - protein, 1211 aa, Artificial Sequence; identical to SEQ ID NO: 2351
  SARS-CoV-2/Australia/NSW10/2020__EPI_ISL_413596 spike protein (1-1211)(F970C_G999C)

SEQ ID NO: 2372 - protein, 1211 aa, Artificial Sequence
  SARS-CoV-2/Switzerland/1000477797/2020__EPI_ISL_413023 spike protein (1-1211)(F970C_G999C)
MFVFLVLLPLVSSQCVNLTTRTQLPPAYTNSFTRGVYYPDKVFRSSVLHSTQDLFLPFFSNVTWFHAIHVSGTNGTKRFDNPVLPFNDGVYFASTEKSNIIRGWIFGTTLDSKTQSLLIVNNATNVVIKVCEFQFCNDPFLGVYYHKNNKSWMESEFRVYSSANNCTFEYVSQPFLMDLEGKQGNFKNLREFVFKNIDGYFNIYSKHTPINLVRDLPQGFSALEPLVDLPIGINITRFQTLLALHRSYLTPGDSSSGWTAGAAAYYVGYLQPRTFLLKYNENGTITDAVDCALDPLSETKCTLKSFTVEKGIYQTSNFRVQPTESIVRFPNITNLCPFGEVFNATRFASVYAWNRKRISNCVADYSVLYNSASFSTFKCYGVSPTKLNDLCFTNVYADSFVIRGDEVRQIAPGQTGKIADYNYKLPDDFTGCVIAWNSNNLDSKVGGNYNYLYRLFRKSNLKPFERDISTEIYQAGSTPCNGVEGFNCYFPLQSYGFQPTNGVGYQPYRVVVLSFELLHAPATVCGPKKSTNLVKNKCVNFNFNGLTGTGVLTESNKKFLPFQQFGRDIADTTDAVRDPQTLEILDITPCSFGGVSVITPGTNTSNQVAVLYQGVNCTEVPVAIHADQLTPTWRVYSTGSNVFQTRAGCLIGAEHVNNSYECDIPIGAGICASYQTQTNSPRRARSVASQSIIAYTMSLGAENSVAYSNNSIAIPTNFTISVTTEILPVSMTKTSVDCTMYICGDSTECSNLLLQYGSFCTQLNRALTGIAVEQDKNTQEVFAQVKQIYKTPPIKDFGGFNFSQILPDPSKPSKRSFIEDLLFNKVTLADAGFIKQYGDCLGDIAARDLICAQKFNGLTVLPPLLTDEMIAQYTSALLAGTITSGWTFGAGAALQIPFAMQMAYRFNGIGVTQNVLYENQKLIANQFNSAIGKIQDSLSSTASALGKLQDVVNQNAQALNTLVKQLSSNCGAISSVLNDILSRLDKVEAEVQIDRLITCRLQSLQTYVTQQLIRAAEIRASANLAATKMSECVLGQSKRVDFCGKGYHLMSFPQSAPHGVVFLHVTYVPAQEKNFTTAPAICHDGKAHFPREGVFVSNGTHWFVTQRNFYEPQIITTDNTFVSGNCDVVIGIVNNTVYDPLQPELDSFKEELDKYFKNHTSPDVDLGDISGINASVVNIQKEIDRLNEVAKNLNESLIDLQELGKYEQYIK

SEQ ID NO: 2373 - protein, 1211 aa, Artificial Sequence
  SARS-CoV-2/Belgium/BA-02291/2020__EPI_ISL_415159 spike protein (1-1211)(F970C_G999C)
MFVFLVLLPLVSSQCVNLTTRTQLPPAYTNSFTRGVYYPDKVFRSSVLHSTQDLFLPFFSNVTWFHAIHVSGTNGTKRFDNPVLPFNDGVYFASTEKSNIIRGWIFGTTLDSKTQSLLIVNNATNVVIKVCEFQFCNDPFLGVYYHKNNKSWMESEFRVYSSANNCTFEYVSQPFLMDLEGKQGNFKNLREFVFKNIDGYFKIYSKHTPINLVRDLPQGFSALEPLVDLPIGINITRFQTLLALHRSYLTPGDSSSGWTAGAAAYYVGYLQPRTFLLKYNENGTITDAVDCALDPLSETKCTLKSFTVEKGIYQTSNFRVQPTESIVRFPNITNLCPFGEVFNATRFASVYAWNRKRISNCVADYSVLYNSASFSTFKCYGVSPTKLNDLCFTNVYADSFVIRGDEVRQIAPGQTGKIADYNYKLPDDFTGCVIAWNSNNLDSKVGGNYNYLYRLFRRSNLKPFERDISTEIYQAGSTPCNGVEGFNCYFPLQSYGFQPTNGVGYQPYRVVVLSFELLPAPATVCGPKKSTNLVKNKCVNFNFNGLTGTGVLTESNKKFLPFQQFGRDIADTTDAVRDPQTLEILDITPCSFGGVSVITPGTNTSNQVAVLYQGVNCTEVPVAIHADQLTPTWRVYSTGSNVFQTRAGCLIGAEHVNNSYECDIPIGAGICASYQTQTNSPRRARSVASQSIIAYTMSLGAENSVAYSNNSIAIPTNFTISVTTEILPVSMTKTSVDCTMYICGDSTECSNLLLQYGSFCTQLNRALTGIAVEQDKNTQEVFAQVKQIYKTPPIKDFGGFNFSQILPDPSKPSKRSFIEDLLFNKVTLADAGFIKQYGDCLGDIAARDLICAQKFNGLTVLPPLLTDEMIAQYTSALLAGTITSGWTFGAGAALQIPFAMQMAYRFNGIGVTQNVLYENQKLIANQFNSAIGKIQDSLSSAAPALGKLQDVVNQNAQALNTLVKQLSSNCGAISSVLNDILSRLDKVEAEVQIDRLITCRLQSLQTYVTQQLIRAAEIRASANLAATKMSECVLGQSKRVDFCGKGYHLMSFPQSAPHGVVFLHVTYVPAQEKNFTTAPAICHDGKAHFPREGVFVSNGTHWFVTQRNFYEPQIITTDNTFVSGNCDVVIGIVNNTVYDPLQPELDSFKEELDKYFKNHTSPDVDLGDISGINASVVNIQKEIDRLNEVAKNLNESLIDLQELGKYEQYIK

SEQ ID NO: 2374 - protein, 1211 aa, Artificial Sequence
  SARS-CoV-2/USA/WA8-UW5/2020__EPI_ISL_413486 spike protein (1-1211)(F970C_G999C)
MFVFLVLLPLVSSQCVNLTTRTQLPPAYTNSFTRGVYYPDKVFRSSVLHSTQDLFLPFFSNVTWFHAIHVSGTNGTKRFDNPVLPFNDGVYFASTEKSNIIRGWIFGTTLDSKTQSLLIVNNATNVVIKVCEFQFCNDPFLGVYYHKNNKSWMESEFRVYSSANNCTFEYVSQPFLMDLEGKQGNFKNLREFVFKNIDGYFKIYSKHTPINLVRDLPQGFSALEPLVDLPIGINITRFQTLLALHRSYLTPGDSSSGWTAGAAAYYVGYLQPRTFLLKYNENGTITDAVDCALDPLSETKCTLKSFTVEKGIYQTSNFRVQPTESIVRFPNITNLCPFGEVFNATRFASVYAWNRKRISNCVADYSVLYNSASFSTFKCYGVSPTKLNDLCFTNVYADSFVIRGDEVRQIAPGQTGKIADYNYKLPDDFTGCVIAWNSNNLDSKVGGNYNYLYRLFRKSNLKPFERDISTEIYQAGSTPCNGVEGFNCYFPLQSYGFQPTNGVGYQPYRVVVLSFELLHAPATVCGPKKSTNLVKNKCVNFNFNGLTGTGVLTESNKKFLPFQQFGRDIADTTDAVRDPQTLEILDITPCSFGGVSVITPGTNTSNQVAVLYQDVNCTEVPVAIHADQLTPTWRVYSTGSNVFQTRAGCLIGAEYVNNSYECDIPIGAGICASYQTQTNSPRRARSVASQSIIAYTMSLGAENSVAYSNNSIAIPTNFTISVTTEILPVSMTKTSVDCTMYICGDSTECSNLLLQYGSFCTQLNRALTGIAVEQDKNTQEVFAQVKQIYKTPPIKDFGGFNFSQILPDPSKPSKRSFIEDLLFNKVTLADAGFIKQYGDCLGDIAARDLICAQKFNGLTVLPPLLTDEMIAQYTSALLAGTITSGWTFGAGAALQIPFAMQMAYRFNGIGVTQNVLYENQKLIANQFNSAIGKIQDSLSSTASALGKLQDVVNQNAQALNTLVKQLSSNCGAISSVLNDILSRLDKVEAEVQIDRLITCRLQSLQTYVTQQLIRAAEIRASANLAATKMSECVLGQSKRVDFCGKGYHLMSFPQSAPHGVVFLHVTYVPAQEKNFTTAPAICHDGKAHFPREGVFVSNGTHWFVTQRNFYEPQIITTDNTFVSGNCDVVIGIVNNTVYDPLQPELDSFKEELDKYFKNHTSPDVDLGDISGINASVVNIQKEIDRLNEVAKNLNESLIDLQELGKYEQYIK

SEQ ID NO: 2375 - protein, 1211 aa, Artificial Sequence
  SARS-CoV-2/England/20102000506/2020__EPI_ISL_415147 spike protein (1-1211)(F970C_G999C)
MFVFLVLLPLVSSQCVNLTTRTQLPPAYTNSFTRGVYYPDKVFRSSVLHSTQDLFLPFFSNVTWFHAIHVSGTNGTKRFDNPVLPFNDGVYFASTEKSNIIRGWIFGTTLDSKTQSLLIVNNATNVVIKVCEFQFCNDPFLGVYYHKNNKSWMESEFRVYSSANNCTFEYVSQPFLMDLEGKQGNFKNLREFVFKNIDGYFKIYSKHTPINLVRDLPQGFSALEPLVDLPIGINITRFQTLLALHRSYLTPGDSSSGWTAGAAAYYVGYLQPRTFLLKYNENGTITDAVDCALDPLSETKCTLKSFTVEKGIYQTSNFRVQPTESIVRFPNITNLCPFGEVFNATRFASVYAWNRKRISNCVADYSVLYNSASFSTFKCYGVSPTKLNDLCFTNVYADSFVIRGDEVRQIAPGQTGKIADYNYKLPDDFTGCVIAWNSNNLDSKVGGNYNYLYRLFRKSNLKPFERDISTEIYQAGSTPCNGVEGFNCYFPLQSYGFQPTNGVGYQPYRVVVLSFELLHAPATVCGPKKSTNLVKNKCVNFNFNGLTGTGVLTESNKKFLPFQQFGRDIADTTDAVRDPQTLEILDITPCSFGGVSVITPGTNTSNQVAVLYQGVNCTEVPVAIHADQLTPTWRVYSTGSNVFQTRAGCLIGAEHVNNSYECDIPIGAGICASYQTQTNSPRRARSVASQSIIAYTMSLGAENSVAYSNNSIAIPTNFTISVTTEILPVSMTKTSVDCTMYICGDSTECSNLLLQYGSFCTQLNRALTGIAVEQDKNTQEVFAQVKQIYKTPPIKDFGGFNFSQILPDPSKPSKRSFIEDLLFNKVTLADAGFIKQYGYCLGDIAARDLICAQKFNGLTVLPPLLTDEMIAQYTSALLAGTITSGWTFGAGAALQIPFAMQMAYRFNGIGVTQNVLYENQKLIANQFNSAIGKIQDSLSSTASALGKLQDVVNQNAQALNTLVKQLSSNCGAISSVLNDILSRLDKVEAEVQIDRLITCRLQSLQTYVTQQLIRAAEIRASANLAATKMSECVLGQSKRVDFCGKGYHLMSFPQSAPHGVVFLHVTYVPAQEKNFTTAPAICHDGKAHFPREGVFVSNGTHWFVTQRNFYEPQIITTDNTFVSGNCDVVIGIVNNTVYDPLQPELDSFKEELDKYFKNHTSPDVDLGDISGINASVVNIQKEIDRLNEVAKNLNESLIDLQELGKYEQYIK

SEQ ID NO: 2376 - protein, 1211 aa, Artificial Sequence
  SARS-CoV-2/Belgium/VAG-03013/2020__EPI_ISL_415155 spike protein (1-1211)(F970C_G999C)
MFVFLVLLPLVSSQCVNLTTRTQLPPAYTNSFTRGVYYPDKVFRSSVLHSTQDLFLPFFSNVTWFHAIHVSGTNGTKRFDNPVLPFNDGVYFASTEKSNIIRGWIFGTTLDSKTQSLLIVNNATNVVIKVCEFQFCNDPFLGVYYHKNNKSWMESEFRVYSSANNCTFEYVSQPFLMDLEGKQGNFKNLREFVFKNIDGYFKIYSKHTPINLVRDLPQGFSALEPLVDLPIGINITRFQTLLALHRSYLTPGDSSSGWTAGAAAYYVGYLQPRTFLLKYNENGTITDAVDCALDPLSETKCTLKSFTVEKGIYQTSNFRVQPTESIVRFPNITNLCPFGEVFNATRFASVYAWNRKRISNCVADYSVLYNSASFSTFKCYGVSPTKLNDLCFTNVYADSFVIRGDEVRQIAPGQTGKIADYNYKLPDDFTGCVIAWNSNNLDSKVGGNYNYLYRLFRKSNLKPFERDISTEIYQAGSTPCNGVEGFNCYFPLQSYGFQPTNGVGYQPYRVVVLSFELLHAPATVCGPKKSTNLVKNKCVNFNFNGLTGTGVLTESNKKFLPFQQFGRDIADTTDAVRDPQTLEILDITPCSFGGVSVITPGTNTSNQVAVLYQGVNCTEVPVAIHADQLTPTWRVYSTGSNVFQTRAGCLIGAEHVNNSYECDIPIGAGICASYQTQTNSPRRARSVASQSIIAYTMSLGAENSVAYSNNSIAIPTNFTISVTTEILPVSMTKTSVDCTMYICGDSTECSNLLLQYGSFCTQLNRALTGIAVEQDKNTQEVFAQVKQIYKTPPIKDFGGFNFSQILPDPSKPSKRSFIEDLLFNKVTLADAGFIKQYGDCLGDIAARDLICAQKFNGLTVLPPLLTDEMIAQYTSALLAGTITSGWTFGAGAALQIPFAMQMAYRFNGIGVTQNVLYENQKLIANQFNSAIGKIQDSLSSTATALGKLQDVVNQNAQALNTLVKQLSSNCGAISSVLNDILSRLDKVEAEVQIDRLITCRLQSLQTYVTQQLIRAAEIRASANLAATKMSECVLGQSKRVDFCGKGYHLMSFPQSAPHGVVFLHVTYVPAQEKNFTTAPAICHDGKAHFPREGVFVSNGTHWFVTQRNFYEPQIITTDNTFVSGNCDVVIGIVNNTVYDPLQPELDSFKEELDKYFKNHTSPDVDLGDISGINASVVNIQKEIDRLNEVAKNLNESLIDLQELGKYEQYIK

SEQ ID NO: 2377 - protein, 1211 aa, Artificial Sequence
  SARS-CoV-2/Belgium/BC-03016/2020__EPI_ISL_415157 spike protein (1-1211)(F970C_G999C)
MFVFLVLLPLVSSQCVNLTTRTQLPPAYTNSFTRGVYYPDKVFRSSVLHSTQDLFLPFFSNVTWFHAIHVSGTNGTKRFDNPVLPFNDGVYFASTEKSNIIRGWIFGTTLDSKTQSLLIVNNATNVVIKVCEFQFCNDPFLGVYYHKNNKSWMESEFRVYSSANNCTFEYVSQPFLMDLEGKQGNFKNLREFVFKNIDGYFKIYSKHTPINLVRDLPQGFSALEPLVDLPIGINITRFQTLLALHRSYLTPGDSSSGWTAGAAAYYVGYLQPRTFLLKYNENGTITDAVDCALDPLSETKCTLKSFTVEKGIYQTSNFRVQPTESIVRFPNITNLCPFGEVFNATRFASVYAWNRKRISNCVADYSVLYNSASFSTFKCYGVSPTKLNDLCFTNVYADSFVIRGDEVRQIAPGQTGKIADYNYKLPDDFTGCVIAWNSNNLDSKVGGNYNYLYRLFRKSNLKPFERDISTEIYQAGSTPCNGVEGFNCYFPLQSYGFQPTNGVGYQPYRVVVLSFELLHAPATVCGPKKSTNLVKNKCVNFNFNGLTGTGVLTESNKKFLPFQQFGRDIADTTDAVRDPQTLEILDITPCSFGGVSVITPGTNTSNQVAVLYQGVNCTEVPVAIHADQLTPTWRVYSTGSNVFQTRAGCLIGAEHVNNSYECDIPIGAGICASYQTQTNSPRRARSVASQSIIAYTMSLGAENSVAYSNNSIAIPTNFTISVTTEILPVSMTKTSVDCTMYICGDSTECSNLLLQYGSFCTQLNRALTGIAVEQDKNTQEVFAQVKQIYKTPPIKDFGGFNFSQILPDPSKPSKRSFIEDLLFNKVTLADAGFIKQYGDCLGDIAARDLICAQKFNGLTVLPPLLTDEMIAQYTSALLAGTITSGWTFGAGAALQIPFAMQMAYRFNGIGVTQNVLYENQKLIANQFNSAIGKIQDSLSSTAPALGKLQDVVNQNAQALNTLVKQLSSNCGAISSVLNDILSRLDKVEAEVQIDRLITCRLQSLQTYVTQQLIRAAEIRASANLAATKMSECVLGQSKRVDFCGKGYHLMSFPQSAPHGVVFLHVTYVPAQEKNFTTAPAICHDGKAHFPREGVFVSNGTHWFVTQRNFYEPQIITTDNTFVSGNCDVVIGIVNNTVYDPLQPELDSFKEELDKYFKNHTSPDVDLGDISGINASVVNIQKEIDRLNEVAKNLNESLIDLQELGKYEQYIK

SEQ ID NO: 2378 - protein, 1211 aa, Artificial Sequence
  SARS-CoV-2/Germany/BavPat3/2020__EPI_ISL_414521 spike protein (1-1211)(F970C_G999C)
MFVFLVLLPLVSSQCVNLTTRTQLPPAYTNSFTRGVYYPDKVFRSSVLHSTQDLFLPFFSNVTWFHAIHVSGTNGTKRFDNPVLPFNDGVYFASTEKSNIIRGWIFGTTLDSKTQSLLIVNNATNVVIKVCEFQFCNDPFLGVYYHKNNKSWMESEFRVYSSANNCTFEYVSQPFLMDLEGKQGNFKNLREFVFKNIDGYFKIYSKHTPINLVRDLPQGFSALEPLVDLPIGINITRFQTLLALHRSYLTPGDSSSGWTAGAAAYYVGYLQPRTFLLKYNENGTITDAVDCALDPLSETKCTLKSFTVEKGIYQTSNFRVQPTESIVRFPNITNLCPFGEVFNATRFASVYAWNRKRISNCVADYSVLYNSASFSTFKCYGVSPTKLNDLCFTNVYADSFVIRGDEVRQIAPGQTGKIADYNYKLPDDFTGCVIAWNSNNLDSKVGGNYNYLYRLFRKSNLKPFERDISTEIYQAGSTPCNGVEGFNCYFPLQSYGFQPTNGVGYQPYRVVVLSFELLHAPATVCGPKKSTNLVKNKCVNFNFNGLTGTGVLTESNKKFLPFQQFGRDIADTTDAVRDPQTLEILDITPCSFGGVSVITPGTNTSNQVAVLYQDVNCTEVPVAIHADQLTPTWRVYSTGSNVFQTRAGCLIGAEHVNNSYECDIPIGAGICASYQTQTNSPRRARSVASQSIIAYTMSLGAENSVAYSNNSIAIPTNFTISVTTEILPVSMTKTSVDCTMYICGDSTECSNLLLQYGSFCTQLNRALTGIAVEQDKNTQQVFAQVKQIYKTPPIKDFGGFNFSQILPDPSKPSKRSFIEDLLFNKVTLADAGFIKQYGDCLGDIAARDLICAQKFNGLTVLPPLLTDEMIAQYTSALLAGTITSGWTFGAGAALQIPFAMQMAYRFNGIGVTQNVLYENQKLIANQFNSAIGKIQDSLSSTASALGKLQDVVNQNAQALNTLVKQLSSNCGAISSVLNDILSRLDKVEAEVQIDRLITCRLQSLQTYVTQQLIRAAEIRASANLAATKMSECVLGQSKRVDFCGKGYHLMSFPQSAPHGVVFLHVTYVPAQEKNFTTAPAICHDGKAHFPREGVFVSNGTHWFVTQRNFYEPQIITTDNTFVSGNCDVVIGIVNNTVYDPLQPELDSFKEELDKYFKNHTSPDVDLGDISGINASVVNIQKEIDRLNEVAKNLNESLIDLQELGKYEQYIK

SEQ ID NO: 2379 - protein, 1211 aa, Artificial Sequence
  SARS-CoV-2/France/HF1805/2020__EPI_ISL_414628 spike protein (1-1211)(F970C_G999C)
MFVFLVLLPLVSSQCVNLTTRTQLPPAYTNSFTRGVYYPDKVFRSSVLHSTQDLFLPFFSNVTWFHAIHVSGTNGTKRFDNPVLPFNDGVYFASTEKSNIIRGWIFGTTLDSKTQSLLIVNNATNVVIKVCEFQFCNDPFLGVYYHKNNKSWMESEFRVYSSANNCTFEYVSQPFLMDLEGKQGNFKNLREFVFKNIDGYFKIYSKHTPINLVRDLPQGFSALEPLVDLPIGINITRFQTLLALHRSYLTPGDSSSGWTAGAAAYYVGYLQPRTFLLKYNENGTITDAVDCALDPLSETKCTLKSFTVEKGIYQTSNFRVQPTESIVRFPNITNLCPFGEVFNATRFASVYAWNRKRISNCVADYSVLYNSASFSTFKCYGVSPTKLNDLCFTNVYADSFVIRGDEVRQIAPGQTGKIADYNYKLPDDFTGCVIAWNSNNLDSKVGGNYNYLYRLFRKSNLKPFERDISTEIYQAGSTPCNGVEGFNCYFPLQSYGFQPTNGVGYQPYRVVVLSFELLHAPATVCGPKKSTNLVKNKCVNFNFNGLTGTGVLTESNKKFLPFQQFGRDIADTTDAVRDPQTLEILDITPCSFGGVSVITPGTNTSNQVAVLYQGVNCTEVPVAIHADQLTPTWRVYSTGSNVFQTRAGCLIGAEHVNNSYECDIPIGAGICASYQTQTNSPRRARSVASQSIIAYTMSLGAENSVAYSNNSIAIPTNFTISVTTEILPVSMTKTSVDCTMYICGDSTECSNLLLQYGSFCTQLNRALTGIAVEQDKNTQEVFAQVKQIYKTPPIKDFGGFNFSQILPDPSKPSKRSFIEDLLFNKVTLADAGFIKQYGDCLGDIAARDLICAQKFNGLTVLPPLLTDEMIAQYTSALLAGTITSGWTFGAGAALQIPFAMQMAYRFNGIGVTQNVLYENQKLIANQFNSAIGKIQDSLSSTASALGKLQDVVNQNAQALNTLVKQLSSNCGAISSVLNDILSRLDKVEAEVQIDRLITCRLQSLQTYVTQQLIRAAEIRASANLAATKMSECVLGQSKRVDFCGKGYHLMSFPQSAPHGVVFLHVTYVPAQEKNFTTAPAICHDGKAHFPREGVFVSNGTHWFVTQRNFYEPQIITTDNTFVSGNCDVVIGVVNNTVYDPLQPELDSFKEELDKYFKNHTSPDVDLGDISGINASVVNIQKEIDRLNEVAKNLNESLIDLQELGKYEQYIK

SEQ ID NO: 2380 - protein, 1211 aa, Artificial Sequence
  SARS-CoV-2/Netherlands/ZuidHolland_9/2020__EPI_ISL_414445 spike protein (1-1211)(F970C_G999C)
MFVFLVLLPLVSSQCVNLTTRTQLPPAYTNSFTRGVYYPDKVFRSSVLHSTQDLFLPFFSNVTWFHAIHVSGTNGTKRFDNPVLPFNDGVYFASTEKSNIIRGWIFGTTLDSKTQSLLIVNNATNVVIKVCEFQFCNDPFLGVYYHKNNKSWMESEFRVYSSANNCTFEYVSQPFLMDLEGKQGNFKNLREFVFKNIDGYFKIYSKHTPINLVRDLPQGFSALEPLVDLPIGINITRFQTLLALHRSYLTPGDSSSGWTAGAAAYYVGYLQPRTFLLKYNENGTITDAVDCALDPLSETKCTLKSFTVEKGIYQTSNFRVQPTESIVRFPNITNLCPFGEVFNATRFASVYAWNRKRISNCVADYSVLYNSASFSTFKCYGVSPTKLNDLCFTNVYADSFVIRGDEVRQIAPGQTGKIADYNYKLPDDFTGCVIAWNSNNLDSKVGGNYNYLYRLFRKSNLKPFERDISTEIYQAGSTPCNGVEGFNCYFPLQSYGFQPTNGVGYQPYRVVVLSFELLHAPATVCGPKKSTNLVKNKCVNFNFNGLTGTGVLTESNKKFLPFQQFGRDIADTTDAVRDPQTLEILDITPCSFGGVSVITPGTNTSNQVAVLYQGVNCTEVPVAIHADQLTPTWRVYSTGSNVFQTRAGCLIGAEHVNNSYECDIPIGAGICASYQTQTNSPRRARSVASQSIIAYTMSLGAENSVAYSNNSIAIPTNFTISVTTEILPVSMTKTSVDCTMYICGDSTECSNLLLQYGSFCTQLNRALTGIAVEQDKNTQEVFAQVKQIYKTPPIKDFGGFNFSQILPDPSKPSKRSFIEDLLFNKVTLADAGFIKQYGDCLGDIAARDLICVQKFNGLTVLPPLLTDEMIAQYTSALLAGTITSGWTFGAGAALQIPFAMQMAYRFNGIGVTQNVLYENQKLIANQFNSAIGKIQDSLSSTASALGKLQDVVNQNAQALNTLVKQLSSNCGAISSVLNDILSRLDKVEAEVQIDRLITCRLQSLQTYVTQQLIRAAEIRASANLAATKMSECVLGQSKRVDFCGKGYHLMSFPQSAPHGVVFLHVTYVPAQEKNFTTAPAICHDGKAHFPREGVFVSNGTHWFVTQRNFYEPQIITTDNTFVSGNCDVVIGIVNNTVYDPLQPELDSFKEELDKYFKNHTSPDVDLGDISGINASVVNIQKEIDRLNEVAKNLNESLIDLQELGKYEQYIK

SEQ ID NO: 2381 - protein, 1211 aa, Artificial Sequence
  SARS-CoV-2/Finland/FIN03032020A/2020__EPI_ISL_413602 spike protein (1-1211)(F970C_G999C)
MFVFLVLLPLVSSQCVNLTTRTQLPPAYTNSFTRGVYYPDKVFRSSVLHSTQDLFLPFFSNVTWFHAIHVSGTNGTKRFDNPVLPFNDGVYFASTEKSNIIRGWIFGTTLDSKTQSLLIVNNATNVVIKVCEFQFCNDPFLGVYYHKNNKSWMESEFRVYSSANNCTFEYVSQPFLMDLEGKQGNFKNLREFVFKNIDGYFKIYSKHTPINLVRDLPQGFSALEPLVDLPIGINITRFQTLLALHRSYLTPGDSSSGWTAGAAAYYVGYLQPRTFLLKYNENGTITDAVDCALDPLSETKCTLKSFTVEKGIYQTSNFRVQPTESIVRFPNITNLCPFGEVFNATRFASVYAWNRKRISNCVADYSVLYNSASFSTFKCYGVSPTKLNDLCFTNVYADSFVIRGDEVRQIAPGQTGKIADYNYKLPDDFTGCVISWNSNNLDSKVGGNYNYLYRLFRKSNLKPFERDISTEIYQAGSTPCNGVEGFNCYFPLQSYGFQPTNGVGYQPYRVVVLSFELLHAPATVCGPKKSTNLVKNKCVNFNFNGLTGTGVLTESNKKFLPFQQFGRDIADTTDAVRDPQTLEILDITPCSFGGVSVITPGTNTSNQVAVLYQGVNCTEVPVAIHADQLTPTWRVYSTGSNVFQTRAGCLIGAEHVNNSYECDIPIGAGICASYQTQTNSPRRARSVASQSIIAYTMSLGAENSVAYSNNSIAIPTNFTISVTTEILPVSMTKTSVDCTMYICGDSTECSNLLLQYGSFCTQLNRALTGIAVEQDKNTQEVFAQVKQIYKTPPIKDFGGFNFSQILPDPSKPSKRSFIEDLLFNKVTLADAGFIKQYGDCLGDIAARDLICAQKFNGLTVLPPLLTDEMIAQYTSALLAGTITSGWTFGAGAALQIPFAMQMAYRFNGIGVTQNVLYENQKLIANQFNSAIGKIQDSLSSTASALGKLQDVVNQNAQALNTLVKQLSSNCGAISSVLNDILSRLDKVEAEVQIDRLITCRLQSLQTYVTQQLIRAAEIRASANLAATKMSECVLGQSKRVDFCGKGYHLMSFPQSAPHGVVFLHVTYVPAQEKNFTTAPAICHDGKAHFPREGVFVSNGTHWFVTQRNFYEPQIITTDNTFVSGNCDVVIGIVNNTVYDPLQPELDSFKEELDKYFKNHTSPDVDLGDISGINASVVNIQKEIDRLNEVAKNLNESLIDLQELGKYEQYIK

SEQ ID NO: 2382 - protein, 1211 aa, Artificial Sequence
  SARS-CoV-2/France/GE1977/2020__EPI_ISL_414632 spike protein (1-1211)(F970C_G999C)
MFVFLVLLPLVSSQCVNLTTRTQLPPAYTNSFTRGVYYPDKVFRSSVLHSTQDLFLPFFSNVTWFHAIHVSGTNGTKRFDNPVLPFNDGVYFASTEKSNIIRGWIFGTTLDSKTQSLLIVNNATNVVIKVCEFQFCNDPFLGVYYHKNNKSWMESEFRVYSSANNCTFEYVSQPFLMDLEGKQGNFKNLREFVFKNIDGYFKIYSKHTPINLVRDLPQGFSALEPLVDLPIGINITRFQTLLALHRSYLTPGDSSSGWTAGAAAYYVGYLQPRTFLLKYNENGTITDAVDCALDPLSETKCTLKSFTVEKGIYQTSNFRVQPTESIVRFPNITNLCPFGEVFNATRFASVYAWNRKRISNCVADYSVLYNSASFSTFKCYGVSPTKLNDLCFTNVYADSFVIRGDEVRQIAPGQTGKIADYNYKLPDDFTGCVIAWNSNNLDSKVGGNYNYLYRLFRKSNLKPFERDISTEIYQAGSTPCNGVEGFNCYFPLQSYGFQPTNGVGYQPYRVVVLSFELLHAPATVCGPKKSTNLVKNKCVNFNFNGLTGTGVLTESNKKFLPFQQFGRDIADTTDAVRDPQTLEILDITPCSFGGVSVITPGTNTSNQVAVLYQGVNCTEVPVAIHADQLTPTWRVYSTGSNVFQTRAGCLIGAEHVNNSYECDIPIGAGICASYQTQTNSPRRARSVASQSIIAYTMSLGAENSVAYSNNSIAIPTNFTISVTTEILPVSMTKTSVDCTMYICGDSTECSNLLLQYGSFCTQLNRALTGIAVEQDKNTQEVFAQVKQIYKTPPIKDFGGFNFSQILPDPSKPSKRSFIEDLLFNKVTLADAGFIKQYGDCLGDIAARDLICAQKFNGLTVLPPLLTDEMIAQYTSALLAGTITSGWTFGAGAALQIPFAMQMAYRFNGIGVTQNVLYENQKLIANQFNSAIGKIQDSLFSTASALGKLQDVVNQNAQALNTLVKQLSSNCGAISSVLNDILSRLDKVEAEVQIDRLITCRLQSLQTYVTQQLIRAAEIRASANLAATKMSECVLGQSKRVDFCGKGYHLMSFPQSAPHGVVFLHVTYVPAQEKNFTTAPAICHDGKAHFPREGVFVSNGTHWFVTQRNFYEPQIITTDNTFVSGNCDVVIGIVNNTVYDPLQPELDSFKEELDKYFKNHTSPDVDLGDISGINASVVNIQKEIDRLNEVAKNLNESLIDLQELGKYEQYIK

SEQ ID NO: 2383 - protein, 1211 aa, Artificial Sequence
  SARS-CoV-2/Finland/FIN-313/2020__EPI_ISL_414641 spike protein (1-1211)(F970C_G999C)
MFVFLVLLPLVSSQCVNLTTRTQLPPAYTNSFTRGVYYPDKVFRSSVLHSTQDLFLPFFSNVTWFHAIHVSGTNGTKRFDNPVLPFNDGVYFASTEKSNIIRGWIFGTTLDSKTQSLLIVNNATNVVIKVCEFQFCNDPFLGVYYHKNNKSWMESEFRVYSSANNCTFEYVSQPFLMDLEGKQGNFKNLREFVFKNIDGYFKIYSKHTPINLVRDLPQGFSALEPLVDLPIGINITRFKTLLALHRSYLTPGDSSSGWTAGAAAYYVGYLQPRTFLLKYNENGTITDAVDCALDPLSETKCTLKSFTVEKGIYQTSNFRVQPTESIVRFPNITNLCPFGEVFNATRFASVYAWNRKRISNCVADYSVLYNSASFSTFKCYGVSPTKLNDLCFTNVYADSFVIRGDEVRQIAPGQTGKIADYNYKLPDDFTGCVIAWNSNNLDSKVGGNYNYLYRLFRKSNLKPFERDISTEIYQAGSTPCNGVEGFNCYFPLQSYGFQPTNGVGYQPYRVVVLSFELLHAPATVCGPKKSTNLVKNKCVNFNFNGLTGTGVLTESNKKFLPFQQFGRDIADTTDAVRDPQTLEILDITPCSFGGVSVITPGTNTSNQVAVLYQGVNCTEVPVAIHADQLTPTWRVYSTGSNVFQTRAGCLIGAEHVNNSYECDIPIGAGICASYQTQTNSPRRARSVASQSIIAYTMSLGAENSVAYSNNSIAIPTNFTISVTTEILPVSMTKTSVDCTMYICGDSTECSNLLLQYGSFCTQLNRALTGIAVEQDKNTQEVFAQVKQIYKTPPIKDFGGFNFSQILPDPSKPSKRSFIEDLLFNKVTLADAGFIKQYGDCLGDIAARDLICAQKFNGLTVLPPLLTDEMIAQYTSALLAGTITSGWTFGAGAALQIPFAMQMAYRFNGIGVTQNVLYENQKLIANQFNSAIGKIQDSLSSTASALGKLQDVVNQNAQALNTLVKQLSSNCGAISSVLNDILSRLDKVEAEVQIDRLITCRLQSLQTYVTQQLIRAAEIRASANLAATKMSECVLGQSKRVDFCGKGYHLMSFPQSAPHGVVFLHVTYVPAQEKNFTTAPAICHDGKAHFPREGVFVSNGTHWFVTQRNFYEPQIITTDNTFVSGNCDVVIGIVNNTVYDPLQPELDSFKEELDKYFKNHTSPDVDLGDISGINASVVNIQKEIDRLNEVAKNLNESLIDLQELGKYEQYIK

SEQ ID NO: 2384 - protein, 1211 aa, Artificial Sequence
  SARS-CoV-2/Netherlands/ZuidHolland_2/2020__EPI_ISL_414556 spike protein (1-1211)(F970C_G999C)
MFVFLVLLPLVSSQCVNLTTRTQLPPAYTNSFTRGVYYPDKVFRSSVLHSTQDLFLPFFSNVTWFHAIHVSGTNGTKRFDNPVLPFNDGVYFASTEKSNIIRGWIFGTTLDSKTQSLLIVNNATNVVIKVCEFQFCNDPFLGVYYHKNNKSWMESEFRVYSSANNCTFEYVSQPFLMDLEGKQGNFKNLREFVFKNIDGYFKIYSKHTPINLVRDLPQGFSALEPLVDLPIGINITRFQTLLALHRSYLTPGDSSSGWTAGAAAYYVGYLQPRTFLLKYNENGTITDAVDCALDPLSETKCTLKSFTVEKGIYQTSNFRVQPTESIVRFPNITNLCPFGEVFNATRFASVYAWNRKRISNCVADYSVLYNSASFSTFKCYGVSPTKLNDLCFTNVYADSFVIRGDEVRQIAPGQTGKIADYNYKLPDDFTGCVIAWNSNNLDSKVGGNYNYLYRLFRKSNLKPFERDISTEIYQAGSTPCNGVEGFNCYFPLQSYGFQPTNGVGYQPYRVVVLSFELLHAPATVCGPKKSTNLVKNKCVNFNFNGLTGTGVLTESNKKFLPFQQFGRDIADTTDAVRDPQTLEILDITPCSFGGVSVITPGTNTSNQVAVLYQGVNCTEVPVAIHADQLTPTWRVYSTGSNVFQTRAGCLIGAEHVNNSYECDIPIGAGICASYQTQTNSPRRARSVASQSIIAYTMSLGAENSVAYSNNSIAIPTNFTISVTTEILPVSMTKTSVDCTMYICGDSTECSNLLLQYGSFCTQLNRALTGIALEQDKNTQEVFAQVKQIYKTPPIKDFGGFNFSQILPDPSKPSKRSFIEDLLFNKVTLADAGFIKQYGDCLGDIAARDLICAQKFNGLTVLPPLLTDEMIAQYTSALLAGTITSGWTFGAGAALQIPFAMQMAYRFNGIGVTQNVLYENQKLIANQFNSAIGKIQDSLSSTASALGKLQDVVNQNAQALNTLVKQLSSNCGAISSVLNDILSRLDKVEAEVQIDRLITCRLQSLQTYVTQQLIRAAEIRASANLAATKMSECVLGQSKRVDFCGKGYHLMSFPQSAPHGVVFLHVTYVPAQEKNFTTAPAICHDGKAHFPREGVFVSNGTHWFVTQRNFYEPQIITTDNTFVSGNCDVVIGIVNNTVYDPLQPELDSFKEELDKYFKNHTSPDVDLGDISGINASVVNIQKEIDRLNEVAKNLNESLIDLQELGKYEQYIK

SEQ ID NO: 2385 - protein, 1211 aa, Artificial Sequence
  SARS-CoV-2/USA/WA-UW31/2020__EPI_ISL_414618 spike protein (1-1211)(F970C_G999C)
MFVFLVLLPLVSSQCVNLTTRTQLPPAYTNSFTRGVYYPDKVFRSSVLHSTQDLFLPFFSNVTWFHAIHVSGTNGTKRFDNPVLPFNDGVYFASTEKSNIIRGWIFGTTLDSKTQSLLIVNNATNVVIKVCEFQFCNDPFLGVYYHKNNKSWMESEFRVYSSANNCTFEYVSQPFLMDLEGKQGNFKNLREFVFKNIDGYFKIYSKHTPINLVRDLPQGFSALEPLVDLPIGINITRFQTLLALHRSYLTPGDSSSGWTAGAAAYYVGYLQPRTFLLKYNENGTITDAVDCALDPLSETKCTLKSFTVEKGIYQTSNFRVQPTESIVRFPNITNLCPFGEVFNATRFASVYAWNRKRISNCVADYSVLYNSASFSTFKCYGVSPTKLNDLCFTNVYADSFVIRGDEVRQIAPGQTGKIADYNYKLPDDFTGCVIAWNSNNLDSKVGGNYNYLYRLFRKSNLKPFERDISTEIYQAGSTPCNGAEGFNCYFPLQSYGFQPTNGVGYQPYRVVVLSFELLHAPATVCGPKKSTNLVKNKCVNFNFNGLTGTGVLTESNKKFLPFQQFGRDIADTTDAVRDPQTLEILDITPCSFGGVSVITPGTNTSNQVAVLYQDVNCTEVPVAIHADQLTPTWRVYSTGSNVFQTRAGCLIGAEHVNNSYECDIPIGAGICASYQTQTNSPRRARSVASQSIIAYTMSLGAENSVAYSNNSIAIPTNFTISVTTEILPVSMTKTSVDCTMYICGDSTECSNLLLQYGSFCTQLNRALTGIAVEQDKNTQEVFAQVKQIYKTPPIKDFGGFNFSQILPDPSKPSKRSFIEDLLFNKVTLADAGFIKQYGDCLGDIAARDLICAQKFNGLTVLPPLLTDEMIAQYTSALLAGTITSGWTFGAGAALQIPFAMQMAYRFNGIGVTQNVLYENQKLIANQFNSAIGKIQDSLSSTASALGKLQDVVNQNAQALNTLVKQLSSNCGAISSVLNDILSRLDKVEAEVQIDRLITCRLQSLQTYVTQQLIRAAEIRASANLAATKMSECVLGQSKRVDFCGKGYHLMSFPQSAPHGVVFLHVTYVPAQEKNFTTAPAICHDGKAHFPREGVFVSNGTHWFVTQRNFYEPQIITTDNTFVSGNCDVVIGIVNNTVYDPLQPELDSFKEELDKYFKNHTSPDVDLGDISGINASVVNIQKEIDRLNEVAKNLNESLIDLQELGKYEQYIK

SEQ ID NO: 2386 - protein, 1211 aa, Artificial Sequence
  SARS-CoV-2/South Korea/SNU01/2020__EPI_ISL_411929 spike protein (1-1211)(F970C_G999C)
MFVFLVLLPLVSSQCVNLTTRTQLPPAYTNSFTRGVYYPDKVFRSSVLHSTQDLFLPFFSNVTWFHAIHVSGTNGTKRFDNPVLPFNDGVYFASTEKSNIIRGWIFGTTLDSKTQSLLIVNNATNVVIKVCEFQFCNDPFLGVYYHKNNKSWMESEFRVYSSANNCTFEYVSQPFLMDLEGKQGNFKNLREFVFKNIDGYFKIYSKHTPINLVRDLPQGFWALEPLVDLPIGINITRFQTLLALHRSYLTPGDSSSGWTAGAAAYYVGYLQPRTFLLKYNENGTITDAVDCALDPLSETKCTLKSFTVEKGIYQTSNFRVQPTESIVRFPNITNLCPFGEVFNATRFASVYAWNRKRISNCVADYSVLYNSASFSTFKCYGVSPTKLNDLCFTNVYADSFVIRGDEVRQIAPGQTGKIADYNYKLPDDFTGCVIAWNSNNLDSKVGGNYNYLYRLFRKSNLKPFERDISTEIYQAGSTPCNGVEGFNCYFPLQSYGFQPTNGVGYQPYRVVVLSFELLHAPATVCGPKKSTNLVKNKCVNFNFNGLTGTGVLTESNKKFLPFQQFGRDIADTTDAVRDPQTLEILDITPCSFGGVSVITPGTNTSNQVAVLYQDVNCTEVPVAIHADQLTPTWRVYSTGSNVFQTRAGCLIGAEHVNNSYECDIPIGAGICASYQTQTNSPRRARSVASQSIIAYTMSLGAENSVAYSNNSIAIPTNFTISVTTEILPVSMTKTSVDCTMYICGDSTECSNLLLQYGSFCTQLNRALTGIAVEQDKNTQEVFAQVKQIYKTPPIKDFGGFNFSQILPDPSKPSKRSFIEDLLFNKVTLADAGFIKQYGDCLGDIAARDLICAQKFNGLTVLPPLLTDEMIAQYTSALLAGTITSGWTFGAGAALQIPFAMQMAYRFNGIGVTQNVLYENQKLIANQFNSAIGKIQDSLSSTASALGKLQDVVNQNAQALNTLVKQLSSNCGAISSVLNDILSRLDKVEAEVQIDRLITCRLQSLQTYVTQQLIRAAEIRASANLAATKMSECVLGQSKRVDFCGKGYHLMSFPQSAPHGVVFLHVTYVPAQEKNFTTAPAICHDGKAHFPREGVFVSNGTHWFVTQRNFYEPQIITTDNTFVSGNCDVVIGIVNNTVYDPLQPELDSFKEELDKYFKNHTSPDVDLGDISGINASVVNIQKEIDRLNEVAKNLNESLIDLQELGKYEQYIK

SEQ ID NO: 2387 - protein, 1211 aa, Artificial Sequence
  SARS-CoV-2/China/WF0004/2020__EPI_ISL_413694 spike protein (1-1211)(F970C_G999C)
MFVFLVLLPLVSSQCVNLTTRTQLPPAYTNSFTRGVYYPDKVFRSSVLHSTQDLFLPFFSNVTWFHAIHVSGTNGTKRFDNPVLPFNDGVYFASTEKSNIIRGWIFGTTLDSKTQSLLIVNNATNVVIKVCEFQFCNDPFLGVYYHKNNKSWTESEFRVYSSANNCTFEYVSQPFLMDLEGKQGNFKNLREFVFKNIDGYFKIYSKHTPINLVRDLPQGFSALEPLVDLPIGINITRFQTLLALHRSYLTPGDSSSGWTAGAAAYYVGYLQPRTFLLKYNENGTITDAVDCALDPLSETKCTLKSFTVEKGIYQTSNFRVQPTESIVRFPNITNLCPFGEVFNATRFASVYAWNRKRISNCVADYSVLYNSASFSTFKCYGVSPTKLNDLCFTNVYADSFVIRGDEVRQIAPGQTGKIADYNYKLPDDFTGCVIAWNSNNLDSKVGGNYNYLYRLFRKSNLKPFERDISTEIYQAGSTPCNGVEGFNCYFPLQSYGFQPTNGVGYQPYRVVVLSFELLHAPATVCGPKKSTNLVKNKCVNFNFNGLTGTGVLTESNKKFLPFQQFGRDIADTTDAVRDPQTLEILDITPCSFGGVSVITPGTNTSNQVAVLYQDVNCTEVPVAIHADQLTPTWRVYSTGSNVFQTRAGCLIGAEHVNNSYECDIPIGAGICASYQTQTNSPRRARSVASQSIIAYTMSLGAENSVAYSNNSIAIPTNFTISVTTEILPVSMTKTSVDCTMYICGDSTECSNLLLQYGSFCTQLNRALTGIAVEQDKNTQEVFAQVKQIYKTPPIKDFGGFNFSQILPDPSKPSKRSFIEDLLFNKVTLADAGFIKQYGDCLGDIAARDLICAQKFNGLTVLPPLLTDEMIAQYTSALLAGTITSGWTFGAGAALQIPFAMQMAYRFNGIGVTQNVLYENQKLIANQFNSAIGKIQDSLSSTASALGKLQDVVNQNAQALNTLVKQLSSNCGAISSVLNDILSRLDKVEAEVQIDRLITCRLQSLQTYVTQQLIRAAEIRASANLAATKMSECVLGQSKRFDFCGKGYHLMSFPQSAPHGVVFLHVTYVPAQEKNFTTAPAICHDGKAHFPREGVFVSNGTHWFVTQRNFYEPQIITTDNTFVSGNCDVVIGIVNNTVYDPLQPELDSFKEELDKYFKNHTSPDVDLGDISGINASVVNIQKEIDRLNEVAKNLNESLIDLQELGKYEQYIK

SEQ ID NO: 2388 - protein, 1211 aa, Artificial Sequence
  SARS-CoV-2/China/WF0028/2020__EPI_ISL_413791 spike protein (1-1211)(F970C_G999C)
MFVFLVLLPLVSSQCVNLTTRTQLPPAYTNSFTRGVYYPDKVFRSSVLHSTQDLFLPFFSNVTWFHAIHVSGTNGTKRFDNPVLPFNDGVYFASTEKSNIIRGWIFGTTLDSKTQSLLIVNNATNVVIKVCEFQFCNDPFLGVYYHKNNKSWMESEFRVYSSANNCTFEYVSQPFLMDLEGKQGNFKNLREFVFKNIDGYFKIYSKHTPINLVRDLPQGFSALEPLVDLPIGINITRFQTLLALHRSYLTPGDSSSGWTAGAAAYYVGYLQPRTFLLKYNENGTITDAVDCALDPLSETKCTLKSFTVEKGIYQTSNFRVQPTESIVRFPNITNLCPFGEVFNATRFASVYAWNRKRISNCVADYSVLYNSASFSTFKCYGVSPTKLNDLCFTNVYADSFVIRGDEVRQIAPGQTGKIADYNYKLPDDFTGCVIAWNSNNLDSKVGGNYNYLYRLFRKSNLKPFERDISTEIYQAGSTPCNGVEGFNCYFPLQSYGFQPTNGVGYQPYRVVVLSFELLHAPATVCGPKKSTNLVKNKCVNFNFNGLTGTGVLTESNKKFLPFQQFGRDIADTTDAVRDPQTLEILDITPCSFGGVSVITPGTNTSNQVAVLYQDVNCTEVPVAIHADQLTPTWRVYSTGSNVFQTRAGCLIGAEHVNNSYECDIPIGAGICASYQTQTNSPRRARSVASQSIIAYTMSLGAENSVAYSNNSIAIPTNFTISVTTEILPVSMTKTSVDCTMYICGDSTECSNLLLQYGSFCTQLNRALTGIAVEQDKNTQEVFAQVKQIYKTPPIKDFGGFNFSQILPDPSKPSKRSFIEDLLFNKVTLADAGFIKQYGDCLGDIAARDLICAQKFNGLTVLPPLLTDEMIAQYTSALLAGTITSGWTFGAGAALQIPFAMQMAYRFNGIGVTQNVLYENQKLIANQFNSAIGKIQDSLSSTASALGKLQDVVNQNAQALNTLVKQLSSNCGAISSVLNDILSRLDKVEAEVQIDRLITCRLQSLQTYVTQQLIRAAEIRASANLAATKMSECVLGQSKRVDFCGKGYHLMSFPQSAPHGVVFLHVTYVPAQEKNFTTAPAICHDGKAHFPREGVFVSNGTHWFVTQRNFYEPQIITTDNTFVSGNCDVVIGIVNNTVYDPLQPELESFKEELDKYFKNHTSPDVDLGDISGINASVVNIQKEIDRLNEVAKNLNESLIDLQELGKYEQYIK

SEQ ID NO: 2389 - protein, 1211 aa, Artificial Sequence
  SARS-CoV-2/2019-nCoV/USA-CruiseA-18/2020__MT159716.1 spike protein (1-1211)(F970C_G999C)
MFVFLVLLPLVSSQCVNLTTRTQLPPAYTNSFTRGVYYPDKVFRSSVLHSTQDLFLPFFSNVTWFHAIHVSGTNGTKRFDNPVLPFNDGVYFASTEKSNIIRGWIFGTTLDSKTQSLLIVNNATNVVIKVCEFQFCNDPFLGVYYHKNNKSWMESELRVYSSANNCTFEYVSQPFLMDLEGKQGNFKNLREFVFKNIDGYFKIYSKHTPINLVRDLPQGFSALEPLVDLPIGINITRFQTLLALHRSYLTPGDSSSGWTAGAAAYYVGYLQPRTFLLKYNENGTITDAVDCALDPLSETKCTLKSFTVEKGIYQTSNFRVQPTESIVRFPNITNLCPFGEVFNATRFASVYAWNRKRISNCVADYSVLYNSASFSTFKCYGVSPTKLNDLCFTNVYADSFVIRGDEVRQIAPGQTGKIADYNYKLPDDFTGCVIAWNSNNLDSKVGGNYNYLYRLFRKSNLKPFERDISTEIYQAGSTPCNGVEGFNCYFPLQSYGFQPTNGVGYQPYRVVVLSFELLHAPATVCGPKKSTNLVKNKCVNFNFNGLTGTGVLTESNKKFLPFQQFGRDIADTTDAVRDPQTLEILDITPCSFGGVSVITPGTNTSNQVAVLYQDVNCTEVPVAIHADQLTPTWRVYSTGSNVFQTRAGCLIGAEHVNNSYECDIPIGAGICASYQTQTNSPRRARSVASQSIIAYTMSLGAENSVAYSNNSIAIPTNFTISVTTEILPVSMTKTSVDCTMYICGDSTECSNLLLQYGSFCTQLNRALTGIAVEQDKNTQEVFAQVKQIYKTPPIKDFGGFNFSQILPDPSKPSKRSFIEDLLFNKVTLADAGFIKQYGDCLGDIAARDLICAQKFNGLTVLPPLLTDEMIAQYTSALLAGTITSGWTFGAGAALQIPFAMQMAYRFNGIGVTQNVLYENQKLIANQFNSAIGKIQDSLSSTASALGKLQDVVNQNAQALNTLVKQLSSNCGAISSVLNDILSRLDKVEAEVQIDRLITCRLQSLQTYVTQQLIRAAEIRASANLAATKMSECVLGQSKRVDFCGKGYHLMSFPQSAPHGVVFLHVTYVPAQEKNFTTAPAICHDGKAHFPREGVFVSNGTHWFVTQRNFYEPQIITTDNTFVSGNCDVVIGIVNNTVYDPLQPELDSFKEELDKYFKNHTSPDVDLGDISGINASVVNIQKEIDRLNEVAKNLNESLIDLQELGKYEQYIK

SEQ ID NO: 2390 - protein, 1211 aa, Artificial Sequence
  SARS-CoV-2/SARS-CoV-2/Yunnan-01/human/2020/CHN__MT049951.1 spike protein (1-1211)(F970C_G999C)
MFVFLVLLPLVSSQCVNLTTRTQLPPANTNSFTRGVYYPDKVFRSSVLHSTQDLFLPFFSNVTWFHAIHVSGTNGTKRFDNPVLPFNDGVYFASTEKSNIIRGWIFGTTLDSKTQSLLIVNNATNVVIKVCEFQFCNDPFLGVYYHKNNKSWMESEFRVYSSANNCTFEYVSQPFLMDLEGKQGNFKNLREFVFKNIDGYFKIYSKHTPINLVRDLPQGFSALEPLVDLPIGINITRFQTLLALHRSYLTPGDSSSGWTAGAAAYYVGYLQPRTFLLKYNENGTITDAVDCALDPLSETKCTLKSFTVEKGIYQTSNFRVQPTESIVRFPNITNLCPFGEVFNATRFASVYAWNRKRISNCVADYSVLYNSASFSTFKCYGVSPTKLNDLCFTNVYADSFVIRGDEVRQIAPGQTGKIADYNYKLPDDFTGCVIAWNSNNLDSKVGGNYNYLYRLFRKSNLKPFERDISTEIYQAGSTPCNGVEGFNCYFPLQSYGFQPTNGVGYQPYRVVVLSFELLHAPATVCGPKKSTNLVKNKCVNFNFNGLTGTGVLTESNKKFLPFQQFGRDIADTTDAVRDPQTLEILDITPCSFGGVSVITPGTNTSNQVAVLYQDVNCTEVPVAIHADQLTPTWRVYSTGSNVFQTRAGCLIGAEHVNNSYECDIPIGAGICASYQTQTNSPRRARSVASQSIIAYTMSLGAENSVAYSNNSIAIPTNFTISVTTEILPVSMTKTSVDCTMYICGDSTECSNLLLQYGSFCTQLNRALTGIAVEQDKNTQEVFAQVKQIYKTPPIKDFGGFNFSQILPDPSKPSKRSFIEDLLFNKVTLADAGFIKQYGDCLGDIAARDLICAQKFNGLTVLPPLLTDEMIAQYTSALLAGTITSGWTFGAGAALQIPFAMQMAYRFNGIGVTQNVLYENQKLIANQFNSAIGKIQDSLSSTASALGKLQDVVNQNAQALNTLVKQLSSNCGAISSVLNDILSRLDKVEAEVQIDRLITCRLQSLQTYVTQQLIRAAEIRASANLAATKMSECVLGQSKRVDFCGKGYHLMSFPQSAPHGVVFLHVTYVPAQEKNFTTAPAICHDGKAHFPREGVFVSNGTHWFVTQRNFYEPQIITTDNTFVSGNCDVVIGIVNNTVYDPLQPELDSFKEELDKYFKNHTSPDVDLGDISGINASVVNIQKEIDRLNEVAKNLNESLIDLQELGKYEQYIK

SEQ ID NO: 2391 - protein, 1211 aa, Artificial Sequence
  SARS-CoV-2/USA/WA-UW292/2020__EPI_ISL_418077 spike protein (1-1211)(F970C_G999C)
MFVFLVLLPLVSSQCVNLTTRTQLPPAYTNSFTRGVYYPDKVFRSSVLHSTQDLFLPFFSNVTWFHAIHVSGTNGTKRFDNPVLPFNDGVYFASTEKSNIIRGWIFGTTLDSKTQSLLIVNNATNVVIKVCEFQFCNDPFLGVYYHKNNKSWMESEFRVYSSANNCTFEYVSQPFLMDLEGKQGNFKNLREFVFKNIDGYFKIYSKHTPINLVRDLPQGFSALEPLVDLPIGINITRFQTLLALHRSYLTPGDSSSGWTAGAAAYYVGYLQPRTFLLKYNENGTITDAVDCALDPLSETKCTLKSFTVEKGIYQTSNFRVQPTESIVRFPNITNLCPFGEVFNATRFASVYAWNRKRISNCVADYSVLYNSASFSTFKCYGVSPTKLNDLCFTNVYADSFVIRGDEVRQIAPGQTGKIADYNYKLPDDFTGCVIAWNSNNLDSKVGGNYNYLYRLFRKSNLKPFERDISTEIYQASSTPCNGVEGFNCYFPLQSYGFQPTNGVGYQPYRVVVLSFELLHAPATVCGPKKSTNLVKNKCVNFNFNGLTGTGVLTESNKKFLPFQQFGRDIADTTDAVRDPQTLEILDITPCSFGGVSVITPGTNTSNQVAVLYQDVNCTEVPVAIHADQLTPTWRVYSTGSNVFQTRAGCLIGAEHVNNSYECDIPIGAGICASYQTQTNSPRRARSVASQSIIAYTMSLGAENSVAYSNNSIAIPTNFTISVTTEILPVSMTKTSVDCTMYICGDSTECSNLLLQYGSFCTQLNRALTGIAVEQDKNTQEVFAQVKQIYKTPPIKDFGGFNFSQILPDPSKPSKRSFIEDLLFNKVTLADAGFIKQYGDCLGDIAARDLICAQKFNGLTVLPPLLTDEMIAQYTSALLAGTITSGWTFGAGAALQIPFAMQMAYRFNGIGVTQNVLYENQKLIANQFNSAIGKIQDSLSSTASALGKLQDVVNQNAQALNTLVKQLSSNCGAISSVLNDILSRLDKVEAEVQIDRLITCRLQSLQTYVTQQLIRAAEIRASANLAATKMSECVLGQSKRVDFCGKGYHLMSFPQSAPHGVVFLHVTYVPAQEKNFTTAPAICHDGKAHFPREGVFVSNGTHWFVTQRNFYEPQIITTDNTFVSGNCDVVIGIVNNTVYDPLQPELDSFKEELDKYFKNHTSPDVDLGDISGINASVVNIQKEIDRLNEVAKNLNESLIDLQELGKYEQYIK

SEQ ID NO: 2392 - protein, 1211 aa, Artificial Sequence
  SARS-CoV-2/Iceland/192/2020__EPI_ISL_417819 spike protein (1-1211)(F970C_G999C)
MFVFFVLLPLVSSQCVNLTTRTQLPPAYTNSFTRGVYYPDKVFRSSVLHSTQDLFLPFFSNVTWFHAIHVSGTNGTKRFDNPVLPFNDGVYFASTEKSNIIRGWIFGTTLDSKTQSLLIVNNATNVVIKVCEFQFCNDPFLGVYYHKNNKSWMESEFRVYSSANNCTFEYVSQPFLMDLEGKQGNFKNLREFVFKNIDGYFKIYSKHTPINLVRDLPQGFSALEPLVDLPIGINITRFQTLLALHRSYLTPGDSSSGWTAGAAAYYVGYLQPRTFLLKYNENGTITDAVDCALDPLSETKCTLKSFTVEKGIYQTSNFRVQPTESIVRFPNITNLCPFGEVFNATRFASVYAWNRKRISNCVADYSVLYNSASFSTFKCYGVSPTKLNDLCFTNVYADSFVIRGDEVRQIAPGQTGKIADYNYKLPDDFTGCVIAWNSNNLDSKVGGNYNYLYRLFRKSNLKPFERDISTEIYQAGSTPCNGVEGFNCYFPLQSYGFQPTNGVGYQPYRVVVLSFELLHAPATVCGPKKSTNLVKNKCVNFNFNGLTGTGVLTESNKKFLPFQQFGRDIADTTDAVRDPQTLEILDITPCSFGGVSVITPGTNTSNQVAVLYQGVNCTEVPVAIHADQLTPTWRVYSTGSNVFQTRAGCLIGAEHVNNSYECDIPIGAGICASYQTQTNSPRRARSVASQSIIAYTMSLGAENSVAYSNNSIAIPTNFTISVTTEILPVSMTKTSVDCTMYICGDSTECSNLLLQYGSFCTQLNRALTGIAVEQDKNTQEVFAQVKQIYKTPPIKDFGGFNFSQILPDPSKPSKRSFIEDLLFNKVTLADAGFIKQYGDCLGDIAARDLICAQKFNGLTVLPPLLTDEMIAQYTSALLAGTITSGWTFGAGAALQIPFAMQMAYRFNGIGVTQNVLYENQKLIANQFNSAIGKIQDSLSSTASALGKLQDVVNQNAQALNTLVKQLSSNCGAISSVLNDILSRLDKVEAEVQIDRLITCRLQSLQTYVTQQLIRAAEIRASANLAATKMSECVLGQSKRVDFCGKGYHLMSFPQSAPHGVVFLHVTYVPAQEKNFTTAPAICHDGKAHFPREGVFVSNGTHWFVTQRNFYEPQIITTDNTFVSGNCDVVIGIVNNTVYDPLQPELDSFKEELDKYFKNHTSPDVDLGDISGINASVVNIQKEIDRLNEVAKNLNESLIDLQELGKYEQYIK

SEQ ID NO: 2393 - protein, 1211 aa, Artificial Sequence
  SARS-CoV-2/Belgium/ULG-6939/2020__EPI_ISL_417020 spike protein (1-1211)(F970C_G999C)
MFVFLVLLPLVSSQCVNLTTRTQLPPAYTNSFTRGVYYPDKVFRSSVLHSTQDLFLPFFSNVTWFHAIHVSGTNGTKRFDNPVLPFNDGVYFASTEKSNIIRGWIFGTTLDSKTQSLLIVNNATNVVIKVCEFQFCNDPFLGVYYHKNNKSWMESEFRVYSSANNCTFEYVSQPFLMDLEGKQGNFKNLREFVFKNIDGYFKIYSKHTPINLVRDLPQGFSALEPLVDLPIGINITRFQTLLALHRSYLTPGDSSSGWTAGAAAYYVGYLQPRTFLLKYNENGTITDAVDCALDPLSETKCTLKSFTVEKGIYQTSNFRVQPTESIVRFPNITNLCPFGEVFNATRFASVYAWNRKRISNCVADYSVLYNSASFSTFKCYGVSPTKLNDLCFTNVYADSFVIRGDEVRQIAPGQTGKIADYNYKLPDDFTGCVIAWNSNNLDSKVGGNYNYLYRLFRKSNLKPFERDISTEIYQAGSTPCNGVEGFNCYFPLQSYGFQPTNGVGYQPYRVVVLSFELLHAPATVCGPKKSTNLVKNKCVNFNFNGLTGTGVLTESNKKFLPFQQFGRDIADTTDAVRDPQTLEILDITPCSFGGVSVITPGTNTSNQVAVLYQGVNCTEVPVAIHADQLTPTWRVYSTGSNVFQTRAGCLIGAEHVNNSYECDIPIGAGICASYQTQTNSPRRARSVASQSIIAYTMSLGAENSVVYSNNSIAIPTNFTISVTTEILPVSMTKTSVDCTMYICGDSTECSNLLLQYGSFCTQLNRALTGIAVEQDKNTQEVFAQVKQIYKTPPIKDFGGFNFSQILPDPSKPSKRSFIEDLLFNKVTLADAGFIKQYGDCLGDIAARDLICAQKFNGLTVLPPLLTDEMIAQYTSALLAGTITSGWTFGAGAALQIPFAMQMAYRFNGIGVTQNVLYENQKLIANQFNSAIGKIQDSLSSTASALGKLQDVVNQNAQALNTLVKQLSSNCGAISSVLNDILSRLDKVEAEVQIDRLITCRLQSLQTYVTQQLIRAAEIRASANLAATKMSECVLGQSKRVDFCGKGYHLMSFPQSAPHGVVFLHVTYVPAQEKNFTTAPAICHDGKAHFPREGVFVSNGTHWFVTQRNFYEPQIITTDNTFVSGNCDVVIGIVNNTVYDPLQPELDSFKEELDKYFKNHTSPDVDLGDISGINASVVNIQKEIDRLNEVAKNLNESLIDLQELGKYEQYIK

SEQ ID NO: 2394 - protein, 1211 aa, Artificial Sequence
  SARS-CoV-2/France/HF2496/2020__EPI_ISL_418231 spike protein (1-1211)(F970C_G999C)
MFVFLVLLPLVSSQCVNLTTRTQLPPAYTNSFTRGVYYPDKVFRSSVLHSTQDLFLPFFSNVTWFHAIHVSGTNGTKRFDNPVLPFNDGVYFASTEKSNIIRGWIFGTTLDSKTQSLLIVNNATNVVIKVCEFQFCNDPFLGVYYHKNNKSWMESEFRVYSSANNCTFEYVSQPFLMDLEGKQGNFKNLREFVFKNIDGYFKIYSKHTPINLVRDLPQGFSALEPLVDLPIGINITRFQTLLALHRSYLTPGDSSSGWTAGAAAYYVGYLQPRTFLLKYNENGTITDAVDCALDPLSETKCTLKSFTVEKGIYQTSNFRVQPTESIVRFPNITNLCPFGEVFNATRFASVYAWNRKRISNCVADYSVLYNSASFSTFKCYGVSPTKLNDLCFTNVYADSFVIRGDEVRQIAPGQTGKIADYNYKLPDDFTGCVIAWNSNNLDSKVGGNYNYLYRLFRKSNLKPFERDISTEIYQAGSTPCNGVEGFNCYFPLQSYGFQPTNGVGYQPYRVVVLSFELLHAPATVCGPKKSTNLVKNKCVNFNFNGLTGTGVLTESNKKFLPFQQFGRDIADTTDAVRDPQTLEILDITPCSFGGVSVITPGTNTSNQVAVLYQGVNCTEVPVAIHADQLTPTWRVYSTGSNVFQTRAGCLIGAEHVNNSYECDIPIGAGICASYQTQTNSPRRARSVASQSIIAYTMSLGAENSVAYSNNSIAIPTNFTISVTTEILPVSMTKTSVDCTMYICGDSTECSNLLLQYGSFCTQLNRALTGIAVEQDKNTQEVFAQVKQIYKTPPIKDFGGFNFSQILPDPSKPSKRSFIEDLLFNKVTLADAGFIKQYGDCLGDIVARDLICAQKFNGLTVLPPLLTDEMIAQYTSALLAGTITSGWTFGAGAALQIPFAMQMAYRFNGIGVTQNVLYENQKLIANQFNSAIGKIQDSLSSTASALGKLQDVVNQNAQALNTLVKQLSSNCGAISSVLNDILSRLDKVEAEVQIDRLITCRLQSLQTYVTQQLIRAAEIRASANLAATKMSECVLGQSKRVDFCGKGYHLMSFPQSAPHGVVFLHVTYVPAQEKNFTTAPAICHDGKAHFPREGVFVSNGTHWFVTQRNFYEPQIITTDNTFVSGNCDVVIGIVNNTVYDPLQPELDSFKEELDKYFKNHTSPDVDLGDISGINASVVNIQKEIDRLNEVAKNLNESLIDLQELGKYEQYIK

SEQ ID NO: 2395 - protein, 1211 aa, Artificial Sequence
  SARS-CoV-2/USA/WA-UW291/2020__EPI_ISL_418076 spike protein (1-1211)(F970C_G999C)
MFVFLVLLPLVSSQCVNLTTRTQLPPAYTNSFTRGVYYPDKVFRSSVLHSTQDLFLPFFSNVTWFHAIHVSGTNGTKRFDNPVLPFNDGVYFASTEKSNIIRGWIFGTTLDSKTQSLLIVNNATNVVIKVCEFQFCNDPFLGVYYHKNNKSWMESEFRVYSSANNCTFEYVSQPFLMDLEGKQGNFKNLREFVFKNIDGYFKIYSKHTPINLVRDLPQGFSALEPLVDLPIGINITRFQTLLALHRSYLTPGDSSSGWTAGAAAYYVGYLQPRTFLLKYNENGTITDAVDCALDPLSETKCTLKSFTVEKGIYQTSNFRVQPTESIVRFPNITNLCPFGEVFNATRFASVYAWNRKRISNCVADYSVLYNSASFSTFKCYGVSPTKLNDLCFTNVYADSFVIRGDEVRQIAPGQTGKIADYNYKLPDDFTGCVIAWNSNNLDSKVGGNYNYLYRLFRKSNLKPFERDISTEIYQAGSTPCNGVEGFNCYFPLQSYGFQPTNGVGYQPYRVVVLSFELLHAPATVCGPKKSTNLVKNKCVNFNFNGLTGTGVLTESNKKFLPFQQFGRDIADTTDAVRDPQTLEILDITPCSFGGVSVITPGTNTSNQVAVLYQGVNCTEVPVAIHADQLTPTWRVYSTGSNVFQTRAGCLIGAEHVNNSYECDIPIGAGICASYQTQTNSPRRARSVASQSIIAYTMSLGAENSVAYSNNSIAIPTNFTISVTTEILPVSMTKTSVDCTMYICGDSTECSNLLLQYGSFCTQLNRALTGIAVEQDKNTQEVFAQVKQIYKTPPIKDFGGFNFSQILPDPSKPSKRSFIEDLLFNKVTLADAGFIKQYGDCLGDIAARDLICAQKFNGLTVLPPLLTDEMIAQYTSALLAGTITSGWTFGAGAALQIPFAMQMAYRFNGIGVTQNVLYENQKLIANQFNSAIGKIQYSLSSTASALGKLQDVVNQNAQALNTLVKQLSSNCGAISSVLNDILSRLDKVEAEVQIDRLITCRLQSLQTYVTQQLIRAAEIRASANLAATKMSECVLGQSKRVDFCGKGYHLMSFPQSAPHGVVFLHVTYVPAQEKNFTTAPAICHDGKAHFPREGVFVSNGTHWFVTQRNFYEPQIITTDNTFVSGNCDVVIGIVNNTVYDPLQPELDSFKEELDKYFKNHTSPDVDLGDISGINASVVNIQKEIDRLNEVAKNLNESLIDLQELGKYEQYIK

SEQ ID NO: 2396 - protein, 1211 aa, Artificial Sequence; identical to SEQ ID NO: 2359
  SARS-CoV-2/Portugal/PT0034/2020__EPI_ISL_418019 spike protein (1-1211)(F970C_G999C)

SEQ ID NO: 2397 - protein, 1211 aa, Artificial Sequence
  SARS-CoV-2/Iceland/202/2020__EPI_ISL_417750 spike protein (1-1211)(F970C_G999C)
MFVFLVLLPLVSSQCVNLTTRTQLPPAYTNSFTRGVYYPDKVFRSSVLHSTQDLFLPFFSNVTWFHAIHVSGTNGTKRFDNPVLPFNDGVYFASTEKSNIIRGWIFGTTLDSKTQSLLIVNNATNVVIKVCEFQFCNDPFLGVYYHKNNKSWMESEFRVYSSANNCTFEYVSQPFLMDLEGKQGNFKNLREFVFKNIDGYFKIYSKHTPINLVRDLPQGFSALEPLVDLPIGINITRFQTLLALHRSYLTPGDSSSGWTAGAAAYYVGYLQPRTFLLKYNENGTITDAVDCALDPLSETKCTLKSFTVEKGIYQTSNFRVQPTESIVRFPNITNLCPFGEVFNATRFASVYAWNRKRISNCVADYSVLYNSASFSTFKCYGVSPTKLNDLCFTNVYADSFVIRGDEVRQIAPGQTGKIADYNYKLPDDFTGCVIAWNSNNLDSKVGGNYNYLYRLFRKSNLKPFERDISTEIYQAGSTPCNGVEGFNCYFPLQSYGFQPTNGVGYQPYRVVVLSFELLHAPATVCGPKKSTNLVKNKCVNFNFNGLTGTGVLTESNKKFLPFQQFGRDIADTTDAVRDPQTLEILDITPCSFGGVSVITPGTNTSNQVAVLYQDVNCTEVPVAIHADQLTPTWRVYSTGSNVFQTRAGCLIGAEHVNNSYECDIPIGAGICASYQTQTNSPRRARSVASQSIIAYTMSLGAENSVAYSNNSIAIPTNFTISVTTEILPVSMTKTSVDCTMYICGDSTECSNLLLQYGSFCTQLNRALTGIAVEQDKNTQEVFAQVKQIYKTPPIKDFGGFNFSQILPDPSKPSKRSFIEDLLFNKVTLADAGFIKQYGDCLGDIAARDLICAQKFNGLTVLPPLLTDEMIAQYTSALLAGTITSGWTFGAGAALQIPFAMQMAYRFNGIGVTQNVLYENQKLIANQFNSAIGKIQDSLSSTASALGKLQDVVNQNAQALNTLVKQLSSNCGAISSVLNDILSRLDKVEAEVQIDRLITCRLQSLQTYVTQQLIRAAEIRASANLAATKMSECVLGQSKRVDFCGKGYHLMSFPQSAPHGVVFLHVTYVPAQEKNFTTAPAICHDGKAHFPREGVFVSNGTHWFVTQRNFYEPQIITTDNTFVSGNCDVVIGIVNNTVYDPLQPELDSFKEELDKYFKNHTSPDVDLGDIPGINASVVNIQKEIDRLNEVAKNLNESLIDLQELGKYEQYIK

SEQ ID NO: 2398 - protein, 1211 aa, Artificial Sequence
  SARS-CoV-2/USA/WA-UW261/2020__EPI_ISL_418046 spike protein (1-1211)(F970C_G999C)
MFVFLVLLPLVSSQCVNLTTRTQLPPAYTNSFTRGVYYPDKVFRSSVLHSTQDLFLPFFSNVTWFHAIHVSGTNGTKRFDNPVLPFNDGVYFASTEKSNIIRGWIFGTTLDSKTQSLLIVNNATNVVIKVCEFQFCNDPFLGVYYHKNNKSWMESEFRVYSSANNCTFEYVSQPFLMDLEGKQGNFKNLREFVFKNIDGYFKIYSKHTPINLVRDLPQGFSALEPLVDLPIGINITRFQTLLALHRSYLTPGDSSSGWTAGAAAYYVGYLQPRTFLLKYNENGTITDAVDCALDPLSETKCTLKSFTVEKGIYQTSNFRVQPTESIVRFPNITNLCPFGEVFNATRFTSVYAWNRKRISNCVADYSVLYNSASFSTFKCYGVSPTKLNDLCFTNVYADSFVIRGDEVRQIAPGQTGKIADYNYKLPDDFTGCVIAWNSNNLDSKVGGNYNYLYRLFRKSNLKPFERDISTEIYQAGSTPCNGVEGFNCYFPLQSYGFQPTNGVGYQPYRVVVLSFELLHAPATVCGPKKSTNLVKNKCVNFNFNGLTGTGVLTESNKKFLPFQQFGRDIADTTDAVRDPQTLEILDITPCSFGGVSVITPGTNTSNQVAVLYQDVNCTEVPVAIHADQLTPTWRVYSTGSNVFQTRAGCLIGAEHVNNSYECDIPIGAGICASYQTQTNSPRRARSVASQSIIAYTMSLGAENSVAYSNNSIAIPTNFTISVTTEILPVSMTKTSVDCTMYICGDSTECSNLLLQYGSFCTQLNRALTGIAVEQDKNTQEVFAQVKQIYKTPPIKDFGGFNFSQILPDPSKPSKRSFIEDLLFNKVTLADAGFIKQYGDCLGDIAARDLICAQKFNGLTVLPPLLTDEMIAQYTSALLAGTITSGWTFGAGAALQIPFAMQMAYRFNGIGVTQNVLYENQKLIANQFNSAIGKIQDSLSSTASALGKLQDVVNQNAQALNTLVKQLSSNCGAISSVLNDILSRLDKVEAEVQIDRLITCRLQSLQTYVTQQLIRAAEIRASANLAATKMSECVLGQSKRVDFCGKGYHLMSFPQSAPHGVVFLHVTYVPAQEKNFTTAPAICHDGKAHFPREGVFVSNGTHWFVTQRNFYEPQIITTDNTFVSGNCDVVIGIVNNTVYDPLQPELDSFKEELDKYFKNHTSPDVDLGDISGINASVVNIQKEIDRLNEVAKNLNESLIDLQELGKYEQYIK

SEQ ID NO: 2399 - protein, 1211 aa, Artificial Sequence
  SARS-CoV-2/Portugal/PT0035/2020__EPI_ISL_418020 spike protein (1-1211)(F970C_G999C)
MFVFLVLLPLVSSQCVNLTTRTQLPPAYTNSFTRGVYYPDKVFRSSVLHSTQDLFLPFFSNVTWFHAIHVSGTNGTKRFDNPVLPFNDGVYFASTEKSNIIRGWIFGTTLDSKTQSLLIVNNATNVVIKVCEFQFCNDPFLGVYYHKNNKSWMESEFRVYSSANNCTFEYVSQPFLMDLEGKQGNFKNLREFVFKNIDGYFKIYSKHTPINLVRDLPQGFSALEPLVDLPIGINITRFQTLLALHRSYLTPGDSSSGWTAGAAAYYVGYLQPRTFLLKYNENGTITDAVDCALDPLSETKCTLKSFTVEKGIYQTSNFRVQPTESIVRFPNITNLCPFGEVFNATRFASVYAWNRKRISNCVADYSVLYNSASFSTFKCYGVSPTKLNDLCFTNVYADSFVIRGDEVRQIAPGQTGKIADYNYKLPDDFTGCVIAWNSNNLDSKVGGNYNYLYRLFRKSNLKPFERDISTEIYQAGSTPCNGVEGFNCYFPLQSYGFQPTNGVGYQPYRVVVLSFELLHAPATVCGPKKSTNLVKNKCVNFNFNGLTGTGVLTESNKKFLPFQQFGRDIADTTDAVRDPQTLEILDITPCSFGGVSVITPGTNTSNQVAVLYQDVNCTEVPVAIHADQLTPTWRVYSTGSNVFQTRAGCLIGAEHVNNSYECDIPIGAGICASYQTQTNSPRRARSVASQSIIAYTMSLGAENSVAYSNNSIAIPTNFTISVTTEILPVSMTKTSVDCTMYICGDSTECSNLLLQYGSFCTQLNRALTGIAVEQDKNTQEVFAQVKQIYKTPPIKDFGGFNFSQILPDPSKPSKRSFIEDLLFNKVTLADAGFIKQYGDCLGDISARDLICAQKFNGLTVLPPLLTDEMIAQYTSALLAGTITSGWTFGAGAALQIPFAMQMAYRFNGIGVTQNVLYENQKLIANQFNSAIGKIQDSLSSTASALGKLQDVVNQNAQALNTLVKQLSSNCGAISSVLNDILSRLDKVEAEVQIDRLITCRLQSLQTYVTQQLIRAAEIRASANLAATKMSECVLGQSKRVDFCGKGYHLMSFPQSAPHGVVFLHVTYVPAQEKNFTTAPAICHDGKAHFPREGVFVSNGTHWFVTQRNFYEPQIITTDNTFVSGNCDVVIGIVNNTVYDPLQPELDSFKEELDKYFKNHTSPDVDLGDISGINASVVNIQKEIDRLNEVAKNLNESLIDLQELGKYEQYIK

SEQ ID NO: 2400 - protein, 1211 aa, Artificial Sequence
  SARS-CoV-2/USA/NY-NYUMC7/2020__EPI_ISL_418192 spike protein (1-1211)(F970C_G999C)
MFVFLVLLPLVSSQCVNLTTRTQLPPAYTNSFTRGVYYPDKVFRSSVLHSTQDLFLPFFSNVTWFHAIHVSGTNGTKRFDNPVLPFNDGVYFASTEKSNIIRGWIFGTTLDSKTQSLLIVNNATNVVIKVCEFQFCNDPFLGVYHHKNNKSWMESEFRVYSSANNCTFEYVSQPFLMDLEGKQGNFKNLREFVFKNIDGYFKIYSKHTPINLVRDLPQGFSALEPLVDLPIGINITRFQTLLALHRSYLTPGDSSSGWTAGAAAYYVGYLQPRTFLLKYNENGTITDAVDCALDPLSETKCTLKSFTVEKGIYQTSNFRVQPTESIVRFPNITNLCPFGEVFNATRFASVYAWNRKRISNCVADYSVLYNSASFSTFKCYGVSPTKLNDLCFTNVYADSFVIRGDEVRQIAPGQTGKIADYNYKLPDDFTGCVIAWNSNNLDSKVGGNYNYLYRLFRKSNLKPFERDISTEIYQAGSTPCNGVEGFNCYFPLQSYGFQPTNGVGYQPYRVVVLSFELLHAPATVCGPKKSTNLVKNKCVNFNFNGLTGTGVLTESNKKFLPFQQFGRDIADTTDAVRDPQTLEILDITPCSFGGVSVITPGTNTSNQVAVLYQGVNCTEVPVAIHADQLTPTWRVYSTGSNVFQTRAGCLIGAEHVNNSYECDIPIGAGICASYQTQTNSPRRARSVASQSIIAYTMSLGAENSVAYSNNSIAIPTNFTISVTTEILPVSMTKTSVDCTMYICGDSTECSNLLLQYGSFCTQLNRALTGIAVEQDKNTQEVFAQVKQIYKTPPIKDFGGFNFSQILPDPSKPSKRSFIEDLLFNKVTLADAGFIKQYGDCLGDIAARDLICAQKFNGLTVLPPLLTDEMIAQYTSALLAGTITSGWTFGAGAALQIPFAMQMAYRFNGIGVTQNVLYENQKLIANQFNSAIGKIQDSLSSTASALGKLQDVVNQNAQALNTLVKQLSSNCGAISSVLNDILSRLDKVEAEVQIDRLITCRLQSLQTYVTQQLIRAAEIRASANLAATKMSECVLGQSKRVDFCGKGYHLMSFPQSAPHGVVFLHVTYVPAQEKNFTTAPAICHDGKAHFPREGVFVSNGTHWFVTQRNFYEPQIITTDNTFVSGNCDVVIGIVNNTVYDPLQPELDSFKEELDKYFKNHTSPDVDLGDISGINASVVNIQKEIDRLNEVAKNLNESLIDLQELGKYEQYIK

SEQ ID NO: 2401 - protein, 1211 aa, Artificial Sequence
  SARS-CoV-2/Iceland/189/2020__EPI_ISL_417709 spike protein (1-1211)(F970C_G999C)
MFVFLVLLPLVSSQCVNLTTRTQLPPAYTNSFTRGVYYPDKVFRSSVLHSTQDLFLPFFSNVTWFHAIHVSGTNGTKRFDNPVLPFNDGVYFASTEKSNIIRGWIFGTTLDSKTQSLLIVNNATNVVIKVCEFQFCNDPFLGVYYHKNNKSWMESEFRVYSSANNCTFEYVSQPFLMDLEGKQGNFKNLREFVFKNIDGYFKIYSKHTPINLVRDLPQGFSALEPLVDLPIGINITRFQTLLALHRSYLTPGDSSSGWTAGAAAYYVGYLQPRTFLLKYNENGTITDAVDCALDPLSETKCTLKSFTVEKGIYQTSNFRVQPTESIVRFPNITNLCPFGEVFNATRFASVYAWNRKRISNCVADYSVLYNSASFSTFKCYGVSPTKLNDLCFTNVYADSFVIRGDEVRQIAPGQTGKIADYNYKLPDDFTGCVIAWNSNNLDSKVGGNYNYLYRLFRKSNLKPFERDISTEIYQAGSTPCNGVEGFNCYFPLQSYGFQPTNGVGYQPYRVVVLSFELLHAPATVCGPKKSTNLVKNKCVNFNFNGLTGTGVLTESNKKFLPFQQFGRDIADTTDAVRDPQTLEILDITPCSFGGVSVITPGTNTSNQVAVLYQGVNCTEVPVAIHADQLTPTWRVYSTGSNVFQTRAGCLIGAEHVNNSYECDIPIGAGICASYQTQTNSPRRARSVASQSIIAYTMSLGAENSVAYSNNSIAIPTNFTISVTTEILPVSMTKTSVDCTMYICGDSTECSNLLLQYGSFCTQLNRALTGIAVEQDKNTQEVFAQVKQIYKTPPIKDFGGFNFSQILPDPSKPSKRSFIEDLLFNKVTLADAGFTKQYGDCLGDIAARDLICAQKFNGLTVLPPLLTDEMIAQYTSALLAGTITSGWTFGAGAALQIPFAMQMAYRFNGIGVTQNVLYENQKLIANQFNSAIGKIQDSLSSTASALGKLQDVVNQNAQALNTLVKQLSSNCGAISSVLNDILSRLDKVEAEVQIDRLITCRLQSLQTYVTQQLIRAAEIRASANLAATKMSECVLGQSKRVDFCGKGYHLMSFPQSAPHGVVFLHVTYVPAQEKNFTTAPAICHDGKAHFPREGVFVSNGTHWFVTQRNFYEPQIITTDNTFVSGNCDVVIGIVNNTVYDPLQPELDSFKEELDKYFKNHTSPDVDLGDISGINASVVNIQKEIDRLNEVAKNLNESLIDLQELGKYEQYIK

SEQ ID NO: 2402 - protein, 1211 aa, Artificial Sequence
  SARS-CoV-2/Australia/NSW56/2020__EPI_ISL_417408 spike protein (1-1211)(F970C_G999C)
MFVFLVLLPLVSSQCVNLTTRTQLPPAYTNSFTRGVYYPDKVFRSSVLHSTQDLFLPFFSNVTWFHAIHVSGTNGTKRFDNPVLPFNDGVYFASTEKSNIIRGWIFGTTLDSKTQSLLIVNNATNVVIKVCEFQFCNDPFLGVYYHKNNKSWMESEFRVYSSANNCTFEYVSQPFLMDLEGKQGNFKNLREFVFKNIDGYFKIYSKHTPINLVRDLPQGFSALEPLVDLPIGINITRFQTLLALHRSYLTPGDSSSGWTAGAAAYYVGYLQPRTFLLKYNENGTITDAVDCALDPLSETKCTLKSFTVEKGIYQTSNFRVQPTESIVRFPNITNLCPFGEVFNATRFASVYAWNRKRISNCVADYSVLYNSASFSTFKCYGVSPTKLNDLCFTNVYADSFVIRGDEVRQIAPGQTGKIADYNYKLPDDFTGCVIAWNSNNLDSKVGGNYNYLYRLFRKSNLKPFERDISTEIYQAGSTPCNGVEGFNCYFPLQSYGFQPTNGVGYQPYRVVVLSFELLHAPATVCGPKKSTNLVKNKCVNFNFNGLTGTGVLTESNKKFLPFQQFGRDIADTTDAVRDPQTLEILDITPCSFGGVSVITPGTNTSNQVAVLYQDVNCTEVPVAIHADQLTPTWRVYSTGSNVFQTRAGCLIGAEHVNNSYECDIPIGAGICASYQTQTNSPRRARSVASQSIIAYTMSLGAENSVAYSNNSIAIPTNFTISVTTEILPVSMTKTSVDCTMYICGDSTECSNLLLQYGSFCTQLNRALTGIAVEQDKNTQEVFAQVKQIYKTPPIKDFGGFNFSQILPDSSKPSKRSFIEDLLFNKVTLADAGFIKQYGDCLGDIAARDLICAQKFNGLTVLPPLLTDEMIAQYTSALLAGTITSGWTFGAGAALQIPFAMQMAYRFNGIGVTQNVLYENQKLIANQFNSAIGKIQDSLSSTASALGKLQDVVNQNAQALNTLVKQLSSNCGAISSVLNDILSRLDKVEAEVQIDRLITCRLQSLQTYVTQQLIRAAEIRASANLAATKMSECVLGQSKRVDFCGKGYHLMSFPQSAPHGVVFLHVTYVPAQEKNFTTAPAICHDGKAHFPREGVFVSNGTHWFVTQRNFYEPQIITTDNTFVSGNCDVVIGIVNNTVYDPLQPELDSFKEELDKYFKNHTSPDVDLGDISGINASVVNIQKEIDRLNEVAKNLNESLIDLQELGKYEQYIK

SEQ ID NO: 2403 - protein, 1211 aa, Artificial Sequence
  SARS-CoV-2/Iceland/280/2020__EPI_ISL_417608 spike protein (1-1211)(F970C_G999C)
MFVFLVLLPLVSSQCVNLTTRTQLPPAYTNSFTRGVYYPDKVFRSSVLHSTQDLFLPFFSNVTWFHAIHVSGTNGTKRFDNPVLPFNDGVYFASTEKSNIIRGWIFGTTLDSKTQSLLIVNNATNVVIKVCEFQFCNDPFLGVYYHKNNKSWMESEFRVYSSANNCTFEYVSQPFLMDLEGKQGNFKNLREFVFKNIDGYFKIYSKHTPINLVRDLPQGFSALEPLVDLPIGINITRFQTLLALHRSYLTPGDSSSGWTAGAAAYYVGYLQPRTFLLKYNENGTITDAVDCALDPLSETKCTLKSFTVEKGIYQTSNFRVQPTESIVRFPNITNLCPFGEVFNATRFASVYAWNRKRISNCVADYSVLYNSASFSTFKCYGVSPTKLNDLCFTNVYADSFVIRGDEVRQIAPGQTGKIADYNYKLPDDFTGCVIAWNSNNLDSKVGGNYNYLYRLFRKSNLKPFERDISTEIYQAGSTPCNGVEGFNCYFPLQSYGFQPTNGVGYQPYRVVVLSFELLHAPATVCGPKKSTNLVKNKCVNFNFNGLTGTGVLTESNKKFLPFQQFGRDIADTTDAVRDPQTLEILDITPCSFGGVSVITPGTNTSNQVAVLYQGVNCTEVPVAIHADQLTPTWRVYSTGSNVFQTRAGCLIGAEHVNNSYECDIPIGAGICASYHTQTNSPRRARSVASQSIIAYTMSLGAENSVAYSNNSIAIPTNFTISVTTEILPVSMTKTSVDCTMYICGDSTECSNLLLQYGSFCTQLNRALTGIAVEQDKNTQEVFAQVKQIYKTPPIKDFGGFNFSQILPDPSKPSKRSFIEDLLFNKVTLADAGFIKQYGDCLGDIAARDLICAQKFNGLTVLPPLLTDEMIAQYTSALLAGTITSGWTFGAGAALQIPFAMQMAYRFNGIGVTQNVLYENQKLIANQFNSAIGKIQDSLSSTASALGKLQDVVNQNAQALNTLVKQLSSNCGAISSVLNDILSRLDKVEAEVQIDRLITCRLQSLQTYVTQQLIRAAEIRASANLAATKMSECVLGQSKRVDFCGKGYHLMSFPQSAPHGVVFLHVTYVPAQEKNFTTAPAICHDGKAHFPREGVFVSNGTHWFVTQRNFYEPQIITTDNTFVSGNCDVVIGIVNNTVYDPLQPELDSFKEELDKYFKNHTSPDVDLGDISGINASVVNIQKEIDRLNEVAKNLNESLIDLQELGKYEQYIK

SEQ ID NO: 2404 - protein, 1211 aa, Artificial Sequence; identical to SEQ ID NO: 2359
  SARS-CoV-2/Iceland/247/2020__EPI_ISL_417575 spike protein (1-1211)(F970C_G999C)

SEQ ID NO: 2405 - protein, 1211 aa, Artificial Sequence
  SARS-CoV-2/Iceland/238/2020__EPI_ISL_417566 spike protein (1-1211)(F970C_G999C)
MFVFLVLLPLVSSQCVNLTTRTQLPPAYTNSFTRGVYYPDKVFRSSVLHSTQDLFLPFFSNVTWFHAIHVSGTNGTKRFDNPVLPFNDGVYFASTEKSNIIRGWIFGTTLDSKTQSLLIVNNATNVVIKVCEFQFCNDPFLGVYYHKNNKSWMESEFRVYSSANNCTFEYVSQPFLMDLEGKQGNFKNLREFVFKNIDGYFKIYSKHTPINLVRDLPQGFSALEPLVDLPIGINITRFQTLLALHRSYLTPGDSSSGWTAGAAAYYVGYLQPRTFLLKYNENGTITDAVDCALDPLSETKCTLKSFTVEKGIYQTSNFRVQPTESIVRFPNITNLCPFGEVFNATRFASVYAWNRKRISNCVADYSVLYNSASFSTFKCYGVSPTKLNDLCFTNVYADSFVIRGDEVRQIAPGQTGKIADYNYKLPDDFTGCVIAWNSNNLDSKVGGNYNYLYRLFRKSNLKPFERDISTEIYQAGSTPCNGVEGFNCYFPLQSYGFQPTNGVGYQPYRVVVLSFELLHAPATVCGPKKSTNLVKNKCVNFNFNGLTGTGVLTESNKKFLPFQQFGRDIADTTDAVRDPQTLEILDITPCSFGGVSVITPGTNTSNQVAVLYQGVNCTEVPVAIHADQLTPTWRVYSTGSNVFQTRAGCLIGAEHVNNSYECDIPIGAGICASYQTQTNSPRRARSVASQSIIAYTMSLGAENSVAYSNNSIAIPTNFTISVTTEILPVSMTKTSVDCTMYICGDSTECSNLLLQYGSFCTQLNRALTGIAVEQDKNTQEVFAQVKQIYKTPPIKDFGGFNFSQILPDPSKPSKRSFIEDLLFNKVTLADVGFIKQYGDCLGDIAARDLICAQKFNGLTVLPPLLTDEMIAQYTSALLAGTITSGWTFGAGAALQIPFAMQMAYRFNGIGVTQNVLYENQKLIANQFNSAIGKIQDSLSSTASALGKLQDVVNQNAQALNTLVKQLSSNCGAISSVLNDILSRLDKVEAEVQIDRLITCRLQSLQTYVTQQLIRAAEIRASANLAATKMSECVLGQSKRVDFCGKGYHLMSFPQSAPHGVVFLHVTYVPAQEKNFTTAPAICHDGKAHFPREGVFVSNGTHWFVTQRNFYEPQIITTDNTFVSGNCDVVIGIVNNTVYDPLQPELDSFKEELDKYFKNHTSPDVDLGDISGINASVVNIQKEIDRLNEVAKNLNESLIDLQELGKYEQYIK

SEQ ID NO: 2406 - protein, 1211 aa, Artificial Sequence
  SARS-CoV-2/Greece/16/2020__EPI_ISL_418265 spike protein (1-1211)(F970C_G999C)
MFVFLVLLPLVSSQCVNLTTRTQLPPAYTNSFTRGVYYPDKVFRSSVLHSTQDLFLPFFSNVTWFHAIHVSGTNGTKRFDNPVLPFNDGVYFASTEKSNIIRGWIFGTTLDSKTQSLLIVNNATNVVIKVCEFQFCNDPFLGVYYHKNNKSWMESEFRVYSSANNCTFEYVSQPFLMDLEGKQGNFKNLREFVFKNVDGYFKIYSKHTPINLVRDLPQGFSALEPLVDLPIGINITRFQTLLALHRSYLTPGDSSSGWTAGAAAYYVGYLQPRTFLLKYNENGTITDAVDCALDPLSETKCTLKSFTVEKGIYQTSNFRVQPTESIVRFPNITNLCPFGEVFNATRFASVYAWNRKRISNCVADYSVLYNSASFSTFKCYGVSPTKLNDLCFTNVYADSFVIRGDEVRQIAPGQTGKIADYNYKLPDDFTGCVIAWNSNNLDSKVGGNYNYLYRLFRKSNLKPFERDISTEIYQAGSTPCNGVEGFNCYFPLQSYGFQPTNGVGYQPYRVVVLSFELLHAPATVCGPKKSTNLVKNKCVNFNFNGLTGTGVLTESNKKFLPFQQFGRDIADTTDAVRDPQTLEILDITPCSFGGVSVITPGTNTSNQVAVLYQDVNCTEVPVAIHADQLTPTWRVYSTGSNVFQTRAGCLIGAEHVNNSYECDIPIGAGICASYQTQTNSPRRARSVASQSIIAYTMSLGAENSVAYSNNSIAIPTNFTISVTTEILPVSMTKTSVDCTMYICGDSTECSNLLLQYGSFCTQLNRALTGIAVEQDKNTQEVFAQVKQIYKTPPIKDFGGFNFSQILPDPSKPSKRSFIEDLLFNKVTLADAGFIKQYGDCLGDIAARDLICAQKFNGLTVLPPLLTDEMIAQYTSALLAGTITSGWTFGAGAALQIPFAMQMAYRFNGIGVTQNVLYENQKLIANQFNSAIGKIQDSLSSTASALGKLQDVVNQNAQALNTLVKQLSSNCGAISSVLNDILSRLDKVEAEVQIDRLITCRLQSLQTYVTQQLIRAAEIRASANLAATKMSECVLGQSKRVDFCGKGYHLMSFPQSAPHGVVFLHVTYVPAQEKNFTTAPAICHDGKAHFPREGVFVSNGTHWFVTQRNFYEPQIITTDNTFVSGNCDVVIGIVNNTVYDPLQPELDSFKEELDKYFKNHTSPDVDLGDISGINASVVNIQKEIDRLNEVAKNLNESLIDLQELGKYEQYIK

SEQ ID NO: 2407 - protein, 1211 aa, Artificial Sequence
  SARS-CoV-2/Iceland/319/2020__EPI_ISL_417648 spike protein (1-1211)(F970C_G999C)
MFVFLVLLPLVSSQCVNLTTRTQLPPAYTNSFTRGVYYPDKVFRSSVLHSTQDLFLPFFSNVTWFHAIHVSGTNGTKRFDNPVLPFNDGVYFASTEKSNIIRGWIFGTTLDSKTQSLLIVNNATNVVIKVCEFQFCNDPFLGVYYHKNNKSWMESEFRVYSSANNCTFEYVSQPFLIDLEGKQGNFKNLREFVFKNIDGYFKIYSKHTPINLVRDLPQGFSALEPLVDLPIGINITRFQTLLALHRSYLTPGDSSSGWTAGAAAYYVGYLQPRTFLLKYNENGTITDAVDCALDPLSETKCTLKSFTVEKGIYQTSNFRVQPTESIVRFPNITNLCPFGEVFNATRFASVYAWNRKRISNCVADYSVLYNSASFSTFKCYGVSPTKLNDLCFTNVYADSFVIRGDEVRQIAPGQTGKIADYNYKLPDDFTGCVIAWNSNNLDSKVGGNYNYLYRLFRKSNLKPFERDISTEIYQAGSTPCNGVEGFNCYFPLQSYGFQPTNGVGYQPYRVVVLSFELLHAPATVCGPKKSTNLVKNKCVNFNFNGLTGTGVLTESNKKFLPFQQFGRDIADTTDAVRDPQTLEILDITPCSFGGVSVITPGTNTSNQVAVLYQGVNCTEVPVAIHADQLTPTWRVYSTGSNVFQTRAGCLIGAEHVNNSYECDIPIGAGICASYQTQTNSPRRARSVASQSIIAYTMSLGAENSVAYSNNSIAIPTNFTISVTTEILPVSMTKTSVDCTMYICGDSTECSNLLLQYGSFCTQLNRALTGIAVEQDKNTQEVFAQVKQIYKTPPIKDFGGFNFSQILPDPSKPSKRSFIEDLLFNKVTLADAGFIKQYGDCLGDIAARDLICAQKFNGLTVLPPLLTDEMIAQYTSALLAGTITSGWTFGAGAALQIPFAMQMAYRFNGIGVTQNVLYENQKLIANQFNSAIGKIQDSLSSTASALGKLQDVVNQNAQALNTLVKQLSSNCGAISSVLNDILSRLDKVEAEVQIDRLITCRLQSLQTYVTQQLIRAAEIRASANLAATKMSECVLGQSKRVDFCGKGYHLMSFPQSAPHGVVFLHVTYVPAQEKNFTTAPAICHDGKAHFPREGVFVSNGTHWFVTQRNFYEPQIITTDNTFVSGNCDVVIGIVNNTVYDPLQPELDSFKEELDKYFKNHTSPDVDLGDISGINASVVNIQKEIDRLNEVAKNLNESLIDLQELGKYEQYIK

SEQ ID NO: 2408 - protein, 1211 aa, Artificial Sequence
  SARS-CoV-2/Congo/94/2020__EPI_ISL_417947 spike protein (1-1211)(F970C_G999C)
MFVFLVLLPLVSSQCVNLTTRTQLPPAYTNSFTRGVYYPDKVFRSSVLHSTQDLFLPFFSNVTWFHAIHVSGTNGTKRFDNPVLPFNDGVYFASTEKSNIIRGWIFGTTLDSKTQSLLIVNNATNVVIKVCEFQFCNDPFLGVYYHKNNKSWMESEFRVYSSANNCTFEYVSQPFLMDLEGKQGNFKNLREFVFKNIDGYFKIYSKHTPINLVRDLPQGFSALEPLVDLPIGINITRFQTLLALHRSYLTPGDSSSGWTAGAAAYYVGYLQPRTFLLKYNENGTITDAVDCALDPLSETKCTLKSFTVEKGIYQTSNFRVQPTESIVRFPNITNLCPFGEVFNATRFASVYAWNRKRISNCVADYSVLYNSASFSTFKCYGVSPTKLNDLCFTNVYADSFVIRGDEVRQIAPGQTGKIADYNYKLPDDFTGCVIAWNSNNLDSKVGGNYNYLYRLFRKSNLKPFERDISTEIYQAGSTPCNGVEGFNCYFPLQSYGFQPTNGVGYQPYRVVVLSFELLHAPATVCGPKKSTNLVKNKCVNFNFNGLTGTGVLTESNKKFLPFQQFGRDIADTTDAVRDPQTLEILDITPCSFGGVSVITPGTNTSNQVAVLYQGVNCTEVPVAIHADQLTPTWRVYSTGSNVFQTRAGCLIGAEHVNNSYECDIPIGAGICASYQTQTNSPRRARSVASQSIIAYTMSLGAENSVAYSNNSIAIPTNFTISVTTEILPVSMTKTSVDCTMYICGDSTECSNLLLQYGSFCTQLNRALTGIAVEQDKNTQEVFAQVKQIYKTPPIKDFGGFNFSQILPDPSKPSKRSFIEDILFNKVTLADAGFIKQYGDCLGDIAARDLICAQKFNGLTVLPPLLTDEMIAQYTSALLAGTITSGWTFGAGAALQIPFAMQMAYRFNGIGVTQNVLYENQKLIANQFNSAIGKIQDSLSSTASALGKLQDVVNQNAQALNTLVKQLSSNCGAISSVLNDILSRLDKVEAEVQIDRLITCRLQSLQTYVTQQLIRAAEIRASANLAATKMSECVLGQSKRVDFCGKGYHLMSFPQSAPHGVVFLHVTYVPAQEKNFTTAPAICHDGKAHFPREGVFVSNGTHWFVTQRNFYEPQIITTDNTFVSGNCDVVIGIVNNTVYDPLQPELDSFKEELDKYFKNHTSPDVDLGDISGINASVVNIQKEIDRLNEVAKNLNESLIDLQELGKYEQYIK

SEQ ID NO: 2409 - protein, 1211 aa, Artificial Sequence
  SARS-CoV-2/Congo/158/2020__EPI_ISL_417950 spike protein (1-1211)(F970C_G999C)
MFVFLVLLPLVSSQCVNLTTRTQLPPAYTNSFTRGVYYPDKVFRSSVLHSTQDLFLPFFSNVTWFHAIHVSGTNGTKRFDNPVLPFNDGVYFASTEKSNIIRGWIFGTTLDSKTQSLLIVNNATNVVIKVCEFQFCNDPFLGVYYHKNNKSWMESEFRVYSSANNCTFEYVSQPFLMDLEGKQGNFKNLREFVFKNIDGYFKIYSKHTPINLVRDLPQGFSALEPLVDLPIGINITRFQTLLALHRSYLTPGDSSSGWTAGAAAYYVGYLQPRTFLLKYNENGTITDAVDCALDPLSETKCTLKSFTVEKGIYQTSNFRVQPTESIVRFPNITNLCPFGEVFNATRFASVYAWNRKRISNCVADYSVLYNSASFSTFKCYGVSPTKLNDLCFTNVYADSFVIRGDEVRQIAPGQTGKIADYNYKLPDDFTGCVIAWNSNNLDSKVGGNYNYLYRLFRKSNLKPFERDISTEIYQAGSTPCNGVEGFNCYFPLQSYGFQPTNGVGYQPYRVVVLSFELLHAPATVCGPKKSTNLVKNKCVNFNFNGLTGTGVLTESNKKFLPFQQFGRDIADTTDAVRDPQTLEILDITPCSFGGVSVITPGTNTSNQVAVLYQDVNCTEVPVAIHADQLTPTWRVYSTGSNVFQTRAGCLIGAEHVNNSYECDIPIGAGICASYQTQTNSPRRARSVASQSIIAYTMSLGAENSVAYSNNSIAIPTNFTISVTTEILPVSMTKTSVDCTMYICGDSTECSNLLLQYGSFCTQLNRALTGIAVEQDKNTQEVFAQVKQIYKTPPIKDFGGFNFSQILPDPSKPSKRSFIEDLLFNKVTLADAGFIKQYGDCLGDIAARDLICAQKFNGLTVLPPLLTDEMIAQYTSALLAGTITSGWTFGAGAALQIPFAMQMAYRFNGIGVTQNVLYENQKLIANQFNSAIGKIQDSLSSTASALGKLQDVVNQNAQALNTLVKQLSSNCGAISSVLNDILSRLDKVEAEVQIDRLITCRLQSLQTYVTQQLIRAAEIRASANLAATKMSECVLGQSKRVDFCGKGYHLMSFPQSAPHGVVFLHVTYVPAQEKNFTTAPAICHDGKAHFPREGVFVSNGTHWFVTQRNFYEPQIITTDNTFLSGNCDVVIGIVNNTVYDPLQPELDSFKEELDKYFKNHTSPDVDLGDISGINASVVNIQKEIDRLNEVAKNLNESLIDLQELGKYEQYIK

SEQ ID NO: 2410 - protein, 1211 aa, Artificial Sequence
  SARS-CoV-2/USA/UT-00034/2020__EPI_ISL_417977 spike protein (1-1211)(F970C_G999C)
MFVFLVLLPLVSSQCVNLTTRTQLPPAYTNSFTRGVYYPDKVFRSSVLHSTQDLFLPFFSNVTWFHAIHVSGTNGTKRFDNPVLPFNDGVYFASTEKSNIIRGWIFGTTLDSKTQSLLIVNNATNVVIKVCEFQFCNDPFLGVYYYKNNKSWMESEFRVYSSANNCTFEYVSQPFLMDLEGKQGNFKNLREFVFKNIDGYFKIYSKHTPINLVRDLPQGFSALEPLVDLPIGINITRFQTLLALHRSYLTPGDSSSGWTAGAAAYYVGYLQPRTFLLKYNENGTITDAVDCALDPLSETKCTLKSFTVEKGIYQTSNFRVQPTESIVRFPNITNLCPFGEVFNATRFASVYAWNRKRISNCVADYSVLYNSASFSTFKCYGVSPTKLNDLCFTNVYADSFVIRGDEVRQIAPGQTGKIADYNYKLPDDFTGCVIAWNSNNLDSKVGGNYNYLYRLFRKSNLKPFERDISTEIYQAGSTPCNGVEGFNCYFPLQSYGFQPTNGVGYQPYRVVVLSFELLHAPATVCGPKKSTNLVKNKCVNFNFNGLTGTGVLTESNKKFLPFQQFGRDIADTTDAVRDPQTLEILDITPCSFGGVSVITPGTNTSNQVAVLYQGVNCTEVPVAIHADQLTPTWRVYSTGSNVFQTRAGCLIGAEHVNNSYECDIPIGAGICASYQTQTNSPRRARSVASQSIIAYTMSLGAENSVAYSNNSIAIPTNFTISVTTEILPVSMTKTSVDCTMYICGDSTECSNLLLQYGSFCTQLNRALTGIAVEQDKNTQEVFAQVKQIYKTPPIKDFGGFNFSQILPDPSKPSKRSFIEDLLFNKVTLADAGFIKQYGDCLGDIAARDLICAQKFNGLTVLPPLLTDEMIAQYTSALLAGTITSGWTFGAGAALQIPFAMQMAYRFNGIGVTQNVLYENQKLIANQFNSAIGKIQDSLSSTASALGKLQDVVNQNAQALNTLVKQLSSNCGAISSVLNDILSRLDKVEAEVQIDRLITCRLQSLQTYVTQQLIRAAEIRASANLAATKMSECVLGQSKRVDFCGKGYHLMSFPQSAPHGVVFLHVTYVPAQEKNFTTAPAICHDGKAHFPREGVFVSNGTHWFVTQRNFYEPQIITTDNTFVSGNCDVVIGIVNNTVYDPLQPELDSFKEELDKYFKNHTSPDVDLGDISGINASVVNIQKEIDRLNEVAKNLNESLIDLQELGKYEQYIK

SEQ ID NO: 2411 - protein, 1211 aa, Artificial Sequence
  SARS-CoV-2/USA/UT-00033/2020__EPI_ISL_417976 spike protein (1-1211)(F970C_G999C)
MFVFLVLLPLVSSQCVNLTTRTQLPPAYTNSFTRGVYYPDKVFRSSVLHSTQDLFLPFFSNVTWFHAIHVSGTNGTKRFDNPVLPFNDGVYFASTEKSNIIRGWIFGTTLDSKTQSLLIVNNATNVVIKVCEFQFCNDPFLGVYYHKNNKSWMESEFRVYSSANNCTFEYVSQPFLMDLEGKQGNFKNLREFVFKNIDGYFKIYSKHTPINLVRDLPQGFSALEPLVDLPIGINITRFQTLLALHRSYLTPGDSSSGLTAGAAAYYVGYLQPRTFLLKYNENGTITDAVDCALDPLSETKCTLKSFTVEKGIYQTSNFRVQPTESIVRFPNITNLCPFGEVFNATRFASVYAWNRKRISNCVADYSVLYNSASFSTFKCYGVSPTKLNDLCFTNVYADSFVIRGDEVRQIAPGQTGKIADYNYKLPDDFTGCVIAWNSNNLDSKVGGNYNYLYRLFRKSNLKPFERDISTEIYQAGSTPCNGVEGFNCYFPLQSYGFQPTNGVGYQPYRVVVLSFELLHAPATVCGPKKSTNLVKNKCVNFNFNGLTGTGVLTESNKKFLPFQQFGRDIADTTDAVRDPQTLEILDITPCSFGGVSVITPGTNTSNQVAVLYQGVNCTEVPVAIHADQLTPTWRVYSTGSNVFQTRAGCLIGAEHVNNSYECDIPIGAGICASYQTQTNSPRRARSVASQSIIAYTMSLGAENSVAYSNNSIAIPTNFTISVTTEILPVSMTKTSVDCTMYICGDSTECSNLLLQYGSFCTQLNRALTGIAVEQDKNTQEVFAQVKQIYKTPPIKDFGGFNFSQILPDPSKPSKRSFIEDLLFNKVTLADAGFIKQYGDCLGDIAARDLICAQKFNGLTVLPPLLTDEMIAQYTSALLAGTITSGWTFGAGAALQIPFAMQMAYRFNGIGVTQNVLYENQKLIANQFNSAIGKIQDSLSSTASALGKLQDVVNQNAQALNTLVKQLSSNCGAISSVLNDILSRLDKVEAEVQIDRLITCRLQSLQTYVTQQLIRAAEIRASANLAATKMSECVLGQSKRVDFCGKGYHLMSFPQSAPHGVVFLHVTYVPAQEKNFTTAPAICHDGKAHFPREGVFVSNGTHWFVTQRNFYEPQIITTDNTFVSGNCDVVIGIVNNTVYDPLQPELDSFKEELDKYFKNHTSPDVDLGDISGINASVVNIQKEIDRLNEVAKNLNESLIDLQELGKYEQYIK

SEQ ID NO: 2412 - protein, 1211 aa, Artificial Sequence
  SARS-CoV-2/USA/WI-13/2020__EPI_ISL_417516 spike protein (1-1211)(F970C_G999C)
MFVFLVLLPLVSSQCVNLTTRTQLPPAYTNSFTRGVYYPDKVFRSSVLHSTQDLFLPFFSNVTWFHAIHVSGTNGTKRFDNPVLPFNDGVYFASTEKSNIIRGWIFGTTLDSKTQSLLIVNNATNVVIKVCEFQFCNDPFLGVYYHKNNKSWMESEFRVYSSANNCTFEYVSQPFLMDLEGKQGNFKNLREFVFKNIDGYFKIYSKHTPINLVRDLPQGFSALEPLVDLPIGINITRFQTLLALHRSYLTPGDSSSGWTAGAAAYYVGYLQPRTFLLKYNENGTITDAVDCALDPLSETKCTLKSFTVEKGIYQTSNFRVLPTESIVRFPNITNLCPFGEVFNATRFASVYAWNRKRISNCVADYSVLYNSASFSTFKCYGVSPTKLNDLCFTNVYADSFVIRGDEVRQIAPGQTGKIADYNYKLPDDFTGCVIAWNSNNLDSKVGGNYNYLYRLFRKSNLKPFERDISTEIYQAGSTPCNGVEGFNCYFPLQSYGFQPTNGVGYQPYRVVVLSFELLHAPATVCGPKKSTNLVKNKCVNFNFNGLTGTGVLTESNKKFLPFQQFGRDIADTTDAVRDPQTLEILDITPCSFGGVSVITPGTNTSNQVAVLYQGVNCTEVPVAIHADQLTPTWRVYSTGSNVFQTRAGCLIGAEHVNNSYECDIPIGAGICASYQTQTNSPRRARSVASQSIIAYTMSLGAENSVAYSNNSIAIPTNFTISVTTEILPVSMTKTSVDCTMYICGDSTECSNLLLQYGSFCTQLNRALTGIAVEQDKNTQEVFAQVKQIYKTPPIKDFGGFNFSQILPDPSKPSKRSFIEDLLFNKVTLADAGFIKQYGDCLGDIAARDLICAQKFNGLTVLPPLLTDEMIAQYTSALLAGTITSGWTFGAGAALQIPFAMQMAYRFNGIGVTQNVLYENQKLIANQFNSAIGKIQDSLSSTASALGKLQDVVNQNAQALNTLVKQLSSNCGAISSVLNDILSRLDKVEAEVQIDRLITCRLQSLQTYVTQQLIRAAEIRASANLAATKMSECVLGQSKRVDFCGKGYHLMSFPQSAPHGVVFLHVTYVPAQEKNFTTAPAICHDGKAHFPREGVFVSNGTHWFVTQRNFYEPQIITTDNTFVSGNCDVVIGIVNNTVYDPLQPELDSFKEELDKYFKNHTSPDVDLGDISGINASVVNIQKEIDRLNEVAKNLNESLIDLQELGKYEQYIK

SEQ ID NO: 2413 - protein, 1210 aa, Artificial Sequence
  SARS-CoV-2/India/1-27/2020__EPI_ISL_413522 spike protein (1-1210)(F969C_G998C)
MFVFLVLLPLVSSQCVNLTTRTQLPPAYTNSFTRGVYYPDKVFRSSVLHSTQDLFLPFFSNVTWFHAIHVSGTNGTKRFDNPVLPFNDGVYFASTEKSNIIRGWIFGTTLDSKTQSLLIVNNATNVVIKVCEFQFCNDPFLGVYHKNNKSWMESEFRVYSSANNCTFEYVSQPFLMDLEGKQGNFKNLREFVFKNIDGYFKIYSKHTPINLVRDLPQGFSALEPLVDLPIGINITRFQTLLALHRSYLTPGDSSSGWTAGAAAYYVGYLQPRTFLLKYNENGTITDAVDCALDPLSETKCTLKSFTVEKGIYQTSNFRVQPTESIVRFPNITNLCPFGEVFNATRFASVYAWNRKRISNCVADYSVLYNSASFSTFKCYGVSPTKLNDLCFTNVYADSFVIRGDEVIQIAPGQTGKIADYNYKLPDDFTGCVIAWNSNNLDSKVGGNYNYLYRLFRKSNLKPFERDISTEIYQAGSTPCNGVEGFNCYFPLQSYGFQPTNGVGYQPYRVVVLSFELLHAPATVCGPKKSTNLVKNKCVNFNFNGLTGTGVLTESNKKFLPFQQFGRDIADTTDAVRDPQTLEILDITPCSFGGVSVITPGTNTSNQVAVLYQDVNCTEVPVAIHADQLTPTWRVYSTGSNVFQTRAGCLIGAEHVNNSYECDIPIGAGICASYQTQTNSPRRARSVASQSIIAYTMSLGAENSVAYSNNSIAIPTNFTISVTTEILPVSMTKTSVDCTMYICGDSTECSNLLLQYGSFCTQLNRALTGIAVEQDKNTQEVFAQVKQIYKTPPIKDFGGFNFSQILPDPSKPSKRSFIEDLLFNKVTLADAGFIKQYGDCLGDIAARDLICAQKFNGLTVLPPLLTDEMIAQYTSALLAGTITSGWTFGAGAALQIPFAMQMAYRFNGIGVTQNVLYENQKLIANQFNSAIGKIQDSLSSTASALGKLQDVVNQNAQALNTLVKQLSSNCGAISSVLNDILSRLDKVEAEVQIDRLITCRLQSLQTYVTQQLIRAAEIRASANLAATKMSECVLGQSKRVDFCGKGYHLMSFPQSAPHGVVFLHVTYVPAQEKNFTTAPAICHDGKAHFPREGVFVSNGTHWFVTQRNFYEPQIITTDNTFVSGNCDVVIGIVNNTVYDPLQPELDSFKEELDKYFKNHTSPDVDLGDISGINASVVNIQKEIDRLNEVAKNLNESLIDLQELGKYEQYIK

SEQ ID NO: 2414 - protein, 1205 aa, Artificial Sequence
  SARS-CoV-2/pangolin/Guangxi/P4L/2017__EPI_ISL_410538 spike protein (1-1205)(F964C_G993C)
MFVFLFVLPLVSSQCVNLTTRTGIPPGYTNSSTRGVYYPDKVFRSSILHLTQDLFLPFFSNVTWFNTINYQGGFKKFDNPVLPFNDGVYFASTEKSNIIRGWIFGTTLDARTQSLLIVNNATNVVIKVCEFQFCTDPFLGVYYHNNNKTWVENEFRVYSSANNCTFEYISQPFLMDLEGKQGNFKNLREFVFKNVDGYFKIYSKHTPIDLVRDLPRGFAALEPLVDLPIGINITRFQTLLALHRSYLTPGNLESGWTTGAAAYYVGYLQQRTFLLSYNQNGTITDAVDCSLDPLSETKCTLKSLTVEKGIYQTSNFRVQPTISIVRFPNITNLCPFGEVFNASKFASVYAWNRKRISNCVADYSVLYNSTSFSTFKCYGVSPTKLNDLCFTNVYADSFVVKGDEVRQIAPGQTGVIADYNYKLPDDFTGCVIAWNSVKQDALTGGNYGYLYRLFRKSKLKPFERDISTEIYQAGSTPCNGQVGLNCYYPLERYGFHPTTGVNYQPFRVVVLSFELLNGPATVCGPKLSTTLVKDKCVNFNFNGLTGTGVLTTSKKQFLPFQQFGRDISDTTDAVRDPQTLEILDITPCSFGGVSVITPGTNTSNQVAVLYQDVNCTEVPMAIHAEQLTPAWRVYSAGANVFQTRAGCLVGAEHVNNSYECDIPVGAGICASYHSMSSLRSVNQRSIIAYTMSLGAENSVAYSNNSIAIPTNFTISVTTEILPVSMTKTSVDCTMYICGDSIECSNLLLQYGSFCTQLNRALTGIAVEQDKNTQEVFAQVKQIYKTPPIKDFGGFNFSQILPDPSKPSKRSFIEDLLFNKVTLADAGFIKQYGDCLGDIAARDLICAQKFNGLTVLPPLLTDEMIAQYTSALLAGTITSGWTFGAGAALQIPFAMQMAYRFNGIGVTQNVLYENQKLIANQFNSAIGKIQDSLSSTASALGKLQDVVNQNAQALNTLVKQLSSNCGAISSVLNDILSRLDKVEAEVQIDRLITCRLQSLQTYVTQQLIRAAEIRASANLAATKMSECVLGQSKRVDFCGKGYHLMSFPQSAPHGVVFLHVTYVPAQEKNFTTAPAICHEGKAHFPREGVFVSNGTHWFITQRNFYEPQIITTDNTFVSGSCDVVIGIVNNTVYDPLQPELDSFKEELDKYFKNHTSPDVDLGDISGINASVVNIQKEIDRLNEVAKNLNESPIDLQELGKYEQYIK

SEQ ID NO: 2415 - protein, 1205 aa, Artificial Sequence
  SARS-CoV-2/pangolin/Guangxi/P5L/2017__EPI_ISL_410540 spike protein (1-1205)(F964C_G993C)
MFVFLFVLPLVSSQCVNLTTRTGIPPGYTNSSTRGVYYPDKVFRSSILHLTQDLFLPFFSNVTWFNTINYQGGFKKFDNPVLPFNDGVYFASTEKSNIIRGWIFGTTLDARTQSLLIVNNATNVVIKVCEFQFCTDPFLGVYYHNNNKTWVENEFRVYSSANNCTFEYISQPFLMDLEGKQGNFKNLREFVFKNVDGYFKIYSKHTPIDLVRDLPRGFAALEPLVDLPIGINITRFQTLLALHRSYLTPGKLESGWTTGAAAYYVGYLQQRTFLLSYNQNGTITDAVDCSLDPLSETKCTLKSLTVEKGIYQTSNFRVQPTISIVRFPNITNLCPFGEVFNASKFASVYAWNRKRISNCVADYSVLYNSTSFSTFKCYGVSPTKLNDLCFTNVYADSFVVKGDEVRQIAPGQTGVIADYNYKLPDDFTGCVIAWNSVKQDALTGGNYGYLYRLFRKSKLKPFERDISTEIYQAGSTPCNGQVGLNCYYPLERYGFHPTTGVNYQPFRVVVLSFELLNGPATVCGPKLSTTLVKDKCVNFNFNGLTGTGVLTTSKKQFLPFQQFGRDISDTTDAVRDPQTLEILDITPCSFGGVSVITPGTNTSNQVAVLYQDVNCTEVPMAIHAEQLTPAWRVYSAGANVFQTRAGCLVGAEHVNNSYECDIPVGAGICASYHSMSSFRSVNQRSIIAYTMSLGAENSVAYSNNSIAIPTNFTISVTTEILPVSMTKTSVDCTMYICGDSIECSNLLLQYGSFCTQLNRALTGIAVEQDKNTQEVFAQVKQIYKTPPIKDFGGFNFSQILPDPSKPSKRSFIEDLLFNKVTLADAGFIKQYGDCLGDIAARDLICAQKFNGLTVLPPLLTDEMIAQYTSALLAGTITSGWTFGAGAALQIPFAMQMAYRFNGIGVTQNVLYENQKLIANQFNSAIGKIQDSLSSTASALGKLQDVVNQNAQALNTLVKQLSSNCGAISSVLNDILSRLDKVEAEVQIDRLITCRLQSLQTYVTQQLIRAAEIRASANLAATKMSECVLGQSKRVDFCGKGYHLMSFPQSAPHGVVFLHVTYVPAQEKNFTTAPAICHEGKAHFPREGVFVSNGTHWFITQRNFYEPQIITTDNTFVSGSCDVVIGIVNNTVYDPLQPELDSFKEELDKYFKNHTSPDVDLGDISGINASVVNIQKEIDRLNEVAKNLNESLIDLQELGKYEQYIK

SEQ ID NO: 2416 - protein, 1205 aa, Artificial Sequence
  SARS-CoV-2/pangolin/Guangxi/P5E/2017__EPI_ISL_410541 spike protein (1-1205)(F964C_G993C)
MFVFLFVLPLVSSQCVNLTTRTGIPPGYTNSSTRGVYYPDKVFRSSILHLTQDLFLPFFSNVTWFNTITYQGGSKKFDNPVLPFNDGVYFASTEKSNIIRGWIFGTTLDARTQSLLIVNNATNVVIKVCEFQFCTDPFLGVYYHNNNKTWVENEFRVYSSANNCTFEYISQPFLMDLEGKQGNFKNLREFVFKNVDGYFKIYSKHTPIDLVRDLPRGFAALEPLVDLPIGINITRFQTLLALHRSYLTPGKLESGWTTGAAAYYVGYLQQRTFLLSYNQNGTITDAVDCSLDPLSETKCTLKSLTVEKGIYQTSNFRVQPTISIVRFPNITNLCPFGEVFNASKFASVYAWNRKRISNCVADYSVLYNSTSFSTFKCYGVSPTKLNDLCFTNVYADSFVVKGDEVRQIAPGQTGVIADYNYKLPDDFTGCVIAWNSVKQDALTGDNYGYLYRLFRKSKLKPFERDISTEIYQAGSTPCNGQVGLNCYYPLERYGFHPTTGVNYQPFRVVVLSFELLNGPATVCGPKLSTTLVKDKCVNFNFNGLTGTGVLTTSKKQFLPFQQFGRDISDTTDAVRDPQTLEILDITPCSFGGVSVITPGTNTSNQVAVLYQDVNCTEVPMAIHAEQLTPAWRVYSAGANVFQTRAGCLVGAEHVNNSYECDIPVGAGICASYHSMSSFRSVNQRSIIAYTMSLGAENSVAYSNNSIAIPTNFTISVTTEILPVSMTKTSVDCTMYICGDSIECSNLLLQYGSFCTQLNRALTGIAVEQDKNTQEVFAQVKQIYKTPPIKDFGGFNFSQILPDPSKPSKRSFIEDLLFNKVTLADAGFIKQYGDCLGDIAARDLICAQKFNGLTVLPPLLTDEMIAQYTSALLAGTITSGWTFGAGAALQIPFAMQMAYRFNGIGVTQNVLYENQKLIANQFNSAIGKIQDSLSSTASALGKLQDVVNQNAQALNTLVKQLSSNCGAISSVLNDILSRLDKVEAEVQIDRLITCRLQSLQTYVTQQLIRAAEIRASANLAATKMSECVLGQSKRVDFCGKGYHLMSFPQSAPHGVVFLHVTYVPAQEKNFTTAPAICHEGKAHFPREGVFVSNGTHWFITQRNFYEPQIITTDNTFVSGSCDVVIGIVNNTVYDPLQPELDSFKEELDKYFKNHTSPDVDLGDISGINASVVNIQKEIDRLNEVAKNLNESLIDLQELGKYEQYIK

SEQ ID NO: 2417 - protein, 1203 aa, Artificial Sequence
  SARS-CoV-2/pangolin/Guangxi/P1E/2017__EPI_ISL_410539 spike protein (1-1203)(F962C_G991C)
MFVFLFVLPLVSSQCVNLTTRTGIQPGYTNSSTRGVYYPDKVFRSSILHLTQDLFLPFFSNVTWFNTINYQGGFKKFDNPVLPFNDGVYFASTEKSNIIRGWIFGTTLDARTQSLLIVNNATNVVIKVCEFQFCTDPFLGVYYHNNNKTWVENEFRVYSSANNCTFEYISQPFLMDLEGKQGNFKNLREFVFKNVDGYFKIYSKHTPIDLVRDLPRGFAALEPLVDLPIGINITRFQTLLALHRSYLTPGKLESGWTTGAAAYYVGYLQQRTFLLSYNQNGTITDAVDCSLDPLSETKCTLKSLTVEKGIYQTSNFRVQPTISIVRFPNITNLCPFGEVFNASKFASVYAWNRKRISNCVADYSVLYNSTSFSTFKCYGVSPTKLNDLCFTNVYADSFVVKGDEVRQIAPGQTGVIADYNYKLPDDFTGCVIAWNSVKQDALTGGNYLYRLFRKSKLKPFERDISTEIYQAGSTPCNGQVGLNCYYPLERYGFHPTTGVNYQPFRVVVLSFELLNGPATVCGPKLSTTLVKDKCVNFNFNGLTGTGVLTTSKKQFLPFQQFGRDISDTTDAVRDPQTLEILDITPCSFGGVSVITPGTNTSNQVAVLYQDVNCTEVPMAIHAEQLTPAWRVYSAGANVFQTRAGCLVGAEHVNNSYECDIPVGAGICASYHSMSSLRSVNQRSIIAYTMSLGAENSVAYSNNSIAIPTNFTISVTTEILPVSMTKTSVDCTMYICGDSIECSNLLLQYGSFCTQLNRALTGIAVEQDKNTQEVFAQVKQIYKTPPIKDFGGFNFSQILPDPSKPSKRSFIEDLLFNKVTLADAGFIKQYGDCLGDIAARDLICAQKFNGLTVLPPLLTDEMIAQYTSALLAGTITSGWTFGAGAALQIPFAMQMAYRFNGIGVTQNVLYENQKLIANQFNSAIGKIQDSLSSTASALGKLQDVVNQNAQALNTLVKQLSSNCGAISSVLNDILSRLDKVEAEVQIDRLITCRLQSLQTYVTQQLIRAAEIRASANLAATKMSECVLGQSKRVDFCGKGYHLMSFPQSAPHGVVFLHVTYVPAQEKNFTTAPAICHEGKAHFPREGVFVSNGTHWFITQRNFYEPQIITTDNTFVSGSCDVVIGIVNNTVYDPLQPELDSFKEELDKYFKNHTSPDVDLGDISGINASVVNIQKEIDRLNEVAKNLNESLIDLQELGKYEQYIK

SEQ ID NO: 2418 - protein, 1211 aa, Artificial Sequence
  SARS-CoV-2/Wuhan/WIV05/2019__EPI_ISL_402128 spike protein (1-1211)(A972C_R995C)
MFVFLVLLPLVSSQCVNLTTRTQLPPAYTNSFTRGVYYPDKVFRSSVLHSTQDLFLPFFSNVTWFHAIHVSGTNGTKRFDNPVLPFNDGVYFASTEKSNIIRGWIFGTTLDSKTQSLLIVNNATNVVIKVCEFQFCNDPFLGVYYHKNNKSWMESEFRVYSSANNCTFEYVSQPFLMDLEGKQGNFKNLREFVFKNIDGYFKIYSKHTPINLVRDLPQGFSALEPLVDLPIGINITRFQTLLALHRSYLTPGDSSSGWTAGAAAYYVGYLQPRTFLLKYNENGTITDAVDCALDPLSETKCTLKSFTVEKGIYQTSNFRVQPTESIVRFPNITNLCPFGEVFNATRFASVYAWNRKRISNCVADYSVLYNSASFSTFKCYGVSPTKLNDLCFTNVYADSFVIRGDEVRQIAPGQTGKIADYNYKLPDDFTGCVIAWNSNNLDSKVGGNYNYLYRLFRKSNLKPFERDISTEIYQAGSTPCNGVEGFNCYFPLQSYGFQPTNGVGYQPYRVVVLSFELLHAPATVCGPKKSTNLVKNKCVNFNFNGLTGTGVLTESNKKFLPFQQFGRDIADTTDAVRDPQTLEILDITPCSFGGVSVITPGTNTSNQVAVLYQDVNCTEVPVAIHADQLTPTWRVYSTGSNVFQTRAGCLIGAEHVNNSYECDIPIGAGICASYQTQTNSPRRARSVASQSIIAYTMSLGAENSVAYSNNSIAIPTNFTISVTTEILPVSMTKTSVDCTMYICGDSTECSNLLLQYGSFCTQLNRALTGIAVEQDKNTQEVFAQVKQIYKTPPIKDFGGFNFSQILPDPSKPSKRSFIEDLLFNKVTLADAGFIKQYGDCLGDIAARDLICAQKFNGLTVLPPLLTDEMIAQYTSALLAGTITSGWTFGAGAALQIPFAMQMAYRFNGIGVTQNVLYENQKLIANQFNSAIGKIQDSLSSTASALGKLQDVVNQNAQALNTLVKQLSSNFGCISSVLNDILSRLDKVEAEVQIDCLITGRLQSLQTYVTQQLIRAAEIRASANLAATKMSECVLGQSKRVDFCGKGYHLMSFPQSAPHGVVFLHVTYVPAQEKNFTTAPAICHDGKAHFPREGVFVSNGTHWFVTQRNFYEPQIITTDNTFVSGNCDVVIGIVNNTVYDPLQPELDSFKEELDKYFKNHTSPDVDLGDISGINASVVNIQKEIDRLNEVAKNLNESLIDLQELGKYEQYIK

SEQ ID NO: 2419 - protein, 1207 aa, Artificial Sequence
  SARS-CoV-2/bat/Yunnan/RaTG13/2013__EPI_ISL_402131 spike protein (1-1207)(A968C_R991C)
MFVFLVLLPLVSSQCVNLTTRTQLPPAYTNSSTRGVYYPDKVFRSSVLHLTQDLFLPFFSNVTWFHAIHVSGTNGIKRFDNPVLPFNDGVYFASTEKSNIIRGWIFGTTLDSKTQSLLIVNNATNVVIKVCEFQFCNDPFLGVYYHKNNKSWMESEFRVYSSANNCTFEYVSQPFLMDLEGKQGNFKNLREFVFKNIDGYFKIYSKHTPINLVRDLPPGFSALEPLVDLPIGINITRFQTLLALHRSYLTPGDSSSGWTAGAAAYYVGYLQPRTFLLKYNENGTITDAVDCALDPLSETKCTLKSFTVEKGIYQTSNFRVQPTDSIVRFPNITNLCPFGEVFNATTFASVYAWNRKRISNCVADYSVLYNSTSFSTFKCYGVSPTKLNDLCFTNVYADSFVITGDEVRQIAPGQTGKIADYNYKLPDDFTGCVIAWNSKHIDAKEGGNFNYLYRLFRKANLKPFERDISTEIYQAGSKPCNGQTGLNCYYPLYRYGFYPTDGVGHQPYRVVVLSFELLNAPATVCGPKKSTNLVKNKCVNFNFNGLTGTGVLTESNKKFLPFQQFGRDIADTTDAVRDPQTLEILDITPCSFGGVSVITPGTNASNQVAVLYQDVNCTEVPVAIHADQLTPTWRVYSTGSNVFQTRAGCLIGAEHVNNSYECDIPIGAGICASYQTQTNSRSVASQSIIAYTMSLGAENSVAYSNNSIAIPTNFTISVTTEILPVSMTKTSVDCTMYICGDSTECSNLLLQYGSFCTQLNRALTGIAVEQDKNTQEVFAQVKQIYKTPPIKDFGGFNFSQILPDPSKPSKRSFIEDLLFNKVTLADAGFIKQYGDCLGDIAARDLICAQKFNGLTVLPPLLTDEMIAQYTSALLAGTITSGWTFGAGAALQIPFAMQMAYRFNGIGVTQNVLYENQKLIANQFNSAIGKIQDSLSSTASALGKLQDVVNQNAQALNTLVKQLSSNFGCISSVLNDILSRLDKVEAEVQIDCLITGRLQSLQTYVTQQLIRAAEIRASANLAATKMSECVLGQSKRVDFCGKGYHLMSFPQSAPHGVVFLHVTYVPAQEKNFTTAPAICHDGKAHFPREGVFVSNGTHWFVTQRNFYEPQIITTDNTFVSGSCDVVIGIVNNTVYDPLQPELDSFKEELDKYFKNHTSPDVDLGDISGINASVVNIQKEIDRLNEVAKNLNESLIDLQELGKYEQYIK

SEQ ID NO: 2420 - protein, 1211 aa, Artificial Sequence
  SARS-CoV-2/Wuhan/HBCDC-HB-01/2019__EPI_ISL_402132 spike protein (1-1211)(A972C_R995C)
MFVFLVLLPLVSSQCVNLTTRTQLPPAYTNSITRGVYYPDKVFRSSVLHSTQDLFLPFFSNVTWFHAIHVSGTNGTKRFDNPVLPFNDGVYFASTEKSNIIRGWIFGTTLDSKTQSLLIVNNATNVVIKVCEFQFCNDPFLGVYYHKNNKSWMESEFRVYSSANNCTFEYVSQPFLMDLEGKQGNFKNLREFVFKNIDGYFKIYSKHTPINLVRDLPQGFSALEPLVDLPIGINITRFQTLLALHRSYLTPGDSSSGWTAGAAAYYVGYLQPRTFLLKYNENGTITDAVDCALDPLSETKCTLKSFTVEKGIYQTSNFRVQPTESIVRFPNITNLCPFGEVFNATRFASVYAWNRKRISNCVADYSVLYNSASFSTFKCYGVSPTKLNDLCFTNVYADSFVIRGDEVRQIAPGQTGKIADYNYKLPDDFTGCVIAWNSNNLDSKVGGNYNYLYRLFRKSNLKPFERDISTEIYQAGSTPCNGVEGFNCYFPLQSYGFQPTNGVGYQPYRVVVLSFELLHAPATVCGPKKSTNLVKNKCVNFNFNGLTGTGVLTESNKKFLPFQQFGRDIADTTDAVRDPQTLEILDITPCSFGGVSVITPGTNTSNQVAVLYQDVNCTEVPVAIHADQLTPTWRVYSTGSNVFQTRAGCLIGAEHVNNSYECDIPIGAGICASYQTQTNSPRRARSVASQSIIAYTMSLGAENSVAYSNNSIAIPTNFTISVTTEILPVSMTKTSVDCTMYICGDSTECSNLLLQYGSFCTQLNRALTGIAVEQDKNTQEVFAQVKQIYKTPPIKDFGGFNFSQILPDPSKPSKRSFIEDLLFNKVTLADAGFIKQYGDCLGDIAARDLICAQKFNGLTVLPPLLTDEMIAQYTSALLAGTITSGWTFGAGAALQIPFAMQMAYRFNGIGVTQNVLYENQKLIANQFNSAIGKIQDSLSSTASALGKLQDVVNQNAQALNTLVKQLSSNFGCISSVLNDILSRLDKVEAEVQIDCLITGRLQSLQTYVTQQLIRAAEIRASANLAATKMSECVLGQSKRVDFCGKGYHLMSFPQSAPHGVVFLHVTYVPAQEKNFTTAPAICHDGKAHFPREGVFVSNGTHWFVTQRNFYEPQIITTDNTFVSGNCDVVIGIVNNTVYDPLQPELDSFKEELDKYFKNHTSPDVDLGDISGINASVVNIQKEIDRLNEVAKNLNESLIDLQELGKYEQYIK

SEQ ID NO: 2421 - protein, 1211 aa, Artificial Sequence
  SARS-CoV-2/Guangdong/20SF028/2020__EPI_ISL_403936 spike protein (1-1211)(A972C_R995C)
MFVFLVLLPLVSSQCVNLTTRTQLPPAYTNSFTRGVYYPDKVFRSSVLYSTQDLFLPFFSNVTWFHAIHVSGTNGTKRFDNPVLPFNDGVYFASTEKSNIIRGWIFGTTLDSKTQSLLIVNNATNVVIKVCEFQFCNDPFLGVYYHKNNKSWMESEFRVYSSANNCTFEYVSQPFLMDLEGKQGNFKNLREFVFKNIDGYFKIYSKHTPINLVRDLPQGFSALEPLVDLPIGINITRFQTLLALHRSYLTPGDSSSGWTAGAAAYYVGYLQPRTFLLKYNENGTITDAVDCALDPLSETKCTLKSFTVEKGIYQTSNFRVQPTESIVRFPNITNLCPFGEVFNATRFASVYAWNRKRISNCVADYSVLYNSASFSTFKCYGVSPTKLNDLCFTNVYADSFVIRGDEVRQIAPGQTGKIADYNYKLPDDFTGCVIAWNSNNLDSKVGGNYNYLYRLFRKSNLKPFERDISTEIYQAGSTPCNGVEGFNCYFPLQSYGFQPTNGVGYQPYRVVVLSFELLHAPATVCGPKKSTNLVKNKCVNFNFNGLTGTGVLTESNKKFLPFQQFGRDIADTTDAVRDPQTLEILDITPCSFGGVSVITPGTNTSNQVAVLYQDVNCTEVPVAIHADQLTPTWRVYSTGSNVFQTRAGCLIGAEHVNNSYECDIPIGAGICASYQTQTNSPRRARSVASQSIIAYTMSLGAENSVAYSNNSIAIPTNFTISVTTEILPVSMTKTSVDCTMYICGDSTECSNLLLQYGSFCTQLNRALTGIAVEQDKNTQEVFAQVKQIYKTPPIKDFGGFNFSQILPDPSKPSKRSFIEDLLFNKVTLADAGFIKQYGDCLGDIAARDLICAQKFNGLTVLPPLLTDEMIAQYTSALLAGTITSGWTFGAGAALQIPFAMQMAYRFNGIGVTQNVLYENQKLIANQFNSAIGKIQDSLSSTASALGKLQDVVNQNAQALNTLVKQLSSNFGCISSVLNDILSRLDKVEAEVQIDCLITGRLQSLQTYVTQQLIRAAEIRASANLAATKMSECVLGQSKRVDFCGKGYHLMSFPQSAPHGVVFLHVTYVPAQEKNFTTAPAICHDGKAHFPREGVFVSNGTHWFVTQRNFYEPQIITTDNTFVSGNCDVVIGIVNNTVYDPLQPELDSFKEELDKYFKNHTSPDVDLGDISGINASVVNIQKEIDRLNEVAKNLNESLIDLQELGKYEQYIK

SEQ ID NO: 2422 - protein, 1211 aa, Artificial Sequence
  SARS-CoV-2/Shenzhen/SZTH-001/2020__EPI_ISL_406592 spike protein (1-1211)(A972C_R995C)
MFVFLVLLPLVSSQCVNLTTRTQLPPAYTNSFTRGVYYPDKVFRSSVLHSTQDLFLPFFSNVTWFHAIHVSGTNGTKRFDNPVLPFNDGVYFASTEKSNIIRGWIFGTTLDSKTQSLLIVNNATNVVIKVCEFQFCNDPFLGVYYHKNNKSWMESEFRVYSSANNCTFEYVSQPFLMDLEGKQGNFKNLREFVFKNIDGYFKIYSKHTPINLVRDLPQGFSALEPLVDLPIGINITRFQTLLALHRSYLTPGDSSSGWTAGAAAYYVGYLQPRTFLLKYNENGTITDAVDCALDPLSETKCTLKSFTVEKGIYQTSNFRVQPTESIVRFPNITNLCPFGEVFNATRFASVYAWNRKRISNCVADYSVLYNSASFSTFKCYGVSPTKLNDLCFTNVYADSFVIRGDEVRQIAPGQTGKIADYNYKLPDDFTGCVIAWNSNNLDSKVGGNYNYLYRLFRKSNLKPFERDISTEIYQAGSTPCNGVEGFNCYFPLQSYGFQPTNGVGYQPYRVVVLSFELLHAPATVCGPKKSTNLVKNKCVNFNFNGLTGTGVLTESNKKFLPFQQFGRDIADTTDAVRDPQTLEILDITPCSFGGVSVITPGTNTSNQVAVLYQDVNCTEVPVAIHADQLTPTWRVYSTGSNVFQTRAGCLIGAEHVNNSYECDIPIGAGICASYQTQTNSPRRARSVASQSIIAYTMSLGAENSVAYSNNSIAIPTNFTISVTTEILPVSMTKTSVDCTMYICGDSTECSNLLLQYGSFCTQLNRALTGIAVEQDKNTQEVFAQVKQIYKTPPIKDFGGFNFSQILPDPSKPSKRSFIEDLLFNKVTLADAGFIKQYGDCLGDIAARDLICAQKFNGLTVLPPLLTDEMIAQYTSALLAGTITSGWTFGAGAALQIPFAMQMAYRFNGIGVTQNVLYENQKLIANQFNSAIGKIQDSLSSTASALGKLQDVVNQNAQALNTLVKQLSSNFGCISSVLNDILSRLDKVEAEVQIDCLITGRLQSLQTYVTQQLIRAAEIRASANLAATKMSECVLGQSKRVDFCGKGYHLMSFPQSAPHGVVFLHVTYVPAQEKNFTTAPAICHDGKAHFPREGVFVSNGTHWFVTQRNFYEPQIITTDNTFVSGNCDVLIGIVNNTVYDPLQPELDSFKEELDKYFKNHTSPDVDLGDISGINASVVNIQKEIDRLNEVAKNLNESLIDLQELGKYEQYIK

SEQ ID NO: 2423 - protein, 1211 aa, Artificial Sequence
  SARS-CoV-2/Shenzhen/SZTH-004/2020__EPI_ISL_406595 spike protein (1-1211)(A972C_R995C)
MFVFLVLLPLVSSQCVNLTTRTQLPPAYTNSFTRGVYYPDKVFRSSVLHSTQDLFLPFFSNVTWFHAIHVSGTNGTKRFDNPVLPFNDGVYFASTEKSNIIRGWIFGTTLDSKTQSLLIVNNATNVVIKVCEFQFCNDPFLGVYYHKNNKSWMESEFRVYSSANNCTFEYVSQPFLMDLEGKQGNFKNLREFVFKNIDGYFKIYSKHTPINLVRDLPQGFSALEPLVDLPIGINITRFQTLLALHRSYLTPGDSSSGWTAGAAAYYVGYLQPRTFLLKYNENGTITDAVDCALDPLSETKCTLKSFTVEKGIYQTSNFRVQPTESIVRFPNITNLCPFGEVFNATRFASVYAWDRKRISNCVAYYSVLYNSASFSTFKCYGVSPTKLNDLCFTNVYADSFVIRGDEVRQIAPGQTGKIADYNYKLPDDFTGCVIAWNSNNLDSKVGGNYNYLYRLFRKSNLKPFERDISTEIYQAGSTPCNGVEGFNCYFPLQSYGFQPTNGVGYQPYRVVVLSFELLHAPATVCGPKKSTNLVKNKCVNFNFNGLTGTGVLTESNKKFLPFQQFGRDIADTTDAVRDPQTLEILDITPCSFGGVSVITPGTNTSNQVAVLYQDVNCTEVPVAIHADQLTPTWRVYSTGSNVFQTRAGCLIGAEHVNNSYECDIPIGAGICASYQTQTNSPRRARSVASQSIIAYTMSLGAENSVAYSNNSIAIPTNFTISVTTEILPVSMTKTSVDCTMYICGDSTECSNLLLQYGSFCTQLNRALTGIAVEQDKNTQEVFAQVKQIYKTPPIKDFGGFNFSQILPDPSKPSKRSFIEDLLFNKVTLADAGFIKQYGDCLGDIAARDLICAQKFNGLTVLPPLLTDEMIAQYTSALLAGTITSGWTFGAGAALQIPFAMQMAYRFNGIGVTQNVLYENQKLIANQFNSAIGKIQDSLSSTASALGKLQDVVNQNAQALNTLVKQLSSNFGCISSVLNDILSRLDKVEAEVQIDCLITGRLQSLQTYVTQQLIRAAEIRASANLAATKMSECVLGQSKRVDFCGKGYHLMSFPQSAPHGVVFLHVTYVPAQEKNFTTAPAICHDGKAHFPREGVFVSNGTHWFVTQRNFYEPQIITTDNTFVSGNCDVVIGIVNNTVYDPLQPELDSFKEELDKYFKNHTSPDVDLGDISGINASVVNIQKEIDRLNEVAKNLNESLIDLQELGKYEQYIK

SEQ ID NO: 2424 - protein, 1211 aa, Artificial Sequence
  SARS-CoV-2/France/IDF0372/2020__EPI_ISL_406596 spike protein (1-1211)(A972C_R995C)
MFVFLVLLPLVSSQCVNLTTRTQLPPAYTNSFTRGVYYPDKVFRSSVLHSTQDLFLPFFSNVTWFHAIHVSGTNGTKRFDNPVLPFNDGVYFASTEKSNIIRGWIFGTTLDSKTQSLLIVNNATNVVIKVCEFQFCNDPFLGVYYHKNNKSWMESEFRVYSSANNCTFEYVSQPFLMDLEGKQGNFKNLREFVFKNIDGYFKIYSKHTPINLVRDLPQGFSALEPLVDLPIGINITRFQTLLALHRSYLTPGDSSSGWTAGAAAYYVGYLQPRTFLLKYNENGTITDAVDCALDPLSETKCTLKSFTVEKGIYQTSNFRVQPTESIVRFPNITNLCPFGEVFNATRFASVYAWNRKRISNCVADYSFLYNSASFSTFKCYGVSPTKLNDLCFTNVYADSFVIRGDEVRQIAPGQTGKIADYNYKLPDDFTGCVIAWNSNNLDSKVGGNYNYLYRLFRKSNLKPFERDISTEIYQAGSTPCNGVEGFNCYFPLQSYGFQPTNGVGYQPYRVVVLSFELLHAPATVCGPKKSTNLVKNKCVNFNFNGLTGTGVLTESNKKFLPFQQFGRDIADTTDAVRDPQTLEILDITPCSFGGVSVITPGTNTSNQVAVLYQDVNCTEVPVAIHADQLTPTWRVYSTGSNVFQTRAGCLIGAEHVNNSYECDIPIGAGICASYQTQTNSPRRARSVASQSIIAYTMSLGAENSVAYSNNSIAIPTNFTISVTTEILPVSMTKTSVDCTMYICGDSTECSNLLLQYGSFCTQLNRALTGIAVEQDKNTQEVFAQVKQIYKTPPIKDFGGFNFSQILPDPSKPSKRSFIEDLLFNKVTLADAGFIKQYGDCLGDIAARDLICAQKFNGLTVLPPLLTDEMIAQYTSALLAGTITSGWTFGAGAALQIPFAMQMAYRFNGIGVTQNVLYENQKLIANQFNSAIGKIQDSLSSTASALGKLQDVVNQNAQALNTLVKQLSSNFGCISSVLNDILSRLDKVEAEVQIDCLITGRLQSLQTYVTQQLIRAAEIRASANLAATKMSECVLGQSKRVDFCGKGYHLMSFPQSAPHGVVFLHVTYVPAQEKNFTTAPAICHDGKAHFPREGVFVSNGTHWFVTQRNFYEPQIITTDNTFVSGNCDVVIGIVNNTVYDPLQPELDSFKEELDKYFKNHTSPDVDLGDISGINASVVNIQKEIDRLNEVAKNLNESLIDLQELGKYEQYIK

SEQ ID NO: 2425 - protein, 1211 aa, Artificial Sequence
  SARS-CoV-2/Australia/VIC01/2020__EPI_ISL_406844 spike protein (1-1211)(A972C_R995C)
MFVFLVLLPLVSSQCVNLTTRTQLPPAYTNSFTRGVYYPDKVFRSSVLHSTQDLFLPFFSNVTWFHAIHVSGTNGTKRFDNPVLPFNDGVYFASTEKSNIIRGWIFGTTLDSKTQSLLIVNNATNVVIKVCEFQFCNDPFLGVYYHKNNKSWMESEFRVYSSANNCTFEYVSQPFLMDLEGKQGNFKNLREFVFKNIDGYFKIYSKHTPINLVRDLPQGFSALEPLVDLPIGINITRFQTLLALHRRYLTPGDSSSGWTAGAAAYYVGYLQPRTFLLKYNENGTITDAVDCALDPLSETKCTLKSFTVEKGIYQTSNFRVQPTESIVRFPNITNLCPFGEVFNATRFASVYAWNRKRISNCVADYSVLYNSASFSTFKCYGVSPTKLNDLCFTNVYADSFVIRGDEVRQIAPGQTGKIADYNYKLPDDFTGCVIAWNSNNLDSKVGGNYNYLYRLFRKSNLKPFERDISTEIYQAGSTPCNGVEGFNCYFPLQSYGFQPTNGVGYQPYRVVVLSFELLHAPATVCGPKKSTNLVKNKCVNFNFNGLTGTGVLTESNKKFLPFQQFGRDIADTTDAVRDPQTLEILDITPCSFGGVSVITPGTNTSNQVAVLYQDVNCTEVPVAIHADQLTPTWRVYSTGSNVFQTRAGCLIGAEHVNNSYECDIPIGAGICASYQTQTNSPRRARSVASQSIIAYTMSLGAENSVAYSNNSIAIPTNFTISVTTEILPVSMTKTSVDCTMYICGDSTECSNLLLQYGSFCTQLNRALTGIAVEQDKNTQEVFAQVKQIYKTPPIKDFGGFNFSQILPDPSKPSKRSFIEDLLFNKVTLADAGFIKQYGDCLGDIAARDLICAQKFNGLTVLPPLLTDEMIAQYTSALLAGTITSGWTFGAGAALQIPFAMQMAYRFNGIGVTQNVLYENQKLIANQFNSAIGKIQDSLSSTASALGKLQDVVNQNAQALNTLVKQLSSNFGCISSVLNDILSRLDKVEAEVQIDCLITGRLQSLQTYVTQQLIRAAEIRASANLAATKMSECVLGQSKRVDFCGKGYHLMSFPQSAPHGVVFLHVTYVPAQEKNFTTAPAICHDGKAHFPREGVFVSNGTHWFVTQRNFYEPQIITTDNTFVSGNCDVVIGIVNNTVYDPLQPELDSFKEELDKYFKNHTSPDVDLGDISGINASVVNIQKEIDRLNEVAKNLNESLIDLQELGKYEQYIK

SEQ ID NO: 2426 - protein, 1211 aa, Artificial Sequence
  SARS-CoV-2/Germany/BavPat1/2020__EPI_ISL_406862 spike protein (1-1211)(A972C_R995C)
MFVFLVLLPLVSSQCVNLTTRTQLPPAYTNSFTRGVYYPDKVFRSSVLHSTQDLFLPFFSNVTWFHAIHVSGTNGTKRFDNPVLPFNDGVYFASTEKSNIIRGWIFGTTLDSKTQSLLIVNNATNVVIKVCEFQFCNDPFLGVYYHKNNKSWMESEFRVYSSANNCTFEYVSQPFLMDLEGKQGNFKNLREFVFKNIDGYFKIYSKHTPINLVRDLPQGFSALEPLVDLPIGINITRFQTLLALHRSYLTPGDSSSGWTAGAAAYYVGYLQPRTFLLKYNENGTITDAVDCALDPLSETKCTLKSFTVEKGIYQTSNFRVQPTESIVRFPNITNLCPFGEVFNATRFASVYAWNRKRISNCVADYSVLYNSASFSTFKCYGVSPTKLNDLCFTNVYADSFVIRGDEVRQIAPGQTGKIADYNYKLPDDFTGCVIAWNSNNLDSKVGGNYNYLYRLFRKSNLKPFERDISTEIYQAGSTPCNGVEGFNCYFPLQSYGFQPTNGVGYQPYRVVVLSFELLHAPATVCGPKKSTNLVKNKCVNFNFNGLTGTGVLTESNKKFLPFQQFGRDIADTTDAVRDPQTLEILDITPCSFGGVSVITPGTNTSNQVAVLYQGVNCTEVPVAIHADQLTPTWRVYSTGSNVFQTRAGCLIGAEHVNNSYECDIPIGAGICASYQTQTNSPRRARSVASQSIIAYTMSLGAENSVAYSNNSIAIPTNFTISVTTEILPVSMTKTSVDCTMYICGDSTECSNLLLQYGSFCTQLNRALTGIAVEQDKNTQEVFAQVKQIYKTPPIKDFGGFNFSQILPDPSKPSKRSFIEDLLFNKVTLADAGFIKQYGDCLGDIAARDLICAQKFNGLTVLPPLLTDEMIAQYTSALLAGTITSGWTFGAGAALQIPFAMQMAYRFNGIGVTQNVLYENQKLIANQFNSAIGKIQDSLSSTASALGKLQDVVNQNAQALNTLVKQLSSNFGCISSVLNDILSRLDKVEAEVQIDCLITGRLQSLQTYVTQQLIRAAEIRASANLAATKMSECVLGQSKRVDFCGKGYHLMSFPQSAPHGVVFLHVTYVPAQEKNFTTAPAICHDGKAHFPREGVFVSNGTHWFVTQRNFYEPQIITTDNTFVSGNCDVVIGIVNNTVYDPLQPELDSFKEELDKYFKNHTSPDVDLGDISGINASVVNIQKEIDRLNEVAKNLNESLIDLQELGKYEQYIK

SEQ ID NO: 2427 - protein, 1211 aa, Artificial Sequence
  SARS-CoV-2/Wuhan/HBCDC-HB-02/2020__EPI_ISL_412978 spike protein (1-1211)(A972C_R995C)
MFVFLVLLPLVSSQCVNLTTRTQLPPAYTNSFTRGVYYPDKVFRSSVLHSTQDLFLPFFSNVTWFHAIHVSGTNGTKRFDNPVLPFNDGVYFASTEKSNIIRGWIFGTTLDSKTQSLLIVNNATNVVIKVCEFQFCNDPFLGVYYHKNNKSWMESEFRVYSSANNCTFEYVSQPFLMDLEGKQGNFKNLREFVFKNIDGYFKIYSKHTPINLVRDLPQGFSALEPLVDLPIGINITRFQTLLALHRSYLTPGDSSSGWTAGAAAYYVGYLQPRTFLLKYNENGTITDAVDCALDPLSETKCTLKSFTVEKGIYQTSNFRVQPTESIVRFPNITNLCPFGEVFNATRFASVYAWNRKRISNCVADYSVLYNSASFSTFKCYGVSPTKLNDLCFTNVYADSFVIRGDEVRQIAPGQTGKIADYNYKLPDDFTGCVIAWNSNNLDSKVGGNYNYLYRLFRKSNLKPFERDISTEIYQAGSTPCNGVEGFNCYFPLQSYGFQPTNGVGYQPYRVVVLSFELLHAPATVCGPKKSTNLVKNKCVNFNFNGLTGTGVLTESNKKFLPFQQFGRDIADTTDAVRDPQTLEILDITPCSFGGVSVITPGTNTSNQVAVLYQDVNCTEVPVAIHADQLTPTWRVYSTGSNVFQTRAGCLIGAEHVNNSYECDIPIGAGICASYQTQTNSPRRARSVASQSIIAYTMSLGAENSVAYSNNSIAIPTNFTISVTTEILPVSMTKTSVDCTMYICGDSTECSNFLLQYGSFCTQLNRALTGIAVEQDKNTQEVFAQVKQIYKTPPIKDFGGFNFSQILPDPSKPSKRSFIEDLLFNKVTLADAGFIKQYGDCLGDIAARDLICAQKFNGLTVLPPLLTDEMIAQYTSALLAGTITSGWTFGAGAALQIPFAMQMAYRFNGIGVTQNVLYENQKLIANQFNSAIGKIQDSLSSTASALGKLQDVVNQNAQALNTLVKQLSSNFGCISSVLNDILSRLDKVEAEVQIDCLITGRLQSLQTYVTQQLIRAAEIRASANLAATKMSECVLGQSKRVDFCGKGYHLMSFPQSAPHGVVFLHVTYVPAQEKNFTTAPAICHDGKAHFPREGVFVSNGTHWFVTQRNFYEPQIITTDNTFVSGNCDVVIGIVNNTVYDPLQPELDSFKEELDKYFKNHTSPDVDLGDISGINASVVNIQKEIDRLNEVAKNLNESLIDLQELGKYEQYIK

SEQ ID NO: 2428 - protein, 1211 aa, Artificial Sequence
  SARS-CoV-2/Australia/QLD02/2020__EPI_ISL_407896 spike protein (1-1211)(A972C_R995C)
MFVFLVLLPLVSSQCVNLTTRTQLPPAYTNSFTRGVYYPDKVFRSSVLHSTQDLFLPFFSNVTWFHAIHVSGTNGTKRFDNPVLPFNDGVYFASTEKSNIIRGWIFGTTLDSKTQSLLIVNNATNVVIKVCEFQFCNDPFLGVYYHKNNKSWMESEFRVYSSANNCTFEYVSQPFLMDLEGKQGNFKNLREFVFKNIDGYFKIYSKHTPINLVRDLPQGFSALEPLVDLPIGINITRFQTLLALHRSYLTPGDSSSGWTAGAAAYYVGYLQPRTFLLKYNENGTITDAVDCALDPLSETKCTLKSFTVEKGIYQTSNFRVQPTESIVRFPNITNLCPFGEVFNATRFASVYAWNRKRISNCVADYSVLYNSASFSTFKCYGVSPTKLNDLCFTNVYADSFVIRGDEVRQIAPGQTGKIADYNYKLPDDFTGCVIAWNSNNLDSKVGGNYNYLYRLFRKSNLKPFERDISTEIYQAGSTPCNGVEGFNCYFPLQSYGFQPTNGVGYQPYRVVVLSFELLHAPATVCGPKKSTNLVKNKCVNFNFNGLTGTGVLTESNKKFLPFQQFGRDIADTTDAVRDPQTLEILDITPCSFGGVSVITPGTNTSNQVAVLYQDVNCTEVPVAIHADQLTPTWRVYSTGSNVFQTRAGCLIGAEHVNNSYECDIPIGAGICASYQTQTNSPRRARSVASQSIIAYTMSLGAENSVAYSNNSIAIPTNFTISVTTEILPVSMTKTSVDCTMYICGDSTECSNLLLQYGSFCTQLNRALTGIAVEQDKNTQEVFAQVKQIYKTPPIKDFGGFNFSQILPDPSKPSKRSFIEDLLFNKVTLADAGFIKQYGDCLGDIAARDLICAQKFNGLTVLPPLLTDEMIAQYTSALLAGTITSGWTFGAGAALQIPFAMQMAYRFNGIGVTQNVLYENQKLIANQFNSAIGKIQDSLSSTASALGKLQDVVNQNAQALNTLVKQLSSNFGCISSVLNDILSRLDKVEAEVQIDCLITGRLQSLQTYVTQQLIRAAEIRASANLAATKMSECVLGQSKRVDFCGKGYHLMSFPQSAPHGVVFLHVTYVPAQEKNFTTAPAICHDGKAHFPREGVFVSNGTHWFVTQRNFYEPQIITTDNTFVSGNCDVVIGIVNNTVYDPLQLELDSFKEELDKYFKNHTSPDVDLGDISGINASVVNIQKEIDRLNEVAKNLNESLIDLQELGKYEQYIK

SEQ ID NO: 2429 - protein, 1211 aa, Artificial Sequence
  SARS-CoV-2/India/1-31/2020__EPI_ISL_413523 spike protein (1-1211)(A972C_R995C)
MFVFLVLLPLVSSQCVNLTTRTQLPPAYTNSFTRGVYYPDKVFRSSVLHSTQDLFLPFFSNVTWFHAIHVSGTNGTKRFDNPVLPFNDGVYFASTEKSNIIRGWIFGTTLDSKTQSLLIVNNATNVVIKVCEFQFCNDPFLGVYYHKNNKSWMESEFRVYSSANNCTFEYVSQPFLMDLEGKQGNFKNLREFVFKNIDGYFKIYSKHTPINLVRDLPQGFSALEPLVDLPIGINITRFQTLLALHRSYLTPGDSSSGWTAGAAAYYVGYLQPRTFLLKYNENGTITDAVDCALDPLSETKCTLKSFTVEKGIYQTSNFRVQPTESIVRFPNITNLCPFGEVFNATRFASVYAWNRKRISNCVADYSVLYNSASFSTFKCYGVSPTKLNDLCFTNVYADSFVIRGDEVRQIAPGQTGKIADYNYKLPDDFTGCVIAWNSNNLDSKVGGNYNYLYRLFRKSNLKPFERDISTEIYQAGSTPCNGVEGFNCYFPLQSYGFQPTNGVGYQPYRVVVLSFELLHAPATVCGPKKSTNLVKNKCVNFNFNGLTGTGVLTESNKKFLPFQQFGRDIADTTDAVRDPQTLEILDITPCSFGGVSVITPGTNTSNQVAVLYQDVNCTEVPVAIHADQLTPTWRVYSTGSNVFQTRAGCLIGAEHVNNSYECDIPIGAGICASYQTQTNSPRRARSVASQSIIAYTMSLGAENSVAYSNNSIAIPTNFTISVTTEILPVSMTKTSVDCTMYICGDSTECSNLLLQYGSFCTQLNRALTGIAVEQDKNTQEVFAQVKQIYKTPPIKDFGGFNFSQILPDPSKPSKRSFIEDLLFNKVTLADAGFIKQYGDCLGDIAARDLICAQKFNGLTVLPPLLTDEMIAQYTSALLAGTITSGWTFGAGAALQIPFAMQMAYRFNGIGVTQNVLYENQKLIANQFNSVIGKIQDSLSSTASALGKLQDVVNQNAQALNTLVKQLSSNFGCISSVLNDILSRLDKVEAEVQIDCLITGRLQSLQTYVTQQLIRAAEIRASANLAATKMSECVLGQSKRVDFCGKGYHLMSFPQSAPHGVVFLHVTYVPAQEKNFTTAPAICHDGKAHFPREGVFVSNGTHWFVTQRNFYEPQIITTDNTFVSGNCDVVIGIVNNTVYDPLQPELDSFKEELDKYFKNHTSPDVDLGDISGINASVVNIQKEIDRLNEVAKNLNESLIDLQELGKYEQYIK

SEQ ID NO: 2430 - protein, 1211 aa, Artificial Sequence
  SARS-CoV-2/Guangdong/GD2020087-P0008/2020__EPI_ISL_413863 spike protein (1-1211)(A972C_R995C)
MFVFLVLLPLVSSQCVNLTTRTQLPPAYTNSFTRGVYYPDKVFRSSVLHSTQDLFLPFFSNVTWFHAIHVSGTNGTKRFDNPVLPFNDGVYFASTEKSNIIRGWIFGTTLDSKTQSLLIVNNATNVVIKVCEFQFCNDPFLGVYYHKNNKSWMESEFRVYSSANNCTFEYVSQPFLMDLEGKQGNFKNLREFVFKNIDGYFKIYSKHTPINLVRDLPQGFSALEPLVDLPIGINITRFQTLLALHRSYLTPGDSSSGWTAGAAAYYVGYLQPRTFLLKYNENGTITDAVDCALDPLSETKCTLKSFTVEKGIYQTSNFRVQPTESIVRFPNITNLCPFGEVFNATRFASVYAWNRKRISNCVADYSVLYNSASFSTFKCYGVSPTKLNDLCFTNVYADSFVIRGDEVREIAPGQTGKIADYNYKLPDDFTGCVIAWNSNNLDSKVGGNYNYLYRLFRKSNLKPFERDISTEIYQAGSTPCNGVEGFNCYFPLQSYGFQPTNGVGYQPYRVVVLSFELLHAPATVCGPKKSTNLVKNKCVNFNFNGLTGTGVLTESNKKFLPFQQFGRDIADTTDAVRDPQTLEILDITPCSFGGVSVITPGTNTSNQVAVLYQDVNCTEVPVAIHADQLTPTWRVYSTGSNVFQTRAGCLIGAEHVNNSYECDIPIGAGICASYQTQTNSPRRARSVASQSIIAYTMSLGAENSVAYSNNSIAIPTNFTISVTTEILPVSMTKTSVDCTMYICGDSTECSNLLLQYGSFCTQLNRALTGIAVEQDKNTQEVFAQVKQIYKTPPIKDFGGFNFSQILPDPSKPSKRSFIEDLLFNKVTLADAGFIKQYGDCLGDIAARDLICAQKFNGLTVLPPLLTDEMIAQYTSALLAGTITSGWTFGAGAALQIPFAMQMAYRFNGIGVTQNVLYENQKLIANQFNSAIGKIQDSLSSTASALGKLQDVVNQNAQALNTLVKQLSSNFGCISSVLNDILSRLDKVEAEVQIDCLITGRLQSLQTYVTQQLIRAAEIRASANLAATKMSECVLGQSKRVDFCGKGYHLMSFPQSAPHGVVFLHVTYVPAQEKNFTTAPAICHDGKAHFPREGVFVSNGTHWFVTQRNFYEPQIITTDNTFVSGNCDVVIGIVNNTVYDPLQPELDSFKEELDKYFKNHTSPDVDLGDISGINASVVNIQKEIDRLNEVAKNLNESLIDLQELGKYEQYIK

SEQ ID NO: 2431 - protein, 1211 aa, Artificial Sequence
  SARS-CoV-2/Sweden/01/2020__EPI_ISL_411951 spike protein (1-1211)(A972C_R995C)
MFVFLVLLPLVSSQCVNLTTRTQLPPAYTNSFTRGVYYPDKVFRSSVLHSTQDLFLPFFSNVTWFHAIHVSGTNGTKRFDNPVLPFNDGVYFASTEKSNIIRGWIFGTTLDSKTQSLLIVNNATNVVIKVCEFQFCNDPFLGVYYHKNNKSWMESEFRVYSSANNCTFEYVSQPFLMDLEGKQGNFKNLREFVFKNIDGYFKIYSKHTPINLVRDLPQGFSALEPLVDLPIGINITRFQTLLALHRSYLTPGDSSSGWTAGAAAYYVGYLQPRTFLLKYNENGTITDAVDCALDPLSETKCTLKSFTVEKGIYQTSNFRVQPTESIVRFPNITNLCPFGEVFNATRFASVYAWNRKRISNCVADYSVLYNSASFSTFKCYGVSPTKLNDLCFTNVYADSFVIRGDEVRQIAPGQTGKIADYNYKLPDDFTGCVIAWNSNNLDSKVGGNYNYLYRLFRKSNLKPFERDISTEIYQAGSTPCNGVEGFNCYFPLQSYGFQPTNGVGYQPYRVVVLSFELLHAPATVCGPKKSTNLVKNKCVNFNFNGLTGTGVLTESNKKFLPFQQFGRDIADTTDAVRDPQTLEILDITPCSFGGVSVITPGTNTSNQVAVLYQDVNCTEVPVAIHADQLTPTWRVYSTGSNVFQTRAGCLIGAEHVNNSYECDIPIGAGICASYQTQTNSPRRARSVASQSIIAYTMSLGAENSVAYSNNSIAIPTNFTISVTTEILPVSMTKTSVDCTMYICGDSTECSNLLLQYGSFCTQLNRALTGIAVEQDKNTQEVFAQVKQIYKTPPIKDCGGFNFSQILPDPSKPSKRSFIEDLLFNKVTLADAGFIKQYGDCLGDIAARDLICAQKFNGLTVLPPLLTDEMIAQYTSALLAGTITSGWTFGAGAALQIPFAMQMAYRFNGIGVTQNVLYENQKLIANQFNSAIGKIQDSLSSTASALGKLQDVVNQNAQALNTLVKQLSSNFGCISSVLNDILSRLDKVEAEVQIDCLITGRLQSLQTYVTQQLIRAAEIRASANLAATKMSECVLGQSKRVDFCGKGYHLMSFPQSAPHGVVFLHVTYVPAQEKNFTTAPAICHDGKAHFPREGVFVSNGTHWFVTQRNFYEPQIITTDNTFVSGNCDVVIGIVNNTVYDPLQPELDSFKEELDKYFKNHTSPDVDLGDISGINASVVNIQKEIDRLNEVAKNLNESLIDLQELGKYEQYIK

SEQ ID NO: 2432 - protein, 1211 aa, Artificial Sequence
  SARS-CoV-2/Tianmen/HBCDC-HB-07/2020__EPI_ISL_412983 spike protein (1-1211)(A972C_R995C)
MFVFLVLLPLVSSQCVNLTTRTQLPPAYTNSFTRGVYYPDKVFRSSVLHSTQDLFLPFFSNVTWFHAIHVSGTNGTKRFDNPVLPFNDGVYFASTEKSNIIRGWIFGTTLDSKTQSLLIVNNATNVVIKVCEFQFCNDPFLGVYYHKNNKSWMESEFRVYSSANNCTFEYVSQPFLMDLEGKQGNFKNLREFVFKNIDGYFKIYSKHTPINLVRDLPQGFSALEPLVDLPIGINITRFQTLLALHRSYLTPGDSSSGWTAGAAAYYVGYLQPRTFLLKYNENGTITDAVDCALDPLSETKCTLKSFTVEKGIYQTSNFRVQPTESIVRFPNITNLCPFGEVFNATRFASVYAWNRKRISNCVADYSVLYNSASFSTFKCYGVSPTKLNDLCFTNVYADSFVIRGDEVRQIAPGQTGKIADYNYKLPDDFTGCVIAWNSNNLDSKVGGNYNYLYRLFRKSNLKPFERDISTEIYQAGSTPCNGVEGFNCYFPLQSYGFQPTNGVGYQPYRVVVLSFELLHAPATVCGPKKSTNLVKNKCVNFNFNGLTGTGVLTESNKKFLPFQQFGRDIADTTDAVRDPQTLEILDITPCSFGGVSVITPGTNTSNQVAVLYQDLNCTEVPVAIHADQLTPTWRVYSTGSNVFQTRAGCLIGAEHVNNSYECDIPIGAGICASYQTQTNSPRRARSVASQSIIAYTMSLGAENSVAYSNNSIAIPTNFTISVTTEILPVSMTKTSVDCTMYICGDSTECSNLLLQYGSFCTQLNRALTGIAVEQDKNTQEVFAQVKQIYKTPPIKDFGGFNFSQILPDPSKPSKRSFIEDLLFNKVTLADAGFIKQYGDCLGDIAARDLICAQKFNGLTVLPPLLTDEMIAQYTSALLAGTITSGWTFGAGAALQIPFAMQMAYRFNGIGVTQNVLYENQKLIANQFNSAIGKIQDSLSSTASALGKLQDVVNQNAQALNTLVKQLSSNFGCISSVLNDILSRLDKVEAEVQIDCLITGRLQSLQTYVTQQLIRAAEIRASANLAATKMSECVLGQSKRVDFCGKGYHLMSFPQSAPHGVVFLHVTYVPAQEKNFTTAPAICHDGKAHFPREGVFVSNGTHWFVTQRNFYEPQIITTDNTFVSGNCDVVIGIVNNTVYDPLQPELDSFKEELDKYFKNHTSPDVDLGDISGINASVVNIQKEIDRLNEVAKNLNESLIDLQELGKYEQYIK

SEQ ID NO: 2433 - protein, 1211 aa, Artificial Sequence
  SARS-CoV-2/Hong Kong/case42_VM20002493/2020__EPI_ISL_414527 spike protein (1-1211)(A972C_R995C)
MFVFLVLLPLVSSQCVNLTTRTQLPPAYTNSFTRGVYYPDKVFRSSVLHSTQDLFLPFFSNVTWFHAIHVSGTNGTKRFDNPVLPFNDGVYFASTEKSNIIRGWIFGTTLDSKTQSLLIVNNATNVVIKVCEFQFCNDPFLGVYYHKNNKSWMESEFRVYSSANNCTFEYVSQPFLMDLEGKQGNFKNLREFVFKNIDGYFKIYSKHTPINLVRDLPQGFSALEPLVDLPIGINITRFQTLLALHRSYLTPGDSSSGWTAGAAAYYVGYLQPRTFLLKYNENGTITDAVDCALDPLSETKCTLKSFTVEKGIYQTSNFRVQPTESIVRFPNITNLCPFGEVFNATRFASVYAWNRKRISNCVADYSVLYNSASFSTFKCYGVSPTKLNDLCFTNVYADSFVIRGDEVRQIAPGQTGKIADYNYKLPDDFTGCVIAWNSNNLDSKVGGNYNYLYRLFRKSNLKPFERDISTEIYQAGSTPCNGVEGFNCYFPLQSYGFQPTNGVGYQPYRVVVLSFELLHAPATVCGPKKSTNLVKNKCVNFNFNGLTGTGVLTESNKKFLPFQQFGRDIADTTDAVRDPQTLEILDITPCSFGGVSVITPGTNTSNQVAVLYQDVNCTEVPVAIHADQLTPTWRVYSTGSNVFQTRAGCLIGAEHVNNSYECDIPIGAGICASYQTQTNSPRRARSVASQSIIAYTMSLGAENSVAYSNNSIAIPTNFAISVTTEILPVSMTKTSVDCTMYICGDSTECSNLLLQYGSFCTQLNRALTGIAVEQDKNTQEVFAQVKQIYKTPPIKDFGGFNFSQILPDPSKPSKRSFIEDLLFNKVTLADAGFIKQYGDCLGDIAARDLICAQKFNGLTVLPPLLTDEMIAQYTSALLAGTITSGWTFGAGAALQIPFAMQMAYRFNGIGVTQNVLYENQKLIANQFNSAIGKIQDSLSSTASALGKLQDVVNQNAQALNTLVKQLSSNFGCISSVLNDILSRLDKVEAEVQIDCLITGRLQSLQTYVTQQLIRAAEIRASANLAATKMSECVLGQSKRVDFCGKGYHLMSFPQSAPHGVVFLHVTYVPAQEKNFTTAPAICHDGKAHFPREGVFVSNGTHWFVTQRNFYEPQIITTDNTFVSGNCDVVIGIVNNTVYDPLQPELDSFKEELDKYFKNHTSPDVDLGDISGINASVVNIQKEIDRLNEVAKNLNESLIDLQELGKYEQYIK

SEQ ID NO: 2434 - protein, 1211 aa, Artificial Sequence
  SARS-CoV-2/USA/CruiseA-23/2020__EPI_ISL_414482 spike protein (1-1211)(A972C_R995C)
MFVFLVLLPLVSSQCVNLTTRTQLPPAYTNSFTRGVYYPDKVFRSSVLHSTQDLFLPFFSNVTWFHAIHVSGTNGTKRFDNPVLPFNDGVYFASTEKSNIIRGWIFGTTLDSKTQSLLIVNNATNVVIKVCEFQFCNDPFLGVYYHKNNKSWMESEFRVYSSANNCTFEYVSQPFLMDLEVKQGNFKNLREFVFKNIDGYFKIYSKHTPINLVRDLPQGFSALEPLVDLPIGINITRFQTLLALHRSYLTPGDSSSGWTAGAAAYYVGYLQPRTFLLKYNENGTITDAVDCALDPLSETKCTLKSFTVEKGIYQTSNFRVQPTESIVRFPNITNLCPFGEVFNATRFASVYAWNRKRISNCVADYSVLYNSASFSTFKCYGVSPTKLNDLCFTNVYADSFVIRGDEVRQIAPGQTGKIADYNYKLPDDFTGCVIAWNSNNLDSKVGGNYNYLYRLFRKSNLKPFERDISTEIYQAGSTPCNGVEGFNCYFPLQSYGFQPTNGVGYQPYRVVVLSFELLHAPATVCGPKKSTNLVKNKCVNFNFNGLTGTGVLTESNKKFLPFQQFGRDIADTTDAVRDPQTLEILDITPCSFGGVSVITPGTNTSNQVAVLYQDVNCTEVPVAIHADQLTPTWRVYSTGSNVFQTRAGCLIGAEHVNNSYECDIPIGAGICASYQTQTNSPRRARSVASQSIIAYTMSLGAENSVAYSNNSIAIPTNFTISVTTEILPVSMTKTSVDCTMYICGDSTECSNLLLQYGSFCTQLNRALTGIAVEQDKNTQEVFAQVKQIYKTPPIKDFGGFNFSQILPDPSKPSKRSFIEDLLFNKVTLADAGFIKQYGDCLGDIAARDLICAQKFNGLTVLPPLLTDEMIAQYTSALLAGTITSGWTFGAGAALQIPFAMQMAYRFNGIGVTQNVLYENQKLIANQFNSAIGKIQDSLSSTASALGKLQDVVNQNAQALNTLVKQLSSNFGCISSVLNDILSRLDKVEAEVQIDCLITGRLQSLQTYVTQQLIRAAEIRASANLAATKMSECVLGQSKRVDFCGKGYHLMSFPQSAPHGVVFLHVTYVPAQEKNFTTAPAICHDGKAHFPREGVFVSNGTHWFVTQRNFYEPQIITTDNTFVSGNCDVVIGIVNNTVYDPLQPELDSFKEELDKYFKNHTSPDVDLGDISGINASVVNIQKEIDRLNEVAKNLNESLIDLQELGKYEQYIK

SEQ ID NO: 2435 - protein, 1211 aa, Artificial Sequence
  SARS-CoV-2/Hong Kong/case85_VM20002868/2020__EPI_ISL_414519 spike protein (1-1211)(A972C_R995C)
MFVFLVLVPLVSSQCVNLTTRTQLPPAYTNSFTRGVYYPDKVFRSSVLHSTQDLFLPFFSNVTWFHAIHVSGTNGTKRFDNPVLPFNDGVYFASTEKSNIIRGWIFGTTLDSKTQSLLIVNNATNVVIKVCEFQFCNDPFLGVYYHKNNKSWMESEFRVYSSANNCTFEYVSQPFLMDLEGKQGNFKNLREFVFKNIDGYFKIYSKHTPINLVRDLPQGFSALEPLVDLPIGINITRFQTLLALHRSYLTPGDSSSGWTAGAAAYYVGYLQPRTFLLKYNENGTITDAVDCALDPLSETKCTLKSFTVEKGIYQTSNFRVQPTESIVRFPNITNLCPFGEVFNATRFASVYAWNRKRISNCVADYSVLYNSASFSTFKCYGVSPTKLNDLCFTNVYADSFVIRGDEVRQIAPGQTGKIADYNYKLPDDFTGCVIAWNSNNLDSKVGGNYNYLYRLFRKSNLKPFERDISTEIYQAGSTPCNGVEGFNCYFPLQSYGFQPTNGVGYQPYRVVVLSFELLHAPATVCGPKKSTNLVKNKCVNFNFNGLTGTGVLTESNKKFLPFQQFGRDIADTTDAVRDPQTLEILDITPCSFGGVSVITPGTNTSNQVAVLYQDVNCTEVPVAIHADQLTPTWRVYSTGSNVFQTRAGCLIGAEHVNNSYECDIPIGAGICASYQTQTNSPRRARSVASQSIIAYTMSLGAENSVAYSNNSIAIPTNFTISVTTEILPVSMTKTSVDCTMYICGDSTECSNLLLQYGSFCTQLNRALTGIAVEQDKNTQEVFAQVKQIYKTPPIKDFGGFNFSQILPDPSKPSKRSFIEDLLFNKVTLADAGFIKQYGDCLGDIAARDLICAQKFNGLTVLPPLLTDEMIAQYTSALLAGTITSGWTFGAGAALQIPFAMQMAYRFNGIGVTQNVLYENQKLIANQFNSAIGKIQDSLSSTASALGKLQDVVNQNAQALNTLVKQLSSNFGCISSVLNDILSRLDKVEAEVQIDCLITGRLQSLQTYVTQQLIRAAEIRASANLAATKMSECVLGQSKRVDFCGKGYHLMSFPQSAPHGVVFLHVTYVPAQEKNFTTAPAICHDGKAHFPREGVFVSNGTHWFVTQRNFYEPQIITTDNTFVSGNCDVVIGIVNNTVYDPLQPELDSFKEELDKYFKNHTSPDVDLGDISGINASVVNIQKEIDRLNEVAKNLNESLIDLQELGKYEQYIK

SEQ ID NO: 2436 - protein, 1211 aa, Artificial Sequence; identical to SEQ ID NO: 2426
  SARS-CoV-2/England/200990660/2020__EPI_ISL_414523 spike protein (1-1211)(A972C_R995C)

SEQ ID NO: 2437 - protein, 1211 aa, Artificial Sequence
  SARS-CoV-2/Australia/NSW09/2020__EPI_ISL_413595 spike protein (1-1211)(A972C_R995C)
MFVFLVLLPLVSSQCVNLTTRTQLPPAYTNSFTRGVYYPDKVFRSSVLHSTQDLFLPFFSNVTWFHAIHVSGTNGTKRFDNPVLPFNDGVYFASTEKSNIIRGWIFGTTLDSKTQSLLIVNNATNVVIKVCEFQFCNDPFLGVYYHKNNKSWMESEFRVYSSANNCTFEYVSQPFLMDLEGKQGNFKNLREFVFKNIDGYFKIYSKHTPINLVRDLPQGFSALEPLVDLPIGINITRFQTLLALHRSYLTPGDSSSGWTAGAAAYYVGYLQPRTFLLKYNENGTITDAVDCALDPLSETKCTLKSFTVEKGIYQTSNFRVQPTESIVRFPNITNLCPFGEVFNATRFASVYAWNRKRISNCVADYSVLYNSASFSTFKCYGVSPTKLNDLCFTNVYADSFVIRGDEVRQIAPGQTGKIADYNYKLPDDFTGCVIAWNSNNLDSKVGGNYNYLYRLFRKSNLKPFERDISTEIYQAGSTPCNGVEGFNCYFPLQSYGFQPTNGVGYQPYRVVVLSFELLHAPATVCGPKKSTNLVKNKCVNFNFNGLTGTGVLTESNKKFLPFQQFGRDIADTTDAVRDPQTLEILDITPCSFGGVSVITPGTNTSNQVAVLYQDVNCTEVPVAIHADQLTPTWRVYSTGSNVFQTRAGCLIGAEHVNNSYECDIPIGAGICASYQTQTNSPRRARSVASQSIIAYTMSLGAENSVAYSNNSIAIPTNFTISVTTEILPVSMTKTSVDCTMYICGDSTECSNLLLQYGSFCTQLNRALTGIAVEQDKNTQEVFAQVKQIYKTPPIKDFGGFNFSQILPDPSKPSKRSFIEDLLFNKVTLADAGFIKQYGDCLGDIAARDLICAQKFNGLTVLPPLLTDEMIAQYTSALLAGTITSGWTFGAGAALQIPFAMQMAYRFNGIGVTQNVLYENQKLIANQFNSAIGKIQDSLSFTASALGKLQDVVNQNAQALNTLVKQLSSNFGCISSVLNDILSRLDKVEAEVQIDCLITGRLQSLQTYVTQQLIRAAEIRASANLAATKMSECVLGQSKRVDFCGKGYHLMSFPQSAPHGVVFLHVTYVPAQEKNFTTAPAICHDGKAHFPREGVFVSNGTHWFVTQRNFYEPQIITTDNTFVSGNCDVVIGIVNNTVYDPLQPELDSFKEELDKYFKNHTSPDVDLGDISGINASVVNIQKEIDRLNEVAKNLNESLIDLQELGKYEQYIK

SEQ ID NO: 2438 - protein, 1211 aa, Artificial Sequence; identical to SEQ ID NO: 2418
  SARS-CoV-2/Australia/NSW10/2020__EPI_ISL_413596 spike protein (1-1211)(A972C_R995C)

SEQ ID NO: 2439 - protein, 1211 aa, Artificial Sequence
  SARS-CoV-2/Switzerland/1000477797/2020__EPI_ISL_413023 spike protein (1-1211)(A972C_R995C)
MFVFLVLLPLVSSQCVNLTTRTQLPPAYTNSFTRGVYYPDKVFRSSVLHSTQDLFLPFFSNVTWFHAIHVSGTNGTKRFDNPVLPFNDGVYFASTEKSNIIRGWIFGTTLDSKTQSLLIVNNATNVVIKVCEFQFCNDPFLGVYYHKNNKSWMESEFRVYSSANNCTFEYVSQPFLMDLEGKQGNFKNLREFVFKNIDGYFNIYSKHTPINLVRDLPQGFSALEPLVDLPIGINITRFQTLLALHRSYLTPGDSSSGWTAGAAAYYVGYLQPRTFLLKYNENGTITDAVDCALDPLSETKCTLKSFTVEKGIYQTSNFRVQPTESIVRFPNITNLCPFGEVFNATRFASVYAWNRKRISNCVADYSVLYNSASFSTFKCYGVSPTKLNDLCFTNVYADSFVIRGDEVRQIAPGQTGKIADYNYKLPDDFTGCVIAWNSNNLDSKVGGNYNYLYRLFRKSNLKPFERDISTEIYQAGSTPCNGVEGFNCYFPLQSYGFQPTNGVGYQPYRVVVLSFELLHAPATVCGPKKSTNLVKNKCVNFNFNGLTGTGVLTESNKKFLPFQQFGRDIADTTDAVRDPQTLEILDITPCSFGGVSVITPGTNTSNQVAVLYQGVNCTEVPVAIHADQLTPTWRVYSTGSNVFQTRAGCLIGAEHVNNSYECDIPIGAGICASYQTQTNSPRRARSVASQSIIAYTMSLGAENSVAYSNNSIAIPTNFTISVTTEILPVSMTKTSVDCTMYICGDSTECSNLLLQYGSFCTQLNRALTGIAVEQDKNTQEVFAQVKQIYKTPPIKDFGGFNFSQILPDPSKPSKRSFIEDLLFNKVTLADAGFIKQYGDCLGDIAARDLICAQKFNGLTVLPPLLTDEMIAQYTSALLAGTITSGWTFGAGAALQIPFAMQMAYRFNGIGVTQNVLYENQKLIANQFNSAIGKIQDSLSSTASALGKLQDVVNQNAQALNTLVKQLSSNFGCISSVLNDILSRLDKVEAEVQIDCLITGRLQSLQTYVTQQLIRAAEIRASANLAATKMSECVLGQSKRVDFCGKGYHLMSFPQSAPHGVVFLHVTYVPAQEKNFTTAPAICHDGKAHFPREGVFVSNGTHWFVTQRNFYEPQIITTDNTFVSGNCDVVIGIVNNTVYDPLQPELDSFKEELDKYFKNHTSPDVDLGDISGINASVVNIQKEIDRLNEVAKNLNESLIDLQELGKYEQYIK

SEQ ID NO: 2440 - protein, 1211 aa, Artificial Sequence
  SARS-CoV-2/Belgium/BA-02291/2020__EPI_ISL_415159 spike protein (1-1211)(A972C_R995C)
MFVFLVLLPLVSSQCVNLTTRTQLPPAYTNSFTRGVYYPDKVFRSSVLHSTQDLFLPFFSNVTWFHAIHVSGTNGTKRFDNPVLPFNDGVYFASTEKSNIIRGWIFGTTLDSKTQSLLIVNNATNVVIKVCEFQFCNDPFLGVYYHKNNKSWMESEFRVYSSANNCTFEYVSQPFLMDLEGKQGNFKNLREFVFKNIDGYFKIYSKHTPINLVRDLPQGFSALEPLVDLPIGINITRFQTLLALHRSYLTPGDSSSGWTAGAAAYYVGYLQPRTFLLKYNENGTITDAVDCALDPLSETKCTLKSFTVEKGIYQTSNFRVQPTESIVRFPNITNLCPFGEVFNATRFASVYAWNRKRISNCVADYSVLYNSASFSTFKCYGVSPTKLNDLCFTNVYADSFVIRGDEVRQIAPGQTGKIADYNYKLPDDFTGCVIAWNSNNLDSKVGGNYNYLYRLFRRSNLKPFERDISTEIYQAGSTPCNGVEGFNCYFPLQSYGFQPTNGVGYQPYRVVVLSFELLPAPATVCGPKKSTNLVKNKCVNFNFNGLTGTGVLTESNKKFLPFQQFGRDIADTTDAVRDPQTLEILDITPCSFGGVSVITPGTNTSNQVAVLYQGVNCTEVPVAIHADQLTPTWRVYSTGSNVFQTRAGCLIGAEHVNNSYECDIPIGAGICASYQTQTNSPRRARSVASQSIIAYTMSLGAENSVAYSNNSIAIPTNFTISVTTEILPVSMTKTSVDCTMYICGDSTECSNLLLQYGSFCTQLNRALTGIAVEQDKNTQEVFAQVKQIYKTPPIKDFGGFNFSQILPDPSKPSKRSFIEDLLFNKVTLADAGFIKQYGDCLGDIAARDLICAQKFNGLTVLPPLLTDEMIAQYTSALLAGTITSGWTFGAGAALQIPFAMQMAYRFNGIGVTQNVLYENQKLIANQFNSAIGKIQDSLSSAAPALGKLQDVVNQNAQALNTLVKQLSSNFGCISSVLNDILSRLDKVEAEVQIDCLITGRLQSLQTYVTQQLIRAAEIRASANLAATKMSECVLGQSKRVDFCGKGYHLMSFPQSAPHGVVFLHVTYVPAQEKNFTTAPAICHDGKAHFPREGVFVSNGTHWFVTQRNFYEPQIITTDNTFVSGNCDVVIGIVNNTVYDPLQPELDSFKEELDKYFKNHTSPDVDLGDISGINASVVNIQKEIDRLNEVAKNLNESLIDLQELGKYEQYIK

SEQ ID NO: 2441 - protein, 1211 aa, Artificial Sequence
  SARS-CoV-2/USA/WA8-UW5/2020__EPI_ISL_413486 spike protein (1-1211)(A972C_R995C)
MFVFLVLLPLVSSQCVNLTTRTQLPPAYTNSFTRGVYYPDKVFRSSVLHSTQDLFLPFFSNVTWFHAIHVSGTNGTKRFDNPVLPFNDGVYFASTEKSNIIRGWIFGTTLDSKTQSLLIVNNATNVVIKVCEFQFCNDPFLGVYYHKNNKSWMESEFRVYSSANNCTFEYVSQPFLMDLEGKQGNFKNLREFVFKNIDGYFKIYSKHTPINLVRDLPQGFSALEPLVDLPIGINITRFQTLLALHRSYLTPGDSSSGWTAGAAAYYVGYLQPRTFLLKYNENGTITDAVDCALDPLSETKCTLKSFTVEKGIYQTSNFRVQPTESIVRFPNITNLCPFGEVFNATRFASVYAWNRKRISNCVADYSVLYNSASFSTFKCYGVSPTKLNDLCFTNVYADSFVIRGDEVRQIAPGQTGKIADYNYKLPDDFTGCVIAWNSNNLDSKVGGNYNYLYRLFRKSNLKPFERDISTEIYQAGSTPCNGVEGFNCYFPLQSYGFQPTNGVGYQPYRVVVLSFELLHAPATVCGPKKSTNLVKNKCVNFNFNGLTGTGVLTESNKKFLPFQQFGRDIADTTDAVRDPQTLEILDITPCSFGGVSVITPGTNTSNQVAVLYQDVNCTEVPVAIHADQLTPTWRVYSTGSNVFQTRAGCLIGAEYVNNSYECDIPIGAGICASYQTQTNSPRRARSVASQSIIAYTMSLGAENSVAYSNNSIAIPTNFTISVTTEILPVSMTKTSVDCTMYICGDSTECSNLLLQYGSFCTQLNRALTGIAVEQDKNTQEVFAQVKQIYKTPPIKDFGGFNFSQILPDPSKPSKRSFIEDLLFNKVTLADAGFIKQYGDCLGDIAARDLICAQKFNGLTVLPPLLTDEMIAQYTSALLAGTITSGWTFGAGAALQIPFAMQMAYRFNGIGVTQNVLYENQKLIANQFNSAIGKIQDSLSSTASALGKLQDVVNQNAQALNTLVKQLSSNFGCISSVLNDILSRLDKVEAEVQIDCLITGRLQSLQTYVTQQLIRAAEIRASANLAATKMSECVLGQSKRVDFCGKGYHLMSFPQSAPHGVVFLHVTYVPAQEKNFTTAPAICHDGKAHFPREGVFVSNGTHWFVTQRNFYEPQIITTDNTFVSGNCDVVIGIVNNTVYDPLQPELDSFKEELDKYFKNHTSPDVDLGDISGINASVVNIQKEIDRLNEVAKNLNESLIDLQELGKYEQYIK

SEQ ID NO: 2442 - protein, 1211 aa, Artificial Sequence
  SARS-CoV-2/England/20102000506/2020__EPI_ISL_415147 spike protein (1-1211)(A972C_R995C)
MFVFLVLLPLVSSQCVNLTTRTQLPPAYTNSFTRGVYYPDKVFRSSVLHSTQDLFLPFFSNVTWFHAIHVSGTNGTKRFDNPVLPFNDGVYFASTEKSNIIRGWIFGTTLDSKTQSLLIVNNATNVVIKVCEFQFCNDPFLGVYYHKNNKSWMESEFRVYSSANNCTFEYVSQPFLMDLEGKQGNFKNLREFVFKNIDGYFKIYSKHTPINLVRDLPQGFSALEPLVDLPIGINITRFQTLLALHRSYLTPGDSSSGWTAGAAAYYVGYLQPRTFLLKYNENGTITDAVDCALDPLSETKCTLKSFTVEKGIYQTSNFRVQPTESIVRFPNITNLCPFGEVFNATRFASVYAWNRKRISNCVADYSVLYNSASFSTFKCYGVSPTKLNDLCFTNVYADSFVIRGDEVRQIAPGQTGKIADYNYKLPDDFTGCVIAWNSNNLDSKVGGNYNYLYRLFRKSNLKPFERDISTEIYQAGSTPCNGVEGFNCYFPLQSYGFQPTNGVGYQPYRVVVLSFELLHAPATVCGPKKSTNLVKNKCVNFNFNGLTGTGVLTESNKKFLPFQQFGRDIADTTDAVRDPQTLEILDITPCSFGGVSVITPGTNTSNQVAVLYQGVNCTEVPVAIHADQLTPTWRVYSTGSNVFQTRAGCLIGAEHVNNSYECDIPIGAGICASYQTQTNSPRRARSVASQSIIAYTMSLGAENSVAYSNNSIAIPTNFTISVTTEILPVSMTKTSVDCTMYICGDSTECSNLLLQYGSFCTQLNRALTGIAVEQDKNTQEVFAQVKQIYKTPPIKDFGGFNFSQILPDPSKPSKRSFIEDLLFNKVTLADAGFIKQYGYCLGDIAARDLICAQKFNGLTVLPPLLTDEMIAQYTSALLAGTITSGWTFGAGAALQIPFAMQMAYRFNGIGVTQNVLYENQKLIANQFNSAIGKIQDSLSSTASALGKLQDVVNQNAQALNTLVKQLSSNFGCISSVLNDILSRLDKVEAEVQIDCLITGRLQSLQTYVTQQLIRAAEIRASANLAATKMSECVLGQSKRVDFCGKGYHLMSFPQSAPHGVVFLHVTYVPAQEKNFTTAPAICHDGKAHFPREGVFVSNGTHWFVTQRNFYEPQIITTDNTFVSGNCDVVIGIVNNTVYDPLQPELDSFKEELDKYFKNHTSPDVDLGDISGINASVVNIQKEIDRLNEVAKNLNESLIDLQELGKYEQYIK

SEQ ID NO: 2443 - protein, 1211 aa, Artificial Sequence
  SARS-CoV-2/Belgium/VAG-03013/2020__EPI_ISL_415155 spike protein (1-1211)(A972C_R995C)
MFVFLVLLPLVSSQCVNLTTRTQLPPAYTNSFTRGVYYPDKVFRSSVLHSTQDLFLPFFSNVTWFHAIHVSGTNGTKRFDNPVLPFNDGVYFASTEKSNIIRGWIFGTTLDSKTQSLLIVNNATNVVIKVCEFQFCNDPFLGVYYHKNNKSWMESEFRVYSSANNCTFEYVSQPFLMDLEGKQGNFKNLREFVFKNIDGYFKIYSKHTPINLVRDLPQGFSALEPLVDLPIGINITRFQTLLALHRSYLTPGDSSSGWTAGAAAYYVGYLQPRTFLLKYNENGTITDAVDCALDPLSETKCTLKSFTVEKGIYQTSNFRVQPTESIVRFPNITNLCPFGEVFNATRFASVYAWNRKRISNCVADYSVLYNSASFSTFKCYGVSPTKLNDLCFTNVYADSFVIRGDEVRQIAPGQTGKIADYNYKLPDDFTGCVIAWNSNNLDSKVGGNYNYLYRLFRKSNLKPFERDISTEIYQAGSTPCNGVEGFNCYFPLQSYGFQPTNGVGYQPYRVVVLSFELLHAPATVCGPKKSTNLVKNKCVNFNFNGLTGTGVLTESNKKFLPFQQFGRDIADTTDAVRDPQTLEILDITPCSFGGVSVITPGTNTSNQVAVLYQGVNCTEVPVAIHADQLTPTWRVYSTGSNVFQTRAGCLIGAEHVNNSYECDIPIGAGICASYQTQTNSPRRARSVASQSIIAYTMSLGAENSVAYSNNSIAIPTNFTISVTTEILPVSMTKTSVDCTMYICGDSTECSNLLLQYGSFCTQLNRALTGIAVEQDKNTQEVFAQVKQIYKTPPIKDFGGFNFSQILPDPSKPSKRSFIEDLLFNKVTLADAGFIKQYGDCLGDIAARDLICAQKFNGLTVLPPLLTDEMIAQYTSALLAGTITSGWTFGAGAALQIPFAMQMAYRFNGIGVTQNVLYENQKLIANQFNSAIGKIQDSLSSTATALGKLQDVVNQNAQALNTLVKQLSSNFGCISSVLNDILSRLDKVEAEVQIDCLITGRLQSLQTYVTQQLIRAAEIRASANLAATKMSECVLGQSKRVDFCGKGYHLMSFPQSAPHGVVFLHVTYVPAQEKNFTTAPAICHDGKAHFPREGVFVSNGTHWFVTQRNFYEPQIITTDNTFVSGNCDVVIGIVNNTVYDPLQPELDSFKEELDKYFKNHTSPDVDLGDISGINASVVNIQKEIDRLNEVAKNLNESLIDLQELGKYEQYIK

SEQ ID NO: 2444 - protein, 1211 aa, Artificial Sequence
  SARS-CoV-2/Belgium/BC-03016/2020__EPI_ISL_415157 spike protein (1-1211)(A972C_R995C)
MFVFLVLLPLVSSQCVNLTTRTQLPPAYTNSFTRGVYYPDKVFRSSVLHSTQDLFLPFFSNVTWFHAIHVSGTNGTKRFDNPVLPFNDGVYFASTEKSNIIRGWIFGTTLDSKTQSLLIVNNATNVVIKVCEFQFCNDPFLGVYYHKNNKSWMESEFRVYSSANNCTFEYVSQPFLMDLEGKQGNFKNLREFVFKNIDGYFKIYSKHTPINLVRDLPQGFSALEPLVDLPIGINITRFQTLLALHRSYLTPGDSSSGWTAGAAAYYVGYLQPRTFLLKYNENGTITDAVDCALDPLSETKCTLKSFTVEKGIYQTSNFRVQPTESIVRFPNITNLCPFGEVFNATRFASVYAWNRKRISNCVADYSVLYNSASFSTFKCYGVSPTKLNDLCFTNVYADSFVIRGDEVRQIAPGQTGKIADYNYKLPDDFTGCVIAWNSNNLDSKVGGNYNYLYRLFRKSNLKPFERDISTEIYQAGSTPCNGVEGFNCYFPLQSYGFQPTNGVGYQPYRVVVLSFELLHAPATVCGPKKSTNLVKNKCVNFNFNGLTGTGVLTESNKKFLPFQQFGRDIADTTDAVRDPQTLEILDITPCSFGGVSVITPGTNTSNQVAVLYQGVNCTEVPVAIHADQLTPTWRVYSTGSNVFQTRAGCLIGAEHVNNSYECDIPIGAGICASYQTQTNSPRRARSVASQSIIAYTMSLGAENSVAYSNNSIAIPTNFTISVTTEILPVSMTKTSVDCTMYICGDSTECSNLLLQYGSFCTQLNRALTGIAVEQDKNTQEVFAQVKQIYKTPPIKDFGGFNFSQILPDPSKPSKRSFIEDLLFNKVTLADAGFIKQYGDCLGDIAARDLICAQKFNGLTVLPPLLTDEMIAQYTSALLAGTITSGWTFGAGAALQIPFAMQMAYRFNGIGVTQNVLYENQKLIANQFNSAIGKIQDSLSSTAPALGKLQDVVNQNAQALNTLVKQLSSNFGCISSVLNDILSRLDKVEAEVQIDCLITGRLQSLQTYVTQQLIRAAEIRASANLAATKMSECVLGQSKRVDFCGKGYHLMSFPQSAPHGVVFLHVTYVPAQEKNFTTAPAICHDGKAHFPREGVFVSNGTHWFVTQRNFYEPQIITTDNTFVSGNCDVVIGIVNNTVYDPLQPELDSFKEELDKYFKNHTSPDVDLGDISGINASVVNIQKEIDRLNEVAKNLNESLIDLQELGKYEQYIK

SEQ ID NO: 2445 - protein, 1211 aa, Artificial Sequence
  SARS-CoV-2/Germany/BavPat3/2020__EPI_ISL_414521 spike protein (1-1211)(A972C_R995C)
MFVFLVLLPLVSSQCVNLTTRTQLPPAYTNSFTRGVYYPDKVFRSSVLHSTQDLFLPFFSNVTWFHAIHVSGTNGTKRFDNPVLPFNDGVYFASTEKSNIIRGWIFGTTLDSKTQSLLIVNNATNVVIKVCEFQFCNDPFLGVYYHKNNKSWMESEFRVYSSANNCTFEYVSQPFLMDLEGKQGNFKNLREFVFKNIDGYFKIYSKHTPINLVRDLPQGFSALEPLVDLPIGINITRFQTLLALHRSYLTPGDSSSGWTAGAAAYYVGYLQPRTFLLKYNENGTITDAVDCALDPLSETKCTLKSFTVEKGIYQTSNFRVQPTESIVRFPNITNLCPFGEVFNATRFASVYAWNRKRISNCVADYSVLYNSASFSTFKCYGVSPTKLNDLCFTNVYADSFVIRGDEVRQIAPGQTGKIADYNYKLPDDFTGCVIAWNSNNLDSKVGGNYNYLYRLFRKSNLKPFERDISTEIYQAGSTPCNGVEGFNCYFPLQSYGFQPTNGVGYQPYRVVVLSFELLHAPATVCGPKKSTNLVKNKCVNFNFNGLTGTGVLTESNKKFLPFQQFGRDIADTTDAVRDPQTLEILDITPCSFGGVSVITPGTNTSNQVAVLYQDVNCTEVPVAIHADQLTPTWRVYSTGSNVFQTRAGCLIGAEHVNNSYECDIPIGAGICASYQTQTNSPRRARSVASQSIIAYTMSLGAENSVAYSNNSIAIPTNFTISVTTEILPVSMTKTSVDCTMYICGDSTECSNLLLQYGSFCTQLNRALTGIAVEQDKNTQQVFAQVKQIYKTPPIKDFGGFNFSQILPDPSKPSKRSFIEDLLFNKVTLADAGFIKQYGDCLGDIAARDLICAQKFNGLTVLPPLLTDEMIAQYTSALLAGTITSGWTFGAGAALQIPFAMQMAYRFNGIGVTQNVLYENQKLIANQFNSAIGKIQDSLSSTASALGKLQDVVNQNAQALNTLVKQLSSNFGCISSVLNDILSRLDKVEAEVQIDCLITGRLQSLQTYVTQQLIRAAEIRASANLAATKMSECVLGQSKRVDFCGKGYHLMSFPQSAPHGVVFLHVTYVPAQEKNFTTAPAICHDGKAHFPREGVFVSNGTHWFVTQRNFYEPQIITTDNTFVSGNCDVVIGIVNNTVYDPLQPELDSFKEELDKYFKNHTSPDVDLGDISGINASVVNIQKEIDRLNEVAKNLNESLIDLQELGKYEQYIK

SEQ ID NO: 2446 - protein, 1211 aa, Artificial Sequence
  SARS-CoV-2/France/HF1805/2020__EPI_ISL_414628 spike protein (1-1211)(A972C_R995C)
MFVFLVLLPLVSSQCVNLTTRTQLPPAYTNSFTRGVYYPDKVFRSSVLHSTQDLFLPFFSNVTWFHAIHVSGTNGTKRFDNPVLPFNDGVYFASTEKSNIIRGWIFGTTLDSKTQSLLIVNNATNVVIKVCEFQFCNDPFLGVYYHKNNKSWMESEFRVYSSANNCTFEYVSQPFLMDLEGKQGNFKNLREFVFKNIDGYFKIYSKHTPINLVRDLPQGFSALEPLVDLPIGINITRFQTLLALHRSYLTPGDSSSGWTAGAAAYYVGYLQPRTFLLKYNENGTITDAVDCALDPLSETKCTLKSFTVEKGIYQTSNFRVQPTESIVRFPNITNLCPFGEVFNATRFASVYAWNRKRISNCVADYSVLYNSASFSTFKCYGVSPTKLNDLCFTNVYADSFVIRGDEVRQIAPGQTGKIADYNYKLPDDFTGCVIAWNSNNLDSKVGGNYNYLYRLFRKSNLKPFERDISTEIYQAGSTPCNGVEGFNCYFPLQSYGFQPTNGVGYQPYRVVVLSFELLHAPATVCGPKKSTNLVKNKCVNFNFNGLTGTGVLTESNKKFLPFQQFGRDIADTTDAVRDPQTLEILDITPCSFGGVSVITPGTNTSNQVAVLYQGVNCTEVPVAIHADQLTPTWRVYSTGSNVFQTRAGCLIGAEHVNNSYECDIPIGAGICASYQTQTNSPRRARSVASQSIIAYTMSLGAENSVAYSNNSIAIPTNFTISVTTEILPVSMTKTSVDCTMYICGDSTECSNLLLQYGSFCTQLNRALTGIAVEQDKNTQEVFAQVKQIYKTPPIKDFGGFNFSQILPDPSKPSKRSFIEDLLFNKVTLADAGFIKQYGDCLGDIAARDLICAQKFNGLTVLPPLLTDEMIAQYTSALLAGTITSGWTFGAGAALQIPFAMQMAYRFNGIGVTQNVLYENQKLIANQFNSAIGKIQDSLSSTASALGKLQDVVNQNAQALNTLVKQLSSNFGCISSVLNDILSRLDKVEAEVQIDCLITGRLQSLQTYVTQQLIRAAEIRASANLAATKMSECVLGQSKRVDFCGKGYHLMSFPQSAPHGVVFLHVTYVPAQEKNFTTAPAICHDGKAHFPREGVFVSNGTHWFVTQRNFYEPQIITTDNTFVSGNCDVVIGVVNNTVYDPLQPELDSFKEELDKYFKNHTSPDVDLGDISGINASVVNIQKEIDRLNEVAKNLNESLIDLQELGKYEQYIK

SEQ ID NO: 2447 - protein, 1211 aa, Artificial Sequence
  SARS-CoV-2/Netherlands/ZuidHolland_9/2020__EPI_ISL_414445 spike protein (1-1211)(A972C_R995C)
MFVFLVLLPLVSSQCVNLTTRTQLPPAYTNSFTRGVYYPDKVFRSSVLHSTQDLFLPFFSNVTWFHAIHVSGTNGTKRFDNPVLPFNDGVYFASTEKSNIIRGWIFGTTLDSKTQSLLIVNNATNVVIKVCEFQFCNDPFLGVYYHKNNKSWMESEFRVYSSANNCTFEYVSQPFLMDLEGKQGNFKNLREFVFKNIDGYFKIYSKHTPINLVRDLPQGFSALEPLVDLPIGINITRFQTLLALHRSYLTPGDSSSGWTAGAAAYYVGYLQPRTFLLKYNENGTITDAVDCALDPLSETKCTLKSFTVEKGIYQTSNFRVQPTESIVRFPNITNLCPFGEVFNATRFASVYAWNRKRISNCVADYSVLYNSASFSTFKCYGVSPTKLNDLCFTNVYADSFVIRGDEVRQIAPGQTGKIADYNYKLPDDFTGCVIAWNSNNLDSKVGGNYNYLYRLFRKSNLKPFERDISTEIYQAGSTPCNGVEGFNCYFPLQSYGFQPTNGVGYQPYRVVVLSFELLHAPATVCGPKKSTNLVKNKCVNFNFNGLTGTGVLTESNKKFLPFQQFGRDIADTTDAVRDPQTLEILDITPCSFGGVSVITPGTNTSNQVAVLYQGVNCTEVPVAIHADQLTPTWRVYSTGSNVFQTRAGCLIGAEHVNNSYECDIPIGAGICASYQTQTNSPRRARSVASQSIIAYTMSLGAENSVAYSNNSIAIPTNFTISVTTEILPVSMTKTSVDCTMYICGDSTECSNLLLQYGSFCTQLNRALTGIAVEQDKNTQEVFAQVKQIYKTPPIKDFGGFNFSQILPDPSKPSKRSFIEDLLFNKVTLADAGFIKQYGDCLGDIAARDLICVQKFNGLTVLPPLLTDEMIAQYTSALLAGTITSGWTFGAGAALQIPFAMQMAYRFNGIGVTQNVLYENQKLIANQFNSAIGKIQDSLSSTASALGKLQDVVNQNAQALNTLVKQLSSNFGCISSVLNDILSRLDKVEAEVQIDCLITGRLQSLQTYVTQQLIRAAEIRASANLAATKMSECVLGQSKRVDFCGKGYHLMSFPQSAPHGVVFLHVTYVPAQEKNFTTAPAICHDGKAHFPREGVFVSNGTHWFVTQRNFYEPQIITTDNTFVSGNCDVVIGIVNNTVYDPLQPELDSFKEELDKYFKNHTSPDVDLGDISGINASVVNIQKEIDRLNEVAKNLNESLIDLQELGKYEQYIK

SEQ ID NO: 2448 - protein, 1211 aa, Artificial Sequence
  SARS-CoV-2/Finland/FIN03032020A/2020__EPI_ISL_413602 spike protein (1-1211)(A972C_R995C)
MFVFLVLLPLVSSQCVNLTTRTQLPPAYTNSFTRGVYYPDKVFRSSVLHSTQDLFLPFFSNVTWFHAIHVSGTNGTKRFDNPVLPFNDGVYFASTEKSNIIRGWIFGTTLDSKTQSLLIVNNATNVVIKVCEFQFCNDPFLGVYYHKNNKSWMESEFRVYSSANNCTFEYVSQPFLMDLEGKQGNFKNLREFVFKNIDGYFKIYSKHTPINLVRDLPQGFSALEPLVDLPIGINITRFQTLLALHRSYLTPGDSSSGWTAGAAAYYVGYLQPRTFLLKYNENGTITDAVDCALDPLSETKCTLKSFTVEKGIYQTSNFRVQPTESIVRFPNITNLCPFGEVFNATRFASVYAWNRKRISNCVADYSVLYNSASFSTFKCYGVSPTKLNDLCFTNVYADSFVIRGDEVRQIAPGQTGKIADYNYKLPDDFTGCVISWNSNNLDSKVGGNYNYLYRLFRKSNLKPFERDISTEIYQAGSTPCNGVEGFNCYFPLQSYGFQPTNGVGYQPYRVVVLSFELLHAPATVCGPKKSTNLVKNKCVNFNFNGLTGTGVLTESNKKFLPFQQFGRDIADTTDAVRDPQTLEILDITPCSFGGVSVITPGTNTSNQVAVLYQGVNCTEVPVAIHADQLTPTWRVYSTGSNVFQTRAGCLIGAEHVNNSYECDIPIGAGICASYQTQTNSPRRARSVASQSIIAYTMSLGAENSVAYSNNSIAIPTNFTISVTTEILPVSMTKTSVDCTMYICGDSTECSNLLLQYGSFCTQLNRALTGIAVEQDKNTQEVFAQVKQIYKTPPIKDFGGFNFSQILPDPSKPSKRSFIEDLLFNKVTLADAGFIKQYGDCLGDIAARDLICAQKFNGLTVLPPLLTDEMIAQYTSALLAGTITSGWTFGAGAALQIPFAMQMAYRFNGIGVTQNVLYENQKLIANQFNSAIGKIQDSLSSTASALGKLQDVVNQNAQALNTLVKQLSSNFGCISSVLNDILSRLDKVEAEVQIDCLITGRLQSLQTYVTQQLIRAAEIRASANLAATKMSECVLGQSKRVDFCGKGYHLMSFPQSAPHGVVFLHVTYVPAQEKNFTTAPAICHDGKAHFPREGVFVSNGTHWFVTQRNFYEPQIITTDNTFVSGNCDVVIGIVNNTVYDPLQPELDSFKEELDKYFKNHTSPDVDLGDISGINASVVNIQKEIDRLNEVAKNLNESLIDLQELGKYEQYIK

SEQ ID NO: 2449 - protein, 1211 aa, Artificial Sequence
  SARS-CoV-2/France/GE1977/2020__EPI_ISL_414632 spike protein (1-1211)(A972C_R995C)
MFVFLVLLPLVSSQCVNLTTRTQLPPAYTNSFTRGVYYPDKVFRSSVLHSTQDLFLPFFSNVTWFHAIHVSGTNGTKRFDNPVLPFNDGVYFASTEKSNIIRGWIFGTTLDSKTQSLLIVNNATNVVIKVCEFQFCNDPFLGVYYHKNNKSWMESEFRVYSSANNCTFEYVSQPFLMDLEGKQGNFKNLREFVFKNIDGYFKIYSKHTPINLVRDLPQGFSALEPLVDLPIGINITRFQTLLALHRSYLTPGDSSSGWTAGAAAYYVGYLQPRTFLLKYNENGTITDAVDCALDPLSETKCTLKSFTVEKGIYQTSNFRVQPTESIVRFPNITNLCPFGEVFNATRFASVYAWNRKRISNCVADYSVLYNSASFSTFKCYGVSPTKLNDLCFTNVYADSFVIRGDEVRQIAPGQTGKIADYNYKLPDDFTGCVIAWNSNNLDSKVGGNYNYLYRLFRKSNLKPFERDISTEIYQAGSTPCNGVEGFNCYFPLQSYGFQPTNGVGYQPYRVVVLSFELLHAPATVCGPKKSTNLVKNKCVNFNFNGLTGTGVLTESNKKFLPFQQFGRDIADTTDAVRDPQTLEILDITPCSFGGVSVITPGTNTSNQVAVLYQGVNCTEVPVAIHADQLTPTWRVYSTGSNVFQTRAGCLIGAEHVNNSYECDIPIGAGICASYQTQTNSPRRARSVASQSIIAYTMSLGAENSVAYSNNSIAIPTNFTISVTTEILPVSMTKTSVDCTMYICGDSTECSNLLLQYGSFCTQLNRALTGIAVEQDKNTQEVFAQVKQIYKTPPIKDFGGFNFSQILPDPSKPSKRSFIEDLLFNKVTLADAGFIKQYGDCLGDIAARDLICAQKFNGLTVLPPLLTDEMIAQYTSALLAGTITSGWTFGAGAALQIPFAMQMAYRFNGIGVTQNVLYENQKLIANQFNSAIGKIQDSLFSTASALGKLQDVVNQNAQALNTLVKQLSSNFGCISSVLNDILSRLDKVEAEVQIDCLITGRLQSLQTYVTQQLIRAAEIRASANLAATKMSECVLGQSKRVDFCGKGYHLMSFPQSAPHGVVFLHVTYVPAQEKNFTTAPAICHDGKAHFPREGVFVSNGTHWFVTQRNFYEPQIITTDNTFVSGNCDVVIGIVNNTVYDPLQPELDSFKEELDKYFKNHTSPDVDLGDISGINASVVNIQKEIDRLNEVAKNLNESLIDLQELGKYEQYIK

SEQ ID NO: 2450 - protein, 1211 aa, Artificial Sequence
  SARS-CoV-2/Finland/FIN-313/2020__EPI_ISL_414641 spike protein (1-1211)(A972C_R995C)
MFVFLVLLPLVSSQCVNLTTRTQLPPAYTNSFTRGVYYPDKVFRSSVLHSTQDLFLPFFSNVTWFHAIHVSGTNGTKRFDNPVLPFNDGVYFASTEKSNIIRGWIFGTTLDSKTQSLLIVNNATNVVIKVCEFQFCNDPFLGVYYHKNNKSWMESEFRVYSSANNCTFEYVSQPFLMDLEGKQGNFKNLREFVFKNIDGYFKIYSKHTPINLVRDLPQGFSALEPLVDLPIGINITRFKTLLALHRSYLTPGDSSSGWTAGAAAYYVGYLQPRTFLLKYNENGTITDAVDCALDPLSETKCTLKSFTVEKGIYQTSNFRVQPTESIVRFPNITNLCPFGEVFNATRFASVYAWNRKRISNCVADYSVLYNSASFSTFKCYGVSPTKLNDLCFTNVYADSFVIRGDEVRQIAPGQTGKIADYNYKLPDDFTGCVIAWNSNNLDSKVGGNYNYLYRLFRKSNLKPFERDISTEIYQAGSTPCNGVEGFNCYFPLQSYGFQPTNGVGYQPYRVVVLSFELLHAPATVCGPKKSTNLVKNKCVNFNFNGLTGTGVLTESNKKFLPFQQFGRDIADTTDAVRDPQTLEILDITPCSFGGVSVITPGTNTSNQVAVLYQGVNCTEVPVAIHADQLTPTWRVYSTGSNVFQTRAGCLIGAEHVNNSYECDIPIGAGICASYQTQTNSPRRARSVASQSIIAYTMSLGAENSVAYSNNSIAIPTNFTISVTTEILPVSMTKTSVDCTMYICGDSTECSNLLLQYGSFCTQLNRALTGIAVEQDKNTQEVFAQVKQIYKTPPIKDFGGFNFSQILPDPSKPSKRSFIEDLLFNKVTLADAGFIKQYGDCLGDIAARDLICAQKFNGLTVLPPLLTDEMIAQYTSALLAGTITSGWTFGAGAALQIPFAMQMAYRFNGIGVTQNVLYENQKLIANQFNSAIGKIQDSLSSTASALGKLQDVVNQNAQALNTLVKQLSSNFGCISSVLNDILSRLDKVEAEVQIDCLITGRLQSLQTYVTQQLIRAAEIRASANLAATKMSECVLGQSKRVDFCGKGYHLMSFPQSAPHGVVFLHVTYVPAQEKNFTTAPAICHDGKAHFPREGVFVSNGTHWFVTQRNFYEPQIITTDNTFVSGNCDVVIGIVNNTVYDPLQPELDSFKEELDKYFKNHTSPDVDLGDISGINASVVNIQKEIDRLNEVAKNLNESLIDLQELGKYEQYIK

SEQ ID NO: 2451 - protein, 1211 aa, Artificial Sequence
  SARS-CoV-2/Netherlands/ZuidHolland_2/2020__EPI_ISL_414556 spike protein (1-1211)(A972C_R995C)
MFVFLVLLPLVSSQCVNLTTRTQLPPAYTNSFTRGVYYPDKVFRSSVLHSTQDLFLPFFSNVTWFHAIHVSGTNGTKRFDNPVLPFNDGVYFASTEKSNIIRGWIFGTTLDSKTQSLLIVNNATNVVIKVCEFQFCNDPFLGVYYHKNNKSWMESEFRVYSSANNCTFEYVSQPFLMDLEGKQGNFKNLREFVFKNIDGYFKIYSKHTPINLVRDLPQGFSALEPLVDLPIGINITRFQTLLALHRSYLTPGDSSSGWTAGAAAYYVGYLQPRTFLLKYNENGTITDAVDCALDPLSETKCTLKSFTVEKGIYQTSNFRVQPTESIVRFPNITNLCPFGEVFNATRFASVYAWNRKRISNCVADYSVLYNSASFSTFKCYGVSPTKLNDLCFTNVYADSFVIRGDEVRQIAPGQTGKIADYNYKLPDDFTGCVIAWNSNNLDSKVGGNYNYLYRLFRKSNLKPFERDISTEIYQAGSTPCNGVEGFNCYFPLQSYGFQPTNGVGYQPYRVVVLSFELLHAPATVCGPKKSTNLVKNKCVNFNFNGLTGTGVLTESNKKFLPFQQFGRDIADTTDAVRDPQTLEILDITPCSFGGVSVITPGTNTSNQVAVLYQGVNCTEVPVAIHADQLTPTWRVYSTGSNVFQTRAGCLIGAEHVNNSYECDIPIGAGICASYQTQTNSPRRARSVASQSIIAYTMSLGAENSVAYSNNSIAIPTNFTISVTTEILPVSMTKTSVDCTMYICGDSTECSNLLLQYGSFCTQLNRALTGIALEQDKNTQEVFAQVKQIYKTPPIKDFGGFNFSQILPDPSKPSKRSFIEDLLFNKVTLADAGFIKQYGDCLGDIAARDLICAQKFNGLTVLPPLLTDEMIAQYTSALLAGTITSGWTFGAGAALQIPFAMQMAYRFNGIGVTQNVLYENQKLIANQFNSAIGKIQDSLSSTASALGKLQDVVNQNAQALNTLVKQLSSNFGCISSVLNDILSRLDKVEAEVQIDCLITGRLQSLQTYVTQQLIRAAEIRASANLAATKMSECVLGQSKRVDFCGKGYHLMSFPQSAPHGVVFLHVTYVPAQEKNFTTAPAICHDGKAHFPREGVFVSNGTHWFVTQRNFYEPQIITTDNTFVSGNCDVVIGIVNNTVYDPLQPELDSFKEELDKYFKNHTSPDVDLGDISGINASVVNIQKEIDRLNEVAKNLNESLIDLQELGKYEQYIK

SEQ ID NO: 2452 - protein, 1211 aa, Artificial Sequence
  SARS-CoV-2/USA/WA-UW31/2020__EPI_ISL_414618 spike protein (1-1211)(A972C_R995C)
MFVFLVLLPLVSSQCVNLTTRTQLPPAYTNSFTRGVYYPDKVFRSSVLHSTQDLFLPFFSNVTWFHAIHVSGTNGTKRFDNPVLPFNDGVYFASTEKSNIIRGWIFGTTLDSKTQSLLIVNNATNVVIKVCEFQFCNDPFLGVYYHKNNKSWMESEFRVYSSANNCTFEYVSQPFLMDLEGKQGNFKNLREFVFKNIDGYFKIYSKHTPINLVRDLPQGFSALEPLVDLPIGINITRFQTLLALHRSYLTPGDSSSGWTAGAAAYYVGYLQPRTFLLKYNENGTITDAVDCALDPLSETKCTLKSFTVEKGIYQTSNFRVQPTESIVRFPNITNLCPFGEVFNATRFASVYAWNRKRISNCVADYSVLYNSASFSTFKCYGVSPTKLNDLCFTNVYADSFVIRGDEVRQIAPGQTGKIADYNYKLPDDFTGCVIAWNSNNLDSKVGGNYNYLYRLFRKSNLKPFERDISTEIYQAGSTPCNGAEGFNCYFPLQSYGFQPTNGVGYQPYRVVVLSFELLHAPATVCGPKKSTNLVKNKCVNFNFNGLTGTGVLTESNKKFLPFQQFGRDIADTTDAVRDPQTLEILDITPCSFGGVSVITPGTNTSNQVAVLYQDVNCTEVPVAIHADQLTPTWRVYSTGSNVFQTRAGCLIGAEHVNNSYECDIPIGAGICASYQTQTNSPRRARSVASQSIIAYTMSLGAENSVAYSNNSIAIPTNFTISVTTEILPVSMTKTSVDCTMYICGDSTECSNLLLQYGSFCTQLNRALTGIAVEQDKNTQEVFAQVKQIYKTPPIKDFGGFNFSQILPDPSKPSKRSFIEDLLFNKVTLADAGFIKQYGDCLGDIAARDLICAQKFNGLTVLPPLLTDEMIAQYTSALLAGTITSGWTFGAGAALQIPFAMQMAYRFNGIGVTQNVLYENQKLIANQFNSAIGKIQDSLSSTASALGKLQDVVNQNAQALNTLVKQLSSNFGCISSVLNDILSRLDKVEAEVQIDCLITGRLQSLQTYVTQQLIRAAEIRASANLAATKMSECVLGQSKRVDFCGKGYHLMSFPQSAPHGVVFLHVTYVPAQEKNFTTAPAICHDGKAHFPREGVFVSNGTHWFVTQRNFYEPQIITTDNTFVSGNCDVVIGIVNNTVYDPLQPELDSFKEELDKYFKNHTSPDVDLGDISGINASVVNIQKEIDRLNEVAKNLNESLIDLQELGKYEQYIK

SEQ ID NO: 2453 - protein, 1211 aa, Artificial Sequence
  SARS-CoV-2/South Korea/SNU01/2020__EPI_ISL_411929 spike protein (1-1211)(A972C_R995C)
MFVFLVLLPLVSSQCVNLTTRTQLPPAYTNSFTRGVYYPDKVFRSSVLHSTQDLFLPFFSNVTWFHAIHVSGTNGTKRFDNPVLPFNDGVYFASTEKSNIIRGWIFGTTLDSKTQSLLIVNNATNVVIKVCEFQFCNDPFLGVYYHKNNKSWMESEFRVYSSANNCTFEYVSQPFLMDLEGKQGNFKNLREFVFKNIDGYFKIYSKHTPINLVRDLPQGFWALEPLVDLPIGINITRFQTLLALHRSYLTPGDSSSGWTAGAAAYYVGYLQPRTFLLKYNENGTITDAVDCALDPLSETKCTLKSFTVEKGIYQTSNFRVQPTESIVRFPNITNLCPFGEVFNATRFASVYAWNRKRISNCVADYSVLYNSASFSTFKCYGVSPTKLNDLCFTNVYADSFVIRGDEVRQIAPGQTGKIADYNYKLPDDFTGCVIAWNSNNLDSKVGGNYNYLYRLFRKSNLKPFERDISTEIYQAGSTPCNGVEGFNCYFPLQSYGFQPTNGVGYQPYRVVVLSFELLHAPATVCGPKKSTNLVKNKCVNFNFNGLTGTGVLTESNKKFLPFQQFGRDIADTTDAVRDPQTLEILDITPCSFGGVSVITPGTNTSNQVAVLYQDVNCTEVPVAIHADQLTPTWRVYSTGSNVFQTRAGCLIGAEHVNNSYECDIPIGAGICASYQTQTNSPRRARSVASQSIIAYTMSLGAENSVAYSNNSIAIPTNFTISVTTEILPVSMTKTSVDCTMYICGDSTECSNLLLQYGSFCTQLNRALTGIAVEQDKNTQEVFAQVKQIYKTPPIKDFGGFNFSQILPDPSKPSKRSFIEDLLFNKVTLADAGFIKQYGDCLGDIAARDLICAQKFNGLTVLPPLLTDEMIAQYTSALLAGTITSGWTFGAGAALQIPFAMQMAYRFNGIGVTQNVLYENQKLIANQFNSAIGKIQDSLSSTASALGKLQDVVNQNAQALNTLVKQLSSNFGCISSVLNDILSRLDKVEAEVQIDCLITGRLQSLQTYVTQQLIRAAEIRASANLAATKMSECVLGQSKRVDFCGKGYHLMSFPQSAPHGVVFLHVTYVPAQEKNFTTAPAICHDGKAHFPREGVFVSNGTHWFVTQRNFYEPQIITTDNTFVSGNCDVVIGIVNNTVYDPLQPELDSFKEELDKYFKNHTSPDVDLGDISGINASVVNIQKEIDRLNEVAKNLNESLIDLQELGKYEQYIK

SEQ ID NO: 2454 - protein, 1211 aa, Artificial Sequence
  SARS-CoV-2/China/WF0004/2020__EPI_ISL_413694 spike protein (1-1211)(A972C_R995C)
MFVFLVLLPLVSSQCVNLTTRTQLPPAYTNSFTRGVYYPDKVFRSSVLHSTQDLFLPFFSNVTWFHAIHVSGTNGTKRFDNPVLPFNDGVYFASTEKSNIIRGWIFGTTLDSKTQSLLIVNNATNVVIKVCEFQFCNDPFLGVYYHKNNKSWTESEFRVYSSANNCTFEYVSQPFLMDLEGKQGNFKNLREFVFKNIDGYFKIYSKHTPINLVRDLPQGFSALEPLVDLPIGINITRFQTLLALHRSYLTPGDSSSGWTAGAAAYYVGYLQPRTFLLKYNENGTITDAVDCALDPLSETKCTLKSFTVEKGIYQTSNFRVQPTESIVRFPNITNLCPFGEVFNATRFASVYAWNRKRISNCVADYSVLYNSASFSTFKCYGVSPTKLNDLCFTNVYADSFVIRGDEVRQIAPGQTGKIADYNYKLPDDFTGCVIAWNSNNLDSKVGGNYNYLYRLFRKSNLKPFERDISTEIYQAGSTPCNGVEGFNCYFPLQSYGFQPTNGVGYQPYRVVVLSFELLHAPATVCGPKKSTNLVKNKCVNFNFNGLTGTGVLTESNKKFLPFQQFGRDIADTTDAVRDPQTLEILDITPCSFGGVSVITPGTNTSNQVAVLYQDVNCTEVPVAIHADQLTPTWRVYSTGSNVFQTRAGCLIGAEHVNNSYECDIPIGAGICASYQTQTNSPRRARSVASQSIIAYTMSLGAENSVAYSNNSIAIPTNFTISVTTEILPVSMTKTSVDCTMYICGDSTECSNLLLQYGSFCTQLNRALTGIAVEQDKNTQEVFAQVKQIYKTPPIKDFGGFNFSQILPDPSKPSKRSFIEDLLFNKVTLADAGFIKQYGDCLGDIAARDLICAQKFNGLTVLPPLLTDEMIAQYTSALLAGTITSGWTFGAGAALQIPFAMQMAYRFNGIGVTQNVLYENQKLIANQFNSAIGKIQDSLSSTASALGKLQDVVNQNAQALNTLVKQLSSNFGCISSVLNDILSRLDKVEAEVQIDCLITGRLQSLQTYVTQQLIRAAEIRASANLAATKMSECVLGQSKRFDFCGKGYHLMSFPQSAPHGVVFLHVTYVPAQEKNFTTAPAICHDGKAHFPREGVFVSNGTHWFVTQRNFYEPQIITTDNTFVSGNCDVVIGIVNNTVYDPLQPELDSFKEELDKYFKNHTSPDVDLGDISGINASVVNIQKEIDRLNEVAKNLNESLIDLQELGKYEQYIK

SEQ ID NO: 2455 - protein, 1211 aa, Artificial Sequence
  SARS-CoV-2/China/WF0028/2020__EPI_ISL_413791 spike protein (1-1211)(A972C_R995C)
MFVFLVLLPLVSSQCVNLTTRTQLPPAYTNSFTRGVYYPDKVFRSSVLHSTQDLFLPFFSNVTWFHAIHVSGTNGTKRFDNPVLPFNDGVYFASTEKSNIIRGWIFGTTLDSKTQSLLIVNNATNVVIKVCEFQFCNDPFLGVYYHKNNKSWMESEFRVYSSANNCTFEYVSQPFLMDLEGKQGNFKNLREFVFKNIDGYFKIYSKHTPINLVRDLPQGFSALEPLVDLPIGINITRFQTLLALHRSYLTPGDSSSGWTAGAAAYYVGYLQPRTFLLKYNENGTITDAVDCALDPLSETKCTLKSFTVEKGIYQTSNFRVQPTESIVRFPNITNLCPFGEVFNATRFASVYAWNRKRISNCVADYSVLYNSASFSTFKCYGVSPTKLNDLCFTNVYADSFVIRGDEVRQIAPGQTGKIADYNYKLPDDFTGCVIAWNSNNLDSKVGGNYNYLYRLFRKSNLKPFERDISTEIYQAGSTPCNGVEGFNCYFPLQSYGFQPTNGVGYQPYRVVVLSFELLHAPATVCGPKKSTNLVKNKCVNFNFNGLTGTGVLTESNKKFLPFQQFGRDIADTTDAVRDPQTLEILDITPCSFGGVSVITPGTNTSNQVAVLYQDVNCTEVPVAIHADQLTPTWRVYSTGSNVFQTRAGCLIGAEHVNNSYECDIPIGAGICASYQTQTNSPRRARSVASQSIIAYTMSLGAENSVAYSNNSIAIPTNFTISVTTEILPVSMTKTSVDCTMYICGDSTECSNLLLQYGSFCTQLNRALTGIAVEQDKNTQEVFAQVKQIYKTPPIKDFGGFNFSQILPDPSKPSKRSFIEDLLFNKVTLADAGFIKQYGDCLGDIAARDLICAQKFNGLTVLPPLLTDEMIAQYTSALLAGTITSGWTFGAGAALQIPFAMQMAYRFNGIGVTQNVLYENQKLIANQFNSAIGKIQDSLSSTASALGKLQDVVNQNAQALNTLVKQLSSNFGCISSVLNDILSRLDKVEAEVQIDCLITGRLQSLQTYVTQQLIRAAEIRASANLAATKMSECVLGQSKRVDFCGKGYHLMSFPQSAPHGVVFLHVTYVPAQEKNFTTAPAICHDGKAHFPREGVFVSNGTHWFVTQRNFYEPQIITTDNTFVSGNCDVVIGIVNNTVYDPLQPELESFKEELDKYFKNHTSPDVDLGDISGINASVVNIQKEIDRLNEVAKNLNESLIDLQELGKYEQYIK

SEQ ID NO: 2456 - protein, 1211 aa, Artificial Sequence
  SARS-CoV-2/2019-nCoV/USA-CruiseA-18/2020__MT159716.1 spike protein (1-1211)(A972C_R995C)
MFVFLVLLPLVSSQCVNLTTRTQLPPAYTNSFTRGVYYPDKVFRSSVLHSTQDLFLPFFSNVTWFHAIHVSGTNGTKRFDNPVLPFNDGVYFASTEKSNIIRGWIFGTTLDSKTQSLLIVNNATNVVIKVCEFQFCNDPFLGVYYHKNNKSWMESELRVYSSANNCTFEYVSQPFLMDLEGKQGNFKNLREFVFKNIDGYFKIYSKHTPINLVRDLPQGFSALEPLVDLPIGINITRFQTLLALHRSYLTPGDSSSGWTAGAAAYYVGYLQPRTFLLKYNENGTITDAVDCALDPLSETKCTLKSFTVEKGIYQTSNFRVQPTESIVRFPNITNLCPFGEVFNATRFASVYAWNRKRISNCVADYSVLYNSASFSTFKCYGVSPTKLNDLCFTNVYADSFVIRGDEVRQIAPGQTGKIADYNYKLPDDFTGCVIAWNSNNLDSKVGGNYNYLYRLFRKSNLKPFERDISTEIYQAGSTPCNGVEGFNCYFPLQSYGFQPTNGVGYQPYRVVVLSFELLHAPATVCGPKKSTNLVKNKCVNFNFNGLTGTGVLTESNKKFLPFQQFGRDIADTTDAVRDPQTLEILDITPCSFGGVSVITPGTNTSNQVAVLYQDVNCTEVPVAIHADQLTPTWRVYSTGSNVFQTRAGCLIGAEHVNNSYECDIPIGAGICASYQTQTNSPRRARSVASQSIIAYTMSLGAENSVAYSNNSIAIPTNFTISVTTEILPVSMTKTSVDCTMYICGDSTECSNLLLQYGSFCTQLNRALTGIAVEQDKNTQEVFAQVKQIYKTPPIKDFGGFNFSQILPDPSKPSKRSFIEDLLFNKVTLADAGFIKQYGDCLGDIAARDLICAQKFNGLTVLPPLLTDEMIAQYTSALLAGTITSGWTFGAGAALQIPFAMQMAYRFNGIGVTQNVLYENQKLIANQFNSAIGKIQDSLSSTASALGKLQDVVNQNAQALNTLVKQLSSNFGCISSVLNDILSRLDKVEAEVQIDCLITGRLQSLQTYVTQQLIRAAEIRASANLAATKMSECVLGQSKRVDFCGKGYHLMSFPQSAPHGVVFLHVTYVPAQEKNFTTAPAICHDGKAHFPREGVFVSNGTHWFVTQRNFYEPQIITTDNTFVSGNCDVVIGIVNNTVYDPLQPELDSFKEELDKYFKNHTSPDVDLGDISGINASVVNIQKEIDRLNEVAKNLNESLIDLQELGKYEQYIK

SEQ ID NO: 2457 - protein, 1211 aa, Artificial Sequence
  SARS-CoV-2/SARS-CoV-2/Yunnan-01/human/2020/CHN__MT049951.1 spike protein (1-1211)(A972C_R995C)
MFVFLVLLPLVSSQCVNLTTRTQLPPANTNSFTRGVYYPDKVFRSSVLHSTQDLFLPFFSNVTWFHAIHVSGTNGTKRFDNPVLPFNDGVYFASTEKSNIIRGWIFGTTLDSKTQSLLIVNNATNVVIKVCEFQFCNDPFLGVYYHKNNKSWMESEFRVYSSANNCTFEYVSQPFLMDLEGKQGNFKNLREFVFKNIDGYFKIYSKHTPINLVRDLPQGFSALEPLVDLPIGINITRFQTLLALHRSYLTPGDSSSGWTAGAAAYYVGYLQPRTFLLKYNENGTITDAVDCALDPLSETKCTLKSFTVEKGIYQTSNFRVQPTESIVRFPNITNLCPFGEVFNATRFASVYAWNRKRISNCVADYSVLYNSASFSTFKCYGVSPTKLNDLCFTNVYADSFVIRGDEVRQIAPGQTGKIADYNYKLPDDFTGCVIAWNSNNLDSKVGGNYNYLYRLFRKSNLKPFERDISTEIYQAGSTPCNGVEGFNCYFPLQSYGFQPTNGVGYQPYRVVVLSFELLHAPATVCGPKKSTNLVKNKCVNFNFNGLTGTGVLTESNKKFLPFQQFGRDIADTTDAVRDPQTLEILDITPCSFGGVSVITPGTNTSNQVAVLYQDVNCTEVPVAIHADQLTPTWRVYSTGSNVFQTRAGCLIGAEHVNNSYECDIPIGAGICASYQTQTNSPRRARSVASQSIIAYTMSLGAENSVAYSNNSIAIPTNFTISVTTEILPVSMTKTSVDCTMYICGDSTECSNLLLQYGSFCTQLNRALTGIAVEQDKNTQEVFAQVKQIYKTPPIKDFGGFNFSQILPDPSKPSKRSFIEDLLFNKVTLADAGFIKQYGDCLGDIAARDLICAQKFNGLTVLPPLLTDEMIAQYTSALLAGTITSGWTFGAGAALQIPFAMQMAYRFNGIGVTQNVLYENQKLIANQFNSAIGKIQDSLSSTASALGKLQDVVNQNAQALNTLVKQLSSNFGCISSVLNDILSRLDKVEAEVQIDCLITGRLQSLQTYVTQQLIRAAEIRASANLAATKMSECVLGQSKRVDFCGKGYHLMSFPQSAPHGVVFLHVTYVPAQEKNFTTAPAICHDGKAHFPREGVFVSNGTHWFVTQRNFYEPQIITTDNTFVSGNCDVVIGIVNNTVYDPLQPELDSFKEELDKYFKNHTSPDVDLGDISGINASVVNIQKEIDRLNEVAKNLNESLIDLQELGKYEQYIK

SEQ ID NO: 2458 - protein, 1211 aa, Artificial Sequence
  SARS-CoV-2/USA/WA-UW292/2020__EPI_ISL_418077 spike protein (1-1211)(A972C_R995C)
MFVFLVLLPLVSSQCVNLTTRTQLPPAYTNSFTRGVYYPDKVFRSSVLHSTQDLFLPFFSNVTWFHAIHVSGTNGTKRFDNPVLPFNDGVYFASTEKSNIIRGWIFGTTLDSKTQSLLIVNNATNVVIKVCEFQFCNDPFLGVYYHKNNKSWMESEFRVYSSANNCTFEYVSQPFLMDLEGKQGNFKNLREFVFKNIDGYFKIYSKHTPINLVRDLPQGFSALEPLVDLPIGINITRFQTLLALHRSYLTPGDSSSGWTAGAAAYYVGYLQPRTFLLKYNENGTITDAVDCALDPLSETKCTLKSFTVEKGIYQTSNFRVQPTESIVRFPNITNLCPFGEVFNATRFASVYAWNRKRISNCVADYSVLYNSASFSTFKCYGVSPTKLNDLCFTNVYADSFVIRGDEVRQIAPGQTGKIADYNYKLPDDFTGCVIAWNSNNLDSKVGGNYNYLYRLFRKSNLKPFERDISTEIYQASSTPCNGVEGFNCYFPLQSYGFQPTNGVGYQPYRVVVLSFELLHAPATVCGPKKSTNLVKNKCVNFNFNGLTGTGVLTESNKKFLPFQQFGRDIADTTDAVRDPQTLEILDITPCSFGGVSVITPGTNTSNQVAVLYQDVNCTEVPVAIHADQLTPTWRVYSTGSNVFQTRAGCLIGAEHVNNSYECDIPIGAGICASYQTQTNSPRRARSVASQSIIAYTMSLGAENSVAYSNNSIAIPTNFTISVTTEILPVSMTKTSVDCTMYICGDSTECSNLLLQYGSFCTQLNRALTGIAVEQDKNTQEVFAQVKQIYKTPPIKDFGGFNFSQILPDPSKPSKRSFIEDLLFNKVTLADAGFIKQYGDCLGDIAARDLICAQKFNGLTVLPPLLTDEMIAQYTSALLAGTITSGWTFGAGAALQIPFAMQMAYRFNGIGVTQNVLYENQKLIANQFNSAIGKIQDSLSSTASALGKLQDVVNQNAQALNTLVKQLSSNFGCISSVLNDILSRLDKVEAEVQIDCLITGRLQSLQTYVTQQLIRAAEIRASANLAATKMSECVLGQSKRVDFCGKGYHLMSFPQSAPHGVVFLHVTYVPAQEKNFTTAPAICHDGKAHFPREGVFVSNGTHWFVTQRNFYEPQIITTDNTFVSGNCDVVIGIVNNTVYDPLQPELDSFKEELDKYFKNHTSPDVDLGDISGINASVVNIQKEIDRLNEVAKNLNESLIDLQELGKYEQYIK

SEQ ID NO: 2459 - protein, 1211 aa, Artificial Sequence
  SARS-CoV-2/Iceland/192/2020__EPI_ISL_417819 spike protein (1-1211)(A972C_R995C)
MFVFFVLLPLVSSQCVNLTTRTQLPPAYTNSFTRGVYYPDKVFRSSVLHSTQDLFLPFFSNVTWFHAIHVSGTNGTKRFDNPVLPFNDGVYFASTEKSNIIRGWIFGTTLDSKTQSLLIVNNATNVVIKVCEFQFCNDPFLGVYYHKNNKSWMESEFRVYSSANNCTFEYVSQPFLMDLEGKQGNFKNLREFVFKNIDGYFKIYSKHTPINLVRDLPQGFSALEPLVDLPIGINITRFQTLLALHRSYLTPGDSSSGWTAGAAAYYVGYLQPRTFLLKYNENGTITDAVDCALDPLSETKCTLKSFTVEKGIYQTSNFRVQPTESIVRFPNITNLCPFGEVFNATRFASVYAWNRKRISNCVADYSVLYNSASFSTFKCYGVSPTKLNDLCFTNVYADSFVIRGDEVRQIAPGQTGKIADYNYKLPDDFTGCVIAWNSNNLDSKVGGNYNYLYRLFRKSNLKPFERDISTEIYQAGSTPCNGVEGFNCYFPLQSYGFQPTNGVGYQPYRVVVLSFELLHAPATVCGPKKSTNLVKNKCVNFNFNGLTGTGVLTESNKKFLPFQQFGRDIADTTDAVRDPQTLEILDITPCSFGGVSVITPGTNTSNQVAVLYQGVNCTEVPVAIHADQLTPTWRVYSTGSNVFQTRAGCLIGAEHVNNSYECDIPIGAGICASYQTQTNSPRRARSVASQSIIAYTMSLGAENSVAYSNNSIAIPTNFTISVTTEILPVSMTKTSVDCTMYICGDSTECSNLLLQYGSFCTQLNRALTGIAVEQDKNTQEVFAQVKQIYKTPPIKDFGGFNFSQILPDPSKPSKRSFIEDLLFNKVTLADAGFIKQYGDCLGDIAARDLICAQKFNGLTVLPPLLTDEMIAQYTSALLAGTITSGWTFGAGAALQIPFAMQMAYRFNGIGVTQNVLYENQKLIANQFNSAIGKIQDSLSSTASALGKLQDVVNQNAQALNTLVKQLSSNFGCISSVLNDILSRLDKVEAEVQIDCLITGRLQSLQTYVTQQLIRAAEIRASANLAATKMSECVLGQSKRVDFCGKGYHLMSFPQSAPHGVVFLHVTYVPAQEKNFTTAPAICHDGKAHFPREGVFVSNGTHWFVTQRNFYEPQIITTDNTFVSGNCDVVIGIVNNTVYDPLQPELDSFKEELDKYFKNHTSPDVDLGDISGINASVVNIQKEIDRLNEVAKNLNESLIDLQELGKYEQYIK

SEQ ID NO: 2460 - protein, 1211 aa, Artificial Sequence
  SARS-CoV-2/Belgium/ULG-6939/2020__EPI_ISL_417020 spike protein (1-1211)(A972C_R995C)
MFVFLVLLPLVSSQCVNLTTRTQLPPAYTNSFTRGVYYPDKVFRSSVLHSTQDLFLPFFSNVTWFHAIHVSGTNGTKRFDNPVLPFNDGVYFASTEKSNIIRGWIFGTTLDSKTQSLLIVNNATNVVIKVCEFQFCNDPFLGVYYHKNNKSWMESEFRVYSSANNCTFEYVSQPFLMDLEGKQGNFKNLREFVFKNIDGYFKIYSKHTPINLVRDLPQGFSALEPLVDLPIGINITRFQTLLALHRSYLTPGDSSSGWTAGAAAYYVGYLQPRTFLLKYNENGTITDAVDCALDPLSETKCTLKSFTVEKGIYQTSNFRVQPTESIVRFPNITNLCPFGEVFNATRFASVYAWNRKRISNCVADYSVLYNSASFSTFKCYGVSPTKLNDLCFTNVYADSFVIRGDEVRQIAPGQTGKIADYNYKLPDDFTGCVIAWNSNNLDSKVGGNYNYLYRLFRKSNLKPFERDISTEIYQAGSTPCNGVEGFNCYFPLQSYGFQPTNGVGYQPYRVVVLSFELLHAPATVCGPKKSTNLVKNKCVNFNFNGLTGTGVLTESNKKFLPFQQFGRDIADTTDAVRDPQTLEILDITPCSFGGVSVITPGTNTSNQVAVLYQGVNCTEVPVAIHADQLTPTWRVYSTGSNVFQTRAGCLIGAEHVNNSYECDIPIGAGICASYQTQTNSPRRARSVASQSIIAYTMSLGAENSVVYSNNSIAIPTNFTISVTTEILPVSMTKTSVDCTMYICGDSTECSNLLLQYGSFCTQLNRALTGIAVEQDKNTQEVFAQVKQIYKTPPIKDFGGFNFSQILPDPSKPSKRSFIEDLLFNKVTLADAGFIKQYGDCLGDIAARDLICAQKFNGLTVLPPLLTDEMIAQYTSALLAGTITSGWTFGAGAALQIPFAMQMAYRFNGIGVTQNVLYENQKLIANQFNSAIGKIQDSLSSTASALGKLQDVVNQNAQALNTLVKQLSSNFGCISSVLNDILSRLDKVEAEVQIDCLITGRLQSLQTYVTQQLIRAAEIRASANLAATKMSECVLGQSKRVDFCGKGYHLMSFPQSAPHGVVFLHVTYVPAQEKNFTTAPAICHDGKAHFPREGVFVSNGTHWFVTQRNFYEPQIITTDNTFVSGNCDVVIGIVNNTVYDPLQPELDSFKEELDKYFKNHTSPDVDLGDISGINASVVNIQKEIDRLNEVAKNLNESLIDLQELGKYEQYIK

SEQ ID NO: 2461 - protein, 1211 aa, Artificial Sequence
  SARS-CoV-2/France/HF2496/2020__EPI_ISL_418231 spike protein (1-1211)(A972C_R995C)
MFVFLVLLPLVSSQCVNLTTRTQLPPAYTNSFTRGVYYPDKVFRSSVLHSTQDLFLPFFSNVTWFHAIHVSGTNGTKRFDNPVLPFNDGVYFASTEKSNIIRGWIFGTTLDSKTQSLLIVNNATNVVIKVCEFQFCNDPFLGVYYHKNNKSWMESEFRVYSSANNCTFEYVSQPFLMDLEGKQGNFKNLREFVFKNIDGYFKIYSKHTPINLVRDLPQGFSALEPLVDLPIGINITRFQTLLALHRSYLTPGDSSSGWTAGAAAYYVGYLQPRTFLLKYNENGTITDAVDCALDPLSETKCTLKSFTVEKGIYQTSNFRVQPTESIVRFPNITNLCPFGEVFNATRFASVYAWNRKRISNCVADYSVLYNSASFSTFKCYGVSPTKLNDLCFTNVYADSFVIRGDEVRQIAPGQTGKIADYNYKLPDDFTGCVIAWNSNNLDSKVGGNYNYLYRLFRKSNLKPFERDISTEIYQAGSTPCNGVEGFNCYFPLQSYGFQPTNGVGYQPYRVVVLSFELLHAPATVCGPKKSTNLVKNKCVNFNFNGLTGTGVLTESNKKFLPFQQFGRDIADTTDAVRDPQTLEILDITPCSFGGVSVITPGTNTSNQVAVLYQGVNCTEVPVAIHADQLTPTWRVYSTGSNVFQTRAGCLIGAEHVNNSYECDIPIGAGICASYQTQTNSPRRARSVASQSIIAYTMSLGAENSVAYSNNSIAIPTNFTISVTTEILPVSMTKTSVDCTMYICGDSTECSNLLLQYGSFCTQLNRALTGIAVEQDKNTQEVFAQVKQIYKTPPIKDFGGFNFSQILPDPSKPSKRSFIEDLLFNKVTLADAGFIKQYGDCLGDIVARDLICAQKFNGLTVLPPLLTDEMIAQYTSALLAGTITSGWTFGAGAALQIPFAMQMAYRFNGIGVTQNVLYENQKLIANQFNSAIGKIQDSLSSTASALGKLQDVVNQNAQALNTLVKQLSSNFGCISSVLNDILSRLDKVEAEVQIDCLITGRLQSLQTYVTQQLIRAAEIRASANLAATKMSECVLGQSKRVDFCGKGYHLMSFPQSAPHGVVFLHVTYVPAQEKNFTTAPAICHDGKAHFPREGVFVSNGTHWFVTQRNFYEPQIITTDNTFVSGNCDVVIGIVNNTVYDPLQPELDSFKEELDKYFKNHTSPDVDLGDISGINASVVNIQKEIDRLNEVAKNLNESLIDLQELGKYEQYIK

SEQ ID NO: 2462 - protein, 1211 aa, Artificial Sequence
  SARS-CoV-2/USA/WA-UW291/2020__EPI_ISL_418076 spike protein (1-1211)(A972C_R995C)
MFVFLVLLPLVSSQCVNLTTRTQLPPAYTNSFTRGVYYPDKVFRSSVLHSTQDLFLPFFSNVTWFHAIHVSGTNGTKRFDNPVLPFNDGVYFASTEKSNIIRGWIFGTTLDSKTQSLLIVNNATNVVIKVCEFQFCNDPFLGVYYHKNNKSWMESEFRVYSSANNCTFEYVSQPFLMDLEGKQGNFKNLREFVFKNIDGYFKIYSKHTPINLVRDLPQGFSALEPLVDLPIGINITRFQTLLALHRSYLTPGDSSSGWTAGAAAYYVGYLQPRTFLLKYNENGTITDAVDCALDPLSETKCTLKSFTVEKGIYQTSNFRVQPTESIVRFPNITNLCPFGEVFNATRFASVYAWNRKRISNCVADYSVLYNSASFSTFKCYGVSPTKLNDLCFTNVYADSFVIRGDEVRQIAPGQTGKIADYNYKLPDDFTGCVIAWNSNNLDSKVGGNYNYLYRLFRKSNLKPFERDISTEIYQAGSTPCNGVEGFNCYFPLQSYGFQPTNGVGYQPYRVVVLSFELLHAPATVCGPKKSTNLVKNKCVNFNFNGLTGTGVLTESNKKFLPFQQFGRDIADTTDAVRDPQTLEILDITPCSFGGVSVITPGTNTSNQVAVLYQGVNCTEVPVAIHADQLTPTWRVYSTGSNVFQTRAGCLIGAEHVNNSYECDIPIGAGICASYQTQTNSPRRARSVASQSIIAYTMSLGAENSVAYSNNSIAIPTNFTISVTTEILPVSMTKTSVDCTMYICGDSTECSNLLLQYGSFCTQLNRALTGIAVEQDKNTQEVFAQVKQIYKTPPIKDFGGFNFSQILPDPSKPSKRSFIEDLLFNKVTLADAGFIKQYGDCLGDIAARDLICAQKFNGLTVLPPLLTDEMIAQYTSALLAGTITSGWTFGAGAALQIPFAMQMAYRFNGIGVTQNVLYENQKLIANQFNSAIGKIQYSLSSTASALGKLQDVVNQNAQALNTLVKQLSSNFGCISSVLNDILSRLDKVEAEVQIDCLITGRLQSLQTYVTQQLIRAAEIRASANLAATKMSECVLGQSKRVDFCGKGYHLMSFPQSAPHGVVFLHVTYVPAQEKNFTTAPAICHDGKAHFPREGVFVSNGTHWFVTQRNFYEPQIITTDNTFVSGNCDVVIGIVNNTVYDPLQPELDSFKEELDKYFKNHTSPDVDLGDISGINASVVNIQKEIDRLNEVAKNLNESLIDLQELGKYEQYIK

SEQ ID NO: 2463 - protein, 1211 aa, Artificial Sequence; identical to SEQ ID NO: 2426
  SARS-CoV-2/Portugal/PT0034/2020__EPI_ISL_418019 spike protein (1-1211)(A972C_R995C)

SEQ ID NO: 2464 - protein, 1211 aa, Artificial Sequence
  SARS-CoV-2/Iceland/202/2020__EPI_ISL_417750 spike protein (1-1211)(A972C_R995C)
MFVFLVLLPLVSSQCVNLTTRTQLPPAYTNSFTRGVYYPDKVFRSSVLHSTQDLFLPFFSNVTWFHAIHVSGTNGTKRFDNPVLPFNDGVYFASTEKSNIIRGWIFGTTLDSKTQSLLIVNNATNVVIKVCEFQFCNDPFLGVYYHKNNKSWMESEFRVYSSANNCTFEYVSQPFLMDLEGKQGNFKNLREFVFKNIDGYFKIYSKHTPINLVRDLPQGFSALEPLVDLPIGINITRFQTLLALHRSYLTPGDSSSGWTAGAAAYYVGYLQPRTFLLKYNENGTITDAVDCALDPLSETKCTLKSFTVEKGIYQTSNFRVQPTESIVRFPNITNLCPFGEVFNATRFASVYAWNRKRISNCVADYSVLYNSASFSTFKCYGVSPTKLNDLCFTNVYADSFVIRGDEVRQIAPGQTGKIADYNYKLPDDFTGCVIAWNSNNLDSKVGGNYNYLYRLFRKSNLKPFERDISTEIYQAGSTPCNGVEGFNCYFPLQSYGFQPTNGVGYQPYRVVVLSFELLHAPATVCGPKKSTNLVKNKCVNFNFNGLTGTGVLTESNKKFLPFQQFGRDIADTTDAVRDPQTLEILDITPCSFGGVSVITPGTNTSNQVAVLYQDVNCTEVPVAIHADQLTPTWRVYSTGSNVFQTRAGCLIGAEHVNNSYECDIPIGAGICASYQTQTNSPRRARSVASQSIIAYTMSLGAENSVAYSNNSIAIPTNFTISVTTEILPVSMTKTSVDCTMYICGDSTECSNLLLQYGSFCTQLNRALTGIAVEQDKNTQEVFAQVKQIYKTPPIKDFGGFNFSQILPDPSKPSKRSFIEDLLFNKVTLADAGFIKQYGDCLGDIAARDLICAQKFNGLTVLPPLLTDEMIAQYTSALLAGTITSGWTFGAGAALQIPFAMQMAYRFNGIGVTQNVLYENQKLIANQFNSAIGKIQDSLSSTASALGKLQDVVNQNAQALNTLVKQLSSNFGCISSVLNDILSRLDKVEAEVQIDCLITGRLQSLQTYVTQQLIRAAEIRASANLAATKMSECVLGQSKRVDFCGKGYHLMSFPQSAPHGVVFLHVTYVPAQEKNFTTAPAICHDGKAHFPREGVFVSNGTHWFVTQRNFYEPQIITTDNTFVSGNCDVVIGIVNNTVYDPLQPELDSFKEELDKYFKNHTSPDVDLGDIPGINASVVNIQKEIDRLNEVAKNLNESLIDLQELGKYEQYIK

SEQ ID NO: 2465 - protein, 1211 aa, Artificial Sequence
  SARS-CoV-2/USA/WA-UW261/2020__EPI_ISL_418046 spike protein (1-1211)(A972C_R995C)
MFVFLVLLPLVSSQCVNLTTRTQLPPAYTNSFTRGVYYPDKVFRSSVLHSTQDLFLPFFSNVTWFHAIHVSGTNGTKRFDNPVLPFNDGVYFASTEKSNIIRGWIFGTTLDSKTQSLLIVNNATNVVIKVCEFQFCNDPFLGVYYHKNNKSWMESEFRVYSSANNCTFEYVSQPFLMDLEGKQGNFKNLREFVFKNIDGYFKIYSKHTPINLVRDLPQGFSALEPLVDLPIGINITRFQTLLALHRSYLTPGDSSSGWTAGAAAYYVGYLQPRTFLLKYNENGTITDAVDCALDPLSETKCTLKSFTVEKGIYQTSNFRVQPTESIVRFPNITNLCPFGEVFNATRFTSVYAWNRKRISNCVADYSVLYNSASFSTFKCYGVSPTKLNDLCFTNVYADSFVIRGDEVRQIAPGQTGKIADYNYKLPDDFTGCVIAWNSNNLDSKVGGNYNYLYRLFRKSNLKPFERDISTEIYQAGSTPCNGVEGFNCYFPLQSYGFQPTNGVGYQPYRVVVLSFELLHAPATVCGPKKSTNLVKNKCVNFNFNGLTGTGVLTESNKKFLPFQQFGRDIADTTDAVRDPQTLEILDITPCSFGGVSVITPGTNTSNQVAVLYQDVNCTEVPVAIHADQLTPTWRVYSTGSNVFQTRAGCLIGAEHVNNSYECDIPIGAGICASYQTQTNSPRRARSVASQSIIAYTMSLGAENSVAYSNNSIAIPTNFTISVTTEILPVSMTKTSVDCTMYICGDSTECSNLLLQYGSFCTQLNRALTGIAVEQDKNTQEVFAQVKQIYKTPPIKDFGGFNFSQILPDPSKPSKRSFIEDLLFNKVTLADAGFIKQYGDCLGDIAARDLICAQKFNGLTVLPPLLTDEMIAQYTSALLAGTITSGWTFGAGAALQIPFAMQMAYRFNGIGVTQNVLYENQKLIANQFNSAIGKIQDSLSSTASALGKLQDVVNQNAQALNTLVKQLSSNFGCISSVLNDILSRLDKVEAEVQIDCLITGRLQSLQTYVTQQLIRAAEIRASANLAATKMSECVLGQSKRVDFCGKGYHLMSFPQSAPHGVVFLHVTYVPAQEKNFTTAPAICHDGKAHFPREGVFVSNGTHWFVTQRNFYEPQIITTDNTFVSGNCDVVIGIVNNTVYDPLQPELDSFKEELDKYFKNHTSPDVDLGDISGINASVVNIQKEIDRLNEVAKNLNESLIDLQELGKYEQYIK

SEQ ID NO: 2466 - protein, 1211 aa, Artificial Sequence
  SARS-CoV-2/Portugal/PT0035/2020__EPI_ISL_418020 spike protein (1-1211)(A972C_R995C)
MFVFLVLLPLVSSQCVNLTTRTQLPPAYTNSFTRGVYYPDKVFRSSVLHSTQDLFLPFFSNVTWFHAIHVSGTNGTKRFDNPVLPFNDGVYFASTEKSNIIRGWIFGTTLDSKTQSLLIVNNATNVVIKVCEFQFCNDPFLGVYYHKNNKSWMESEFRVYSSANNCTFEYVSQPFLMDLEGKQGNFKNLREFVFKNIDGYFKIYSKHTPINLVRDLPQGFSALEPLVDLPIGINITRFQTLLALHRSYLTPGDSSSGWTAGAAAYYVGYLQPRTFLLKYNENGTITDAVDCALDPLSETKCTLKSFTVEKGIYQTSNFRVQPTESIVRFPNITNLCPFGEVFNATRFASVYAWNRKRISNCVADYSVLYNSASFSTFKCYGVSPTKLNDLCFTNVYADSFVIRGDEVRQIAPGQTGKIADYNYKLPDDFTGCVIAWNSNNLDSKVGGNYNYLYRLFRKSNLKPFERDISTEIYQAGSTPCNGVEGFNCYFPLQSYGFQPTNGVGYQPYRVVVLSFELLHAPATVCGPKKSTNLVKNKCVNFNFNGLTGTGVLTESNKKFLPFQQFGRDIADTTDAVRDPQTLEILDITPCSFGGVSVITPGTNTSNQVAVLYQDVNCTEVPVAIHADQLTPTWRVYSTGSNVFQTRAGCLIGAEHVNNSYECDIPIGAGICASYQTQTNSPRRARSVASQSIIAYTMSLGAENSVAYSNNSIAIPTNFTISVTTEILPVSMTKTSVDCTMYICGDSTECSNLLLQYGSFCTQLNRALTGIAVEQDKNTQEVFAQVKQIYKTPPIKDFGGFNFSQILPDPSKPSKRSFIEDLLFNKVTLADAGFIKQYGDCLGDISARDLICAQKFNGLTVLPPLLTDEMIAQYTSALLAGTITSGWTFGAGAALQIPFAMQMAYRFNGIGVTQNVLYENQKLIANQFNSAIGKIQDSLSSTASALGKLQDVVNQNAQALNTLVKQLSSNFGCISSVLNDILSRLDKVEAEVQIDCLITGRLQSLQTYVTQQLIRAAEIRASANLAATKMSECVLGQSKRVDFCGKGYHLMSFPQSAPHGVVFLHVTYVPAQEKNFTTAPAICHDGKAHFPREGVFVSNGTHWFVTQRNFYEPQIITTDNTFVSGNCDVVIGIVNNTVYDPLQPELDSFKEELDKYFKNHTSPDVDLGDISGINASVVNIQKEIDRLNEVAKNLNESLIDLQELGKYEQYIK

SEQ ID NO: 2467 - protein, 1211 aa, Artificial Sequence
  SARS-CoV-2/USA/NY-NYUMC7/2020__EPI_ISL_418192 spike protein (1-1211)(A972C_R995C)
MFVFLVLLPLVSSQCVNLTTRTQLPPAYTNSFTRGVYYPDKVFRSSVLHSTQDLFLPFFSNVTWFHAIHVSGTNGTKRFDNPVLPFNDGVYFASTEKSNIIRGWIFGTTLDSKTQSLLIVNNATNVVIKVCEFQFCNDPFLGVYHHKNNKSWMESEFRVYSSANNCTFEYVSQPFLMDLEGKQGNFKNLREFVFKNIDGYFKIYSKHTPINLVRDLPQGFSALEPLVDLPIGINITRFQTLLALHRSYLTPGDSSSGWTAGAAAYYVGYLQPRTFLLKYNENGTITDAVDCALDPLSETKCTLKSFTVEKGIYQTSNFRVQPTESIVRFPNITNLCPFGEVFNATRFASVYAWNRKRISNCVADYSVLYNSASFSTFKCYGVSPTKLNDLCFTNVYADSFVIRGDEVRQIAPGQTGKIADYNYKLPDDFTGCVIAWNSNNLDSKVGGNYNYLYRLFRKSNLKPFERDISTEIYQAGSTPCNGVEGFNCYFPLQSYGFQPTNGVGYQPYRVVVLSFELLHAPATVCGPKKSTNLVKNKCVNFNFNGLTGTGVLTESNKKFLPFQQFGRDIADTTDAVRDPQTLEILDITPCSFGGVSVITPGTNTSNQVAVLYQGVNCTEVPVAIHADQLTPTWRVYSTGSNVFQTRAGCLIGAEHVNNSYECDIPIGAGICASYQTQTNSPRRARSVASQSIIAYTMSLGAENSVAYSNNSIAIPTNFTISVTTEILPVSMTKTSVDCTMYICGDSTECSNLLLQYGSFCTQLNRALTGIAVEQDKNTQEVFAQVKQIYKTPPIKDFGGFNFSQILPDPSKPSKRSFIEDLLFNKVTLADAGFIKQYGDCLGDIAARDLICAQKFNGLTVLPPLLTDEMIAQYTSALLAGTITSGWTFGAGAALQIPFAMQMAYRFNGIGVTQNVLYENQKLIANQFNSAIGKIQDSLSSTASALGKLQDVVNQNAQALNTLVKQLSSNFGCISSVLNDILSRLDKVEAEVQIDCLITGRLQSLQTYVTQQLIRAAEIRASANLAATKMSECVLGQSKRVDFCGKGYHLMSFPQSAPHGVVFLHVTYVPAQEKNFTTAPAICHDGKAHFPREGVFVSNGTHWFVTQRNFYEPQIITTDNTFVSGNCDVVIGIVNNTVYDPLQPELDSFKEELDKYFKNHTSPDVDLGDISGINASVVNIQKEIDRLNEVAKNLNESLIDLQELGKYEQYIK

SEQ ID NO: 2468 - protein, 1211 aa, Artificial Sequence
  SARS-CoV-2/Iceland/189/2020__EPI_ISL_417709 spike protein (1-1211)(A972C_R995C)
MFVFLVLLPLVSSQCVNLTTRTQLPPAYTNSFTRGVYYPDKVFRSSVLHSTQDLFLPFFSNVTWFHAIHVSGTNGTKRFDNPVLPFNDGVYFASTEKSNIIRGWIFGTTLDSKTQSLLIVNNATNVVIKVCEFQFCNDPFLGVYYHKNNKSWMESEFRVYSSANNCTFEYVSQPFLMDLEGKQGNFKNLREFVFKNIDGYFKIYSKHTPINLVRDLPQGFSALEPLVDLPIGINITRFQTLLALHRSYLTPGDSSSGWTAGAAAYYVGYLQPRTFLLKYNENGTITDAVDCALDPLSETKCTLKSFTVEKGIYQTSNFRVQPTESIVRFPNITNLCPFGEVFNATRFASVYAWNRKRISNCVADYSVLYNSASFSTFKCYGVSPTKLNDLCFTNVYADSFVIRGDEVRQIAPGQTGKIADYNYKLPDDFTGCVIAWNSNNLDSKVGGNYNYLYRLFRKSNLKPFERDISTEIYQAGSTPCNGVEGFNCYFPLQSYGFQPTNGVGYQPYRVVVLSFELLHAPATVCGPKKSTNLVKNKCVNFNFNGLTGTGVLTESNKKFLPFQQFGRDIADTTDAVRDPQTLEILDITPCSFGGVSVITPGTNTSNQVAVLYQGVNCTEVPVAIHADQLTPTWRVYSTGSNVFQTRAGCLIGAEHVNNSYECDIPIGAGICASYQTQTNSPRRARSVASQSIIAYTMSLGAENSVAYSNNSIAIPTNFTISVTTEILPVSMTKTSVDCTMYICGDSTECSNLLLQYGSFCTQLNRALTGIAVEQDKNTQEVFAQVKQIYKTPPIKDFGGFNFSQILPDPSKPSKRSFIEDLLFNKVTLADAGFTKQYGDCLGDIAARDLICAQKFNGLTVLPPLLTDEMIAQYTSALLAGTITSGWTFGAGAALQIPFAMQMAYRFNGIGVTQNVLYENQKLIANQFNSAIGKIQDSLSSTASALGKLQDVVNQNAQALNTLVKQLSSNFGCISSVLNDILSRLDKVEAEVQIDCLITGRLQSLQTYVTQQLIRAAEIRASANLAATKMSECVLGQSKRVDFCGKGYHLMSFPQSAPHGVVFLHVTYVPAQEKNFTTAPAICHDGKAHFPREGVFVSNGTHWFVTQRNFYEPQIITTDNTFVSGNCDVVIGIVNNTVYDPLQPELDSFKEELDKYFKNHTSPDVDLGDISGINASVVNIQKEIDRLNEVAKNLNESLIDLQELGKYEQYIK

SEQ ID NO: 2469 - protein, 1211 aa, Artificial Sequence
  SARS-CoV-2/Australia/NSW56/2020__EPI_ISL_417408 spike protein (1-1211)(A972C_R995C)
MFVFLVLLPLVSSQCVNLTTRTQLPPAYTNSFTRGVYYPDKVFRSSVLHSTQDLFLPFFSNVTWFHAIHVSGTNGTKRFDNPVLPFNDGVYFASTEKSNIIRGWIFGTTLDSKTQSLLIVNNATNVVIKVCEFQFCNDPFLGVYYHKNNKSWMESEFRVYSSANNCTFEYVSQPFLMDLEGKQGNFKNLREFVFKNIDGYFKIYSKHTPINLVRDLPQGFSALEPLVDLPIGINITRFQTLLALHRSYLTPGDSSSGWTAGAAAYYVGYLQPRTFLLKYNENGTITDAVDCALDPLSETKCTLKSFTVEKGIYQTSNFRVQPTESIVRFPNITNLCPFGEVFNATRFASVYAWNRKRISNCVADYSVLYNSASFSTFKCYGVSPTKLNDLCFTNVYADSFVIRGDEVRQIAPGQTGKIADYNYKLPDDFTGCVIAWNSNNLDSKVGGNYNYLYRLFRKSNLKPFERDISTEIYQAGSTPCNGVEGFNCYFPLQSYGFQPTNGVGYQPYRVVVLSFELLHAPATVCGPKKSTNLVKNKCVNFNFNGLTGTGVLTESNKKFLPFQQFGRDIADTTDAVRDPQTLEILDITPCSFGGVSVITPGTNTSNQVAVLYQDVNCTEVPVAIHADQLTPTWRVYSTGSNVFQTRAGCLIGAEHVNNSYECDIPIGAGICASYQTQTNSPRRARSVASQSIIAYTMSLGAENSVAYSNNSIAIPTNFTISVTTEILPVSMTKTSVDCTMYICGDSTECSNLLLQYGSFCTQLNRALTGIAVEQDKNTQEVFAQVKQIYKTPPIKDFGGFNFSQILPDSSKPSKRSFIEDLLFNKVTLADAGFIKQYGDCLGDIAARDLICAQKFNGLTVLPPLLTDEMIAQYTSALLAGTITSGWTFGAGAALQIPFAMQMAYRFNGIGVTQNVLYENQKLIANQFNSAIGKIQDSLSSTASALGKLQDVVNQNAQALNTLVKQLSSNFGCISSVLNDILSRLDKVEAEVQIDCLITGRLQSLQTYVTQQLIRAAEIRASANLAATKMSECVLGQSKRVDFCGKGYHLMSFPQSAPHGVVFLHVTYVPAQEKNFTTAPAICHDGKAHFPREGVFVSNGTHWFVTQRNFYEPQIITTDNTFVSGNCDVVIGIVNNTVYDPLQPELDSFKEELDKYFKNHTSPDVDLGDISGINASVVNIQKEIDRLNEVAKNLNESLIDLQELGKYEQYIK

SEQ ID NO: 2470 - protein, 1211 aa, Artificial Sequence
  SARS-CoV-2/Iceland/280/2020__EPI_ISL_417608 spike protein (1-1211)(A972C_R995C)
MFVFLVLLPLVSSQCVNLTTRTQLPPAYTNSFTRGVYYPDKVFRSSVLHSTQDLFLPFFSNVTWFHAIHVSGTNGTKRFDNPVLPFNDGVYFASTEKSNIIRGWIFGTTLDSKTQSLLIVNNATNVVIKVCEFQFCNDPFLGVYYHKNNKSWMESEFRVYSSANNCTFEYVSQPFLMDLEGKQGNFKNLREFVFKNIDGYFKIYSKHTPINLVRDLPQGFSALEPLVDLPIGINITRFQTLLALHRSYLTPGDSSSGWTAGAAAYYVGYLQPRTFLLKYNENGTITDAVDCALDPLSETKCTLKSFTVEKGIYQTSNFRVQPTESIVRFPNITNLCPFGEVFNATRFASVYAWNRKRISNCVADYSVLYNSASFSTFKCYGVSPTKLNDLCFTNVYADSFVIRGDEVRQIAPGQTGKIADYNYKLPDDFTGCVIAWNSNNLDSKVGGNYNYLYRLFRKSNLKPFERDISTEIYQAGSTPCNGVEGFNCYFPLQSYGFQPTNGVGYQPYRVVVLSFELLHAPATVCGPKKSTNLVKNKCVNFNFNGLTGTGVLTESNKKFLPFQQFGRDIADTTDAVRDPQTLEILDITPCSFGGVSVITPGTNTSNQVAVLYQGVNCTEVPVAIHADQLTPTWRVYSTGSNVFQTRAGCLIGAEHVNNSYECDIPIGAGICASYHTQTNSPRRARSVASQSIIAYTMSLGAENSVAYSNNSIAIPTNFTISVTTEILPVSMTKTSVDCTMYICGDSTECSNLLLQYGSFCTQLNRALTGIAVEQDKNTQEVFAQVKQIYKTPPIKDFGGFNFSQILPDPSKPSKRSFIEDLLFNKVTLADAGFIKQYGDCLGDIAARDLICAQKFNGLTVLPPLLTDEMIAQYTSALLAGTITSGWTFGAGAALQIPFAMQMAYRFNGIGVTQNVLYENQKLIANQFNSAIGKIQDSLSSTASALGKLQDVVNQNAQALNTLVKQLSSNFGCISSVLNDILSRLDKVEAEVQIDCLITGRLQSLQTYVTQQLIRAAEIRASANLAATKMSECVLGQSKRVDFCGKGYHLMSFPQSAPHGVVFLHVTYVPAQEKNFTTAPAICHDGKAHFPREGVFVSNGTHWFVTQRNFYEPQIITTDNTFVSGNCDVVIGIVNNTVYDPLQPELDSFKEELDKYFKNHTSPDVDLGDISGINASVVNIQKEIDRLNEVAKNLNESLIDLQELGKYEQYIK

SEQ ID NO: 2471 - protein, 1211 aa, Artificial Sequence; identical to SEQ ID NO: 2426
  SARS-CoV-2/Iceland/247/2020__EPI_ISL_417575 spike protein (1-1211)(A972C_R995C)

SEQ ID NO: 2472 - protein, 1211 aa, Artificial Sequence
  SARS-CoV-2/Iceland/238/2020__EPI_ISL_417566 spike protein (1-1211)(A972C_R995C)
MFVFLVLLPLVSSQCVNLTTRTQLPPAYTNSFTRGVYYPDKVFRSSVLHSTQDLFLPFFSNVTWFHAIHVSGTNGTKRFDNPVLPFNDGVYFASTEKSNIIRGWIFGTTLDSKTQSLLIVNNATNVVIKVCEFQFCNDPFLGVYYHKNNKSWMESEFRVYSSANNCTFEYVSQPFLMDLEGKQGNFKNLREFVFKNIDGYFKIYSKHTPINLVRDLPQGFSALEPLVDLPIGINITRFQTLLALHRSYLTPGDSSSGWTAGAAAYYVGYLQPRTFLLKYNENGTITDAVDCALDPLSETKCTLKSFTVEKGIYQTSNFRVQPTESIVRFPNITNLCPFGEVFNATRFASVYAWNRKRISNCVADYSVLYNSASFSTFKCYGVSPTKLNDLCFTNVYADSFVIRGDEVRQIAPGQTGKIADYNYKLPDDFTGCVIAWNSNNLDSKVGGNYNYLYRLFRKSNLKPFERDISTEIYQAGSTPCNGVEGFNCYFPLQSYGFQPTNGVGYQPYRVVVLSFELLHAPATVCGPKKSTNLVKNKCVNFNFNGLTGTGVLTESNKKFLPFQQFGRDIADTTDAVRDPQTLEILDITPCSFGGVSVITPGTNTSNQVAVLYQGVNCTEVPVAIHADQLTPTWRVYSTGSNVFQTRAGCLIGAEHVNNSYECDIPIGAGICASYQTQTNSPRRARSVASQSIIAYTMSLGAENSVAYSNNSIAIPTNFTISVTTEILPVSMTKTSVDCTMYICGDSTECSNLLLQYGSFCTQLNRALTGIAVEQDKNTQEVFAQVKQIYKTPPIKDFGGFNFSQILPDPSKPSKRSFIEDLLFNKVTLADVGFIKQYGDCLGDIAARDLICAQKFNGLTVLPPLLTDEMIAQYTSALLAGTITSGWTFGAGAALQIPFAMQMAYRFNGIGVTQNVLYENQKLIANQFNSAIGKIQDSLSSTASALGKLQDVVNQNAQALNTLVKQLSSNFGCISSVLNDILSRLDKVEAEVQIDCLITGRLQSLQTYVTQQLIRAAEIRASANLAATKMSECVLGQSKRVDFCGKGYHLMSFPQSAPHGVVFLHVTYVPAQEKNFTTAPAICHDGKAHFPREGVFVSNGTHWFVTQRNFYEPQIITTDNTFVSGNCDVVIGIVNNTVYDPLQPELDSFKEELDKYFKNHTSPDVDLGDISGINASVVNIQKEIDRLNEVAKNLNESLIDLQELGKYEQYIK

SEQ ID NO: 2473 - protein, 1211 aa, Artificial Sequence
  SARS-CoV-2/Greece/16/2020__EPI_ISL_418265 spike protein (1-1211)(A972C_R995C)
MFVFLVLLPLVSSQCVNLTTRTQLPPAYTNSFTRGVYYPDKVFRSSVLHSTQDLFLPFFSNVTWFHAIHVSGTNGTKRFDNPVLPFNDGVYFASTEKSNIIRGWIFGTTLDSKTQSLLIVNNATNVVIKVCEFQFCNDPFLGVYYHKNNKSWMESEFRVYSSANNCTFEYVSQPFLMDLEGKQGNFKNLREFVFKNVDGYFKIYSKHTPINLVRDLPQGFSALEPLVDLPIGINITRFQTLLALHRSYLTPGDSSSGWTAGAAAYYVGYLQPRTFLLKYNENGTITDAVDCALDPLSETKCTLKSFTVEKGIYQTSNFRVQPTESIVRFPNITNLCPFGEVFNATRFASVYAWNRKRISNCVADYSVLYNSASFSTFKCYGVSPTKLNDLCFTNVYADSFVIRGDEVRQIAPGQTGKIADYNYKLPDDFTGCVIAWNSNNLDSKVGGNYNYLYRLFRKSNLKPFERDISTEIYQAGSTPCNGVEGFNCYFPLQSYGFQPTNGVGYQPYRVVVLSFELLHAPATVCGPKKSTNLVKNKCVNFNFNGLTGTGVLTESNKKFLPFQQFGRDIADTTDAVRDPQTLEILDITPCSFGGVSVITPGTNTSNQVAVLYQDVNCTEVPVAIHADQLTPTWRVYSTGSNVFQTRAGCLIGAEHVNNSYECDIPIGAGICASYQTQTNSPRRARSVASQSIIAYTMSLGAENSVAYSNNSIAIPTNFTISVTTEILPVSMTKTSVDCTMYICGDSTECSNLLLQYGSFCTQLNRALTGIAVEQDKNTQEVFAQVKQIYKTPPIKDFGGFNFSQILPDPSKPSKRSFIEDLLFNKVTLADAGFIKQYGDCLGDIAARDLICAQKFNGLTVLPPLLTDEMIAQYTSALLAGTITSGWTFGAGAALQIPFAMQMAYRFNGIGVTQNVLYENQKLIANQFNSAIGKIQDSLSSTASALGKLQDVVNQNAQALNTLVKQLSSNFGCISSVLNDILSRLDKVEAEVQIDCLITGRLQSLQTYVTQQLIRAAEIRASANLAATKMSECVLGQSKRVDFCGKGYHLMSFPQSAPHGVVFLHVTYVPAQEKNFTTAPAICHDGKAHFPREGVFVSNGTHWFVTQRNFYEPQIITTDNTFVSGNCDVVIGIVNNTVYDPLQPELDSFKEELDKYFKNHTSPDVDLGDISGINASVVNIQKEIDRLNEVAKNLNESLIDLQELGKYEQYIK

SEQ ID NO: 2474 - protein, 1211 aa, Artificial Sequence
  SARS-CoV-2/Iceland/319/2020__EPI_ISL_417648 spike protein (1-1211)(A972C_R995C)
MFVFLVLLPLVSSQCVNLTTRTQLPPAYTNSFTRGVYYPDKVFRSSVLHSTQDLFLPFFSNVTWFHAIHVSGTNGTKRFDNPVLPFNDGVYFASTEKSNIIRGWIFGTTLDSKTQSLLIVNNATNVVIKVCEFQFCNDPFLGVYYHKNNKSWMESEFRVYSSANNCTFEYVSQPFLIDLEGKQGNFKNLREFVFKNIDGYFKIYSKHTPINLVRDLPQGFSALEPLVDLPIGINITRFQTLLALHRSYLTPGDSSSGWTAGAAAYYVGYLQPRTFLLKYNENGTITDAVDCALDPLSETKCTLKSFTVEKGIYQTSNFRVQPTESIVRFPNITNLCPFGEVFNATRFASVYAWNRKRISNCVADYSVLYNSASFSTFKCYGVSPTKLNDLCFTNVYADSFVIRGDEVRQIAPGQTGKIADYNYKLPDDFTGCVIAWNSNNLDSKVGGNYNYLYRLFRKSNLKPFERDISTEIYQAGSTPCNGVEGFNCYFPLQSYGFQPTNGVGYQPYRVVVLSFELLHAPATVCGPKKSTNLVKNKCVNFNFNGLTGTGVLTESNKKFLPFQQFGRDIADTTDAVRDPQTLEILDITPCSFGGVSVITPGTNTSNQVAVLYQGVNCTEVPVAIHADQLTPTWRVYSTGSNVFQTRAGCLIGAEHVNNSYECDIPIGAGICASYQTQTNSPRRARSVASQSIIAYTMSLGAENSVAYSNNSIAIPTNFTISVTTEILPVSMTKTSVDCTMYICGDSTECSNLLLQYGSFCTQLNRALTGIAVEQDKNTQEVFAQVKQIYKTPPIKDFGGFNFSQILPDPSKPSKRSFIEDLLFNKVTLADAGFIKQYGDCLGDIAARDLICAQKFNGLTVLPPLLTDEMIAQYTSALLAGTITSGWTFGAGAALQIPFAMQMAYRFNGIGVTQNVLYENQKLIANQFNSAIGKIQDSLSSTASALGKLQDVVNQNAQALNTLVKQLSSNFGCISSVLNDILSRLDKVEAEVQIDCLITGRLQSLQTYVTQQLIRAAEIRASANLAATKMSECVLGQSKRVDFCGKGYHLMSFPQSAPHGVVFLHVTYVPAQEKNFTTAPAICHDGKAHFPREGVFVSNGTHWFVTQRNFYEPQIITTDNTFVSGNCDVVIGIVNNTVYDPLQPELDSFKEELDKYFKNHTSPDVDLGDISGINASVVNIQKEIDRLNEVAKNLNESLIDLQELGKYEQYIK

SEQ ID NO: 2475 - protein, 1211 aa, Artificial Sequence
  SARS-CoV-2/Congo/94/2020__EPI_ISL_417947 spike protein (1-1211)(A972C_R995C)
MFVFLVLLPLVSSQCVNLTTRTQLPPAYTNSFTRGVYYPDKVFRSSVLHSTQDLFLPFFSNVTWFHAIHVSGTNGTKRFDNPVLPFNDGVYFASTEKSNIIRGWIFGTTLDSKTQSLLIVNNATNVVIKVCEFQFCNDPFLGVYYHKNNKSWMESEFRVYSSANNCTFEYVSQPFLMDLEGKQGNFKNLREFVFKNIDGYFKIYSKHTPINLVRDLPQGFSALEPLVDLPIGINITRFQTLLALHRSYLTPGDSSSGWTAGAAAYYVGYLQPRTFLLKYNENGTITDAVDCALDPLSETKCTLKSFTVEKGIYQTSNFRVQPTESIVRFPNITNLCPFGEVFNATRFASVYAWNRKRISNCVADYSVLYNSASFSTFKCYGVSPTKLNDLCFTNVYADSFVIRGDEVRQIAPGQTGKIADYNYKLPDDFTGCVIAWNSNNLDSKVGGNYNYLYRLFRKSNLKPFERDISTEIYQAGSTPCNGVEGFNCYFPLQSYGFQPTNGVGYQPYRVVVLSFELLHAPATVCGPKKSTNLVKNKCVNFNFNGLTGTGVLTESNKKFLPFQQFGRDIADTTDAVRDPQTLEILDITPCSFGGVSVITPGTNTSNQVAVLYQGVNCTEVPVAIHADQLTPTWRVYSTGSNVFQTRAGCLIGAEHVNNSYECDIPIGAGICASYQTQTNSPRRARSVASQSIIAYTMSLGAENSVAYSNNSIAIPTNFTISVTTEILPVSMTKTSVDCTMYICGDSTECSNLLLQYGSFCTQLNRALTGIAVEQDKNTQEVFAQVKQIYKTPPIKDFGGFNFSQILPDPSKPSKRSFIEDILFNKVTLADAGFIKQYGDCLGDIAARDLICAQKFNGLTVLPPLLTDEMIAQYTSALLAGTITSGWTFGAGAALQIPFAMQMAYRFNGIGVTQNVLYENQKLIANQFNSAIGKIQDSLSSTASALGKLQDVVNQNAQALNTLVKQLSSNFGCISSVLNDILSRLDKVEAEVQIDCLITGRLQSLQTYVTQQLIRAAEIRASANLAATKMSECVLGQSKRVDFCGKGYHLMSFPQSAPHGVVFLHVTYVPAQEKNFTTAPAICHDGKAHFPREGVFVSNGTHWFVTQRNFYEPQIITTDNTFVSGNCDVVIGIVNNTVYDPLQPELDSFKEELDKYFKNHTSPDVDLGDISGINASVVNIQKEIDRLNEVAKNLNESLIDLQELGKYEQYIK

SEQ ID NO: 2476 - protein, 1211 aa, Artificial Sequence
  SARS-CoV-2/Congo/158/2020__EPI_ISL_417950 spike protein (1-1211)(A972C_R995C)
MFVFLVLLPLVSSQCVNLTTRTQLPPAYTNSFTRGVYYPDKVFRSSVLHSTQDLFLPFFSNVTWFHAIHVSGTNGTKRFDNPVLPFNDGVYFASTEKSNIIRGWIFGTTLDSKTQSLLIVNNATNVVIKVCEFQFCNDPFLGVYYHKNNKSWMESEFRVYSSANNCTFEYVSQPFLMDLEGKQGNFKNLREFVFKNIDGYFKIYSKHTPINLVRDLPQGFSALEPLVDLPIGINITRFQTLLALHRSYLTPGDSSSGWTAGAAAYYVGYLQPRTFLLKYNENGTITDAVDCALDPLSETKCTLKSFTVEKGIYQTSNFRVQPTESIVRFPNITNLCPFGEVFNATRFASVYAWNRKRISNCVADYSVLYNSASFSTFKCYGVSPTKLNDLCFTNVYADSFVIRGDEVRQIAPGQTGKIADYNYKLPDDFTGCVIAWNSNNLDSKVGGNYNYLYRLFRKSNLKPFERDISTEIYQAGSTPCNGVEGFNCYFPLQSYGFQPTNGVGYQPYRVVVLSFELLHAPATVCGPKKSTNLVKNKCVNFNFNGLTGTGVLTESNKKFLPFQQFGRDIADTTDAVRDPQTLEILDITPCSFGGVSVITPGTNTSNQVAVLYQDVNCTEVPVAIHADQLTPTWRVYSTGSNVFQTRAGCLIGAEHVNNSYECDIPIGAGICASYQTQTNSPRRARSVASQSIIAYTMSLGAENSVAYSNNSIAIPTNFTISVTTEILPVSMTKTSVDCTMYICGDSTECSNLLLQYGSFCTQLNRALTGIAVEQDKNTQEVFAQVKQIYKTPPIKDFGGFNFSQILPDPSKPSKRSFIEDLLFNKVTLADAGFIKQYGDCLGDIAARDLICAQKFNGLTVLPPLLTDEMIAQYTSALLAGTITSGWTFGAGAALQIPFAMQMAYRFNGIGVTQNVLYENQKLIANQFNSAIGKIQDSLSSTASALGKLQDVVNQNAQALNTLVKQLSSNFGCISSVLNDILSRLDKVEAEVQIDCLITGRLQSLQTYVTQQLIRAAEIRASANLAATKMSECVLGQSKRVDFCGKGYHLMSFPQSAPHGVVFLHVTYVPAQEKNFTTAPAICHDGKAHFPREGVFVSNGTHWFVTQRNFYEPQIITTDNTFLSGNCDVVIGIVNNTVYDPLQPELDSFKEELDKYFKNHTSPDVDLGDISGINASVVNIQKEIDRLNEVAKNLNESLIDLQELGKYEQYIK

SEQ ID NO: 2477 - protein, 1211 aa, Artificial Sequence
  SARS-CoV-2/USA/UT-00034/2020__EPI_ISL_417977 spike protein (1-1211)(A972C_R995C)
MFVFLVLLPLVSSQCVNLTTRTQLPPAYTNSFTRGVYYPDKVFRSSVLHSTQDLFLPFFSNVTWFHAIHVSGTNGTKRFDNPVLPFNDGVYFASTEKSNIIRGWIFGTTLDSKTQSLLIVNNATNVVIKVCEFQFCNDPFLGVYYYKNNKSWMESEFRVYSSANNCTFEYVSQPFLMDLEGKQGNFKNLREFVFKNIDGYFKIYSKHTPINLVRDLPQGFSALEPLVDLPIGINITRFQTLLALHRSYLTPGDSSSGWTAGAAAYYVGYLQPRTFLLKYNENGTITDAVDCALDPLSETKCTLKSFTVEKGIYQTSNFRVQPTESIVRFPNITNLCPFGEVFNATRFASVYAWNRKRISNCVADYSVLYNSASFSTFKCYGVSPTKLNDLCFTNVYADSFVIRGDEVRQIAPGQTGKIADYNYKLPDDFTGCVIAWNSNNLDSKVGGNYNYLYRLFRKSNLKPFERDISTEIYQAGSTPCNGVEGFNCYFPLQSYGFQPTNGVGYQPYRVVVLSFELLHAPATVCGPKKSTNLVKNKCVNFNFNGLTGTGVLTESNKKFLPFQQFGRDIADTTDAVRDPQTLEILDITPCSFGGVSVITPGTNTSNQVAVLYQGVNCTEVPVAIHADQLTPTWRVYSTGSNVFQTRAGCLIGAEHVNNSYECDIPIGAGICASYQTQTNSPRRARSVASQSIIAYTMSLGAENSVAYSNNSIAIPTNFTISVTTEILPVSMTKTSVDCTMYICGDSTECSNLLLQYGSFCTQLNRALTGIAVEQDKNTQEVFAQVKQIYKTPPIKDFGGFNFSQILPDPSKPSKRSFIEDLLFNKVTLADAGFIKQYGDCLGDIAARDLICAQKFNGLTVLPPLLTDEMIAQYTSALLAGTITSGWTFGAGAALQIPFAMQMAYRFNGIGVTQNVLYENQKLIANQFNSAIGKIQDSLSSTASALGKLQDVVNQNAQALNTLVKQLSSNFGCISSVLNDILSRLDKVEAEVQIDCLITGRLQSLQTYVTQQLIRAAEIRASANLAATKMSECVLGQSKRVDFCGKGYHLMSFPQSAPHGVVFLHVTYVPAQEKNFTTAPAICHDGKAHFPREGVFVSNGTHWFVTQRNFYEPQIITTDNTFVSGNCDVVIGIVNNTVYDPLQPELDSFKEELDKYFKNHTSPDVDLGDISGINASVVNIQKEIDRLNEVAKNLNESLIDLQELGKYEQYIK

SEQ ID NO: 2478 - protein, 1211 aa, Artificial Sequence
  SARS-CoV-2/USA/UT-00033/2020__EPI_ISL_417976 spike protein (1-1211)(A972C_R995C)
MFVFLVLLPLVSSQCVNLTTRTQLPPAYTNSFTRGVYYPDKVFRSSVLHSTQDLFLPFFSNVTWFHAIHVSGTNGTKRFDNPVLPFNDGVYFASTEKSNIIRGWIFGTTLDSKTQSLLIVNNATNVVIKVCEFQFCNDPFLGVYYHKNNKSWMESEFRVYSSANNCTFEYVSQPFLMDLEGKQGNFKNLREFVFKNIDGYFKIYSKHTPINLVRDLPQGFSALEPLVDLPIGINITRFQTLLALHRSYLTPGDSSSGLTAGAAAYYVGYLQPRTFLLKYNENGTITDAVDCALDPLSETKCTLKSFTVEKGIYQTSNFRVQPTESIVRFPNITNLCPFGEVFNATRFASVYAWNRKRISNCVADYSVLYNSASFSTFKCYGVSPTKLNDLCFTNVYADSFVIRGDEVRQIAPGQTGKIADYNYKLPDDFTGCVIAWNSNNLDSKVGGNYNYLYRLFRKSNLKPFERDISTEIYQAGSTPCNGVEGFNCYFPLQSYGFQPTNGVGYQPYRVVVLSFELLHAPATVCGPKKSTNLVKNKCVNFNFNGLTGTGVLTESNKKFLPFQQFGRDIADTTDAVRDPQTLEILDITPCSFGGVSVITPGTNTSNQVAVLYQGVNCTEVPVAIHADQLTPTWRVYSTGSNVFQTRAGCLIGAEHVNNSYECDIPIGAGICASYQTQTNSPRRARSVASQSIIAYTMSLGAENSVAYSNNSIAIPTNFTISVTTEILPVSMTKTSVDCTMYICGDSTECSNLLLQYGSFCTQLNRALTGIAVEQDKNTQEVFAQVKQIYKTPPIKDFGGFNFSQILPDPSKPSKRSFIEDLLFNKVTLADAGFIKQYGDCLGDIAARDLICAQKFNGLTVLPPLLTDEMIAQYTSALLAGTITSGWTFGAGAALQIPFAMQMAYRFNGIGVTQNVLYENQKLIANQFNSAIGKIQDSLSSTASALGKLQDVVNQNAQALNTLVKQLSSNFGCISSVLNDILSRLDKVEAEVQIDCLITGRLQSLQTYVTQQLIRAAEIRASANLAATKMSECVLGQSKRVDFCGKGYHLMSFPQSAPHGVVFLHVTYVPAQEKNFTTAPAICHDGKAHFPREGVFVSNGTHWFVTQRNFYEPQIITTDNTFVSGNCDVVIGIVNNTVYDPLQPELDSFKEELDKYFKNHTSPDVDLGDISGINASVVNIQKEIDRLNEVAKNLNESLIDLQELGKYEQYIK

SEQ ID NO: 2479 - protein, 1211 aa, Artificial Sequence
  SARS-CoV-2/USA/WI-13/2020__EPI_ISL_417516 spike protein (1-1211)(A972C_R995C)
MFVFLVLLPLVSSQCVNLTTRTQLPPAYTNSFTRGVYYPDKVFRSSVLHSTQDLFLPFFSNVTWFHAIHVSGTNGTKRFDNPVLPFNDGVYFASTEKSNIIRGWIFGTTLDSKTQSLLIVNNATNVVIKVCEFQFCNDPFLGVYYHKNNKSWMESEFRVYSSANNCTFEYVSQPFLMDLEGKQGNFKNLREFVFKNIDGYFKIYSKHTPINLVRDLPQGFSALEPLVDLPIGINITRFQTLLALHRSYLTPGDSSSGWTAGAAAYYVGYLQPRTFLLKYNENGTITDAVDCALDPLSETKCTLKSFTVEKGIYQTSNFRVLPTESIVRFPNITNLCPFGEVFNATRFASVYAWNRKRISNCVADYSVLYNSASFSTFKCYGVSPTKLNDLCFTNVYADSFVIRGDEVRQIAPGQTGKIADYNYKLPDDFTGCVIAWNSNNLDSKVGGNYNYLYRLFRKSNLKPFERDISTEIYQAGSTPCNGVEGFNCYFPLQSYGFQPTNGVGYQPYRVVVLSFELLHAPATVCGPKKSTNLVKNKCVNFNFNGLTGTGVLTESNKKFLPFQQFGRDIADTTDAVRDPQTLEILDITPCSFGGVSVITPGTNTSNQVAVLYQGVNCTEVPVAIHADQLTPTWRVYSTGSNVFQTRAGCLIGAEHVNNSYECDIPIGAGICASYQTQTNSPRRARSVASQSIIAYTMSLGAENSVAYSNNSIAIPTNFTISVTTEILPVSMTKTSVDCTMYICGDSTECSNLLLQYGSFCTQLNRALTGIAVEQDKNTQEVFAQVKQIYKTPPIKDFGGFNFSQILPDPSKPSKRSFIEDLLFNKVTLADAGFIKQYGDCLGDIAARDLICAQKFNGLTVLPPLLTDEMIAQYTSALLAGTITSGWTFGAGAALQIPFAMQMAYRFNGIGVTQNVLYENQKLIANQFNSAIGKIQDSLSSTASALGKLQDVVNQNAQALNTLVKQLSSNFGCISSVLNDILSRLDKVEAEVQIDCLITGRLQSLQTYVTQQLIRAAEIRASANLAATKMSECVLGQSKRVDFCGKGYHLMSFPQSAPHGVVFLHVTYVPAQEKNFTTAPAICHDGKAHFPREGVFVSNGTHWFVTQRNFYEPQIITTDNTFVSGNCDVVIGIVNNTVYDPLQPELDSFKEELDKYFKNHTSPDVDLGDISGINASVVNIQKEIDRLNEVAKNLNESLIDLQELGKYEQYIK

SEQ ID NO: 2480 - protein, 1210 aa, Artificial Sequence
  SARS-CoV-2/India/1-27/2020__EPI_ISL_413522 spike protein (1-1210)(A971C_R994C)
MFVFLVLLPLVSSQCVNLTTRTQLPPAYTNSFTRGVYYPDKVFRSSVLHSTQDLFLPFFSNVTWFHAIHVSGTNGTKRFDNPVLPFNDGVYFASTEKSNIIRGWIFGTTLDSKTQSLLIVNNATNVVIKVCEFQFCNDPFLGVYHKNNKSWMESEFRVYSSANNCTFEYVSQPFLMDLEGKQGNFKNLREFVFKNIDGYFKIYSKHTPINLVRDLPQGFSALEPLVDLPIGINITRFQTLLALHRSYLTPGDSSSGWTAGAAAYYVGYLQPRTFLLKYNENGTITDAVDCALDPLSETKCTLKSFTVEKGIYQTSNFRVQPTESIVRFPNITNLCPFGEVFNATRFASVYAWNRKRISNCVADYSVLYNSASFSTFKCYGVSPTKLNDLCFTNVYADSFVIRGDEVIQIAPGQTGKIADYNYKLPDDFTGCVIAWNSNNLDSKVGGNYNYLYRLFRKSNLKPFERDISTEIYQAGSTPCNGVEGFNCYFPLQSYGFQPTNGVGYQPYRVVVLSFELLHAPATVCGPKKSTNLVKNKCVNFNFNGLTGTGVLTESNKKFLPFQQFGRDIADTTDAVRDPQTLEILDITPCSFGGVSVITPGTNTSNQVAVLYQDVNCTEVPVAIHADQLTPTWRVYSTGSNVFQTRAGCLIGAEHVNNSYECDIPIGAGICASYQTQTNSPRRARSVASQSIIAYTMSLGAENSVAYSNNSIAIPTNFTISVTTEILPVSMTKTSVDCTMYICGDSTECSNLLLQYGSFCTQLNRALTGIAVEQDKNTQEVFAQVKQIYKTPPIKDFGGFNFSQILPDPSKPSKRSFIEDLLFNKVTLADAGFIKQYGDCLGDIAARDLICAQKFNGLTVLPPLLTDEMIAQYTSALLAGTITSGWTFGAGAALQIPFAMQMAYRFNGIGVTQNVLYENQKLIANQFNSAIGKIQDSLSSTASALGKLQDVVNQNAQALNTLVKQLSSNFGCISSVLNDILSRLDKVEAEVQIDCLITGRLQSLQTYVTQQLIRAAEIRASANLAATKMSECVLGQSKRVDFCGKGYHLMSFPQSAPHGVVFLHVTYVPAQEKNFTTAPAICHDGKAHFPREGVFVSNGTHWFVTQRNFYEPQIITTDNTFVSGNCDVVIGIVNNTVYDPLQPELDSFKEELDKYFKNHTSPDVDLGDISGINASVVNIQKEIDRLNEVAKNLNESLIDLQELGKYEQYIK

SEQ ID NO: 2481 - protein, 1205 aa, Artificial Sequence
  SARS-CoV-2/pangolin/Guangxi/P4L/2017__EPI_ISL_410538 spike protein (1-1205)(A966C_R989C)
MFVFLFVLPLVSSQCVNLTTRTGIPPGYTNSSTRGVYYPDKVFRSSILHLTQDLFLPFFSNVTWFNTINYQGGFKKFDNPVLPFNDGVYFASTEKSNIIRGWIFGTTLDARTQSLLIVNNATNVVIKVCEFQFCTDPFLGVYYHNNNKTWVENEFRVYSSANNCTFEYISQPFLMDLEGKQGNFKNLREFVFKNVDGYFKIYSKHTPIDLVRDLPRGFAALEPLVDLPIGINITRFQTLLALHRSYLTPGNLESGWTTGAAAYYVGYLQQRTFLLSYNQNGTITDAVDCSLDPLSETKCTLKSLTVEKGIYQTSNFRVQPTISIVRFPNITNLCPFGEVFNASKFASVYAWNRKRISNCVADYSVLYNSTSFSTFKCYGVSPTKLNDLCFTNVYADSFVVKGDEVRQIAPGQTGVIADYNYKLPDDFTGCVIAWNSVKQDALTGGNYGYLYRLFRKSKLKPFERDISTEIYQAGSTPCNGQVGLNCYYPLERYGFHPTTGVNYQPFRVVVLSFELLNGPATVCGPKLSTTLVKDKCVNFNFNGLTGTGVLTTSKKQFLPFQQFGRDISDTTDAVRDPQTLEILDITPCSFGGVSVITPGTNTSNQVAVLYQDVNCTEVPMAIHAEQLTPAWRVYSAGANVFQTRAGCLVGAEHVNNSYECDIPVGAGICASYHSMSSLRSVNQRSIIAYTMSLGAENSVAYSNNSIAIPTNFTISVTTEILPVSMTKTSVDCTMYICGDSIECSNLLLQYGSFCTQLNRALTGIAVEQDKNTQEVFAQVKQIYKTPPIKDFGGFNFSQILPDPSKPSKRSFIEDLLFNKVTLADAGFIKQYGDCLGDIAARDLICAQKFNGLTVLPPLLTDEMIAQYTSALLAGTITSGWTFGAGAALQIPFAMQMAYRFNGIGVTQNVLYENQKLIANQFNSAIGKIQDSLSSTASALGKLQDVVNQNAQALNTLVKQLSSNFGCISSVLNDILSRLDKVEAEVQIDCLITGRLQSLQTYVTQQLIRAAEIRASANLAATKMSECVLGQSKRVDFCGKGYHLMSFPQSAPHGVVFLHVTYVPAQEKNFTTAPAICHEGKAHFPREGVFVSNGTHWFITQRNFYEPQIITTDNTFVSGSCDVVIGIVNNTVYDPLQPELDSFKEELDKYFKNHTSPDVDLGDISGINASVVNIQKEIDRLNEVAKNLNESPIDLQELGKYEQYIK

SEQ ID NO: 2482 - protein, 1205 aa, Artificial Sequence
  SARS-CoV-2/pangolin/Guangxi/P5L/2017__EPI_ISL_410540 spike protein (1-1205)(A966C_R989C)
MFVFLFVLPLVSSQCVNLTTRTGIPPGYTNSSTRGVYYPDKVFRSSILHLTQDLFLPFFSNVTWFNTINYQGGFKKFDNPVLPFNDGVYFASTEKSNIIRGWIFGTTLDARTQSLLIVNNATNVVIKVCEFQFCTDPFLGVYYHNNNKTWVENEFRVYSSANNCTFEYISQPFLMDLEGKQGNFKNLREFVFKNVDGYFKIYSKHTPIDLVRDLPRGFAALEPLVDLPIGINITRFQTLLALHRSYLTPGKLESGWTTGAAAYYVGYLQQRTFLLSYNQNGTITDAVDCSLDPLSETKCTLKSLTVEKGIYQTSNFRVQPTISIVRFPNITNLCPFGEVFNASKFASVYAWNRKRISNCVADYSVLYNSTSFSTFKCYGVSPTKLNDLCFTNVYADSFVVKGDEVRQIAPGQTGVIADYNYKLPDDFTGCVIAWNSVKQDALTGGNYGYLYRLFRKSKLKPFERDISTEIYQAGSTPCNGQVGLNCYYPLERYGFHPTTGVNYQPFRVVVLSFELLNGPATVCGPKLSTTLVKDKCVNFNFNGLTGTGVLTTSKKQFLPFQQFGRDISDTTDAVRDPQTLEILDITPCSFGGVSVITPGTNTSNQVAVLYQDVNCTEVPMAIHAEQLTPAWRVYSAGANVFQTRAGCLVGAEHVNNSYECDIPVGAGICASYHSMSSFRSVNQRSIIAYTMSLGAENSVAYSNNSIAIPTNFTISVTTEILPVSMTKTSVDCTMYICGDSIECSNLLLQYGSFCTQLNRALTGIAVEQDKNTQEVFAQVKQIYKTPPIKDFGGFNFSQILPDPSKPSKRSFIEDLLFNKVTLADAGFIKQYGDCLGDIAARDLICAQKFNGLTVLPPLLTDEMIAQYTSALLAGTITSGWTFGAGAALQIPFAMQMAYRFNGIGVTQNVLYENQKLIANQFNSAIGKIQDSLSSTASALGKLQDVVNQNAQALNTLVKQLSSNFGCISSVLNDILSRLDKVEAEVQIDCLITGRLQSLQTYVTQQLIRAAEIRASANLAATKMSECVLGQSKRVDFCGKGYHLMSFPQSAPHGVVFLHVTYVPAQEKNFTTAPAICHEGKAHFPREGVFVSNGTHWFITQRNFYEPQIITTDNTFVSGSCDVVIGIVNNTVYDPLQPELDSFKEELDKYFKNHTSPDVDLGDISGINASVVNIQKEIDRLNEVAKNLNESLIDLQELGKYEQYIK

SEQ ID NO: 2483 - protein, 1205 aa, Artificial Sequence
  SARS-CoV-2/pangolin/Guangxi/P5E/2017__EPI_ISL_410541 spike protein (1-1205)(A966C_R989C)
MFVFLFVLPLVSSQCVNLTTRTGIPPGYTNSSTRGVYYPDKVFRSSILHLTQDLFLPFFSNVTWFNTITYQGGSKKFDNPVLPFNDGVYFASTEKSNIIRGWIFGTTLDARTQSLLIVNNATNVVIKVCEFQFCTDPFLGVYYHNNNKTWVENEFRVYSSANNCTFEYISQPFLMDLEGKQGNFKNLREFVFKNVDGYFKIYSKHTPIDLVRDLPRGFAALEPLVDLPIGINITRFQTLLALHRSYLTPGKLESGWTTGAAAYYVGYLQQRTFLLSYNQNGTITDAVDCSLDPLSETKCTLKSLTVEKGIYQTSNFRVQPTISIVRFPNITNLCPFGEVFNASKFASVYAWNRKRISNCVADYSVLYNSTSFSTFKCYGVSPTKLNDLCFTNVYADSFVVKGDEVRQIAPGQTGVIADYNYKLPDDFTGCVIAWNSVKQDALTGDNYGYLYRLFRKSKLKPFERDISTEIYQAGSTPCNGQVGLNCYYPLERYGFHPTTGVNYQPFRVVVLSFELLNGPATVCGPKLSTTLVKDKCVNFNFNGLTGTGVLTTSKKQFLPFQQFGRDISDTTDAVRDPQTLEILDITPCSFGGVSVITPGTNTSNQVAVLYQDVNCTEVPMAIHAEQLTPAWRVYSAGANVFQTRAGCLVGAEHVNNSYECDIPVGAGICASYHSMSSFRSVNQRSIIAYTMSLGAENSVAYSNNSIAIPTNFTISVTTEILPVSMTKTSVDCTMYICGDSIECSNLLLQYGSFCTQLNRALTGIAVEQDKNTQEVFAQVKQIYKTPPIKDFGGFNFSQILPDPSKPSKRSFIEDLLFNKVTLADAGFIKQYGDCLGDIAARDLICAQKFNGLTVLPPLLTDEMIAQYTSALLAGTITSGWTFGAGAALQIPFAMQMAYRFNGIGVTQNVLYENQKLIANQFNSAIGKIQDSLSSTASALGKLQDVVNQNAQALNTLVKQLSSNFGCISSVLNDILSRLDKVEAEVQIDCLITGRLQSLQTYVTQQLIRAAEIRASANLAATKMSECVLGQSKRVDFCGKGYHLMSFPQSAPHGVVFLHVTYVPAQEKNFTTAPAICHEGKAHFPREGVFVSNGTHWFITQRNFYEPQIITTDNTFVSGSCDVVIGIVNNTVYDPLQPELDSFKEELDKYFKNHTSPDVDLGDISGINASVVNIQKEIDRLNEVAKNLNESLIDLQELGKYEQYIK

SEQ ID NO: 2484 - protein, 1203 aa, Artificial Sequence
  SARS-CoV-2/pangolin/Guangxi/P1E/2017__EPI_ISL_410539 spike protein (1-1203)(A964C_R987C)
MFVFLFVLPLVSSQCVNLTTRTGIQPGYTNSSTRGVYYPDKVFRSSILHLTQDLFLPFFSNVTWFNTINYQGGFKKFDNPVLPFNDGVYFASTEKSNIIRGWIFGTTLDARTQSLLIVNNATNVVIKVCEFQFCTDPFLGVYYHNNNKTWVENEFRVYSSANNCTFEYISQPFLMDLEGKQGNFKNLREFVFKNVDGYFKIYSKHTPIDLVRDLPRGFAALEPLVDLPIGINITRFQTLLALHRSYLTPGKLESGWTTGAAAYYVGYLQQRTFLLSYNQNGTITDAVDCSLDPLSETKCTLKSLTVEKGIYQTSNFRVQPTISIVRFPNITNLCPFGEVFNASKFASVYAWNRKRISNCVADYSVLYNSTSFSTFKCYGVSPTKLNDLCFTNVYADSFVVKGDEVRQIAPGQTGVIADYNYKLPDDFTGCVIAWNSVKQDALTGGNYLYRLFRKSKLKPFERDISTEIYQAGSTPCNGQVGLNCYYPLERYGFHPTTGVNYQPFRVVVLSFELLNGPATVCGPKLSTTLVKDKCVNFNFNGLTGTGVLTTSKKQFLPFQQFGRDISDTTDAVRDPQTLEILDITPCSFGGVSVITPGTNTSNQVAVLYQDVNCTEVPMAIHAEQLTPAWRVYSAGANVFQTRAGCLVGAEHVNNSYECDIPVGAGICASYHSMSSLRSVNQRSIIAYTMSLGAENSVAYSNNSIAIPTNFTISVTTEILPVSMTKTSVDCTMYICGDSIECSNLLLQYGSFCTQLNRALTGIAVEQDKNTQEVFAQVKQIYKTPPIKDFGGFNFSQILPDPSKPSKRSFIEDLLFNKVTLADAGFIKQYGDCLGDIAARDLICAQKFNGLTVLPPLLTDEMIAQYTSALLAGTITSGWTFGAGAALQIPFAMQMAYRFNGIGVTQNVLYENQKLIANQFNSAIGKIQDSLSSTASALGKLQDVVNQNAQALNTLVKQLSSNFGCISSVLNDILSRLDKVEAEVQIDCLITGRLQSLQTYVTQQLIRAAEIRASANLAATKMSECVLGQSKRVDFCGKGYHLMSFPQSAPHGVVFLHVTYVPAQEKNFTTAPAICHEGKAHFPREGVFVSNGTHWFITQRNFYEPQIITTDNTFVSGSCDVVIGIVNNTVYDPLQPELDSFKEELDKYFKNHTSPDVDLGDISGINASVVNIQKEIDRLNEVAKNLNESLIDLQELGKYEQYIK

SEQ ID NO: 2485 - protein, 1211 aa, Artificial Sequence
  SARS-CoV-2/Wuhan/WIV05/2019__EPI_ISL_402128 spike protein (1-1211)(A890C_V1040C)
MFVFLVLLPLVSSQCVNLTTRTQLPPAYTNSFTRGVYYPDKVFRSSVLHSTQDLFLPFFSNVTWFHAIHVSGTNGTKRFDNPVLPFNDGVYFASTEKSNIIRGWIFGTTLDSKTQSLLIVNNATNVVIKVCEFQFCNDPFLGVYYHKNNKSWMESEFRVYSSANNCTFEYVSQPFLMDLEGKQGNFKNLREFVFKNIDGYFKIYSKHTPINLVRDLPQGFSALEPLVDLPIGINITRFQTLLALHRSYLTPGDSSSGWTAGAAAYYVGYLQPRTFLLKYNENGTITDAVDCALDPLSETKCTLKSFTVEKGIYQTSNFRVQPTESIVRFPNITNLCPFGEVFNATRFASVYAWNRKRISNCVADYSVLYNSASFSTFKCYGVSPTKLNDLCFTNVYADSFVIRGDEVRQIAPGQTGKIADYNYKLPDDFTGCVIAWNSNNLDSKVGGNYNYLYRLFRKSNLKPFERDISTEIYQAGSTPCNGVEGFNCYFPLQSYGFQPTNGVGYQPYRVVVLSFELLHAPATVCGPKKSTNLVKNKCVNFNFNGLTGTGVLTESNKKFLPFQQFGRDIADTTDAVRDPQTLEILDITPCSFGGVSVITPGTNTSNQVAVLYQDVNCTEVPVAIHADQLTPTWRVYSTGSNVFQTRAGCLIGAEHVNNSYECDIPIGAGICASYQTQTNSPRRARSVASQSIIAYTMSLGAENSVAYSNNSIAIPTNFTISVTTEILPVSMTKTSVDCTMYICGDSTECSNLLLQYGSFCTQLNRALTGIAVEQDKNTQEVFAQVKQIYKTPPIKDFGGFNFSQILPDPSKPSKRSFIEDLLFNKVTLADAGFIKQYGDCLGDIAARDLICAQKFNGLTVLPPLLTDEMIAQYTSALLAGTITSGWTFGCGAALQIPFAMQMAYRFNGIGVTQNVLYENQKLIANQFNSAIGKIQDSLSSTASALGKLQDVVNQNAQALNTLVKQLSSNFGAISSVLNDILSRLDKVEAEVQIDRLITGRLQSLQTYVTQQLIRAAEIRASANLAATKMSECVLGQSKRCDFCGKGYHLMSFPQSAPHGVVFLHVTYVPAQEKNFTTAPAICHDGKAHFPREGVFVSNGTHWFVTQRNFYEPQIITTDNTFVSGNCDVVIGIVNNTVYDPLQPELDSFKEELDKYFKNHTSPDVDLGDISGINASVVNIQKEIDRLNEVAKNLNESLIDLQELGKYEQYIK

SEQ ID NO: 2486 - protein, 1207 aa, Artificial Sequence; identical to SEQ ID NO: 2218
  SARS-CoV-2/bat/Yunnan/RaTG13/2013__EPI_ISL_402131 spike protein (1-1207)(A886C_V1036C)

SEQ ID NO: 2487 - protein, 1211 aa, Artificial Sequence; identical to SEQ ID NO: 2219
  SARS-CoV-2/Wuhan/HBCDC-HB-01/2019__EPI_ISL_402132 spike protein (1-1211)(A890C_V1040C)

SEQ ID NO: 2488 - protein, 1211 aa, Artificial Sequence; identical to SEQ ID NO: 2220
  SARS-CoV-2/Guangdong/20SF028/2020__EPI_ISL_403936 spike protein (1-1211)(A890C_V1040C)

SEQ ID NO: 2489 - protein, 1211 aa, Artificial Sequence; identical to SEQ ID NO: 2221
  SARS-CoV-2/Shenzhen/SZTH-001/2020__EPI_ISL_406592 spike protein (1-1211)(A890C_V1040C)

SEQ ID NO: 2490 - protein, 1211 aa, Artificial Sequence; identical to SEQ ID NO: 2222
  SARS-CoV-2/Shenzhen/SZTH-004/2020__EPI_ISL_406595 spike protein (1-1211)(A890C_V1040C)

SEQ ID NO: 2491 - protein, 1211 aa, Artificial Sequence; identical to SEQ ID NO: 2223
  SARS-CoV-2/France/IDF0372/2020__EPI_ISL_406596 spike protein (1-1211)(A890C_V1040C)

SEQ ID NO: 2492 - protein, 1211 aa, Artificial Sequence; identical to SEQ ID NO: 2224
  SARS-CoV-2/Australia/VIC01/2020__EPI_ISL_406844 spike protein (1-1211)(A890C_V1040C)

SEQ ID NO: 2493 - protein, 1211 aa, Artificial Sequence; identical to SEQ ID NO: 2225
  SARS-CoV-2/Germany/BavPat1/2020__EPI_ISL_406862 spike protein (1-1211)(A890C_V1040C)

SEQ ID NO: 2494 - protein, 1211 aa, Artificial Sequence; identical to SEQ ID NO: 2226
  SARS-CoV-2/Wuhan/HBCDC-HB-02/2020__EPI_ISL_412978 spike protein (1-1211)(A890C_V1040C)

SEQ ID NO: 2495 - protein, 1211 aa, Artificial Sequence; identical to SEQ ID NO: 2227
  SARS-CoV-2/Australia/QLD02/2020__EPI_ISL_407896 spike protein (1-1211)(A890C_V1040C)

SEQ ID NO: 2496 - protein, 1211 aa, Artificial Sequence; identical to SEQ ID NO: 2228
  SARS-CoV-2/India/1-31/2020__EPI_ISL_413523 spike protein (1-1211)(A890C_V1040C)

SEQ ID NO: 2497 - protein, 1211 aa, Artificial Sequence; identical to SEQ ID NO: 2229
  SARS-CoV-2/Guangdong/GD2020087-P0008/2020__EPI_ISL_413863 spike protein (1-1211)(A890C_V1040C)

SEQ ID NO: 2498 - protein, 1211 aa, Artificial Sequence; identical to SEQ ID NO: 2230
  SARS-CoV-2/Sweden/01/2020__EPI_ISL_411951 spike protein (1-1211)(A890C_V1040C)

SEQ ID NO: 2499 - protein, 1211 aa, Artificial Sequence; identical to SEQ ID NO: 2231
  SARS-CoV-2/Tianmen/HBCDC-HB-07/2020__EPI_ISL_412983 spike protein (1-1211)(A890C_V1040C)

SEQ ID NO: 2500 - protein, 1211 aa, Artificial Sequence; identical to SEQ ID NO: 2232
  SARS-CoV-2/Hong Kong/case42_VM20002493/2020__EPI_ISL_414527 spike protein (1-1211)(A890C_V1040C)

SEQ ID NO: 2501 - protein, 1211 aa, Artificial Sequence; identical to SEQ ID NO: 2233
  SARS-CoV-2/USA/CruiseA-23/2020__EPI_ISL_414482 spike protein (1-1211)(A890C_V1040C)

SEQ ID NO: 2502 - protein, 1211 aa, Artificial Sequence; identical to SEQ ID NO: 2234
  SARS-CoV-2/Hong Kong/case85_VM20002868/2020__EPI_ISL_414519 spike protein (1-1211)(A890C_V1040C)

SEQ ID NO: 2503 - protein, 1211 aa, Artificial Sequence; identical to SEQ ID NO: 2225
  SARS-CoV-2/England/200990660/2020__EPI_ISL_414523 spike protein (1-1211)(A890C_V1040C)

SEQ ID NO: 2504 - protein, 1211 aa, Artificial Sequence; identical to SEQ ID NO: 2236
  SARS-CoV-2/Australia/NSW09/2020__EPI_ISL_413595 spike protein (1-1211)(A890C_V1040C)

SEQ ID NO: 2505 - protein, 1211 aa, Artificial Sequence; identical to SEQ ID NO: 2217
  SARS-CoV-2/Australia/NSW10/2020__EPI_ISL_413596 spike protein (1-1211)(A890C_V1040C)

SEQ ID NO: 2506 - protein, 1211 aa, Artificial Sequence; identical to SEQ ID NO: 2238
  SARS-CoV-2/Switzerland/1000477797/2020__EPI_ISL_413023 spike protein (1-1211)(A890C_V1040C)

SEQ ID NO: 2507 - protein, 1211 aa, Artificial Sequence; identical to SEQ ID NO: 2239
  SARS-CoV-2/Belgium/BA-02291/2020__EPI_ISL_415159 spike protein (1-1211)(A890C_V1040C)

SEQ ID NO: 2508 - protein, 1211 aa, Artificial Sequence; identical to SEQ ID NO: 2240
  SARS-CoV-2/USA/WA8-UW5/2020__EPI_ISL_413486 spike protein (1-1211)(A890C_V1040C)

SEQ ID NO: 2509 - protein, 1211 aa, Artificial Sequence; identical to SEQ ID NO: 2241
  SARS-CoV-2/England/20102000506/2020__EPI_ISL_415147 spike protein (1-1211)(A890C_V1040C)

SEQ ID NO: 2510 - protein, 1211 aa, Artificial Sequence; identical to SEQ ID NO: 2242
  SARS-CoV-2/Belgium/VAG-03013/2020__EPI_ISL_415155 spike protein (1-1211)(A890C_V1040C)

SEQ ID NO: 2511 - protein, 1211 aa, Artificial Sequence; identical to SEQ ID NO: 2243
  SARS-CoV-2/Belgium/BC-03016/2020__EPI_ISL_415157 spike protein (1-1211)(A890C_V1040C)

SEQ ID NO: 2512 - protein, 1211 aa, Artificial Sequence; identical to SEQ ID NO: 2244
  SARS-CoV-2/Germany/BavPat3/2020__EPI_ISL_414521 spike protein (1-1211)(A890C_V1040C)

SEQ ID NO: 2513 - protein, 1211 aa, Artificial Sequence; identical to SEQ ID NO: 2245
  SARS-CoV-2/France/HF1805/2020__EPI_ISL_414628 spike protein (1-1211)(A890C_V1040C)

SEQ ID NO: 2514 - protein, 1211 aa, Artificial Sequence; identical to SEQ ID NO: 2246
  SARS-CoV-2/Netherlands/ZuidHolland_9/2020__EPI_ISL_414445 spike protein (1-1211)(A890C_V1040C)

SEQ ID NO: 2515 - protein, 1211 aa, Artificial Sequence; identical to SEQ ID NO: 2247
  SARS-CoV-2/Finland/FIN03032020A/2020__EPI_ISL_413602 spike protein (1-1211)(A890C_V1040C)

SEQ ID NO: 2516 - protein, 1211 aa, Artificial Sequence; identical to SEQ ID NO: 2248
  SARS-CoV-2/France/GE1977/2020__EPI_ISL_414632 spike protein (1-1211)(A890C_V1040C)

SEQ ID NO: 2517 - protein, 1211 aa, Artificial Sequence; identical to SEQ ID NO: 2249
  SARS-CoV-2/Finland/FIN-313/2020__EPI_ISL_414641 spike protein (1-1211)(A890C_V1040C)

SEQ ID NO: 2518 - protein, 1211 aa, Artificial Sequence; identical to SEQ ID NO: 2250
  SARS-CoV-2/Netherlands/ZuidHolland_2/2020__EPI_ISL_414556 spike protein (1-1211)(A890C_V1040C)

SEQ ID NO: 2519 - protein, 1211 aa, Artificial Sequence; identical to SEQ ID NO: 2251
  SARS-CoV-2/USA/WA-UW31/2020__EPI_ISL_414618 spike protein (1-1211)(A890C_V1040C)

SEQ ID NO: 2520 - protein, 1211 aa, Artificial Sequence; identical to SEQ ID NO: 2252
  SARS-CoV-2/South Korea/SNU01/2020__EPI_ISL_411929 spike protein (1-1211)(A890C_V1040C)

SEQ ID NO: 2521 - protein, 1211 aa, Artificial Sequence; identical to SEQ ID NO: 2253
  SARS-CoV-2/China/WF0004/2020__EPI_ISL_413694 spike protein (1-1211)(A890C_V1040C)

SEQ ID NO: 2522 - protein, 1211 aa, Artificial Sequence; identical to SEQ ID NO: 2254
  SARS-CoV-2/China/WF0028/2020__EPI_ISL_413791 spike protein (1-1211)(A890C_V1040C)

SEQ ID NO: 2523 - protein, 1211 aa, Artificial Sequence; identical to SEQ ID NO: 2255
  SARS-CoV-2/2019-nCoV/USA-CruiseA-18/2020__MT159716.1 spike protein (1-1211)(A890C_V1040C)

SEQ ID NO: 2524 - protein, 1211 aa, Artificial Sequence; identical to SEQ ID NO: 2256
  SARS-CoV-2/SARS-CoV-2/Yunnan-01/human/2020/CHN__MT049951.1 spike protein (1-1211)(A890C_V1040C)

SEQ ID NO: 2525 - protein, 1211 aa, Artificial Sequence; identical to SEQ ID NO: 2257
  SARS-CoV-2/USA/WA-UW292/2020__EPI_ISL_418077 spike protein (1-1211)(A890C_V1040C)

SEQ ID NO: 2526 - protein, 1211 aa, Artificial Sequence; identical to SEQ ID NO: 2258
  SARS-CoV-2/Iceland/192/2020__EPI_ISL_417819 spike protein (1-1211)(A890C_V1040C)

SEQ ID NO: 2527 - protein, 1211 aa, Artificial Sequence; identical to SEQ ID NO: 2259
  SARS-CoV-2/Belgium/ULG-6939/2020__EPI_ISL_417020 spike protein (1-1211)(A890C_V1040C)

SEQ ID NO: 2528 - protein, 1211 aa, Artificial Sequence; identical to SEQ ID NO: 2260
  SARS-CoV-2/France/HF2496/2020__EPI_ISL_418231 spike protein (1-1211)(A890C_V1040C)

SEQ ID NO: 2529 - protein, 1211 aa, Artificial Sequence; identical to SEQ ID NO: 2261
  SARS-CoV-2/USA/WA-UW291/2020__EPI_ISL_418076 spike protein (1-1211)(A890C_V1040C)

SEQ ID NO: 2530 - protein, 1211 aa, Artificial Sequence; identical to SEQ ID NO: 2225
  SARS-CoV-2/Portugal/PT0034/2020__EPI_ISL_418019 spike protein (1-1211)(A890C_V1040C)

SEQ ID NO: 2531 - protein, 1211 aa, Artificial Sequence; identical to SEQ ID NO: 2263
  SARS-CoV-2/Iceland/202/2020__EPI_ISL_417750 spike protein (1-1211)(A890C_V1040C)

SEQ ID NO: 2532 - protein, 1211 aa, Artificial Sequence; identical to SEQ ID NO: 2264
  SARS-CoV-2/USA/WA-UW261/2020__EPI_ISL_418046 spike protein (1-1211)(A890C_V1040C)

SEQ ID NO: 2533 - protein, 1211 aa, Artificial Sequence; identical to SEQ ID NO: 2265
  SARS-CoV-2/Portugal/PT0035/2020__EPI_ISL_418020 spike protein (1-1211)(A890C_V1040C)

SEQ ID NO: 2534 - protein, 1211 aa, Artificial Sequence; identical to SEQ ID NO: 2266
  SARS-CoV-2/USA/NY-NYUMC7/2020__EPI_ISL_418192 spike protein (1-1211)(A890C_V1040C)

SEQ ID NO: 2535 - protein, 1211 aa, Artificial Sequence; identical to SEQ ID NO: 2267
  SARS-CoV-2/Iceland/189/2020__EPI_ISL_417709 spike protein (1-1211)(A890C_V1040C)

SEQ ID NO: 2536 - protein, 1211 aa, Artificial Sequence; identical to SEQ ID NO: 2268
  SARS-CoV-2/Australia/NSW56/2020__EPI_ISL_417408 spike protein (1-1211)(A890C_V1040C)

SEQ ID NO: 2537 - protein, 1211 aa, Artificial Sequence; identical to SEQ ID NO: 2269
  SARS-CoV-2/Iceland/280/2020__EPI_ISL_417608 spike protein (1-1211)(A890C_V1040C)

SEQ ID NO: 2538 - protein, 1211 aa, Artificial Sequence; identical to SEQ ID NO: 2225
  SARS-CoV-2/Iceland/247/2020__EPI_ISL_417575 spike protein (1-1211)(A890C_V1040C)

SEQ ID NO: 2539 - protein, 1211 aa, Artificial Sequence; identical to SEQ ID NO: 2271
  SARS-CoV-2/Iceland/238/2020__EPI_ISL_417566 spike protein (1-1211)(A890C_V1040C)

SEQ ID NO: 2540 - protein, 1211 aa, Artificial Sequence; identical to SEQ ID NO: 2272
  SARS-CoV-2/Greece/16/2020__EPI_ISL_418265 spike protein (1-1211)(A890C_V1040C)

SEQ ID NO: 2541 - protein, 1211 aa, Artificial Sequence; identical to SEQ ID NO: 2273
  SARS-CoV-2/Iceland/319/2020__EPI_ISL_417648 spike protein (1-1211)(A890C_V1040C)

SEQ ID NO: 2542 - protein, 1211 aa, Artificial Sequence; identical to SEQ ID NO: 2274
  SARS-CoV-2/Congo/94/2020__EPI_ISL_417947 spike protein (1-1211)(A890C_V1040C)

SEQ ID NO: 2543 - protein, 1211 aa, Artificial Sequence; identical to SEQ ID NO: 2275
  SARS-CoV-2/Congo/158/2020__EPI_ISL_417950 spike protein (1-1211)(A890C_V1040C)

SEQ ID NO: 2544 - protein, 1211 aa, Artificial Sequence; identical to SEQ ID NO: 2276
  SARS-CoV-2/USA/UT-00034/2020__EPI_ISL_417977 spike protein (1-1211)(A890C_V1040C)

SEQ ID NO: 2545 - protein, 1211 aa, Artificial Sequence; identical to SEQ ID NO: 2277
  SARS-CoV-2/USA/UT-00033/2020__EPI_ISL_417976 spike protein (1-1211)(A890C_V1040C)

SEQ ID NO: 2546 - protein, 1211 aa, Artificial Sequence; identical to SEQ ID NO: 2278
  SARS-CoV-2/USA/WI-13/2020__EPI_ISL_417516 spike protein (1-1211)(A890C_V1040C)

SEQ ID NO: 2547 - protein, 1210 aa, Artificial Sequence; identical to SEQ ID NO: 2279
  SARS-CoV-2/India/1-27/2020__EPI_ISL_413522 spike protein (1-1210)(A889C_V1039C)

SEQ ID NO: 2548 - protein, 1205 aa, Artificial Sequence; identical to SEQ ID NO: 2280
  SARS-CoV-2/pangolin/Guangxi/P4L/2017__EPI_ISL_410538 spike protein (1-1205)(A884C_V1034C)

SEQ ID NO: 2549 - protein, 1205 aa, Artificial Sequence; identical to SEQ ID NO: 2281
  SARS-CoV-2/pangolin/Guangxi/P5L/2017__EPI_ISL_410540 spike protein (1-1205)(A884C_V1034C)

SEQ ID NO: 2550 - protein, 1205 aa, Artificial Sequence; identical to SEQ ID NO: 2282
  SARS-CoV-2/pangolin/Guangxi/P5E/2017__EPI_ISL_410541 spike protein (1-1205)(A884C_V1034C)

SEQ ID NO: 2551 - protein, 1203 aa, Artificial Sequence; identical to SEQ ID NO: 2283
  SARS-CoV-2/pangolin/Guangxi/P1E/2017__EPI_ISL_410539 spike protein (1-1203)(A882C_V1032C)

SEQ ID NO: 2552 - protein, 1211 aa, Artificial Sequence
  SARS-CoV-2/Wuhan/WIV05/2019__EPI_ISL_402128 spike protein (1-1211)(T874C_S1055C)
MFVFLVLLPLVSSQCVNLTTRTQLPPAYTNSFTRGVYYPDKVFRSSVLHSTQDLFLPFFSNVTWFHAIHVSGTNGTKRFDNPVLPFNDGVYFASTEKSNIIRGWIFGTTLDSKTQSLLIVNNATNVVIKVCEFQFCNDPFLGVYYHKNNKSWMESEFRVYSSANNCTFEYVSQPFLMDLEGKQGNFKNLREFVFKNIDGYFKIYSKHTPINLVRDLPQGFSALEPLVDLPIGINITRFQTLLALHRSYLTPGDSSSGWTAGAAAYYVGYLQPRTFLLKYNENGTITDAVDCALDPLSETKCTLKSFTVEKGIYQTSNFRVQPTESIVRFPNITNLCPFGEVFNATRFASVYAWNRKRISNCVADYSVLYNSASFSTFKCYGVSPTKLNDLCFTNVYADSFVIRGDEVRQIAPGQTGKIADYNYKLPDDFTGCVIAWNSNNLDSKVGGNYNYLYRLFRKSNLKPFERDISTEIYQAGSTPCNGVEGFNCYFPLQSYGFQPTNGVGYQPYRVVVLSFELLHAPATVCGPKKSTNLVKNKCVNFNFNGLTGTGVLTESNKKFLPFQQFGRDIADTTDAVRDPQTLEILDITPCSFGGVSVITPGTNTSNQVAVLYQDVNCTEVPVAIHADQLTPTWRVYSTGSNVFQTRAGCLIGAEHVNNSYECDIPIGAGICASYQTQTNSPRRARSVASQSIIAYTMSLGAENSVAYSNNSIAIPTNFTISVTTEILPVSMTKTSVDCTMYICGDSTECSNLLLQYGSFCTQLNRALTGIAVEQDKNTQEVFAQVKQIYKTPPIKDFGGFNFSQILPDPSKPSKRSFIEDLLFNKVTLADAGFIKQYGDCLGDIAARDLICAQKFNGLTVLPPLLTDEMIAQYCSALLAGTITSGWTFGAGAALQIPFAMQMAYRFNGIGVTQNVLYENQKLIANQFNSAIGKIQDSLSSTASALGKLQDVVNQNAQALNTLVKQLSSNFGAISSVLNDILSRLDKVEAEVQIDRLITGRLQSLQTYVTQQLIRAAEIRASANLAATKMSECVLGQSKRVDFCGKGYHLMSFPQCAPHGVVFLHVTYVPAQEKNFTTAPAICHDGKAHFPREGVFVSNGTHWFVTQRNFYEPQIITTDNTFVSGNCDVVIGIVNNTVYDPLQPELDSFKEELDKYFKNHTSPDVDLGDISGINASVVNIQKEIDRLNEVAKNLNESLIDLQELGKYEQYIK

SEQ ID NO: 2553 - protein, 1207 aa, Artificial Sequence
  SARS-CoV-2/bat/Yunnan/RaTG13/2013__EPI_ISL_402131 spike protein (1-1207)(T870C_S1051C)
MFVFLVLLPLVSSQCVNLTTRTQLPPAYTNSSTRGVYYPDKVFRSSVLHLTQDLFLPFFSNVTWFHAIHVSGTNGIKRFDNPVLPFNDGVYFASTEKSNIIRGWIFGTTLDSKTQSLLIVNNATNVVIKVCEFQFCNDPFLGVYYHKNNKSWMESEFRVYSSANNCTFEYVSQPFLMDLEGKQGNFKNLREFVFKNIDGYFKIYSKHTPINLVRDLPPGFSALEPLVDLPIGINITRFQTLLALHRSYLTPGDSSSGWTAGAAAYYVGYLQPRTFLLKYNENGTITDAVDCALDPLSETKCTLKSFTVEKGIYQTSNFRVQPTDSIVRFPNITNLCPFGEVFNATTFASVYAWNRKRISNCVADYSVLYNSTSFSTFKCYGVSPTKLNDLCFTNVYADSFVITGDEVRQIAPGQTGKIADYNYKLPDDFTGCVIAWNSKHIDAKEGGNFNYLYRLFRKANLKPFERDISTEIYQAGSKPCNGQTGLNCYYPLYRYGFYPTDGVGHQPYRVVVLSFELLNAPATVCGPKKSTNLVKNKCVNFNFNGLTGTGVLTESNKKFLPFQQFGRDIADTTDAVRDPQTLEILDITPCSFGGVSVITPGTNASNQVAVLYQDVNCTEVPVAIHADQLTPTWRVYSTGSNVFQTRAGCLIGAEHVNNSYECDIPIGAGICASYQTQTNSRSVASQSIIAYTMSLGAENSVAYSNNSIAIPTNFTISVTTEILPVSMTKTSVDCTMYICGDSTECSNLLLQYGSFCTQLNRALTGIAVEQDKNTQEVFAQVKQIYKTPPIKDFGGFNFSQILPDPSKPSKRSFIEDLLFNKVTLADAGFIKQYGDCLGDIAARDLICAQKFNGLTVLPPLLTDEMIAQYCSALLAGTITSGWTFGAGAALQIPFAMQMAYRFNGIGVTQNVLYENQKLIANQFNSAIGKIQDSLSSTASALGKLQDVVNQNAQALNTLVKQLSSNFGAISSVLNDILSRLDKVEAEVQIDRLITGRLQSLQTYVTQQLIRAAEIRASANLAATKMSECVLGQSKRVDFCGKGYHLMSFPQCAPHGVVFLHVTYVPAQEKNFTTAPAICHDGKAHFPREGVFVSNGTHWFVTQRNFYEPQIITTDNTFVSGSCDVVIGIVNNTVYDPLQPELDSFKEELDKYFKNHTSPDVDLGDISGINASVVNIQKEIDRLNEVAKNLNESLIDLQELGKYEQYIK

SEQ ID NO: 2554 - protein, 1211 aa, Artificial Sequence
  SARS-CoV-2/Wuhan/HBCDC-HB-01/2019__EPI_ISL_402132 spike protein (1-1211)(T874C_S1055C)
MFVFLVLLPLVSSQCVNLTTRTQLPPAYTNSITRGVYYPDKVFRSSVLHSTQDLFLPFFSNVTWFHAIHVSGTNGTKRFDNPVLPFNDGVYFASTEKSNIIRGWIFGTTLDSKTQSLLIVNNATNVVIKVCEFQFCNDPFLGVYYHKNNKSWMESEFRVYSSANNCTFEYVSQPFLMDLEGKQGNFKNLREFVFKNIDGYFKIYSKHTPINLVRDLPQGFSALEPLVDLPIGINITRFQTLLALHRSYLTPGDSSSGWTAGAAAYYVGYLQPRTFLLKYNENGTITDAVDCALDPLSETKCTLKSFTVEKGIYQTSNFRVQPTESIVRFPNITNLCPFGEVFNATRFASVYAWNRKRISNCVADYSVLYNSASFSTFKCYGVSPTKLNDLCFTNVYADSFVIRGDEVRQIAPGQTGKIADYNYKLPDDFTGCVIAWNSNNLDSKVGGNYNYLYRLFRKSNLKPFERDISTEIYQAGSTPCNGVEGFNCYFPLQSYGFQPTNGVGYQPYRVVVLSFELLHAPATVCGPKKSTNLVKNKCVNFNFNGLTGTGVLTESNKKFLPFQQFGRDIADTTDAVRDPQTLEILDITPCSFGGVSVITPGTNTSNQVAVLYQDVNCTEVPVAIHADQLTPTWRVYSTGSNVFQTRAGCLIGAEHVNNSYECDIPIGAGICASYQTQTNSPRRARSVASQSIIAYTMSLGAENSVAYSNNSIAIPTNFTISVTTEILPVSMTKTSVDCTMYICGDSTECSNLLLQYGSFCTQLNRALTGIAVEQDKNTQEVFAQVKQIYKTPPIKDFGGFNFSQILPDPSKPSKRSFIEDLLFNKVTLADAGFIKQYGDCLGDIAARDLICAQKFNGLTVLPPLLTDEMIAQYCSALLAGTITSGWTFGAGAALQIPFAMQMAYRFNGIGVTQNVLYENQKLIANQFNSAIGKIQDSLSSTASALGKLQDVVNQNAQALNTLVKQLSSNFGAISSVLNDILSRLDKVEAEVQIDRLITGRLQSLQTYVTQQLIRAAEIRASANLAATKMSECVLGQSKRVDFCGKGYHLMSFPQCAPHGVVFLHVTYVPAQEKNFTTAPAICHDGKAHFPREGVFVSNGTHWFVTQRNFYEPQIITTDNTFVSGNCDVVIGIVNNTVYDPLQPELDSFKEELDKYFKNHTSPDVDLGDISGINASVVNIQKEIDRLNEVAKNLNESLIDLQELGKYEQYIK

SEQ ID NO: 2555 - protein, 1211 aa, Artificial Sequence
  SARS-CoV-2/Guangdong/20SF028/2020__EPI_ISL_403936 spike protein (1-1211)(T874C_S1055C)
MFVFLVLLPLVSSQCVNLTTRTQLPPAYTNSFTRGVYYPDKVFRSSVLYSTQDLFLPFFSNVTWFHAIHVSGTNGTKRFDNPVLPFNDGVYFASTEKSNIIRGWIFGTTLDSKTQSLLIVNNATNVVIKVCEFQFCNDPFLGVYYHKNNKSWMESEFRVYSSANNCTFEYVSQPFLMDLEGKQGNFKNLREFVFKNIDGYFKIYSKHTPINLVRDLPQGFSALEPLVDLPIGINITRFQTLLALHRSYLTPGDSSSGWTAGAAAYYVGYLQPRTFLLKYNENGTITDAVDCALDPLSETKCTLKSFTVEKGIYQTSNFRVQPTESIVRFPNITNLCPFGEVFNATRFASVYAWNRKRISNCVADYSVLYNSASFSTFKCYGVSPTKLNDLCFTNVYADSFVIRGDEVRQIAPGQTGKIADYNYKLPDDFTGCVIAWNSNNLDSKVGGNYNYLYRLFRKSNLKPFERDISTEIYQAGSTPCNGVEGFNCYFPLQSYGFQPTNGVGYQPYRVVVLSFELLHAPATVCGPKKSTNLVKNKCVNFNFNGLTGTGVLTESNKKFLPFQQFGRDIADTTDAVRDPQTLEILDITPCSFGGVSVITPGTNTSNQVAVLYQDVNCTEVPVAIHADQLTPTWRVYSTGSNVFQTRAGCLIGAEHVNNSYECDIPIGAGICASYQTQTNSPRRARSVASQSIIAYTMSLGAENSVAYSNNSIAIPTNFTISVTTEILPVSMTKTSVDCTMYICGDSTECSNLLLQYGSFCTQLNRALTGIAVEQDKNTQEVFAQVKQIYKTPPIKDFGGFNFSQILPDPSKPSKRSFIEDLLFNKVTLADAGFIKQYGDCLGDIAARDLICAQKFNGLTVLPPLLTDEMIAQYCSALLAGTITSGWTFGAGAALQIPFAMQMAYRFNGIGVTQNVLYENQKLIANQFNSAIGKIQDSLSSTASALGKLQDVVNQNAQALNTLVKQLSSNFGAISSVLNDILSRLDKVEAEVQIDRLITGRLQSLQTYVTQQLIRAAEIRASANLAATKMSECVLGQSKRVDFCGKGYHLMSFPQCAPHGVVFLHVTYVPAQEKNFTTAPAICHDGKAHFPREGVFVSNGTHWFVTQRNFYEPQIITTDNTFVSGNCDVVIGIVNNTVYDPLQPELDSFKEELDKYFKNHTSPDVDLGDISGINASVVNIQKEIDRLNEVAKNLNESLIDLQELGKYEQYIK

SEQ ID NO: 2556 - protein, 1211 aa, Artificial Sequence
  SARS-CoV-2/Shenzhen/SZTH-001/2020__EPI_ISL_406592 spike protein (1-1211)(T874C_S1055C)
MFVFLVLLPLVSSQCVNLTTRTQLPPAYTNSFTRGVYYPDKVFRSSVLHSTQDLFLPFFSNVTWFHAIHVSGTNGTKRFDNPVLPFNDGVYFASTEKSNIIRGWIFGTTLDSKTQSLLIVNNATNVVIKVCEFQFCNDPFLGVYYHKNNKSWMESEFRVYSSANNCTFEYVSQPFLMDLEGKQGNFKNLREFVFKNIDGYFKIYSKHTPINLVRDLPQGFSALEPLVDLPIGINITRFQTLLALHRSYLTPGDSSSGWTAGAAAYYVGYLQPRTFLLKYNENGTITDAVDCALDPLSETKCTLKSFTVEKGIYQTSNFRVQPTESIVRFPNITNLCPFGEVFNATRFASVYAWNRKRISNCVADYSVLYNSASFSTFKCYGVSPTKLNDLCFTNVYADSFVIRGDEVRQIAPGQTGKIADYNYKLPDDFTGCVIAWNSNNLDSKVGGNYNYLYRLFRKSNLKPFERDISTEIYQAGSTPCNGVEGFNCYFPLQSYGFQPTNGVGYQPYRVVVLSFELLHAPATVCGPKKSTNLVKNKCVNFNFNGLTGTGVLTESNKKFLPFQQFGRDIADTTDAVRDPQTLEILDITPCSFGGVSVITPGTNTSNQVAVLYQDVNCTEVPVAIHADQLTPTWRVYSTGSNVFQTRAGCLIGAEHVNNSYECDIPIGAGICASYQTQTNSPRRARSVASQSIIAYTMSLGAENSVAYSNNSIAIPTNFTISVTTEILPVSMTKTSVDCTMYICGDSTECSNLLLQYGSFCTQLNRALTGIAVEQDKNTQEVFAQVKQIYKTPPIKDFGGFNFSQILPDPSKPSKRSFIEDLLFNKVTLADAGFIKQYGDCLGDIAARDLICAQKFNGLTVLPPLLTDEMIAQYCSALLAGTITSGWTFGAGAALQIPFAMQMAYRFNGIGVTQNVLYENQKLIANQFNSAIGKIQDSLSSTASALGKLQDVVNQNAQALNTLVKQLSSNFGAISSVLNDILSRLDKVEAEVQIDRLITGRLQSLQTYVTQQLIRAAEIRASANLAATKMSECVLGQSKRVDFCGKGYHLMSFPQCAPHGVVFLHVTYVPAQEKNFTTAPAICHDGKAHFPREGVFVSNGTHWFVTQRNFYEPQIITTDNTFVSGNCDVLIGIVNNTVYDPLQPELDSFKEELDKYFKNHTSPDVDLGDISGINASVVNIQKEIDRLNEVAKNLNESLIDLQELGKYEQYIK

SEQ ID NO: 2557 - protein, 1211 aa, Artificial Sequence
  SARS-CoV-2/Shenzhen/SZTH-004/2020__EPI_ISL_406595 spike protein (1-1211)(T874C_S1055C)
MFVFLVLLPLVSSQCVNLTTRTQLPPAYTNSFTRGVYYPDKVFRSSVLHSTQDLFLPFFSNVTWFHAIHVSGTNGTKRFDNPVLPFNDGVYFASTEKSNIIRGWIFGTTLDSKTQSLLIVNNATNVVIKVCEFQFCNDPFLGVYYHKNNKSWMESEFRVYSSANNCTFEYVSQPFLMDLEGKQGNFKNLREFVFKNIDGYFKIYSKHTPINLVRDLPQGFSALEPLVDLPIGINITRFQTLLALHRSYLTPGDSSSGWTAGAAAYYVGYLQPRTFLLKYNENGTITDAVDCALDPLSETKCTLKSFTVEKGIYQTSNFRVQPTESIVRFPNITNLCPFGEVFNATRFASVYAWDRKRISNCVAYYSVLYNSASFSTFKCYGVSPTKLNDLCFTNVYADSFVIRGDEVRQIAPGQTGKIADYNYKLPDDFTGCVIAWNSNNLDSKVGGNYNYLYRLFRKSNLKPFERDISTEIYQAGSTPCNGVEGFNCYFPLQSYGFQPTNGVGYQPYRVVVLSFELLHAPATVCGPKKSTNLVKNKCVNFNFNGLTGTGVLTESNKKFLPFQQFGRDIADTTDAVRDPQTLEILDITPCSFGGVSVITPGTNTSNQVAVLYQDVNCTEVPVAIHADQLTPTWRVYSTGSNVFQTRAGCLIGAEHVNNSYECDIPIGAGICASYQTQTNSPRRARSVASQSIIAYTMSLGAENSVAYSNNSIAIPTNFTISVTTEILPVSMTKTSVDCTMYICGDSTECSNLLLQYGSFCTQLNRALTGIAVEQDKNTQEVFAQVKQIYKTPPIKDFGGFNFSQILPDPSKPSKRSFIEDLLFNKVTLADAGFIKQYGDCLGDIAARDLICAQKFNGLTVLPPLLTDEMIAQYCSALLAGTITSGWTFGAGAALQIPFAMQMAYRFNGIGVTQNVLYENQKLIANQFNSAIGKIQDSLSSTASALGKLQDVVNQNAQALNTLVKQLSSNFGAISSVLNDILSRLDKVEAEVQIDRLITGRLQSLQTYVTQQLIRAAEIRASANLAATKMSECVLGQSKRVDFCGKGYHLMSFPQCAPHGVVFLHVTYVPAQEKNFTTAPAICHDGKAHFPREGVFVSNGTHWFVTQRNFYEPQIITTDNTFVSGNCDVVIGIVNNTVYDPLQPELDSFKEELDKYFKNHTSPDVDLGDISGINASVVNIQKEIDRLNEVAKNLNESLIDLQELGKYEQYIK

SEQ ID NO: 2558 - protein, 1211 aa, Artificial Sequence
  SARS-CoV-2/France/IDF0372/2020__EPI_ISL_406596 spike protein (1-1211)(T874C_S1055C)
MFVFLVLLPLVSSQCVNLTTRTQLPPAYTNSFTRGVYYPDKVFRSSVLHSTQDLFLPFFSNVTWFHAIHVSGTNGTKRFDNPVLPFNDGVYFASTEKSNIIRGWIFGTTLDSKTQSLLIVNNATNVVIKVCEFQFCNDPFLGVYYHKNNKSWMESEFRVYSSANNCTFEYVSQPFLMDLEGKQGNFKNLREFVFKNIDGYFKIYSKHTPINLVRDLPQGFSALEPLVDLPIGINITRFQTLLALHRSYLTPGDSSSGWTAGAAAYYVGYLQPRTFLLKYNENGTITDAVDCALDPLSETKCTLKSFTVEKGIYQTSNFRVQPTESIVRFPNITNLCPFGEVFNATRFASVYAWNRKRISNCVADYSFLYNSASFSTFKCYGVSPTKLNDLCFTNVYADSFVIRGDEVRQIAPGQTGKIADYNYKLPDDFTGCVIAWNSNNLDSKVGGNYNYLYRLFRKSNLKPFERDISTEIYQAGSTPCNGVEGFNCYFPLQSYGFQPTNGVGYQPYRVVVLSFELLHAPATVCGPKKSTNLVKNKCVNFNFNGLTGTGVLTESNKKFLPFQQFGRDIADTTDAVRDPQTLEILDITPCSFGGVSVITPGTNTSNQVAVLYQDVNCTEVPVAIHADQLTPTWRVYSTGSNVFQTRAGCLIGAEHVNNSYECDIPIGAGICASYQTQTNSPRRARSVASQSIIAYTMSLGAENSVAYSNNSIAIPTNFTISVTTEILPVSMTKTSVDCTMYICGDSTECSNLLLQYGSFCTQLNRALTGIAVEQDKNTQEVFAQVKQIYKTPPIKDFGGFNFSQILPDPSKPSKRSFIEDLLFNKVTLADAGFIKQYGDCLGDIAARDLICAQKFNGLTVLPPLLTDEMIAQYCSALLAGTITSGWTFGAGAALQIPFAMQMAYRFNGIGVTQNVLYENQKLIANQFNSAIGKIQDSLSSTASALGKLQDVVNQNAQALNTLVKQLSSNFGAISSVLNDILSRLDKVEAEVQIDRLITGRLQSLQTYVTQQLIRAAEIRASANLAATKMSECVLGQSKRVDFCGKGYHLMSFPQCAPHGVVFLHVTYVPAQEKNFTTAPAICHDGKAHFPREGVFVSNGTHWFVTQRNFYEPQIITTDNTFVSGNCDVVIGIVNNTVYDPLQPELDSFKEELDKYFKNHTSPDVDLGDISGINASVVNIQKEIDRLNEVAKNLNESLIDLQELGKYEQYIK

SEQ ID NO: 2559 - protein, 1211 aa, Artificial Sequence
  SARS-CoV-2/Australia/VIC01/2020__EPI_ISL_406844 spike protein (1-1211)(T874C_S1055C)
MFVFLVLLPLVSSQCVNLTTRTQLPPAYTNSFTRGVYYPDKVFRSSVLHSTQDLFLPFFSNVTWFHAIHVSGTNGTKRFDNPVLPFNDGVYFASTEKSNIIRGWIFGTTLDSKTQSLLIVNNATNVVIKVCEFQFCNDPFLGVYYHKNNKSWMESEFRVYSSANNCTFEYVSQPFLMDLEGKQGNFKNLREFVFKNIDGYFKIYSKHTPINLVRDLPQGFSALEPLVDLPIGINITRFQTLLALHRRYLTPGDSSSGWTAGAAAYYVGYLQPRTFLLKYNENGTITDAVDCALDPLSETKCTLKSFTVEKGIYQTSNFRVQPTESIVRFPNITNLCPFGEVFNATRFASVYAWNRKRISNCVADYSVLYNSASFSTFKCYGVSPTKLNDLCFTNVYADSFVIRGDEVRQIAPGQTGKIADYNYKLPDDFTGCVIAWNSNNLDSKVGGNYNYLYRLFRKSNLKPFERDISTEIYQAGSTPCNGVEGFNCYFPLQSYGFQPTNGVGYQPYRVVVLSFELLHAPATVCGPKKSTNLVKNKCVNFNFNGLTGTGVLTESNKKFLPFQQFGRDIADTTDAVRDPQTLEILDITPCSFGGVSVITPGTNTSNQVAVLYQDVNCTEVPVAIHADQLTPTWRVYSTGSNVFQTRAGCLIGAEHVNNSYECDIPIGAGICASYQTQTNSPRRARSVASQSIIAYTMSLGAENSVAYSNNSIAIPTNFTISVTTEILPVSMTKTSVDCTMYICGDSTECSNLLLQYGSFCTQLNRALTGIAVEQDKNTQEVFAQVKQIYKTPPIKDFGGFNFSQILPDPSKPSKRSFIEDLLFNKVTLADAGFIKQYGDCLGDIAARDLICAQKFNGLTVLPPLLTDEMIAQYCSALLAGTITSGWTFGAGAALQIPFAMQMAYRFNGIGVTQNVLYENQKLIANQFNSAIGKIQDSLSSTASALGKLQDVVNQNAQALNTLVKQLSSNFGAISSVLNDILSRLDKVEAEVQIDRLITGRLQSLQTYVTQQLIRAAEIRASANLAATKMSECVLGQSKRVDFCGKGYHLMSFPQCAPHGVVFLHVTYVPAQEKNFTTAPAICHDGKAHFPREGVFVSNGTHWFVTQRNFYEPQIITTDNTFVSGNCDVVIGIVNNTVYDPLQPELDSFKEELDKYFKNHTSPDVDLGDISGINASVVNIQKEIDRLNEVAKNLNESLIDLQELGKYEQYIK

SEQ ID NO: 2560 - protein, 1211 aa, Artificial Sequence
  SARS-CoV-2/Germany/BavPat1/2020__EPI_ISL_406862 spike protein (1-1211)(T874C_S1055C)
MFVFLVLLPLVSSQCVNLTTRTQLPPAYTNSFTRGVYYPDKVFRSSVLHSTQDLFLPFFSNVTWFHAIHVSGTNGTKRFDNPVLPFNDGVYFASTEKSNIIRGWIFGTTLDSKTQSLLIVNNATNVVIKVCEFQFCNDPFLGVYYHKNNKSWMESEFRVYSSANNCTFEYVSQPFLMDLEGKQGNFKNLREFVFKNIDGYFKIYSKHTPINLVRDLPQGFSALEPLVDLPIGINITRFQTLLALHRSYLTPGDSSSGWTAGAAAYYVGYLQPRTFLLKYNENGTITDAVDCALDPLSETKCTLKSFTVEKGIYQTSNFRVQPTESIVRFPNITNLCPFGEVFNATRFASVYAWNRKRISNCVADYSVLYNSASFSTFKCYGVSPTKLNDLCFTNVYADSFVIRGDEVRQIAPGQTGKIADYNYKLPDDFTGCVIAWNSNNLDSKVGGNYNYLYRLFRKSNLKPFERDISTEIYQAGSTPCNGVEGFNCYFPLQSYGFQPTNGVGYQPYRVVVLSFELLHAPATVCGPKKSTNLVKNKCVNFNFNGLTGTGVLTESNKKFLPFQQFGRDIADTTDAVRDPQTLEILDITPCSFGGVSVITPGTNTSNQVAVLYQGVNCTEVPVAIHADQLTPTWRVYSTGSNVFQTRAGCLIGAEHVNNSYECDIPIGAGICASYQTQTNSPRRARSVASQSIIAYTMSLGAENSVAYSNNSIAIPTNFTISVTTEILPVSMTKTSVDCTMYICGDSTECSNLLLQYGSFCTQLNRALTGIAVEQDKNTQEVFAQVKQIYKTPPIKDFGGFNFSQILPDPSKPSKRSFIEDLLFNKVTLADAGFIKQYGDCLGDIAARDLICAQKFNGLTVLPPLLTDEMIAQYCSALLAGTITSGWTFGAGAALQIPFAMQMAYRFNGIGVTQNVLYENQKLIANQFNSAIGKIQDSLSSTASALGKLQDVVNQNAQALNTLVKQLSSNFGAISSVLNDILSRLDKVEAEVQIDRLITGRLQSLQTYVTQQLIRAAEIRASANLAATKMSECVLGQSKRVDFCGKGYHLMSFPQCAPHGVVFLHVTYVPAQEKNFTTAPAICHDGKAHFPREGVFVSNGTHWFVTQRNFYEPQIITTDNTFVSGNCDVVIGIVNNTVYDPLQPELDSFKEELDKYFKNHTSPDVDLGDISGINASVVNIQKEIDRLNEVAKNLNESLIDLQELGKYEQYIK

SEQ ID NO: 2561 - protein, 1211 aa, Artificial Sequence
  SARS-CoV-2/Wuhan/HBCDC-HB-02/2020__EPI_ISL_412978 spike protein (1-1211)(T874C_S1055C)
MFVFLVLLPLVSSQCVNLTTRTQLPPAYTNSFTRGVYYPDKVFRSSVLHSTQDLFLPFFSNVTWFHAIHVSGTNGTKRFDNPVLPFNDGVYFASTEKSNIIRGWIFGTTLDSKTQSLLIVNNATNVVIKVCEFQFCNDPFLGVYYHKNNKSWMESEFRVYSSANNCTFEYVSQPFLMDLEGKQGNFKNLREFVFKNIDGYFKIYSKHTPINLVRDLPQGFSALEPLVDLPIGINITRFQTLLALHRSYLTPGDSSSGWTAGAAAYYVGYLQPRTFLLKYNENGTITDAVDCALDPLSETKCTLKSFTVEKGIYQTSNFRVQPTESIVRFPNITNLCPFGEVFNATRFASVYAWNRKRISNCVADYSVLYNSASFSTFKCYGVSPTKLNDLCFTNVYADSFVIRGDEVRQIAPGQTGKIADYNYKLPDDFTGCVIAWNSNNLDSKVGGNYNYLYRLFRKSNLKPFERDISTEIYQAGSTPCNGVEGFNCYFPLQSYGFQPTNGVGYQPYRVVVLSFELLHAPATVCGPKKSTNLVKNKCVNFNFNGLTGTGVLTESNKKFLPFQQFGRDIADTTDAVRDPQTLEILDITPCSFGGVSVITPGTNTSNQVAVLYQDVNCTEVPVAIHADQLTPTWRVYSTGSNVFQTRAGCLIGAEHVNNSYECDIPIGAGICASYQTQTNSPRRARSVASQSIIAYTMSLGAENSVAYSNNSIAIPTNFTISVTTEILPVSMTKTSVDCTMYICGDSTECSNFLLQYGSFCTQLNRALTGIAVEQDKNTQEVFAQVKQIYKTPPIKDFGGFNFSQILPDPSKPSKRSFIEDLLFNKVTLADAGFIKQYGDCLGDIAARDLICAQKFNGLTVLPPLLTDEMIAQYCSALLAGTITSGWTFGAGAALQIPFAMQMAYRFNGIGVTQNVLYENQKLIANQFNSAIGKIQDSLSSTASALGKLQDVVNQNAQALNTLVKQLSSNFGAISSVLNDILSRLDKVEAEVQIDRLITGRLQSLQTYVTQQLIRAAEIRASANLAATKMSECVLGQSKRVDFCGKGYHLMSFPQCAPHGVVFLHVTYVPAQEKNFTTAPAICHDGKAHFPREGVFVSNGTHWFVTQRNFYEPQIITTDNTFVSGNCDVVIGIVNNTVYDPLQPELDSFKEELDKYFKNHTSPDVDLGDISGINASVVNIQKEIDRLNEVAKNLNESLIDLQELGKYEQYIK

SEQ ID NO: 2562 - protein, 1211 aa, Artificial Sequence
  SARS-CoV-2/Australia/QLD02/2020__EPI_ISL_407896 spike protein (1-1211)(T874C_S1055C)
MFVFLVLLPLVSSQCVNLTTRTQLPPAYTNSFTRGVYYPDKVFRSSVLHSTQDLFLPFFSNVTWFHAIHVSGTNGTKRFDNPVLPFNDGVYFASTEKSNIIRGWIFGTTLDSKTQSLLIVNNATNVVIKVCEFQFCNDPFLGVYYHKNNKSWMESEFRVYSSANNCTFEYVSQPFLMDLEGKQGNFKNLREFVFKNIDGYFKIYSKHTPINLVRDLPQGFSALEPLVDLPIGINITRFQTLLALHRSYLTPGDSSSGWTAGAAAYYVGYLQPRTFLLKYNENGTITDAVDCALDPLSETKCTLKSFTVEKGIYQTSNFRVQPTESIVRFPNITNLCPFGEVFNATRFASVYAWNRKRISNCVADYSVLYNSASFSTFKCYGVSPTKLNDLCFTNVYADSFVIRGDEVRQIAPGQTGKIADYNYKLPDDFTGCVIAWNSNNLDSKVGGNYNYLYRLFRKSNLKPFERDISTEIYQAGSTPCNGVEGFNCYFPLQSYGFQPTNGVGYQPYRVVVLSFELLHAPATVCGPKKSTNLVKNKCVNFNFNGLTGTGVLTESNKKFLPFQQFGRDIADTTDAVRDPQTLEILDITPCSFGGVSVITPGTNTSNQVAVLYQDVNCTEVPVAIHADQLTPTWRVYSTGSNVFQTRAGCLIGAEHVNNSYECDIPIGAGICASYQTQTNSPRRARSVASQSIIAYTMSLGAENSVAYSNNSIAIPTNFTISVTTEILPVSMTKTSVDCTMYICGDSTECSNLLLQYGSFCTQLNRALTGIAVEQDKNTQEVFAQVKQIYKTPPIKDFGGFNFSQILPDPSKPSKRSFIEDLLFNKVTLADAGFIKQYGDCLGDIAARDLICAQKFNGLTVLPPLLTDEMIAQYCSALLAGTITSGWTFGAGAALQIPFAMQMAYRFNGIGVTQNVLYENQKLIANQFNSAIGKIQDSLSSTASALGKLQDVVNQNAQALNTLVKQLSSNFGAISSVLNDILSRLDKVEAEVQIDRLITGRLQSLQTYVTQQLIRAAEIRASANLAATKMSECVLGQSKRVDFCGKGYHLMSFPQCAPHGVVFLHVTYVPAQEKNFTTAPAICHDGKAHFPREGVFVSNGTHWFVTQRNFYEPQIITTDNTFVSGNCDVVIGIVNNTVYDPLQLELDSFKEELDKYFKNHTSPDVDLGDISGINASVVNIQKEIDRLNEVAKNLNESLIDLQELGKYEQYIK

SEQ ID NO: 2563 - protein, 1211 aa, Artificial Sequence
  SARS-CoV-2/India/1-31/2020__EPI_ISL_413523 spike protein (1-1211)(T874C_S1055C)
MFVFLVLLPLVSSQCVNLTTRTQLPPAYTNSFTRGVYYPDKVFRSSVLHSTQDLFLPFFSNVTWFHAIHVSGTNGTKRFDNPVLPFNDGVYFASTEKSNIIRGWIFGTTLDSKTQSLLIVNNATNVVIKVCEFQFCNDPFLGVYYHKNNKSWMESEFRVYSSANNCTFEYVSQPFLMDLEGKQGNFKNLREFVFKNIDGYFKIYSKHTPINLVRDLPQGFSALEPLVDLPIGINITRFQTLLALHRSYLTPGDSSSGWTAGAAAYYVGYLQPRTFLLKYNENGTITDAVDCALDPLSETKCTLKSFTVEKGIYQTSNFRVQPTESIVRFPNITNLCPFGEVFNATRFASVYAWNRKRISNCVADYSVLYNSASFSTFKCYGVSPTKLNDLCFTNVYADSFVIRGDEVRQIAPGQTGKIADYNYKLPDDFTGCVIAWNSNNLDSKVGGNYNYLYRLFRKSNLKPFERDISTEIYQAGSTPCNGVEGFNCYFPLQSYGFQPTNGVGYQPYRVVVLSFELLHAPATVCGPKKSTNLVKNKCVNFNFNGLTGTGVLTESNKKFLPFQQFGRDIADTTDAVRDPQTLEILDITPCSFGGVSVITPGTNTSNQVAVLYQDVNCTEVPVAIHADQLTPTWRVYSTGSNVFQTRAGCLIGAEHVNNSYECDIPIGAGICASYQTQTNSPRRARSVASQSIIAYTMSLGAENSVAYSNNSIAIPTNFTISVTTEILPVSMTKTSVDCTMYICGDSTECSNLLLQYGSFCTQLNRALTGIAVEQDKNTQEVFAQVKQIYKTPPIKDFGGFNFSQILPDPSKPSKRSFIEDLLFNKVTLADAGFIKQYGDCLGDIAARDLICAQKFNGLTVLPPLLTDEMIAQYCSALLAGTITSGWTFGAGAALQIPFAMQMAYRFNGIGVTQNVLYENQKLIANQFNSVIGKIQDSLSSTASALGKLQDVVNQNAQALNTLVKQLSSNFGAISSVLNDILSRLDKVEAEVQIDRLITGRLQSLQTYVTQQLIRAAEIRASANLAATKMSECVLGQSKRVDFCGKGYHLMSFPQCAPHGVVFLHVTYVPAQEKNFTTAPAICHDGKAHFPREGVFVSNGTHWFVTQRNFYEPQIITTDNTFVSGNCDVVIGIVNNTVYDPLQPELDSFKEELDKYFKNHTSPDVDLGDISGINASVVNIQKEIDRLNEVAKNLNESLIDLQELGKYEQYIK

SEQ ID NO: 2564 - protein, 1211 aa, Artificial Sequence
  SARS-CoV-2/Guangdong/GD2020087-P0008/2020__EPI_ISL_413863 spike protein (1-1211)(T874C_S1055C)
MFVFLVLLPLVSSQCVNLTTRTQLPPAYTNSFTRGVYYPDKVFRSSVLHSTQDLFLPFFSNVTWFHAIHVSGTNGTKRFDNPVLPFNDGVYFASTEKSNIIRGWIFGTTLDSKTQSLLIVNNATNVVIKVCEFQFCNDPFLGVYYHKNNKSWMESEFRVYSSANNCTFEYVSQPFLMDLEGKQGNFKNLREFVFKNIDGYFKIYSKHTPINLVRDLPQGFSALEPLVDLPIGINITRFQTLLALHRSYLTPGDSSSGWTAGAAAYYVGYLQPRTFLLKYNENGTITDAVDCALDPLSETKCTLKSFTVEKGIYQTSNFRVQPTESIVRFPNITNLCPFGEVFNATRFASVYAWNRKRISNCVADYSVLYNSASFSTFKCYGVSPTKLNDLCFTNVYADSFVIRGDEVREIAPGQTGKIADYNYKLPDDFTGCVIAWNSNNLDSKVGGNYNYLYRLFRKSNLKPFERDISTEIYQAGSTPCNGVEGFNCYFPLQSYGFQPTNGVGYQPYRVVVLSFELLHAPATVCGPKKSTNLVKNKCVNFNFNGLTGTGVLTESNKKFLPFQQFGRDIADTTDAVRDPQTLEILDITPCSFGGVSVITPGTNTSNQVAVLYQDVNCTEVPVAIHADQLTPTWRVYSTGSNVFQTRAGCLIGAEHVNNSYECDIPIGAGICASYQTQTNSPRRARSVASQSIIAYTMSLGAENSVAYSNNSIAIPTNFTISVTTEILPVSMTKTSVDCTMYICGDSTECSNLLLQYGSFCTQLNRALTGIAVEQDKNTQEVFAQVKQIYKTPPIKDFGGFNFSQILPDPSKPSKRSFIEDLLFNKVTLADAGFIKQYGDCLGDIAARDLICAQKFNGLTVLPPLLTDEMIAQYCSALLAGTITSGWTFGAGAALQIPFAMQMAYRFNGIGVTQNVLYENQKLIANQFNSAIGKIQDSLSSTASALGKLQDVVNQNAQALNTLVKQLSSNFGAISSVLNDILSRLDKVEAEVQIDRLITGRLQSLQTYVTQQLIRAAEIRASANLAATKMSECVLGQSKRVDFCGKGYHLMSFPQCAPHGVVFLHVTYVPAQEKNFTTAPAICHDGKAHFPREGVFVSNGTHWFVTQRNFYEPQIITTDNTFVSGNCDVVIGIVNNTVYDPLQPELDSFKEELDKYFKNHTSPDVDLGDISGINASVVNIQKEIDRLNEVAKNLNESLIDLQELGKYEQYIK

SEQ ID NO: 2565 - protein, 1211 aa, Artificial Sequence
  SARS-CoV-2/Sweden/01/2020__EPI_ISL_411951 spike protein (1-1211)(T874C_S1055C)
MFVFLVLLPLVSSQCVNLTTRTQLPPAYTNSFTRGVYYPDKVFRSSVLHSTQDLFLPFFSNVTWFHAIHVSGTNGTKRFDNPVLPFNDGVYFASTEKSNIIRGWIFGTTLDSKTQSLLIVNNATNVVIKVCEFQFCNDPFLGVYYHKNNKSWMESEFRVYSSANNCTFEYVSQPFLMDLEGKQGNFKNLREFVFKNIDGYFKIYSKHTPINLVRDLPQGFSALEPLVDLPIGINITRFQTLLALHRSYLTPGDSSSGWTAGAAAYYVGYLQPRTFLLKYNENGTITDAVDCALDPLSETKCTLKSFTVEKGIYQTSNFRVQPTESIVRFPNITNLCPFGEVFNATRFASVYAWNRKRISNCVADYSVLYNSASFSTFKCYGVSPTKLNDLCFTNVYADSFVIRGDEVRQIAPGQTGKIADYNYKLPDDFTGCVIAWNSNNLDSKVGGNYNYLYRLFRKSNLKPFERDISTEIYQAGSTPCNGVEGFNCYFPLQSYGFQPTNGVGYQPYRVVVLSFELLHAPATVCGPKKSTNLVKNKCVNFNFNGLTGTGVLTESNKKFLPFQQFGRDIADTTDAVRDPQTLEILDITPCSFGGVSVITPGTNTSNQVAVLYQDVNCTEVPVAIHADQLTPTWRVYSTGSNVFQTRAGCLIGAEHVNNSYECDIPIGAGICASYQTQTNSPRRARSVASQSIIAYTMSLGAENSVAYSNNSIAIPTNFTISVTTEILPVSMTKTSVDCTMYICGDSTECSNLLLQYGSFCTQLNRALTGIAVEQDKNTQEVFAQVKQIYKTPPIKDCGGFNFSQILPDPSKPSKRSFIEDLLFNKVTLADAGFIKQYGDCLGDIAARDLICAQKFNGLTVLPPLLTDEMIAQYCSALLAGTITSGWTFGAGAALQIPFAMQMAYRFNGIGVTQNVLYENQKLIANQFNSAIGKIQDSLSSTASALGKLQDVVNQNAQALNTLVKQLSSNFGAISSVLNDILSRLDKVEAEVQIDRLITGRLQSLQTYVTQQLIRAAEIRASANLAATKMSECVLGQSKRVDFCGKGYHLMSFPQCAPHGVVFLHVTYVPAQEKNFTTAPAICHDGKAHFPREGVFVSNGTHWFVTQRNFYEPQIITTDNTFVSGNCDVVIGIVNNTVYDPLQPELDSFKEELDKYFKNHTSPDVDLGDISGINASVVNIQKEIDRLNEVAKNLNESLIDLQELGKYEQYIK

SEQ ID NO: 2566 - protein, 1211 aa, Artificial Sequence
  SARS-CoV-2/Tianmen/HBCDC-HB-07/2020__EPI_ISL_412983 spike protein (1-1211)(T874C_S1055C)
MFVFLVLLPLVSSQCVNLTTRTQLPPAYTNSFTRGVYYPDKVFRSSVLHSTQDLFLPFFSNVTWFHAIHVSGTNGTKRFDNPVLPFNDGVYFASTEKSNIIRGWIFGTTLDSKTQSLLIVNNATNVVIKVCEFQFCNDPFLGVYYHKNNKSWMESEFRVYSSANNCTFEYVSQPFLMDLEGKQGNFKNLREFVFKNIDGYFKIYSKHTPINLVRDLPQGFSALEPLVDLPIGINITRFQTLLALHRSYLTPGDSSSGWTAGAAAYYVGYLQPRTFLLKYNENGTITDAVDCALDPLSETKCTLKSFTVEKGIYQTSNFRVQPTESIVRFPNITNLCPFGEVFNATRFASVYAWNRKRISNCVADYSVLYNSASFSTFKCYGVSPTKLNDLCFTNVYADSFVIRGDEVRQIAPGQTGKIADYNYKLPDDFTGCVIAWNSNNLDSKVGGNYNYLYRLFRKSNLKPFERDISTEIYQAGSTPCNGVEGFNCYFPLQSYGFQPTNGVGYQPYRVVVLSFELLHAPATVCGPKKSTNLVKNKCVNFNFNGLTGTGVLTESNKKFLPFQQFGRDIADTTDAVRDPQTLEILDITPCSFGGVSVITPGTNTSNQVAVLYQDLNCTEVPVAIHADQLTPTWRVYSTGSNVFQTRAGCLIGAEHVNNSYECDIPIGAGICASYQTQTNSPRRARSVASQSIIAYTMSLGAENSVAYSNNSIAIPTNFTISVTTEILPVSMTKTSVDCTMYICGDSTECSNLLLQYGSFCTQLNRALTGIAVEQDKNTQEVFAQVKQIYKTPPIKDFGGFNFSQILPDPSKPSKRSFIEDLLFNKVTLADAGFIKQYGDCLGDIAARDLICAQKFNGLTVLPPLLTDEMIAQYCSALLAGTITSGWTFGAGAALQIPFAMQMAYRFNGIGVTQNVLYENQKLIANQFNSAIGKIQDSLSSTASALGKLQDVVNQNAQALNTLVKQLSSNFGAISSVLNDILSRLDKVEAEVQIDRLITGRLQSLQTYVTQQLIRAAEIRASANLAATKMSECVLGQSKRVDFCGKGYHLMSFPQCAPHGVVFLHVTYVPAQEKNFTTAPAICHDGKAHFPREGVFVSNGTHWFVTQRNFYEPQIITTDNTFVSGNCDVVIGIVNNTVYDPLQPELDSFKEELDKYFKNHTSPDVDLGDISGINASVVNIQKEIDRLNEVAKNLNESLIDLQELGKYEQYIK

SEQ ID NO: 2567 - protein, 1211 aa, Artificial Sequence
  SARS-CoV-2/Hong Kong/case42_VM20002493/2020__EPI_ISL_414527 spike protein (1-1211)(T874C_S1055C)
MFVFLVLLPLVSSQCVNLTTRTQLPPAYTNSFTRGVYYPDKVFRSSVLHSTQDLFLPFFSNVTWFHAIHVSGTNGTKRFDNPVLPFNDGVYFASTEKSNIIRGWIFGTTLDSKTQSLLIVNNATNVVIKVCEFQFCNDPFLGVYYHKNNKSWMESEFRVYSSANNCTFEYVSQPFLMDLEGKQGNFKNLREFVFKNIDGYFKIYSKHTPINLVRDLPQGFSALEPLVDLPIGINITRFQTLLALHRSYLTPGDSSSGWTAGAAAYYVGYLQPRTFLLKYNENGTITDAVDCALDPLSETKCTLKSFTVEKGIYQTSNFRVQPTESIVRFPNITNLCPFGEVFNATRFASVYAWNRKRISNCVADYSVLYNSASFSTFKCYGVSPTKLNDLCFTNVYADSFVIRGDEVRQIAPGQTGKIADYNYKLPDDFTGCVIAWNSNNLDSKVGGNYNYLYRLFRKSNLKPFERDISTEIYQAGSTPCNGVEGFNCYFPLQSYGFQPTNGVGYQPYRVVVLSFELLHAPATVCGPKKSTNLVKNKCVNFNFNGLTGTGVLTESNKKFLPFQQFGRDIADTTDAVRDPQTLEILDITPCSFGGVSVITPGTNTSNQVAVLYQDVNCTEVPVAIHADQLTPTWRVYSTGSNVFQTRAGCLIGAEHVNNSYECDIPIGAGICASYQTQTNSPRRARSVASQSIIAYTMSLGAENSVAYSNNSIAIPTNFAISVTTEILPVSMTKTSVDCTMYICGDSTECSNLLLQYGSFCTQLNRALTGIAVEQDKNTQEVFAQVKQIYKTPPIKDFGGFNFSQILPDPSKPSKRSFIEDLLFNKVTLADAGFIKQYGDCLGDIAARDLICAQKFNGLTVLPPLLTDEMIAQYCSALLAGTITSGWTFGAGAALQIPFAMQMAYRFNGIGVTQNVLYENQKLIANQFNSAIGKIQDSLSSTASALGKLQDVVNQNAQALNTLVKQLSSNFGAISSVLNDILSRLDKVEAEVQIDRLITGRLQSLQTYVTQQLIRAAEIRASANLAATKMSECVLGQSKRVDFCGKGYHLMSFPQCAPHGVVFLHVTYVPAQEKNFTTAPAICHDGKAHFPREGVFVSNGTHWFVTQRNFYEPQIITTDNTFVSGNCDVVIGIVNNTVYDPLQPELDSFKEELDKYFKNHTSPDVDLGDISGINASVVNIQKEIDRLNEVAKNLNESLIDLQELGKYEQYIK

SEQ ID NO: 2568 - protein, 1211 aa, Artificial Sequence
  SARS-CoV-2/USA/CruiseA-23/2020__EPI_ISL_414482 spike protein (1-1211)(T874C_S1055C)
MFVFLVLLPLVSSQCVNLTTRTQLPPAYTNSFTRGVYYPDKVFRSSVLHSTQDLFLPFFSNVTWFHAIHVSGTNGTKRFDNPVLPFNDGVYFASTEKSNIIRGWIFGTTLDSKTQSLLIVNNATNVVIKVCEFQFCNDPFLGVYYHKNNKSWMESEFRVYSSANNCTFEYVSQPFLMDLEVKQGNFKNLREFVFKNIDGYFKIYSKHTPINLVRDLPQGFSALEPLVDLPIGINITRFQTLLALHRSYLTPGDSSSGWTAGAAAYYVGYLQPRTFLLKYNENGTITDAVDCALDPLSETKCTLKSFTVEKGIYQTSNFRVQPTESIVRFPNITNLCPFGEVFNATRFASVYAWNRKRISNCVADYSVLYNSASFSTFKCYGVSPTKLNDLCFTNVYADSFVIRGDEVRQIAPGQTGKIADYNYKLPDDFTGCVIAWNSNNLDSKVGGNYNYLYRLFRKSNLKPFERDISTEIYQAGSTPCNGVEGFNCYFPLQSYGFQPTNGVGYQPYRVVVLSFELLHAPATVCGPKKSTNLVKNKCVNFNFNGLTGTGVLTESNKKFLPFQQFGRDIADTTDAVRDPQTLEILDITPCSFGGVSVITPGTNTSNQVAVLYQDVNCTEVPVAIHADQLTPTWRVYSTGSNVFQTRAGCLIGAEHVNNSYECDIPIGAGICASYQTQTNSPRRARSVASQSIIAYTMSLGAENSVAYSNNSIAIPTNFTISVTTEILPVSMTKTSVDCTMYICGDSTECSNLLLQYGSFCTQLNRALTGIAVEQDKNTQEVFAQVKQIYKTPPIKDFGGFNFSQILPDPSKPSKRSFIEDLLFNKVTLADAGFIKQYGDCLGDIAARDLICAQKFNGLTVLPPLLTDEMIAQYCSALLAGTITSGWTFGAGAALQIPFAMQMAYRFNGIGVTQNVLYENQKLIANQFNSAIGKIQDSLSSTASALGKLQDVVNQNAQALNTLVKQLSSNFGAISSVLNDILSRLDKVEAEVQIDRLITGRLQSLQTYVTQQLIRAAEIRASANLAATKMSECVLGQSKRVDFCGKGYHLMSFPQCAPHGVVFLHVTYVPAQEKNFTTAPAICHDGKAHFPREGVFVSNGTHWFVTQRNFYEPQIITTDNTFVSGNCDVVIGIVNNTVYDPLQPELDSFKEELDKYFKNHTSPDVDLGDISGINASVVNIQKEIDRLNEVAKNLNESLIDLQELGKYEQYIK

SEQ ID NO: 2569 - protein, 1211 aa, Artificial Sequence
  SARS-CoV-2/Hong Kong/case85_VM20002868/2020__EPI_ISL_414519 spike protein (1-1211)(T874C_S1055C)
MFVFLVLVPLVSSQCVNLTTRTQLPPAYTNSFTRGVYYPDKVFRSSVLHSTQDLFLPFFSNVTWFHAIHVSGTNGTKRFDNPVLPFNDGVYFASTEKSNIIRGWIFGTTLDSKTQSLLIVNNATNVVIKVCEFQFCNDPFLGVYYHKNNKSWMESEFRVYSSANNCTFEYVSQPFLMDLEGKQGNFKNLREFVFKNIDGYFKIYSKHTPINLVRDLPQGFSALEPLVDLPIGINITRFQTLLALHRSYLTPGDSSSGWTAGAAAYYVGYLQPRTFLLKYNENGTITDAVDCALDPLSETKCTLKSFTVEKGIYQTSNFRVQPTESIVRFPNITNLCPFGEVFNATRFASVYAWNRKRISNCVADYSVLYNSASFSTFKCYGVSPTKLNDLCFTNVYADSFVIRGDEVRQIAPGQTGKIADYNYKLPDDFTGCVIAWNSNNLDSKVGGNYNYLYRLFRKSNLKPFERDISTEIYQAGSTPCNGVEGFNCYFPLQSYGFQPTNGVGYQPYRVVVLSFELLHAPATVCGPKKSTNLVKNKCVNFNFNGLTGTGVLTESNKKFLPFQQFGRDIADTTDAVRDPQTLEILDITPCSFGGVSVITPGTNTSNQVAVLYQDVNCTEVPVAIHADQLTPTWRVYSTGSNVFQTRAGCLIGAEHVNNSYECDIPIGAGICASYQTQTNSPRRARSVASQSIIAYTMSLGAENSVAYSNNSIAIPTNFTISVTTEILPVSMTKTSVDCTMYICGDSTECSNLLLQYGSFCTQLNRALTGIAVEQDKNTQEVFAQVKQIYKTPPIKDFGGFNFSQILPDPSKPSKRSFIEDLLFNKVTLADAGFIKQYGDCLGDIAARDLICAQKFNGLTVLPPLLTDEMIAQYCSALLAGTITSGWTFGAGAALQIPFAMQMAYRFNGIGVTQNVLYENQKLIANQFNSAIGKIQDSLSSTASALGKLQDVVNQNAQALNTLVKQLSSNFGAISSVLNDILSRLDKVEAEVQIDRLITGRLQSLQTYVTQQLIRAAEIRASANLAATKMSECVLGQSKRVDFCGKGYHLMSFPQCAPHGVVFLHVTYVPAQEKNFTTAPAICHDGKAHFPREGVFVSNGTHWFVTQRNFYEPQIITTDNTFVSGNCDVVIGIVNNTVYDPLQPELDSFKEELDKYFKNHTSPDVDLGDISGINASVVNIQKEIDRLNEVAKNLNESLIDLQELGKYEQYIK

SEQ ID NO: 2570 - protein, 1211 aa, Artificial Sequence; identical to SEQ ID NO: 2560
  SARS-CoV-2/England/200990660/2020__EPI_ISL_414523 spike protein (1-1211)(T874C_S1055C)

SEQ ID NO: 2571 - protein, 1211 aa, Artificial Sequence
  SARS-CoV-2/Australia/NSW09/2020__EPI_ISL_413595 spike protein (1-1211)(T874C_S1055C)
MFVFLVLLPLVSSQCVNLTTRTQLPPAYTNSFTRGVYYPDKVFRSSVLHSTQDLFLPFFSNVTWFHAIHVSGTNGTKRFDNPVLPFNDGVYFASTEKSNIIRGWIFGTTLDSKTQSLLIVNNATNVVIKVCEFQFCNDPFLGVYYHKNNKSWMESEFRVYSSANNCTFEYVSQPFLMDLEGKQGNFKNLREFVFKNIDGYFKIYSKHTPINLVRDLPQGFSALEPLVDLPIGINITRFQTLLALHRSYLTPGDSSSGWTAGAAAYYVGYLQPRTFLLKYNENGTITDAVDCALDPLSETKCTLKSFTVEKGIYQTSNFRVQPTESIVRFPNITNLCPFGEVFNATRFASVYAWNRKRISNCVADYSVLYNSASFSTFKCYGVSPTKLNDLCFTNVYADSFVIRGDEVRQIAPGQTGKIADYNYKLPDDFTGCVIAWNSNNLDSKVGGNYNYLYRLFRKSNLKPFERDISTEIYQAGSTPCNGVEGFNCYFPLQSYGFQPTNGVGYQPYRVVVLSFELLHAPATVCGPKKSTNLVKNKCVNFNFNGLTGTGVLTESNKKFLPFQQFGRDIADTTDAVRDPQTLEILDITPCSFGGVSVITPGTNTSNQVAVLYQDVNCTEVPVAIHADQLTPTWRVYSTGSNVFQTRAGCLIGAEHVNNSYECDIPIGAGICASYQTQTNSPRRARSVASQSIIAYTMSLGAENSVAYSNNSIAIPTNFTISVTTEILPVSMTKTSVDCTMYICGDSTECSNLLLQYGSFCTQLNRALTGIAVEQDKNTQEVFAQVKQIYKTPPIKDFGGFNFSQILPDPSKPSKRSFIEDLLFNKVTLADAGFIKQYGDCLGDIAARDLICAQKFNGLTVLPPLLTDEMIAQYCSALLAGTITSGWTFGAGAALQIPFAMQMAYRFNGIGVTQNVLYENQKLIANQFNSAIGKIQDSLSFTASALGKLQDVVNQNAQALNTLVKQLSSNFGAISSVLNDILSRLDKVEAEVQIDRLITGRLQSLQTYVTQQLIRAAEIRASANLAATKMSECVLGQSKRVDFCGKGYHLMSFPQCAPHGVVFLHVTYVPAQEKNFTTAPAICHDGKAHFPREGVFVSNGTHWFVTQRNFYEPQIITTDNTFVSGNCDVVIGIVNNTVYDPLQPELDSFKEELDKYFKNHTSPDVDLGDISGINASVVNIQKEIDRLNEVAKNLNESLIDLQELGKYEQYIK

SEQ ID NO: 2572 - protein, 1211 aa, Artificial Sequence; identical to SEQ ID NO: 2552
  SARS-CoV-2/Australia/NSW10/2020__EPI_ISL_413596 spike protein (1-1211)(T874C_S1055C)

SEQ ID NO: 2573 - protein, 1211 aa, Artificial Sequence
  SARS-CoV-2/Switzerland/1000477797/2020__EPI_ISL_413023 spike protein (1-1211)(T874C_S1055C)
MFVFLVLLPLVSSQCVNLTTRTQLPPAYTNSFTRGVYYPDKVFRSSVLHSTQDLFLPFFSNVTWFHAIHVSGTNGTKRFDNPVLPFNDGVYFASTEKSNIIRGWIFGTTLDSKTQSLLIVNNATNVVIKVCEFQFCNDPFLGVYYHKNNKSWMESEFRVYSSANNCTFEYVSQPFLMDLEGKQGNFKNLREFVFKNIDGYFNIYSKHTPINLVRDLPQGFSALEPLVDLPIGINITRFQTLLALHRSYLTPGDSSSGWTAGAAAYYVGYLQPRTFLLKYNENGTITDAVDCALDPLSETKCTLKSFTVEKGIYQTSNFRVQPTESIVRFPNITNLCPFGEVFNATRFASVYAWNRKRISNCVADYSVLYNSASFSTFKCYGVSPTKLNDLCFTNVYADSFVIRGDEVRQIAPGQTGKIADYNYKLPDDFTGCVIAWNSNNLDSKVGGNYNYLYRLFRKSNLKPFERDISTEIYQAGSTPCNGVEGFNCYFPLQSYGFQPTNGVGYQPYRVVVLSFELLHAPATVCGPKKSTNLVKNKCVNFNFNGLTGTGVLTESNKKFLPFQQFGRDIADTTDAVRDPQTLEILDITPCSFGGVSVITPGTNTSNQVAVLYQGVNCTEVPVAIHADQLTPTWRVYSTGSNVFQTRAGCLIGAEHVNNSYECDIPIGAGICASYQTQTNSPRRARSVASQSIIAYTMSLGAENSVAYSNNSIAIPTNFTISVTTEILPVSMTKTSVDCTMYICGDSTECSNLLLQYGSFCTQLNRALTGIAVEQDKNTQEVFAQVKQIYKTPPIKDFGGFNFSQILPDPSKPSKRSFIEDLLFNKVTLADAGFIKQYGDCLGDIAARDLICAQKFNGLTVLPPLLTDEMIAQYCSALLAGTITSGWTFGAGAALQIPFAMQMAYRFNGIGVTQNVLYENQKLIANQFNSAIGKIQDSLSSTASALGKLQDVVNQNAQALNTLVKQLSSNFGAISSVLNDILSRLDKVEAEVQIDRLITGRLQSLQTYVTQQLIRAAEIRASANLAATKMSECVLGQSKRVDFCGKGYHLMSFPQCAPHGVVFLHVTYVPAQEKNFTTAPAICHDGKAHFPREGVFVSNGTHWFVTQRNFYEPQIITTDNTFVSGNCDVVIGIVNNTVYDPLQPELDSFKEELDKYFKNHTSPDVDLGDISGINASVVNIQKEIDRLNEVAKNLNESLIDLQELGKYEQYIK

SEQ ID NO: 2574 - protein, 1211 aa, Artificial Sequence
  SARS-CoV-2/Belgium/BA-02291/2020__EPI_ISL_415159 spike protein (1-1211)(T874C_S1055C)
MFVFLVLLPLVSSQCVNLTTRTQLPPAYTNSFTRGVYYPDKVFRSSVLHSTQDLFLPFFSNVTWFHAIHVSGTNGTKRFDNPVLPFNDGVYFASTEKSNIIRGWIFGTTLDSKTQSLLIVNNATNVVIKVCEFQFCNDPFLGVYYHKNNKSWMESEFRVYSSANNCTFEYVSQPFLMDLEGKQGNFKNLREFVFKNIDGYFKIYSKHTPINLVRDLPQGFSALEPLVDLPIGINITRFQTLLALHRSYLTPGDSSSGWTAGAAAYYVGYLQPRTFLLKYNENGTITDAVDCALDPLSETKCTLKSFTVEKGIYQTSNFRVQPTESIVRFPNITNLCPFGEVFNATRFASVYAWNRKRISNCVADYSVLYNSASFSTFKCYGVSPTKLNDLCFTNVYADSFVIRGDEVRQIAPGQTGKIADYNYKLPDDFTGCVIAWNSNNLDSKVGGNYNYLYRLFRRSNLKPFERDISTEIYQAGSTPCNGVEGFNCYFPLQSYGFQPTNGVGYQPYRVVVLSFELLPAPATVCGPKKSTNLVKNKCVNFNFNGLTGTGVLTESNKKFLPFQQFGRDIADTTDAVRDPQTLEILDITPCSFGGVSVITPGTNTSNQVAVLYQGVNCTEVPVAIHADQLTPTWRVYSTGSNVFQTRAGCLIGAEHVNNSYECDIPIGAGICASYQTQTNSPRRARSVASQSIIAYTMSLGAENSVAYSNNSIAIPTNFTISVTTEILPVSMTKTSVDCTMYICGDSTECSNLLLQYGSFCTQLNRALTGIAVEQDKNTQEVFAQVKQIYKTPPIKDFGGFNFSQILPDPSKPSKRSFIEDLLFNKVTLADAGFIKQYGDCLGDIAARDLICAQKFNGLTVLPPLLTDEMIAQYCSALLAGTITSGWTFGAGAALQIPFAMQMAYRFNGIGVTQNVLYENQKLIANQFNSAIGKIQDSLSSAAPALGKLQDVVNQNAQALNTLVKQLSSNFGAISSVLNDILSRLDKVEAEVQIDRLITGRLQSLQTYVTQQLIRAAEIRASANLAATKMSECVLGQSKRVDFCGKGYHLMSFPQCAPHGVVFLHVTYVPAQEKNFTTAPAICHDGKAHFPREGVFVSNGTHWFVTQRNFYEPQIITTDNTFVSGNCDVVIGIVNNTVYDPLQPELDSFKEELDKYFKNHTSPDVDLGDISGINASVVNIQKEIDRLNEVAKNLNESLIDLQELGKYEQYIK

SEQ ID NO: 2575 - protein, 1211 aa, Artificial Sequence
  SARS-CoV-2/USA/WA8-UW5/2020__EPI_ISL_413486 spike protein (1-1211)(T874C_S1055C)
MFVFLVLLPLVSSQCVNLTTRTQLPPAYTNSFTRGVYYPDKVFRSSVLHSTQDLFLPFFSNVTWFHAIHVSGTNGTKRFDNPVLPFNDGVYFASTEKSNIIRGWIFGTTLDSKTQSLLIVNNATNVVIKVCEFQFCNDPFLGVYYHKNNKSWMESEFRVYSSANNCTFEYVSQPFLMDLEGKQGNFKNLREFVFKNIDGYFKIYSKHTPINLVRDLPQGFSALEPLVDLPIGINITRFQTLLALHRSYLTPGDSSSGWTAGAAAYYVGYLQPRTFLLKYNENGTITDAVDCALDPLSETKCTLKSFTVEKGIYQTSNFRVQPTESIVRFPNITNLCPFGEVFNATRFASVYAWNRKRISNCVADYSVLYNSASFSTFKCYGVSPTKLNDLCFTNVYADSFVIRGDEVRQIAPGQTGKIADYNYKLPDDFTGCVIAWNSNNLDSKVGGNYNYLYRLFRKSNLKPFERDISTEIYQAGSTPCNGVEGFNCYFPLQSYGFQPTNGVGYQPYRVVVLSFELLHAPATVCGPKKSTNLVKNKCVNFNFNGLTGTGVLTESNKKFLPFQQFGRDIADTTDAVRDPQTLEILDITPCSFGGVSVITPGTNTSNQVAVLYQDVNCTEVPVAIHADQLTPTWRVYSTGSNVFQTRAGCLIGAEYVNNSYECDIPIGAGICASYQTQTNSPRRARSVASQSIIAYTMSLGAENSVAYSNNSIAIPTNFTISVTTEILPVSMTKTSVDCTMYICGDSTECSNLLLQYGSFCTQLNRALTGIAVEQDKNTQEVFAQVKQIYKTPPIKDFGGFNFSQILPDPSKPSKRSFIEDLLFNKVTLADAGFIKQYGDCLGDIAARDLICAQKFNGLTVLPPLLTDEMIAQYCSALLAGTITSGWTFGAGAALQIPFAMQMAYRFNGIGVTQNVLYENQKLIANQFNSAIGKIQDSLSSTASALGKLQDVVNQNAQALNTLVKQLSSNFGAISSVLNDILSRLDKVEAEVQIDRLITGRLQSLQTYVTQQLIRAAEIRASANLAATKMSECVLGQSKRVDFCGKGYHLMSFPQCAPHGVVFLHVTYVPAQEKNFTTAPAICHDGKAHFPREGVFVSNGTHWFVTQRNFYEPQIITTDNTFVSGNCDVVIGIVNNTVYDPLQPELDSFKEELDKYFKNHTSPDVDLGDISGINASVVNIQKEIDRLNEVAKNLNESLIDLQELGKYEQYIK

SEQ ID NO: 2576 - protein, 1211 aa, Artificial Sequence
  SARS-CoV-2/England/20102000506/2020__EPI_ISL_415147 spike protein (1-1211)(T874C_S1055C)
MFVFLVLLPLVSSQCVNLTTRTQLPPAYTNSFTRGVYYPDKVFRSSVLHSTQDLFLPFFSNVTWFHAIHVSGTNGTKRFDNPVLPFNDGVYFASTEKSNIIRGWIFGTTLDSKTQSLLIVNNATNVVIKVCEFQFCNDPFLGVYYHKNNKSWMESEFRVYSSANNCTFEYVSQPFLMDLEGKQGNFKNLREFVFKNIDGYFKIYSKHTPINLVRDLPQGFSALEPLVDLPIGINITRFQTLLALHRSYLTPGDSSSGWTAGAAAYYVGYLQPRTFLLKYNENGTITDAVDCALDPLSETKCTLKSFTVEKGIYQTSNFRVQPTESIVRFPNITNLCPFGEVFNATRFASVYAWNRKRISNCVADYSVLYNSASFSTFKCYGVSPTKLNDLCFTNVYADSFVIRGDEVRQIAPGQTGKIADYNYKLPDDFTGCVIAWNSNNLDSKVGGNYNYLYRLFRKSNLKPFERDISTEIYQAGSTPCNGVEGFNCYFPLQSYGFQPTNGVGYQPYRVVVLSFELLHAPATVCGPKKSTNLVKNKCVNFNFNGLTGTGVLTESNKKFLPFQQFGRDIADTTDAVRDPQTLEILDITPCSFGGVSVITPGTNTSNQVAVLYQGVNCTEVPVAIHADQLTPTWRVYSTGSNVFQTRAGCLIGAEHVNNSYECDIPIGAGICASYQTQTNSPRRARSVASQSIIAYTMSLGAENSVAYSNNSIAIPTNFTISVTTEILPVSMTKTSVDCTMYICGDSTECSNLLLQYGSFCTQLNRALTGIAVEQDKNTQEVFAQVKQIYKTPPIKDFGGFNFSQILPDPSKPSKRSFIEDLLFNKVTLADAGFIKQYGYCLGDIAARDLICAQKFNGLTVLPPLLTDEMIAQYCSALLAGTITSGWTFGAGAALQIPFAMQMAYRFNGIGVTQNVLYENQKLIANQFNSAIGKIQDSLSSTASALGKLQDVVNQNAQALNTLVKQLSSNFGAISSVLNDILSRLDKVEAEVQIDRLITGRLQSLQTYVTQQLIRAAEIRASANLAATKMSECVLGQSKRVDFCGKGYHLMSFPQCAPHGVVFLHVTYVPAQEKNFTTAPAICHDGKAHFPREGVFVSNGTHWFVTQRNFYEPQIITTDNTFVSGNCDVVIGIVNNTVYDPLQPELDSFKEELDKYFKNHTSPDVDLGDISGINASVVNIQKEIDRLNEVAKNLNESLIDLQELGKYEQYIK

SEQ ID NO: 2577 - protein, 1211 aa, Artificial Sequence
  SARS-CoV-2/Belgium/VAG-03013/2020__EPI_ISL_415155 spike protein (1-1211)(T874C_S1055C)
MFVFLVLLPLVSSQCVNLTTRTQLPPAYTNSFTRGVYYPDKVFRSSVLHSTQDLFLPFFSNVTWFHAIHVSGTNGTKRFDNPVLPFNDGVYFASTEKSNIIRGWIFGTTLDSKTQSLLIVNNATNVVIKVCEFQFCNDPFLGVYYHKNNKSWMESEFRVYSSANNCTFEYVSQPFLMDLEGKQGNFKNLREFVFKNIDGYFKIYSKHTPINLVRDLPQGFSALEPLVDLPIGINITRFQTLLALHRSYLTPGDSSSGWTAGAAAYYVGYLQPRTFLLKYNENGTITDAVDCALDPLSETKCTLKSFTVEKGIYQTSNFRVQPTESIVRFPNITNLCPFGEVFNATRFASVYAWNRKRISNCVADYSVLYNSASFSTFKCYGVSPTKLNDLCFTNVYADSFVIRGDEVRQIAPGQTGKIADYNYKLPDDFTGCVIAWNSNNLDSKVGGNYNYLYRLFRKSNLKPFERDISTEIYQAGSTPCNGVEGFNCYFPLQSYGFQPTNGVGYQPYRVVVLSFELLHAPATVCGPKKSTNLVKNKCVNFNFNGLTGTGVLTESNKKFLPFQQFGRDIADTTDAVRDPQTLEILDITPCSFGGVSVITPGTNTSNQVAVLYQGVNCTEVPVAIHADQLTPTWRVYSTGSNVFQTRAGCLIGAEHVNNSYECDIPIGAGICASYQTQTNSPRRARSVASQSIIAYTMSLGAENSVAYSNNSIAIPTNFTISVTTEILPVSMTKTSVDCTMYICGDSTECSNLLLQYGSFCTQLNRALTGIAVEQDKNTQEVFAQVKQIYKTPPIKDFGGFNFSQILPDPSKPSKRSFIEDLLFNKVTLADAGFIKQYGDCLGDIAARDLICAQKFNGLTVLPPLLTDEMIAQYCSALLAGTITSGWTFGAGAALQIPFAMQMAYRFNGIGVTQNVLYENQKLIANQFNSAIGKIQDSLSSTATALGKLQDVVNQNAQALNTLVKQLSSNFGAISSVLNDILSRLDKVEAEVQIDRLITGRLQSLQTYVTQQLIRAAEIRASANLAATKMSECVLGQSKRVDFCGKGYHLMSFPQCAPHGVVFLHVTYVPAQEKNFTTAPAICHDGKAHFPREGVFVSNGTHWFVTQRNFYEPQIITTDNTFVSGNCDVVIGIVNNTVYDPLQPELDSFKEELDKYFKNHTSPDVDLGDISGINASVVNIQKEIDRLNEVAKNLNESLIDLQELGKYEQYIK

SEQ ID NO: 2578 - protein, 1211 aa, Artificial Sequence
  SARS-CoV-2/Belgium/BC-03016/2020__EPI_ISL_415157 spike protein (1-1211)(T874C_S1055C)
MFVFLVLLPLVSSQCVNLTTRTQLPPAYTNSFTRGVYYPDKVFRSSVLHSTQDLFLPFFSNVTWFHAIHVSGTNGTKRFDNPVLPFNDGVYFASTEKSNIIRGWIFGTTLDSKTQSLLIVNNATNVVIKVCEFQFCNDPFLGVYYHKNNKSWMESEFRVYSSANNCTFEYVSQPFLMDLEGKQGNFKNLREFVFKNIDGYFKIYSKHTPINLVRDLPQGFSALEPLVDLPIGINITRFQTLLALHRSYLTPGDSSSGWTAGAAAYYVGYLQPRTFLLKYNENGTITDAVDCALDPLSETKCTLKSFTVEKGIYQTSNFRVQPTESIVRFPNITNLCPFGEVFNATRFASVYAWNRKRISNCVADYSVLYNSASFSTFKCYGVSPTKLNDLCFTNVYADSFVIRGDEVRQIAPGQTGKIADYNYKLPDDFTGCVIAWNSNNLDSKVGGNYNYLYRLFRKSNLKPFERDISTEIYQAGSTPCNGVEGFNCYFPLQSYGFQPTNGVGYQPYRVVVLSFELLHAPATVCGPKKSTNLVKNKCVNFNFNGLTGTGVLTESNKKFLPFQQFGRDIADTTDAVRDPQTLEILDITPCSFGGVSVITPGTNTSNQVAVLYQGVNCTEVPVAIHADQLTPTWRVYSTGSNVFQTRAGCLIGAEHVNNSYECDIPIGAGICASYQTQTNSPRRARSVASQSIIAYTMSLGAENSVAYSNNSIAIPTNFTISVTTEILPVSMTKTSVDCTMYICGDSTECSNLLLQYGSFCTQLNRALTGIAVEQDKNTQEVFAQVKQIYKTPPIKDFGGFNFSQILPDPSKPSKRSFIEDLLFNKVTLADAGFIKQYGDCLGDIAARDLICAQKFNGLTVLPPLLTDEMIAQYCSALLAGTITSGWTFGAGAALQIPFAMQMAYRFNGIGVTQNVLYENQKLIANQFNSAIGKIQDSLSSTAPALGKLQDVVNQNAQALNTLVKQLSSNFGAISSVLNDILSRLDKVEAEVQIDRLITGRLQSLQTYVTQQLIRAAEIRASANLAATKMSECVLGQSKRVDFCGKGYHLMSFPQCAPHGVVFLHVTYVPAQEKNFTTAPAICHDGKAHFPREGVFVSNGTHWFVTQRNFYEPQIITTDNTFVSGNCDVVIGIVNNTVYDPLQPELDSFKEELDKYFKNHTSPDVDLGDISGINASVVNIQKEIDRLNEVAKNLNESLIDLQELGKYEQYIK

SEQ ID NO: 2579 - protein, 1211 aa, Artificial Sequence
  SARS-CoV-2/Germany/BavPat3/2020__EPI_ISL_414521 spike protein (1-1211)(T874C_S1055C)
MFVFLVLLPLVSSQCVNLTTRTQLPPAYTNSFTRGVYYPDKVFRSSVLHSTQDLFLPFFSNVTWFHAIHVSGTNGTKRFDNPVLPFNDGVYFASTEKSNIIRGWIFGTTLDSKTQSLLIVNNATNVVIKVCEFQFCNDPFLGVYYHKNNKSWMESEFRVYSSANNCTFEYVSQPFLMDLEGKQGNFKNLREFVFKNIDGYFKIYSKHTPINLVRDLPQGFSALEPLVDLPIGINITRFQTLLALHRSYLTPGDSSSGWTAGAAAYYVGYLQPRTFLLKYNENGTITDAVDCALDPLSETKCTLKSFTVEKGIYQTSNFRVQPTESIVRFPNITNLCPFGEVFNATRFASVYAWNRKRISNCVADYSVLYNSASFSTFKCYGVSPTKLNDLCFTNVYADSFVIRGDEVRQIAPGQTGKIADYNYKLPDDFTGCVIAWNSNNLDSKVGGNYNYLYRLFRKSNLKPFERDISTEIYQAGSTPCNGVEGFNCYFPLQSYGFQPTNGVGYQPYRVVVLSFELLHAPATVCGPKKSTNLVKNKCVNFNFNGLTGTGVLTESNKKFLPFQQFGRDIADTTDAVRDPQTLEILDITPCSFGGVSVITPGTNTSNQVAVLYQDVNCTEVPVAIHADQLTPTWRVYSTGSNVFQTRAGCLIGAEHVNNSYECDIPIGAGICASYQTQTNSPRRARSVASQSIIAYTMSLGAENSVAYSNNSIAIPTNFTISVTTEILPVSMTKTSVDCTMYICGDSTECSNLLLQYGSFCTQLNRALTGIAVEQDKNTQQVFAQVKQIYKTPPIKDFGGFNFSQILPDPSKPSKRSFIEDLLFNKVTLADAGFIKQYGDCLGDIAARDLICAQKFNGLTVLPPLLTDEMIAQYCSALLAGTITSGWTFGAGAALQIPFAMQMAYRFNGIGVTQNVLYENQKLIANQFNSAIGKIQDSLSSTASALGKLQDVVNQNAQALNTLVKQLSSNFGAISSVLNDILSRLDKVEAEVQIDRLITGRLQSLQTYVTQQLIRAAEIRASANLAATKMSECVLGQSKRVDFCGKGYHLMSFPQCAPHGVVFLHVTYVPAQEKNFTTAPAICHDGKAHFPREGVFVSNGTHWFVTQRNFYEPQIITTDNTFVSGNCDVVIGIVNNTVYDPLQPELDSFKEELDKYFKNHTSPDVDLGDISGINASVVNIQKEIDRLNEVAKNLNESLIDLQELGKYEQYIK

SEQ ID NO: 2580 - protein, 1211 aa, Artificial Sequence
  SARS-CoV-2/France/HF1805/2020__EPI_ISL_414628 spike protein (1-1211)(T874C_S1055C)
MFVFLVLLPLVSSQCVNLTTRTQLPPAYTNSFTRGVYYPDKVFRSSVLHSTQDLFLPFFSNVTWFHAIHVSGTNGTKRFDNPVLPFNDGVYFASTEKSNIIRGWIFGTTLDSKTQSLLIVNNATNVVIKVCEFQFCNDPFLGVYYHKNNKSWMESEFRVYSSANNCTFEYVSQPFLMDLEGKQGNFKNLREFVFKNIDGYFKIYSKHTPINLVRDLPQGFSALEPLVDLPIGINITRFQTLLALHRSYLTPGDSSSGWTAGAAAYYVGYLQPRTFLLKYNENGTITDAVDCALDPLSETKCTLKSFTVEKGIYQTSNFRVQPTESIVRFPNITNLCPFGEVFNATRFASVYAWNRKRISNCVADYSVLYNSASFSTFKCYGVSPTKLNDLCFTNVYADSFVIRGDEVRQIAPGQTGKIADYNYKLPDDFTGCVIAWNSNNLDSKVGGNYNYLYRLFRKSNLKPFERDISTEIYQAGSTPCNGVEGFNCYFPLQSYGFQPTNGVGYQPYRVVVLSFELLHAPATVCGPKKSTNLVKNKCVNFNFNGLTGTGVLTESNKKFLPFQQFGRDIADTTDAVRDPQTLEILDITPCSFGGVSVITPGTNTSNQVAVLYQGVNCTEVPVAIHADQLTPTWRVYSTGSNVFQTRAGCLIGAEHVNNSYECDIPIGAGICASYQTQTNSPRRARSVASQSIIAYTMSLGAENSVAYSNNSIAIPTNFTISVTTEILPVSMTKTSVDCTMYICGDSTECSNLLLQYGSFCTQLNRALTGIAVEQDKNTQEVFAQVKQIYKTPPIKDFGGFNFSQILPDPSKPSKRSFIEDLLFNKVTLADAGFIKQYGDCLGDIAARDLICAQKFNGLTVLPPLLTDEMIAQYCSALLAGTITSGWTFGAGAALQIPFAMQMAYRFNGIGVTQNVLYENQKLIANQFNSAIGKIQDSLSSTASALGKLQDVVNQNAQALNTLVKQLSSNFGAISSVLNDILSRLDKVEAEVQIDRLITGRLQSLQTYVTQQLIRAAEIRASANLAATKMSECVLGQSKRVDFCGKGYHLMSFPQCAPHGVVFLHVTYVPAQEKNFTTAPAICHDGKAHFPREGVFVSNGTHWFVTQRNFYEPQIITTDNTFVSGNCDVVIGVVNNTVYDPLQPELDSFKEELDKYFKNHTSPDVDLGDISGINASVVNIQKEIDRLNEVAKNLNESLIDLQELGKYEQYIK

SEQ ID NO: 2581 - protein, 1211 aa, Artificial Sequence
  SARS-CoV-2/Netherlands/ZuidHolland_9/2020__EPI_ISL_414445 spike protein (1-1211)(T874C_S1055C)
MFVFLVLLPLVSSQCVNLTTRTQLPPAYTNSFTRGVYYPDKVFRSSVLHSTQDLFLPFFSNVTWFHAIHVSGTNGTKRFDNPVLPFNDGVYFASTEKSNIIRGWIFGTTLDSKTQSLLIVNNATNVVIKVCEFQFCNDPFLGVYYHKNNKSWMESEFRVYSSANNCTFEYVSQPFLMDLEGKQGNFKNLREFVFKNIDGYFKIYSKHTPINLVRDLPQGFSALEPLVDLPIGINITRFQTLLALHRSYLTPGDSSSGWTAGAAAYYVGYLQPRTFLLKYNENGTITDAVDCALDPLSETKCTLKSFTVEKGIYQTSNFRVQPTESIVRFPNITNLCPFGEVFNATRFASVYAWNRKRISNCVADYSVLYNSASFSTFKCYGVSPTKLNDLCFTNVYADSFVIRGDEVRQIAPGQTGKIADYNYKLPDDFTGCVIAWNSNNLDSKVGGNYNYLYRLFRKSNLKPFERDISTEIYQAGSTPCNGVEGFNCYFPLQSYGFQPTNGVGYQPYRVVVLSFELLHAPATVCGPKKSTNLVKNKCVNFNFNGLTGTGVLTESNKKFLPFQQFGRDIADTTDAVRDPQTLEILDITPCSFGGVSVITPGTNTSNQVAVLYQGVNCTEVPVAIHADQLTPTWRVYSTGSNVFQTRAGCLIGAEHVNNSYECDIPIGAGICASYQTQTNSPRRARSVASQSIIAYTMSLGAENSVAYSNNSIAIPTNFTISVTTEILPVSMTKTSVDCTMYICGDSTECSNLLLQYGSFCTQLNRALTGIAVEQDKNTQEVFAQVKQIYKTPPIKDFGGFNFSQILPDPSKPSKRSFIEDLLFNKVTLADAGFIKQYGDCLGDIAARDLICVQKFNGLTVLPPLLTDEMIAQYCSALLAGTITSGWTFGAGAALQIPFAMQMAYRFNGIGVTQNVLYENQKLIANQFNSAIGKIQDSLSSTASALGKLQDVVNQNAQALNTLVKQLSSNFGAISSVLNDILSRLDKVEAEVQIDRLITGRLQSLQTYVTQQLIRAAEIRASANLAATKMSECVLGQSKRVDFCGKGYHLMSFPQCAPHGVVFLHVTYVPAQEKNFTTAPAICHDGKAHFPREGVFVSNGTHWFVTQRNFYEPQIITTDNTFVSGNCDVVIGIVNNTVYDPLQPELDSFKEELDKYFKNHTSPDVDLGDISGINASVVNIQKEIDRLNEVAKNLNESLIDLQELGKYEQYIK

SEQ ID NO: 2582 - protein, 1211 aa, Artificial Sequence
  SARS-CoV-2/Finland/FIN03032020A/2020__EPI_ISL_413602 spike protein (1-1211)(T874C_S1055C)
MFVFLVLLPLVSSQCVNLTTRTQLPPAYTNSFTRGVYYPDKVFRSSVLHSTQDLFLPFFSNVTWFHAIHVSGTNGTKRFDNPVLPFNDGVYFASTEKSNIIRGWIFGTTLDSKTQSLLIVNNATNVVIKVCEFQFCNDPFLGVYYHKNNKSWMESEFRVYSSANNCTFEYVSQPFLMDLEGKQGNFKNLREFVFKNIDGYFKIYSKHTPINLVRDLPQGFSALEPLVDLPIGINITRFQTLLALHRSYLTPGDSSSGWTAGAAAYYVGYLQPRTFLLKYNENGTITDAVDCALDPLSETKCTLKSFTVEKGIYQTSNFRVQPTESIVRFPNITNLCPFGEVFNATRFASVYAWNRKRISNCVADYSVLYNSASFSTFKCYGVSPTKLNDLCFTNVYADSFVIRGDEVRQIAPGQTGKIADYNYKLPDDFTGCVISWNSNNLDSKVGGNYNYLYRLFRKSNLKPFERDISTEIYQAGSTPCNGVEGFNCYFPLQSYGFQPTNGVGYQPYRVVVLSFELLHAPATVCGPKKSTNLVKNKCVNFNFNGLTGTGVLTESNKKFLPFQQFGRDIADTTDAVRDPQTLEILDITPCSFGGVSVITPGTNTSNQVAVLYQGVNCTEVPVAIHADQLTPTWRVYSTGSNVFQTRAGCLIGAEHVNNSYECDIPIGAGICASYQTQTNSPRRARSVASQSIIAYTMSLGAENSVAYSNNSIAIPTNFTISVTTEILPVSMTKTSVDCTMYICGDSTECSNLLLQYGSFCTQLNRALTGIAVEQDKNTQEVFAQVKQIYKTPPIKDFGGFNFSQILPDPSKPSKRSFIEDLLFNKVTLADAGFIKQYGDCLGDIAARDLICAQKFNGLTVLPPLLTDEMIAQYCSALLAGTITSGWTFGAGAALQIPFAMQMAYRFNGIGVTQNVLYENQKLIANQFNSAIGKIQDSLSSTASALGKLQDVVNQNAQALNTLVKQLSSNFGAISSVLNDILSRLDKVEAEVQIDRLITGRLQSLQTYVTQQLIRAAEIRASANLAATKMSECVLGQSKRVDFCGKGYHLMSFPQCAPHGVVFLHVTYVPAQEKNFTTAPAICHDGKAHFPREGVFVSNGTHWFVTQRNFYEPQIITTDNTFVSGNCDVVIGIVNNTVYDPLQPELDSFKEELDKYFKNHTSPDVDLGDISGINASVVNIQKEIDRLNEVAKNLNESLIDLQELGKYEQYIK

SEQ ID NO: 2583 - protein, 1211 aa, Artificial Sequence
  SARS-CoV-2/France/GE1977/2020__EPI_ISL_414632 spike protein (1-1211)(T874C_S1055C)
MFVFLVLLPLVSSQCVNLTTRTQLPPAYTNSFTRGVYYPDKVFRSSVLHSTQDLFLPFFSNVTWFHAIHVSGTNGTKRFDNPVLPFNDGVYFASTEKSNIIRGWIFGTTLDSKTQSLLIVNNATNVVIKVCEFQFCNDPFLGVYYHKNNKSWMESEFRVYSSANNCTFEYVSQPFLMDLEGKQGNFKNLREFVFKNIDGYFKIYSKHTPINLVRDLPQGFSALEPLVDLPIGINITRFQTLLALHRSYLTPGDSSSGWTAGAAAYYVGYLQPRTFLLKYNENGTITDAVDCALDPLSETKCTLKSFTVEKGIYQTSNFRVQPTESIVRFPNITNLCPFGEVFNATRFASVYAWNRKRISNCVADYSVLYNSASFSTFKCYGVSPTKLNDLCFTNVYADSFVIRGDEVRQIAPGQTGKIADYNYKLPDDFTGCVIAWNSNNLDSKVGGNYNYLYRLFRKSNLKPFERDISTEIYQAGSTPCNGVEGFNCYFPLQSYGFQPTNGVGYQPYRVVVLSFELLHAPATVCGPKKSTNLVKNKCVNFNFNGLTGTGVLTESNKKFLPFQQFGRDIADTTDAVRDPQTLEILDITPCSFGGVSVITPGTNTSNQVAVLYQGVNCTEVPVAIHADQLTPTWRVYSTGSNVFQTRAGCLIGAEHVNNSYECDIPIGAGICASYQTQTNSPRRARSVASQSIIAYTMSLGAENSVAYSNNSIAIPTNFTISVTTEILPVSMTKTSVDCTMYICGDSTECSNLLLQYGSFCTQLNRALTGIAVEQDKNTQEVFAQVKQIYKTPPIKDFGGFNFSQILPDPSKPSKRSFIEDLLFNKVTLADAGFIKQYGDCLGDIAARDLICAQKFNGLTVLPPLLTDEMIAQYCSALLAGTITSGWTFGAGAALQIPFAMQMAYRFNGIGVTQNVLYENQKLIANQFNSAIGKIQDSLFSTASALGKLQDVVNQNAQALNTLVKQLSSNFGAISSVLNDILSRLDKVEAEVQIDRLITGRLQSLQTYVTQQLIRAAEIRASANLAATKMSECVLGQSKRVDFCGKGYHLMSFPQCAPHGVVFLHVTYVPAQEKNFTTAPAICHDGKAHFPREGVFVSNGTHWFVTQRNFYEPQIITTDNTFVSGNCDVVIGIVNNTVYDPLQPELDSFKEELDKYFKNHTSPDVDLGDISGINASVVNIQKEIDRLNEVAKNLNESLIDLQELGKYEQYIK

SEQ ID NO: 2584 - protein, 1211 aa, Artificial Sequence
  SARS-CoV-2/Finland/FIN-313/2020__EPI_ISL_414641 spike protein (1-1211)(T874C_S1055C)
MFVFLVLLPLVSSQCVNLTTRTQLPPAYTNSFTRGVYYPDKVFRSSVLHSTQDLFLPFFSNVTWFHAIHVSGTNGTKRFDNPVLPFNDGVYFASTEKSNIIRGWIFGTTLDSKTQSLLIVNNATNVVIKVCEFQFCNDPFLGVYYHKNNKSWMESEFRVYSSANNCTFEYVSQPFLMDLEGKQGNFKNLREFVFKNIDGYFKIYSKHTPINLVRDLPQGFSALEPLVDLPIGINITRFKTLLALHRSYLTPGDSSSGWTAGAAAYYVGYLQPRTFLLKYNENGTITDAVDCALDPLSETKCTLKSFTVEKGIYQTSNFRVQPTESIVRFPNITNLCPFGEVFNATRFASVYAWNRKRISNCVADYSVLYNSASFSTFKCYGVSPTKLNDLCFTNVYADSFVIRGDEVRQIAPGQTGKIADYNYKLPDDFTGCVIAWNSNNLDSKVGGNYNYLYRLFRKSNLKPFERDISTEIYQAGSTPCNGVEGFNCYFPLQSYGFQPTNGVGYQPYRVVVLSFELLHAPATVCGPKKSTNLVKNKCVNFNFNGLTGTGVLTESNKKFLPFQQFGRDIADTTDAVRDPQTLEILDITPCSFGGVSVITPGTNTSNQVAVLYQGVNCTEVPVAIHADQLTPTWRVYSTGSNVFQTRAGCLIGAEHVNNSYECDIPIGAGICASYQTQTNSPRRARSVASQSIIAYTMSLGAENSVAYSNNSIAIPTNFTISVTTEILPVSMTKTSVDCTMYICGDSTECSNLLLQYGSFCTQLNRALTGIAVEQDKNTQEVFAQVKQIYKTPPIKDFGGFNFSQILPDPSKPSKRSFIEDLLFNKVTLADAGFIKQYGDCLGDIAARDLICAQKFNGLTVLPPLLTDEMIAQYCSALLAGTITSGWTFGAGAALQIPFAMQMAYRFNGIGVTQNVLYENQKLIANQFNSAIGKIQDSLSSTASALGKLQDVVNQNAQALNTLVKQLSSNFGAISSVLNDILSRLDKVEAEVQIDRLITGRLQSLQTYVTQQLIRAAEIRASANLAATKMSECVLGQSKRVDFCGKGYHLMSFPQCAPHGVVFLHVTYVPAQEKNFTTAPAICHDGKAHFPREGVFVSNGTHWFVTQRNFYEPQIITTDNTFVSGNCDVVIGIVNNTVYDPLQPELDSFKEELDKYFKNHTSPDVDLGDISGINASVVNIQKEIDRLNEVAKNLNESLIDLQELGKYEQYIK

SEQ ID NO: 2585 - protein, 1211 aa, Artificial Sequence
  SARS-CoV-2/Netherlands/ZuidHolland_2/2020__EPI_ISL_414556 spike protein (1-1211)(T874C_S1055C)
MFVFLVLLPLVSSQCVNLTTRTQLPPAYTNSFTRGVYYPDKVFRSSVLHSTQDLFLPFFSNVTWFHAIHVSGTNGTKRFDNPVLPFNDGVYFASTEKSNIIRGWIFGTTLDSKTQSLLIVNNATNVVIKVCEFQFCNDPFLGVYYHKNNKSWMESEFRVYSSANNCTFEYVSQPFLMDLEGKQGNFKNLREFVFKNIDGYFKIYSKHTPINLVRDLPQGFSALEPLVDLPIGINITRFQTLLALHRSYLTPGDSSSGWTAGAAAYYVGYLQPRTFLLKYNENGTITDAVDCALDPLSETKCTLKSFTVEKGIYQTSNFRVQPTESIVRFPNITNLCPFGEVFNATRFASVYAWNRKRISNCVADYSVLYNSASFSTFKCYGVSPTKLNDLCFTNVYADSFVIRGDEVRQIAPGQTGKIADYNYKLPDDFTGCVIAWNSNNLDSKVGGNYNYLYRLFRKSNLKPFERDISTEIYQAGSTPCNGVEGFNCYFPLQSYGFQPTNGVGYQPYRVVVLSFELLHAPATVCGPKKSTNLVKNKCVNFNFNGLTGTGVLTESNKKFLPFQQFGRDIADTTDAVRDPQTLEILDITPCSFGGVSVITPGTNTSNQVAVLYQGVNCTEVPVAIHADQLTPTWRVYSTGSNVFQTRAGCLIGAEHVNNSYECDIPIGAGICASYQTQTNSPRRARSVASQSIIAYTMSLGAENSVAYSNNSIAIPTNFTISVTTEILPVSMTKTSVDCTMYICGDSTECSNLLLQYGSFCTQLNRALTGIALEQDKNTQEVFAQVKQIYKTPPIKDFGGFNFSQILPDPSKPSKRSFIEDLLFNKVTLADAGFIKQYGDCLGDIAARDLICAQKFNGLTVLPPLLTDEMIAQYCSALLAGTITSGWTFGAGAALQIPFAMQMAYRFNGIGVTQNVLYENQKLIANQFNSAIGKIQDSLSSTASALGKLQDVVNQNAQALNTLVKQLSSNFGAISSVLNDILSRLDKVEAEVQIDRLITGRLQSLQTYVTQQLIRAAEIRASANLAATKMSECVLGQSKRVDFCGKGYHLMSFPQCAPHGVVFLHVTYVPAQEKNFTTAPAICHDGKAHFPREGVFVSNGTHWFVTQRNFYEPQIITTDNTFVSGNCDVVIGIVNNTVYDPLQPELDSFKEELDKYFKNHTSPDVDLGDISGINASVVNIQKEIDRLNEVAKNLNESLIDLQELGKYEQYIK

SEQ ID NO: 2586 - protein, 1211 aa, Artificial Sequence
  SARS-CoV-2/USA/WA-UW31/2020__EPI_ISL_414618 spike protein (1-1211)(T874C_S1055C)
MFVFLVLLPLVSSQCVNLTTRTQLPPAYTNSFTRGVYYPDKVFRSSVLHSTQDLFLPFFSNVTWFHAIHVSGTNGTKRFDNPVLPFNDGVYFASTEKSNIIRGWIFGTTLDSKTQSLLIVNNATNVVIKVCEFQFCNDPFLGVYYHKNNKSWMESEFRVYSSANNCTFEYVSQPFLMDLEGKQGNFKNLREFVFKNIDGYFKIYSKHTPINLVRDLPQGFSALEPLVDLPIGINITRFQTLLALHRSYLTPGDSSSGWTAGAAAYYVGYLQPRTFLLKYNENGTITDAVDCALDPLSETKCTLKSFTVEKGIYQTSNFRVQPTESIVRFPNITNLCPFGEVFNATRFASVYAWNRKRISNCVADYSVLYNSASFSTFKCYGVSPTKLNDLCFTNVYADSFVIRGDEVRQIAPGQTGKIADYNYKLPDDFTGCVIAWNSNNLDSKVGGNYNYLYRLFRKSNLKPFERDISTEIYQAGSTPCNGAEGFNCYFPLQSYGFQPTNGVGYQPYRVVVLSFELLHAPATVCGPKKSTNLVKNKCVNFNFNGLTGTGVLTESNKKFLPFQQFGRDIADTTDAVRDPQTLEILDITPCSFGGVSVITPGTNTSNQVAVLYQDVNCTEVPVAIHADQLTPTWRVYSTGSNVFQTRAGCLIGAEHVNNSYECDIPIGAGICASYQTQTNSPRRARSVASQSIIAYTMSLGAENSVAYSNNSIAIPTNFTISVTTEILPVSMTKTSVDCTMYICGDSTECSNLLLQYGSFCTQLNRALTGIAVEQDKNTQEVFAQVKQIYKTPPIKDFGGFNFSQILPDPSKPSKRSFIEDLLFNKVTLADAGFIKQYGDCLGDIAARDLICAQKFNGLTVLPPLLTDEMIAQYCSALLAGTITSGWTFGAGAALQIPFAMQMAYRFNGIGVTQNVLYENQKLIANQFNSAIGKIQDSLSSTASALGKLQDVVNQNAQALNTLVKQLSSNFGAISSVLNDILSRLDKVEAEVQIDRLITGRLQSLQTYVTQQLIRAAEIRASANLAATKMSECVLGQSKRVDFCGKGYHLMSFPQCAPHGVVFLHVTYVPAQEKNFTTAPAICHDGKAHFPREGVFVSNGTHWFVTQRNFYEPQIITTDNTFVSGNCDVVIGIVNNTVYDPLQPELDSFKEELDKYFKNHTSPDVDLGDISGINASVVNIQKEIDRLNEVAKNLNESLIDLQELGKYEQYIK

SEQ ID NO: 2587 - protein, 1211 aa, Artificial Sequence
  SARS-CoV-2/South Korea/SNU01/2020__EPI_ISL_411929 spike protein (1-1211)(T874C_S1055C)
MFVFLVLLPLVSSQCVNLTTRTQLPPAYTNSFTRGVYYPDKVFRSSVLHSTQDLFLPFFSNVTWFHAIHVSGTNGTKRFDNPVLPFNDGVYFASTEKSNIIRGWIFGTTLDSKTQSLLIVNNATNVVIKVCEFQFCNDPFLGVYYHKNNKSWMESEFRVYSSANNCTFEYVSQPFLMDLEGKQGNFKNLREFVFKNIDGYFKIYSKHTPINLVRDLPQGFWALEPLVDLPIGINITRFQTLLALHRSYLTPGDSSSGWTAGAAAYYVGYLQPRTFLLKYNENGTITDAVDCALDPLSETKCTLKSFTVEKGIYQTSNFRVQPTESIVRFPNITNLCPFGEVFNATRFASVYAWNRKRISNCVADYSVLYNSASFSTFKCYGVSPTKLNDLCFTNVYADSFVIRGDEVRQIAPGQTGKIADYNYKLPDDFTGCVIAWNSNNLDSKVGGNYNYLYRLFRKSNLKPFERDISTEIYQAGSTPCNGVEGFNCYFPLQSYGFQPTNGVGYQPYRVVVLSFELLHAPATVCGPKKSTNLVKNKCVNFNFNGLTGTGVLTESNKKFLPFQQFGRDIADTTDAVRDPQTLEILDITPCSFGGVSVITPGTNTSNQVAVLYQDVNCTEVPVAIHADQLTPTWRVYSTGSNVFQTRAGCLIGAEHVNNSYECDIPIGAGICASYQTQTNSPRRARSVASQSIIAYTMSLGAENSVAYSNNSIAIPTNFTISVTTEILPVSMTKTSVDCTMYICGDSTECSNLLLQYGSFCTQLNRALTGIAVEQDKNTQEVFAQVKQIYKTPPIKDFGGFNFSQILPDPSKPSKRSFIEDLLFNKVTLADAGFIKQYGDCLGDIAARDLICAQKFNGLTVLPPLLTDEMIAQYCSALLAGTITSGWTFGAGAALQIPFAMQMAYRFNGIGVTQNVLYENQKLIANQFNSAIGKIQDSLSSTASALGKLQDVVNQNAQALNTLVKQLSSNFGAISSVLNDILSRLDKVEAEVQIDRLITGRLQSLQTYVTQQLIRAAEIRASANLAATKMSECVLGQSKRVDFCGKGYHLMSFPQCAPHGVVFLHVTYVPAQEKNFTTAPAICHDGKAHFPREGVFVSNGTHWFVTQRNFYEPQIITTDNTFVSGNCDVVIGIVNNTVYDPLQPELDSFKEELDKYFKNHTSPDVDLGDISGINASVVNIQKEIDRLNEVAKNLNESLIDLQELGKYEQYIK

SEQ ID NO: 2588 - protein, 1211 aa, Artificial Sequence
  SARS-CoV-2/China/WF0004/2020__EPI_ISL_413694 spike protein (1-1211)(T874C_S1055C)
MFVFLVLLPLVSSQCVNLTTRTQLPPAYTNSFTRGVYYPDKVFRSSVLHSTQDLFLPFFSNVTWFHAIHVSGTNGTKRFDNPVLPFNDGVYFASTEKSNIIRGWIFGTTLDSKTQSLLIVNNATNVVIKVCEFQFCNDPFLGVYYHKNNKSWTESEFRVYSSANNCTFEYVSQPFLMDLEGKQGNFKNLREFVFKNIDGYFKIYSKHTPINLVRDLPQGFSALEPLVDLPIGINITRFQTLLALHRSYLTPGDSSSGWTAGAAAYYVGYLQPRTFLLKYNENGTITDAVDCALDPLSETKCTLKSFTVEKGIYQTSNFRVQPTESIVRFPNITNLCPFGEVFNATRFASVYAWNRKRISNCVADYSVLYNSASFSTFKCYGVSPTKLNDLCFTNVYADSFVIRGDEVRQIAPGQTGKIADYNYKLPDDFTGCVIAWNSNNLDSKVGGNYNYLYRLFRKSNLKPFERDISTEIYQAGSTPCNGVEGFNCYFPLQSYGFQPTNGVGYQPYRVVVLSFELLHAPATVCGPKKSTNLVKNKCVNFNFNGLTGTGVLTESNKKFLPFQQFGRDIADTTDAVRDPQTLEILDITPCSFGGVSVITPGTNTSNQVAVLYQDVNCTEVPVAIHADQLTPTWRVYSTGSNVFQTRAGCLIGAEHVNNSYECDIPIGAGICASYQTQTNSPRRARSVASQSIIAYTMSLGAENSVAYSNNSIAIPTNFTISVTTEILPVSMTKTSVDCTMYICGDSTECSNLLLQYGSFCTQLNRALTGIAVEQDKNTQEVFAQVKQIYKTPPIKDFGGFNFSQILPDPSKPSKRSFIEDLLFNKVTLADAGFIKQYGDCLGDIAARDLICAQKFNGLTVLPPLLTDEMIAQYCSALLAGTITSGWTFGAGAALQIPFAMQMAYRFNGIGVTQNVLYENQKLIANQFNSAIGKIQDSLSSTASALGKLQDVVNQNAQALNTLVKQLSSNFGAISSVLNDILSRLDKVEAEVQIDRLITGRLQSLQTYVTQQLIRAAEIRASANLAATKMSECVLGQSKRFDFCGKGYHLMSFPQCAPHGVVFLHVTYVPAQEKNFTTAPAICHDGKAHFPREGVFVSNGTHWFVTQRNFYEPQIITTDNTFVSGNCDVVIGIVNNTVYDPLQPELDSFKEELDKYFKNHTSPDVDLGDISGINASVVNIQKEIDRLNEVAKNLNESLIDLQELGKYEQYIK

SEQ ID NO: 2589 - protein, 1211 aa, Artificial Sequence
  SARS-CoV-2/China/WF0028/2020__EPI_ISL_413791 spike protein (1-1211)(T874C_S1055C)
MFVFLVLLPLVSSQCVNLTTRTQLPPAYTNSFTRGVYYPDKVFRSSVLHSTQDLFLPFFSNVTWFHAIHVSGTNGTKRFDNPVLPFNDGVYFASTEKSNIIRGWIFGTTLDSKTQSLLIVNNATNVVIKVCEFQFCNDPFLGVYYHKNNKSWMESEFRVYSSANNCTFEYVSQPFLMDLEGKQGNFKNLREFVFKNIDGYFKIYSKHTPINLVRDLPQGFSALEPLVDLPIGINITRFQTLLALHRSYLTPGDSSSGWTAGAAAYYVGYLQPRTFLLKYNENGTITDAVDCALDPLSETKCTLKSFTVEKGIYQTSNFRVQPTESIVRFPNITNLCPFGEVFNATRFASVYAWNRKRISNCVADYSVLYNSASFSTFKCYGVSPTKLNDLCFTNVYADSFVIRGDEVRQIAPGQTGKIADYNYKLPDDFTGCVIAWNSNNLDSKVGGNYNYLYRLFRKSNLKPFERDISTEIYQAGSTPCNGVEGFNCYFPLQSYGFQPTNGVGYQPYRVVVLSFELLHAPATVCGPKKSTNLVKNKCVNFNFNGLTGTGVLTESNKKFLPFQQFGRDIADTTDAVRDPQTLEILDITPCSFGGVSVITPGTNTSNQVAVLYQDVNCTEVPVAIHADQLTPTWRVYSTGSNVFQTRAGCLIGAEHVNNSYECDIPIGAGICASYQTQTNSPRRARSVASQSIIAYTMSLGAENSVAYSNNSIAIPTNFTISVTTEILPVSMTKTSVDCTMYICGDSTECSNLLLQYGSFCTQLNRALTGIAVEQDKNTQEVFAQVKQIYKTPPIKDFGGFNFSQILPDPSKPSKRSFIEDLLFNKVTLADAGFIKQYGDCLGDIAARDLICAQKFNGLTVLPPLLTDEMIAQYCSALLAGTITSGWTFGAGAALQIPFAMQMAYRFNGIGVTQNVLYENQKLIANQFNSAIGKIQDSLSSTASALGKLQDVVNQNAQALNTLVKQLSSNFGAISSVLNDILSRLDKVEAEVQIDRLITGRLQSLQTYVTQQLIRAAEIRASANLAATKMSECVLGQSKRVDFCGKGYHLMSFPQCAPHGVVFLHVTYVPAQEKNFTTAPAICHDGKAHFPREGVFVSNGTHWFVTQRNFYEPQIITTDNTFVSGNCDVVIGIVNNTVYDPLQPELESFKEELDKYFKNHTSPDVDLGDISGINASVVNIQKEIDRLNEVAKNLNESLIDLQELGKYEQYIK

SEQ ID NO: 2590 - protein, 1211 aa, Artificial Sequence
  SARS-CoV-2/2019-nCoV/USA-CruiseA-18/2020__MT159716.1 spike protein (1-1211)(T874C_S1055C)
MFVFLVLLPLVSSQCVNLTTRTQLPPAYTNSFTRGVYYPDKVFRSSVLHSTQDLFLPFFSNVTWFHAIHVSGTNGTKRFDNPVLPFNDGVYFASTEKSNIIRGWIFGTTLDSKTQSLLIVNNATNVVIKVCEFQFCNDPFLGVYYHKNNKSWMESELRVYSSANNCTFEYVSQPFLMDLEGKQGNFKNLREFVFKNIDGYFKIYSKHTPINLVRDLPQGFSALEPLVDLPIGINITRFQTLLALHRSYLTPGDSSSGWTAGAAAYYVGYLQPRTFLLKYNENGTITDAVDCALDPLSETKCTLKSFTVEKGIYQTSNFRVQPTESIVRFPNITNLCPFGEVFNATRFASVYAWNRKRISNCVADYSVLYNSASFSTFKCYGVSPTKLNDLCFTNVYADSFVIRGDEVRQIAPGQTGKIADYNYKLPDDFTGCVIAWNSNNLDSKVGGNYNYLYRLFRKSNLKPFERDISTEIYQAGSTPCNGVEGFNCYFPLQSYGFQPTNGVGYQPYRVVVLSFELLHAPATVCGPKKSTNLVKNKCVNFNFNGLTGTGVLTESNKKFLPFQQFGRDIADTTDAVRDPQTLEILDITPCSFGGVSVITPGTNTSNQVAVLYQDVNCTEVPVAIHADQLTPTWRVYSTGSNVFQTRAGCLIGAEHVNNSYECDIPIGAGICASYQTQTNSPRRARSVASQSIIAYTMSLGAENSVAYSNNSIAIPTNFTISVTTEILPVSMTKTSVDCTMYICGDSTECSNLLLQYGSFCTQLNRALTGIAVEQDKNTQEVFAQVKQIYKTPPIKDFGGFNFSQILPDPSKPSKRSFIEDLLFNKVTLADAGFIKQYGDCLGDIAARDLICAQKFNGLTVLPPLLTDEMIAQYCSALLAGTITSGWTFGAGAALQIPFAMQMAYRFNGIGVTQNVLYENQKLIANQFNSAIGKIQDSLSSTASALGKLQDVVNQNAQALNTLVKQLSSNFGAISSVLNDILSRLDKVEAEVQIDRLITGRLQSLQTYVTQQLIRAAEIRASANLAATKMSECVLGQSKRVDFCGKGYHLMSFPQCAPHGVVFLHVTYVPAQEKNFTTAPAICHDGKAHFPREGVFVSNGTHWFVTQRNFYEPQIITTDNTFVSGNCDVVIGIVNNTVYDPLQPELDSFKEELDKYFKNHTSPDVDLGDISGINASVVNIQKEIDRLNEVAKNLNESLIDLQELGKYEQYIK

SEQ ID NO: 2591 - protein, 1211 aa, Artificial Sequence
  SARS-CoV-2/SARS-CoV-2/Yunnan-01/human/2020/CHN__MT049951.1 spike protein (1-1211)(T874C_S1055C)
MFVFLVLLPLVSSQCVNLTTRTQLPPANTNSFTRGVYYPDKVFRSSVLHSTQDLFLPFFSNVTWFHAIHVSGTNGTKRFDNPVLPFNDGVYFASTEKSNIIRGWIFGTTLDSKTQSLLIVNNATNVVIKVCEFQFCNDPFLGVYYHKNNKSWMESEFRVYSSANNCTFEYVSQPFLMDLEGKQGNFKNLREFVFKNIDGYFKIYSKHTPINLVRDLPQGFSALEPLVDLPIGINITRFQTLLALHRSYLTPGDSSSGWTAGAAAYYVGYLQPRTFLLKYNENGTITDAVDCALDPLSETKCTLKSFTVEKGIYQTSNFRVQPTESIVRFPNITNLCPFGEVFNATRFASVYAWNRKRISNCVADYSVLYNSASFSTFKCYGVSPTKLNDLCFTNVYADSFVIRGDEVRQIAPGQTGKIADYNYKLPDDFTGCVIAWNSNNLDSKVGGNYNYLYRLFRKSNLKPFERDISTEIYQAGSTPCNGVEGFNCYFPLQSYGFQPTNGVGYQPYRVVVLSFELLHAPATVCGPKKSTNLVKNKCVNFNFNGLTGTGVLTESNKKFLPFQQFGRDIADTTDAVRDPQTLEILDITPCSFGGVSVITPGTNTSNQVAVLYQDVNCTEVPVAIHADQLTPTWRVYSTGSNVFQTRAGCLIGAEHVNNSYECDIPIGAGICASYQTQTNSPRRARSVASQSIIAYTMSLGAENSVAYSNNSIAIPTNFTISVTTEILPVSMTKTSVDCTMYICGDSTECSNLLLQYGSFCTQLNRALTGIAVEQDKNTQEVFAQVKQIYKTPPIKDFGGFNFSQILPDPSKPSKRSFIEDLLFNKVTLADAGFIKQYGDCLGDIAARDLICAQKFNGLTVLPPLLTDEMIAQYCSALLAGTITSGWTFGAGAALQIPFAMQMAYRFNGIGVTQNVLYENQKLIANQFNSAIGKIQDSLSSTASALGKLQDVVNQNAQALNTLVKQLSSNFGAISSVLNDILSRLDKVEAEVQIDRLITGRLQSLQTYVTQQLIRAAEIRASANLAATKMSECVLGQSKRVDFCGKGYHLMSFPQCAPHGVVFLHVTYVPAQEKNFTTAPAICHDGKAHFPREGVFVSNGTHWFVTQRNFYEPQIITTDNTFVSGNCDVVIGIVNNTVYDPLQPELDSFKEELDKYFKNHTSPDVDLGDISGINASVVNIQKEIDRLNEVAKNLNESLIDLQELGKYEQYIK

SEQ ID NO: 2592 - protein, 1211 aa, Artificial Sequence
  SARS-CoV-2/USA/WA-UW292/2020__EPI_ISL_418077 spike protein (1-1211)(T874C_S1055C)
MFVFLVLLPLVSSQCVNLTTRTQLPPAYTNSFTRGVYYPDKVFRSSVLHSTQDLFLPFFSNVTWFHAIHVSGTNGTKRFDNPVLPFNDGVYFASTEKSNIIRGWIFGTTLDSKTQSLLIVNNATNVVIKVCEFQFCNDPFLGVYYHKNNKSWMESEFRVYSSANNCTFEYVSQPFLMDLEGKQGNFKNLREFVFKNIDGYFKIYSKHTPINLVRDLPQGFSALEPLVDLPIGINITRFQTLLALHRSYLTPGDSSSGWTAGAAAYYVGYLQPRTFLLKYNENGTITDAVDCALDPLSETKCTLKSFTVEKGIYQTSNFRVQPTESIVRFPNITNLCPFGEVFNATRFASVYAWNRKRISNCVADYSVLYNSASFSTFKCYGVSPTKLNDLCFTNVYADSFVIRGDEVRQIAPGQTGKIADYNYKLPDDFTGCVIAWNSNNLDSKVGGNYNYLYRLFRKSNLKPFERDISTEIYQASSTPCNGVEGFNCYFPLQSYGFQPTNGVGYQPYRVVVLSFELLHAPATVCGPKKSTNLVKNKCVNFNFNGLTGTGVLTESNKKFLPFQQFGRDIADTTDAVRDPQTLEILDITPCSFGGVSVITPGTNTSNQVAVLYQDVNCTEVPVAIHADQLTPTWRVYSTGSNVFQTRAGCLIGAEHVNNSYECDIPIGAGICASYQTQTNSPRRARSVASQSIIAYTMSLGAENSVAYSNNSIAIPTNFTISVTTEILPVSMTKTSVDCTMYICGDSTECSNLLLQYGSFCTQLNRALTGIAVEQDKNTQEVFAQVKQIYKTPPIKDFGGFNFSQILPDPSKPSKRSFIEDLLFNKVTLADAGFIKQYGDCLGDIAARDLICAQKFNGLTVLPPLLTDEMIAQYCSALLAGTITSGWTFGAGAALQIPFAMQMAYRFNGIGVTQNVLYENQKLIANQFNSAIGKIQDSLSSTASALGKLQDVVNQNAQALNTLVKQLSSNFGAISSVLNDILSRLDKVEAEVQIDRLITGRLQSLQTYVTQQLIRAAEIRASANLAATKMSECVLGQSKRVDFCGKGYHLMSFPQCAPHGVVFLHVTYVPAQEKNFTTAPAICHDGKAHFPREGVFVSNGTHWFVTQRNFYEPQIITTDNTFVSGNCDVVIGIVNNTVYDPLQPELDSFKEELDKYFKNHTSPDVDLGDISGINASVVNIQKEIDRLNEVAKNLNESLIDLQELGKYEQYIK

SEQ ID NO: 2593 - protein, 1211 aa, Artificial Sequence
  SARS-CoV-2/Iceland/192/2020__EPI_ISL_417819 spike protein (1-1211)(T874C_S1055C)
MFVFFVLLPLVSSQCVNLTTRTQLPPAYTNSFTRGVYYPDKVFRSSVLHSTQDLFLPFFSNVTWFHAIHVSGTNGTKRFDNPVLPFNDGVYFASTEKSNIIRGWIFGTTLDSKTQSLLIVNNATNVVIKVCEFQFCNDPFLGVYYHKNNKSWMESEFRVYSSANNCTFEYVSQPFLMDLEGKQGNFKNLREFVFKNIDGYFKIYSKHTPINLVRDLPQGFSALEPLVDLPIGINITRFQTLLALHRSYLTPGDSSSGWTAGAAAYYVGYLQPRTFLLKYNENGTITDAVDCALDPLSETKCTLKSFTVEKGIYQTSNFRVQPTESIVRFPNITNLCPFGEVFNATRFASVYAWNRKRISNCVADYSVLYNSASFSTFKCYGVSPTKLNDLCFTNVYADSFVIRGDEVRQIAPGQTGKIADYNYKLPDDFTGCVIAWNSNNLDSKVGGNYNYLYRLFRKSNLKPFERDISTEIYQAGSTPCNGVEGFNCYFPLQSYGFQPTNGVGYQPYRVVVLSFELLHAPATVCGPKKSTNLVKNKCVNFNFNGLTGTGVLTESNKKFLPFQQFGRDIADTTDAVRDPQTLEILDITPCSFGGVSVITPGTNTSNQVAVLYQGVNCTEVPVAIHADQLTPTWRVYSTGSNVFQTRAGCLIGAEHVNNSYECDIPIGAGICASYQTQTNSPRRARSVASQSIIAYTMSLGAENSVAYSNNSIAIPTNFTISVTTEILPVSMTKTSVDCTMYICGDSTECSNLLLQYGSFCTQLNRALTGIAVEQDKNTQEVFAQVKQIYKTPPIKDFGGFNFSQILPDPSKPSKRSFIEDLLFNKVTLADAGFIKQYGDCLGDIAARDLICAQKFNGLTVLPPLLTDEMIAQYCSALLAGTITSGWTFGAGAALQIPFAMQMAYRFNGIGVTQNVLYENQKLIANQFNSAIGKIQDSLSSTASALGKLQDVVNQNAQALNTLVKQLSSNFGAISSVLNDILSRLDKVEAEVQIDRLITGRLQSLQTYVTQQLIRAAEIRASANLAATKMSECVLGQSKRVDFCGKGYHLMSFPQCAPHGVVFLHVTYVPAQEKNFTTAPAICHDGKAHFPREGVFVSNGTHWFVTQRNFYEPQIITTDNTFVSGNCDVVIGIVNNTVYDPLQPELDSFKEELDKYFKNHTSPDVDLGDISGINASVVNIQKEIDRLNEVAKNLNESLIDLQELGKYEQYIK

SEQ ID NO: 2594 - protein, 1211 aa, Artificial Sequence
  SARS-CoV-2/Belgium/ULG-6939/2020__EPI_ISL_417020 spike protein (1-1211)(T874C_S1055C)
MFVFLVLLPLVSSQCVNLTTRTQLPPAYTNSFTRGVYYPDKVFRSSVLHSTQDLFLPFFSNVTWFHAIHVSGTNGTKRFDNPVLPFNDGVYFASTEKSNIIRGWIFGTTLDSKTQSLLIVNNATNVVIKVCEFQFCNDPFLGVYYHKNNKSWMESEFRVYSSANNCTFEYVSQPFLMDLEGKQGNFKNLREFVFKNIDGYFKIYSKHTPINLVRDLPQGFSALEPLVDLPIGINITRFQTLLALHRSYLTPGDSSSGWTAGAAAYYVGYLQPRTFLLKYNENGTITDAVDCALDPLSETKCTLKSFTVEKGIYQTSNFRVQPTESIVRFPNITNLCPFGEVFNATRFASVYAWNRKRISNCVADYSVLYNSASFSTFKCYGVSPTKLNDLCFTNVYADSFVIRGDEVRQIAPGQTGKIADYNYKLPDDFTGCVIAWNSNNLDSKVGGNYNYLYRLFRKSNLKPFERDISTEIYQAGSTPCNGVEGFNCYFPLQSYGFQPTNGVGYQPYRVVVLSFELLHAPATVCGPKKSTNLVKNKCVNFNFNGLTGTGVLTESNKKFLPFQQFGRDIADTTDAVRDPQTLEILDITPCSFGGVSVITPGTNTSNQVAVLYQGVNCTEVPVAIHADQLTPTWRVYSTGSNVFQTRAGCLIGAEHVNNSYECDIPIGAGICASYQTQTNSPRRARSVASQSIIAYTMSLGAENSVVYSNNSIAIPTNFTISVTTEILPVSMTKTSVDCTMYICGDSTECSNLLLQYGSFCTQLNRALTGIAVEQDKNTQEVFAQVKQIYKTPPIKDFGGFNFSQILPDPSKPSKRSFIEDLLFNKVTLADAGFIKQYGDCLGDIAARDLICAQKFNGLTVLPPLLTDEMIAQYCSALLAGTITSGWTFGAGAALQIPFAMQMAYRFNGIGVTQNVLYENQKLIANQFNSAIGKIQDSLSSTASALGKLQDVVNQNAQALNTLVKQLSSNFGAISSVLNDILSRLDKVEAEVQIDRLITGRLQSLQTYVTQQLIRAAEIRASANLAATKMSECVLGQSKRVDFCGKGYHLMSFPQCAPHGVVFLHVTYVPAQEKNFTTAPAICHDGKAHFPREGVFVSNGTHWFVTQRNFYEPQIITTDNTFVSGNCDVVIGIVNNTVYDPLQPELDSFKEELDKYFKNHTSPDVDLGDISGINASVVNIQKEIDRLNEVAKNLNESLIDLQELGKYEQYIK

SEQ ID NO: 2595 - protein, 1211 aa, Artificial Sequence
  SARS-CoV-2/France/HF2496/2020__EPI_ISL_418231 spike protein (1-1211)(T874C_S1055C)
MFVFLVLLPLVSSQCVNLTTRTQLPPAYTNSFTRGVYYPDKVFRSSVLHSTQDLFLPFFSNVTWFHAIHVSGTNGTKRFDNPVLPFNDGVYFASTEKSNIIRGWIFGTTLDSKTQSLLIVNNATNVVIKVCEFQFCNDPFLGVYYHKNNKSWMESEFRVYSSANNCTFEYVSQPFLMDLEGKQGNFKNLREFVFKNIDGYFKIYSKHTPINLVRDLPQGFSALEPLVDLPIGINITRFQTLLALHRSYLTPGDSSSGWTAGAAAYYVGYLQPRTFLLKYNENGTITDAVDCALDPLSETKCTLKSFTVEKGIYQTSNFRVQPTESIVRFPNITNLCPFGEVFNATRFASVYAWNRKRISNCVADYSVLYNSASFSTFKCYGVSPTKLNDLCFTNVYADSFVIRGDEVRQIAPGQTGKIADYNYKLPDDFTGCVIAWNSNNLDSKVGGNYNYLYRLFRKSNLKPFERDISTEIYQAGSTPCNGVEGFNCYFPLQSYGFQPTNGVGYQPYRVVVLSFELLHAPATVCGPKKSTNLVKNKCVNFNFNGLTGTGVLTESNKKFLPFQQFGRDIADTTDAVRDPQTLEILDITPCSFGGVSVITPGTNTSNQVAVLYQGVNCTEVPVAIHADQLTPTWRVYSTGSNVFQTRAGCLIGAEHVNNSYECDIPIGAGICASYQTQTNSPRRARSVASQSIIAYTMSLGAENSVAYSNNSIAIPTNFTISVTTEILPVSMTKTSVDCTMYICGDSTECSNLLLQYGSFCTQLNRALTGIAVEQDKNTQEVFAQVKQIYKTPPIKDFGGFNFSQILPDPSKPSKRSFIEDLLFNKVTLADAGFIKQYGDCLGDIVARDLICAQKFNGLTVLPPLLTDEMIAQYCSALLAGTITSGWTFGAGAALQIPFAMQMAYRFNGIGVTQNVLYENQKLIANQFNSAIGKIQDSLSSTASALGKLQDVVNQNAQALNTLVKQLSSNFGAISSVLNDILSRLDKVEAEVQIDRLITGRLQSLQTYVTQQLIRAAEIRASANLAATKMSECVLGQSKRVDFCGKGYHLMSFPQCAPHGVVFLHVTYVPAQEKNFTTAPAICHDGKAHFPREGVFVSNGTHWFVTQRNFYEPQIITTDNTFVSGNCDVVIGIVNNTVYDPLQPELDSFKEELDKYFKNHTSPDVDLGDISGINASVVNIQKEIDRLNEVAKNLNESLIDLQELGKYEQYIK

SEQ ID NO: 2596 - protein, 1211 aa, Artificial Sequence
  SARS-CoV-2/USA/WA-UW291/2020__EPI_ISL_418076 spike protein (1-1211)(T874C_S1055C)
MFVFLVLLPLVSSQCVNLTTRTQLPPAYTNSFTRGVYYPDKVFRSSVLHSTQDLFLPFFSNVTWFHAIHVSGTNGTKRFDNPVLPFNDGVYFASTEKSNIIRGWIFGTTLDSKTQSLLIVNNATNVVIKVCEFQFCNDPFLGVYYHKNNKSWMESEFRVYSSANNCTFEYVSQPFLMDLEGKQGNFKNLREFVFKNIDGYFKIYSKHTPINLVRDLPQGFSALEPLVDLPIGINITRFQTLLALHRSYLTPGDSSSGWTAGAAAYYVGYLQPRTFLLKYNENGTITDAVDCALDPLSETKCTLKSFTVEKGIYQTSNFRVQPTESIVRFPNITNLCPFGEVFNATRFASVYAWNRKRISNCVADYSVLYNSASFSTFKCYGVSPTKLNDLCFTNVYADSFVIRGDEVRQIAPGQTGKIADYNYKLPDDFTGCVIAWNSNNLDSKVGGNYNYLYRLFRKSNLKPFERDISTEIYQAGSTPCNGVEGFNCYFPLQSYGFQPTNGVGYQPYRVVVLSFELLHAPATVCGPKKSTNLVKNKCVNFNFNGLTGTGVLTESNKKFLPFQQFGRDIADTTDAVRDPQTLEILDITPCSFGGVSVITPGTNTSNQVAVLYQGVNCTEVPVAIHADQLTPTWRVYSTGSNVFQTRAGCLIGAEHVNNSYECDIPIGAGICASYQTQTNSPRRARSVASQSIIAYTMSLGAENSVAYSNNSIAIPTNFTISVTTEILPVSMTKTSVDCTMYICGDSTECSNLLLQYGSFCTQLNRALTGIAVEQDKNTQEVFAQVKQIYKTPPIKDFGGFNFSQILPDPSKPSKRSFIEDLLFNKVTLADAGFIKQYGDCLGDIAARDLICAQKFNGLTVLPPLLTDEMIAQYCSALLAGTITSGWTFGAGAALQIPFAMQMAYRFNGIGVTQNVLYENQKLIANQFNSAIGKIQYSLSSTASALGKLQDVVNQNAQALNTLVKQLSSNFGAISSVLNDILSRLDKVEAEVQIDRLITGRLQSLQTYVTQQLIRAAEIRASANLAATKMSECVLGQSKRVDFCGKGYHLMSFPQCAPHGVVFLHVTYVPAQEKNFTTAPAICHDGKAHFPREGVFVSNGTHWFVTQRNFYEPQIITTDNTFVSGNCDVVIGIVNNTVYDPLQPELDSFKEELDKYFKNHTSPDVDLGDISGINASVVNIQKEIDRLNEVAKNLNESLIDLQELGKYEQYIK

SEQ ID NO: 2597 - protein, 1211 aa, Artificial Sequence; identical to SEQ ID NO: 2560
  SARS-CoV-2/Portugal/PT0034/2020__EPI_ISL_418019 spike protein (1-1211)(T874C_S1055C)

SEQ ID NO: 2598 - protein, 1211 aa, Artificial Sequence
  SARS-CoV-2/Iceland/202/2020__EPI_ISL_417750 spike protein (1-1211)(T874C_S1055C)
MFVFLVLLPLVSSQCVNLTTRTQLPPAYTNSFTRGVYYPDKVFRSSVLHSTQDLFLPFFSNVTWFHAIHVSGTNGTKRFDNPVLPFNDGVYFASTEKSNIIRGWIFGTTLDSKTQSLLIVNNATNVVIKVCEFQFCNDPFLGVYYHKNNKSWMESEFRVYSSANNCTFEYVSQPFLMDLEGKQGNFKNLREFVFKNIDGYFKIYSKHTPINLVRDLPQGFSALEPLVDLPIGINITRFQTLLALHRSYLTPGDSSSGWTAGAAAYYVGYLQPRTFLLKYNENGTITDAVDCALDPLSETKCTLKSFTVEKGIYQTSNFRVQPTESIVRFPNITNLCPFGEVFNATRFASVYAWNRKRISNCVADYSVLYNSASFSTFKCYGVSPTKLNDLCFTNVYADSFVIRGDEVRQIAPGQTGKIADYNYKLPDDFTGCVIAWNSNNLDSKVGGNYNYLYRLFRKSNLKPFERDISTEIYQAGSTPCNGVEGFNCYFPLQSYGFQPTNGVGYQPYRVVVLSFELLHAPATVCGPKKSTNLVKNKCVNFNFNGLTGTGVLTESNKKFLPFQQFGRDIADTTDAVRDPQTLEILDITPCSFGGVSVITPGTNTSNQVAVLYQDVNCTEVPVAIHADQLTPTWRVYSTGSNVFQTRAGCLIGAEHVNNSYECDIPIGAGICASYQTQTNSPRRARSVASQSIIAYTMSLGAENSVAYSNNSIAIPTNFTISVTTEILPVSMTKTSVDCTMYICGDSTECSNLLLQYGSFCTQLNRALTGIAVEQDKNTQEVFAQVKQIYKTPPIKDFGGFNFSQILPDPSKPSKRSFIEDLLFNKVTLADAGFIKQYGDCLGDIAARDLICAQKFNGLTVLPPLLTDEMIAQYCSALLAGTITSGWTFGAGAALQIPFAMQMAYRFNGIGVTQNVLYENQKLIANQFNSAIGKIQDSLSSTASALGKLQDVVNQNAQALNTLVKQLSSNFGAISSVLNDILSRLDKVEAEVQIDRLITGRLQSLQTYVTQQLIRAAEIRASANLAATKMSECVLGQSKRVDFCGKGYHLMSFPQCAPHGVVFLHVTYVPAQEKNFTTAPAICHDGKAHFPREGVFVSNGTHWFVTQRNFYEPQIITTDNTFVSGNCDVVIGIVNNTVYDPLQPELDSFKEELDKYFKNHTSPDVDLGDIPGINASVVNIQKEIDRLNEVAKNLNESLIDLQELGKYEQYIK

SEQ ID NO: 2599 - protein, 1211 aa, Artificial Sequence
  SARS-CoV-2/USA/WA-UW261/2020__EPI_ISL_418046 spike protein (1-1211)(T874C_S1055C)
MFVFLVLLPLVSSQCVNLTTRTQLPPAYTNSFTRGVYYPDKVFRSSVLHSTQDLFLPFFSNVTWFHAIHVSGTNGTKRFDNPVLPFNDGVYFASTEKSNIIRGWIFGTTLDSKTQSLLIVNNATNVVIKVCEFQFCNDPFLGVYYHKNNKSWMESEFRVYSSANNCTFEYVSQPFLMDLEGKQGNFKNLREFVFKNIDGYFKIYSKHTPINLVRDLPQGFSALEPLVDLPIGINITRFQTLLALHRSYLTPGDSSSGWTAGAAAYYVGYLQPRTFLLKYNENGTITDAVDCALDPLSETKCTLKSFTVEKGIYQTSNFRVQPTESIVRFPNITNLCPFGEVFNATRFTSVYAWNRKRISNCVADYSVLYNSASFSTFKCYGVSPTKLNDLCFTNVYADSFVIRGDEVRQIAPGQTGKIADYNYKLPDDFTGCVIAWNSNNLDSKVGGNYNYLYRLFRKSNLKPFERDISTEIYQAGSTPCNGVEGFNCYFPLQSYGFQPTNGVGYQPYRVVVLSFELLHAPATVCGPKKSTNLVKNKCVNFNFNGLTGTGVLTESNKKFLPFQQFGRDIADTTDAVRDPQTLEILDITPCSFGGVSVITPGTNTSNQVAVLYQDVNCTEVPVAIHADQLTPTWRVYSTGSNVFQTRAGCLIGAEHVNNSYECDIPIGAGICASYQTQTNSPRRARSVASQSIIAYTMSLGAENSVAYSNNSIAIPTNFTISVTTEILPVSMTKTSVDCTMYICGDSTECSNLLLQYGSFCTQLNRALTGIAVEQDKNTQEVFAQVKQIYKTPPIKDFGGFNFSQILPDPSKPSKRSFIEDLLFNKVTLADAGFIKQYGDCLGDIAARDLICAQKFNGLTVLPPLLTDEMIAQYCSALLAGTITSGWTFGAGAALQIPFAMQMAYRFNGIGVTQNVLYENQKLIANQFNSAIGKIQDSLSSTASALGKLQDVVNQNAQALNTLVKQLSSNFGAISSVLNDILSRLDKVEAEVQIDRLITGRLQSLQTYVTQQLIRAAEIRASANLAATKMSECVLGQSKRVDFCGKGYHLMSFPQCAPHGVVFLHVTYVPAQEKNFTTAPAICHDGKAHFPREGVFVSNGTHWFVTQRNFYEPQIITTDNTFVSGNCDVVIGIVNNTVYDPLQPELDSFKEELDKYFKNHTSPDVDLGDISGINASVVNIQKEIDRLNEVAKNLNESLIDLQELGKYEQYIK

SEQ ID NO: 2600 - protein, 1211 aa, Artificial Sequence
  SARS-CoV-2/Portugal/PT0035/2020__EPI_ISL_418020 spike protein (1-1211)(T874C_S1055C)
MFVFLVLLPLVSSQCVNLTTRTQLPPAYTNSFTRGVYYPDKVFRSSVLHSTQDLFLPFFSNVTWFHAIHVSGTNGTKRFDNPVLPFNDGVYFASTEKSNIIRGWIFGTTLDSKTQSLLIVNNATNVVIKVCEFQFCNDPFLGVYYHKNNKSWMESEFRVYSSANNCTFEYVSQPFLMDLEGKQGNFKNLREFVFKNIDGYFKIYSKHTPINLVRDLPQGFSALEPLVDLPIGINITRFQTLLALHRSYLTPGDSSSGWTAGAAAYYVGYLQPRTFLLKYNENGTITDAVDCALDPLSETKCTLKSFTVEKGIYQTSNFRVQPTESIVRFPNITNLCPFGEVFNATRFASVYAWNRKRISNCVADYSVLYNSASFSTFKCYGVSPTKLNDLCFTNVYADSFVIRGDEVRQIAPGQTGKIADYNYKLPDDFTGCVIAWNSNNLDSKVGGNYNYLYRLFRKSNLKPFERDISTEIYQAGSTPCNGVEGFNCYFPLQSYGFQPTNGVGYQPYRVVVLSFELLHAPATVCGPKKSTNLVKNKCVNFNFNGLTGTGVLTESNKKFLPFQQFGRDIADTTDAVRDPQTLEILDITPCSFGGVSVITPGTNTSNQVAVLYQDVNCTEVPVAIHADQLTPTWRVYSTGSNVFQTRAGCLIGAEHVNNSYECDIPIGAGICASYQTQTNSPRRARSVASQSIIAYTMSLGAENSVAYSNNSIAIPTNFTISVTTEILPVSMTKTSVDCTMYICGDSTECSNLLLQYGSFCTQLNRALTGIAVEQDKNTQEVFAQVKQIYKTPPIKDFGGFNFSQILPDPSKPSKRSFIEDLLFNKVTLADAGFIKQYGDCLGDISARDLICAQKFNGLTVLPPLLTDEMIAQYCSALLAGTITSGWTFGAGAALQIPFAMQMAYRFNGIGVTQNVLYENQKLIANQFNSAIGKIQDSLSSTASALGKLQDVVNQNAQALNTLVKQLSSNFGAISSVLNDILSRLDKVEAEVQIDRLITGRLQSLQTYVTQQLIRAAEIRASANLAATKMSECVLGQSKRVDFCGKGYHLMSFPQCAPHGVVFLHVTYVPAQEKNFTTAPAICHDGKAHFPREGVFVSNGTHWFVTQRNFYEPQIITTDNTFVSGNCDVVIGIVNNTVYDPLQPELDSFKEELDKYFKNHTSPDVDLGDISGINASVVNIQKEIDRLNEVAKNLNESLIDLQELGKYEQYIK

SEQ ID NO: 2601 - protein, 1211 aa, Artificial Sequence
  SARS-CoV-2/USA/NY-NYUMC7/2020__EPI_ISL_418192 spike protein (1-1211)(T874C_S1055C)
MFVFLVLLPLVSSQCVNLTTRTQLPPAYTNSFTRGVYYPDKVFRSSVLHSTQDLFLPFFSNVTWFHAIHVSGTNGTKRFDNPVLPFNDGVYFASTEKSNIIRGWIFGTTLDSKTQSLLIVNNATNVVIKVCEFQFCNDPFLGVYHHKNNKSWMESEFRVYSSANNCTFEYVSQPFLMDLEGKQGNFKNLREFVFKNIDGYFKIYSKHTPINLVRDLPQGFSALEPLVDLPIGINITRFQTLLALHRSYLTPGDSSSGWTAGAAAYYVGYLQPRTFLLKYNENGTITDAVDCALDPLSETKCTLKSFTVEKGIYQTSNFRVQPTESIVRFPNITNLCPFGEVFNATRFASVYAWNRKRISNCVADYSVLYNSASFSTFKCYGVSPTKLNDLCFTNVYADSFVIRGDEVRQIAPGQTGKIADYNYKLPDDFTGCVIAWNSNNLDSKVGGNYNYLYRLFRKSNLKPFERDISTEIYQAGSTPCNGVEGFNCYFPLQSYGFQPTNGVGYQPYRVVVLSFELLHAPATVCGPKKSTNLVKNKCVNFNFNGLTGTGVLTESNKKFLPFQQFGRDIADTTDAVRDPQTLEILDITPCSFGGVSVITPGTNTSNQVAVLYQGVNCTEVPVAIHADQLTPTWRVYSTGSNVFQTRAGCLIGAEHVNNSYECDIPIGAGICASYQTQTNSPRRARSVASQSIIAYTMSLGAENSVAYSNNSIAIPTNFTISVTTEILPVSMTKTSVDCTMYICGDSTECSNLLLQYGSFCTQLNRALTGIAVEQDKNTQEVFAQVKQIYKTPPIKDFGGFNFSQILPDPSKPSKRSFIEDLLFNKVTLADAGFIKQYGDCLGDIAARDLICAQKFNGLTVLPPLLTDEMIAQYCSALLAGTITSGWTFGAGAALQIPFAMQMAYRFNGIGVTQNVLYENQKLIANQFNSAIGKIQDSLSSTASALGKLQDVVNQNAQALNTLVKQLSSNFGAISSVLNDILSRLDKVEAEVQIDRLITGRLQSLQTYVTQQLIRAAEIRASANLAATKMSECVLGQSKRVDFCGKGYHLMSFPQCAPHGVVFLHVTYVPAQEKNFTTAPAICHDGKAHFPREGVFVSNGTHWFVTQRNFYEPQIITTDNTFVSGNCDVVIGIVNNTVYDPLQPELDSFKEELDKYFKNHTSPDVDLGDISGINASVVNIQKEIDRLNEVAKNLNESLIDLQELGKYEQYIK

SEQ ID NO: 2602 - protein, 1211 aa, Artificial Sequence
  SARS-CoV-2/Iceland/189/2020__EPI_ISL_417709 spike protein (1-1211)(T874C_S1055C)
MFVFLVLLPLVSSQCVNLTTRTQLPPAYTNSFTRGVYYPDKVFRSSVLHSTQDLFLPFFSNVTWFHAIHVSGTNGTKRFDNPVLPFNDGVYFASTEKSNIIRGWIFGTTLDSKTQSLLIVNNATNVVIKVCEFQFCNDPFLGVYYHKNNKSWMESEFRVYSSANNCTFEYVSQPFLMDLEGKQGNFKNLREFVFKNIDGYFKIYSKHTPINLVRDLPQGFSALEPLVDLPIGINITRFQTLLALHRSYLTPGDSSSGWTAGAAAYYVGYLQPRTFLLKYNENGTITDAVDCALDPLSETKCTLKSFTVEKGIYQTSNFRVQPTESIVRFPNITNLCPFGEVFNATRFASVYAWNRKRISNCVADYSVLYNSASFSTFKCYGVSPTKLNDLCFTNVYADSFVIRGDEVRQIAPGQTGKIADYNYKLPDDFTGCVIAWNSNNLDSKVGGNYNYLYRLFRKSNLKPFERDISTEIYQAGSTPCNGVEGFNCYFPLQSYGFQPTNGVGYQPYRVVVLSFELLHAPATVCGPKKSTNLVKNKCVNFNFNGLTGTGVLTESNKKFLPFQQFGRDIADTTDAVRDPQTLEILDITPCSFGGVSVITPGTNTSNQVAVLYQGVNCTEVPVAIHADQLTPTWRVYSTGSNVFQTRAGCLIGAEHVNNSYECDIPIGAGICASYQTQTNSPRRARSVASQSIIAYTMSLGAENSVAYSNNSIAIPTNFTISVTTEILPVSMTKTSVDCTMYICGDSTECSNLLLQYGSFCTQLNRALTGIAVEQDKNTQEVFAQVKQIYKTPPIKDFGGFNFSQILPDPSKPSKRSFIEDLLFNKVTLADAGFTKQYGDCLGDIAARDLICAQKFNGLTVLPPLLTDEMIAQYCSALLAGTITSGWTFGAGAALQIPFAMQMAYRFNGIGVTQNVLYENQKLIANQFNSAIGKIQDSLSSTASALGKLQDVVNQNAQALNTLVKQLSSNFGAISSVLNDILSRLDKVEAEVQIDRLITGRLQSLQTYVTQQLIRAAEIRASANLAATKMSECVLGQSKRVDFCGKGYHLMSFPQCAPHGVVFLHVTYVPAQEKNFTTAPAICHDGKAHFPREGVFVSNGTHWFVTQRNFYEPQIITTDNTFVSGNCDVVIGIVNNTVYDPLQPELDSFKEELDKYFKNHTSPDVDLGDISGINASVVNIQKEIDRLNEVAKNLNESLIDLQELGKYEQYIK

SEQ ID NO: 2603 - protein, 1211 aa, Artificial Sequence
  SARS-CoV-2/Australia/NSW56/2020__EPI_ISL_417408 spike protein (1-1211)(T874C_S1055C)
MFVFLVLLPLVSSQCVNLTTRTQLPPAYTNSFTRGVYYPDKVFRSSVLHSTQDLFLPFFSNVTWFHAIHVSGTNGTKRFDNPVLPFNDGVYFASTEKSNIIRGWIFGTTLDSKTQSLLIVNNATNVVIKVCEFQFCNDPFLGVYYHKNNKSWMESEFRVYSSANNCTFEYVSQPFLMDLEGKQGNFKNLREFVFKNIDGYFKIYSKHTPINLVRDLPQGFSALEPLVDLPIGINITRFQTLLALHRSYLTPGDSSSGWTAGAAAYYVGYLQPRTFLLKYNENGTITDAVDCALDPLSETKCTLKSFTVEKGIYQTSNFRVQPTESIVRFPNITNLCPFGEVFNATRFASVYAWNRKRISNCVADYSVLYNSASFSTFKCYGVSPTKLNDLCFTNVYADSFVIRGDEVRQIAPGQTGKIADYNYKLPDDFTGCVIAWNSNNLDSKVGGNYNYLYRLFRKSNLKPFERDISTEIYQAGSTPCNGVEGFNCYFPLQSYGFQPTNGVGYQPYRVVVLSFELLHAPATVCGPKKSTNLVKNKCVNFNFNGLTGTGVLTESNKKFLPFQQFGRDIADTTDAVRDPQTLEILDITPCSFGGVSVITPGTNTSNQVAVLYQDVNCTEVPVAIHADQLTPTWRVYSTGSNVFQTRAGCLIGAEHVNNSYECDIPIGAGICASYQTQTNSPRRARSVASQSIIAYTMSLGAENSVAYSNNSIAIPTNFTISVTTEILPVSMTKTSVDCTMYICGDSTECSNLLLQYGSFCTQLNRALTGIAVEQDKNTQEVFAQVKQIYKTPPIKDFGGFNFSQILPDSSKPSKRSFIEDLLFNKVTLADAGFIKQYGDCLGDIAARDLICAQKFNGLTVLPPLLTDEMIAQYCSALLAGTITSGWTFGAGAALQIPFAMQMAYRFNGIGVTQNVLYENQKLIANQFNSAIGKIQDSLSSTASALGKLQDVVNQNAQALNTLVKQLSSNFGAISSVLNDILSRLDKVEAEVQIDRLITGRLQSLQTYVTQQLIRAAEIRASANLAATKMSECVLGQSKRVDFCGKGYHLMSFPQCAPHGVVFLHVTYVPAQEKNFTTAPAICHDGKAHFPREGVFVSNGTHWFVTQRNFYEPQIITTDNTFVSGNCDVVIGIVNNTVYDPLQPELDSFKEELDKYFKNHTSPDVDLGDISGINASVVNIQKEIDRLNEVAKNLNESLIDLQELGKYEQYIK

SEQ ID NO: 2604 - protein, 1211 aa, Artificial Sequence
  SARS-CoV-2/Iceland/280/2020__EPI_ISL_417608 spike protein (1-1211)(T874C_S1055C)
MFVFLVLLPLVSSQCVNLTTRTQLPPAYTNSFTRGVYYPDKVFRSSVLHSTQDLFLPFFSNVTWFHAIHVSGTNGTKRFDNPVLPFNDGVYFASTEKSNIIRGWIFGTTLDSKTQSLLIVNNATNVVIKVCEFQFCNDPFLGVYYHKNNKSWMESEFRVYSSANNCTFEYVSQPFLMDLEGKQGNFKNLREFVFKNIDGYFKIYSKHTPINLVRDLPQGFSALEPLVDLPIGINITRFQTLLALHRSYLTPGDSSSGWTAGAAAYYVGYLQPRTFLLKYNENGTITDAVDCALDPLSETKCTLKSFTVEKGIYQTSNFRVQPTESIVRFPNITNLCPFGEVFNATRFASVYAWNRKRISNCVADYSVLYNSASFSTFKCYGVSPTKLNDLCFTNVYADSFVIRGDEVRQIAPGQTGKIADYNYKLPDDFTGCVIAWNSNNLDSKVGGNYNYLYRLFRKSNLKPFERDISTEIYQAGSTPCNGVEGFNCYFPLQSYGFQPTNGVGYQPYRVVVLSFELLHAPATVCGPKKSTNLVKNKCVNFNFNGLTGTGVLTESNKKFLPFQQFGRDIADTTDAVRDPQTLEILDITPCSFGGVSVITPGTNTSNQVAVLYQGVNCTEVPVAIHADQLTPTWRVYSTGSNVFQTRAGCLIGAEHVNNSYECDIPIGAGICASYHTQTNSPRRARSVASQSIIAYTMSLGAENSVAYSNNSIAIPTNFTISVTTEILPVSMTKTSVDCTMYICGDSTECSNLLLQYGSFCTQLNRALTGIAVEQDKNTQEVFAQVKQIYKTPPIKDFGGFNFSQILPDPSKPSKRSFIEDLLFNKVTLADAGFIKQYGDCLGDIAARDLICAQKFNGLTVLPPLLTDEMIAQYCSALLAGTITSGWTFGAGAALQIPFAMQMAYRFNGIGVTQNVLYENQKLIANQFNSAIGKIQDSLSSTASALGKLQDVVNQNAQALNTLVKQLSSNFGAISSVLNDILSRLDKVEAEVQIDRLITGRLQSLQTYVTQQLIRAAEIRASANLAATKMSECVLGQSKRVDFCGKGYHLMSFPQCAPHGVVFLHVTYVPAQEKNFTTAPAICHDGKAHFPREGVFVSNGTHWFVTQRNFYEPQIITTDNTFVSGNCDVVIGIVNNTVYDPLQPELDSFKEELDKYFKNHTSPDVDLGDISGINASVVNIQKEIDRLNEVAKNLNESLIDLQELGKYEQYIK

SEQ ID NO: 2605 - protein, 1211 aa, Artificial Sequence; identical to SEQ ID NO: 2560
  SARS-CoV-2/Iceland/247/2020__EPI_ISL_417575 spike protein (1-1211)(T874C_S1055C)

SEQ ID NO: 2606 - protein, 1211 aa, Artificial Sequence
  SARS-CoV-2/Iceland/238/2020__EPI_ISL_417566 spike protein (1-1211)(T874C_S1055C)
MFVFLVLLPLVSSQCVNLTTRTQLPPAYTNSFTRGVYYPDKVFRSSVLHSTQDLFLPFFSNVTWFHAIHVSGTNGTKRFDNPVLPFNDGVYFASTEKSNIIRGWIFGTTLDSKTQSLLIVNNATNVVIKVCEFQFCNDPFLGVYYHKNNKSWMESEFRVYSSANNCTFEYVSQPFLMDLEGKQGNFKNLREFVFKNIDGYFKIYSKHTPINLVRDLPQGFSALEPLVDLPIGINITRFQTLLALHRSYLTPGDSSSGWTAGAAAYYVGYLQPRTFLLKYNENGTITDAVDCALDPLSETKCTLKSFTVEKGIYQTSNFRVQPTESIVRFPNITNLCPFGEVFNATRFASVYAWNRKRISNCVADYSVLYNSASFSTFKCYGVSPTKLNDLCFTNVYADSFVIRGDEVRQIAPGQTGKIADYNYKLPDDFTGCVIAWNSNNLDSKVGGNYNYLYRLFRKSNLKPFERDISTEIYQAGSTPCNGVEGFNCYFPLQSYGFQPTNGVGYQPYRVVVLSFELLHAPATVCGPKKSTNLVKNKCVNFNFNGLTGTGVLTESNKKFLPFQQFGRDIADTTDAVRDPQTLEILDITPCSFGGVSVITPGTNTSNQVAVLYQGVNCTEVPVAIHADQLTPTWRVYSTGSNVFQTRAGCLIGAEHVNNSYECDIPIGAGICASYQTQTNSPRRARSVASQSIIAYTMSLGAENSVAYSNNSIAIPTNFTISVTTEILPVSMTKTSVDCTMYICGDSTECSNLLLQYGSFCTQLNRALTGIAVEQDKNTQEVFAQVKQIYKTPPIKDFGGFNFSQILPDPSKPSKRSFIEDLLFNKVTLADVGFIKQYGDCLGDIAARDLICAQKFNGLTVLPPLLTDEMIAQYCSALLAGTITSGWTFGAGAALQIPFAMQMAYRFNGIGVTQNVLYENQKLIANQFNSAIGKIQDSLSSTASALGKLQDVVNQNAQALNTLVKQLSSNFGAISSVLNDILSRLDKVEAEVQIDRLITGRLQSLQTYVTQQLIRAAEIRASANLAATKMSECVLGQSKRVDFCGKGYHLMSFPQCAPHGVVFLHVTYVPAQEKNFTTAPAICHDGKAHFPREGVFVSNGTHWFVTQRNFYEPQIITTDNTFVSGNCDVVIGIVNNTVYDPLQPELDSFKEELDKYFKNHTSPDVDLGDISGINASVVNIQKEIDRLNEVAKNLNESLIDLQELGKYEQYIK

SEQ ID NO: 2607 - protein, 1211 aa, Artificial Sequence
  SARS-CoV-2/Greece/16/2020__EPI_ISL_418265 spike protein (1-1211)(T874C_S1055C)
MFVFLVLLPLVSSQCVNLTTRTQLPPAYTNSFTRGVYYPDKVFRSSVLHSTQDLFLPFFSNVTWFHAIHVSGTNGTKRFDNPVLPFNDGVYFASTEKSNIIRGWIFGTTLDSKTQSLLIVNNATNVVIKVCEFQFCNDPFLGVYYHKNNKSWMESEFRVYSSANNCTFEYVSQPFLMDLEGKQGNFKNLREFVFKNVDGYFKIYSKHTPINLVRDLPQGFSALEPLVDLPIGINITRFQTLLALHRSYLTPGDSSSGWTAGAAAYYVGYLQPRTFLLKYNENGTITDAVDCALDPLSETKCTLKSFTVEKGIYQTSNFRVQPTESIVRFPNITNLCPFGEVFNATRFASVYAWNRKRISNCVADYSVLYNSASFSTFKCYGVSPTKLNDLCFTNVYADSFVIRGDEVRQIAPGQTGKIADYNYKLPDDFTGCVIAWNSNNLDSKVGGNYNYLYRLFRKSNLKPFERDISTEIYQAGSTPCNGVEGFNCYFPLQSYGFQPTNGVGYQPYRVVVLSFELLHAPATVCGPKKSTNLVKNKCVNFNFNGLTGTGVLTESNKKFLPFQQFGRDIADTTDAVRDPQTLEILDITPCSFGGVSVITPGTNTSNQVAVLYQDVNCTEVPVAIHADQLTPTWRVYSTGSNVFQTRAGCLIGAEHVNNSYECDIPIGAGICASYQTQTNSPRRARSVASQSIIAYTMSLGAENSVAYSNNSIAIPTNFTISVTTEILPVSMTKTSVDCTMYICGDSTECSNLLLQYGSFCTQLNRALTGIAVEQDKNTQEVFAQVKQIYKTPPIKDFGGFNFSQILPDPSKPSKRSFIEDLLFNKVTLADAGFIKQYGDCLGDIAARDLICAQKFNGLTVLPPLLTDEMIAQYCSALLAGTITSGWTFGAGAALQIPFAMQMAYRFNGIGVTQNVLYENQKLIANQFNSAIGKIQDSLSSTASALGKLQDVVNQNAQALNTLVKQLSSNFGAISSVLNDILSRLDKVEAEVQIDRLITGRLQSLQTYVTQQLIRAAEIRASANLAATKMSECVLGQSKRVDFCGKGYHLMSFPQCAPHGVVFLHVTYVPAQEKNFTTAPAICHDGKAHFPREGVFVSNGTHWFVTQRNFYEPQIITTDNTFVSGNCDVVIGIVNNTVYDPLQPELDSFKEELDKYFKNHTSPDVDLGDISGINASVVNIQKEIDRLNEVAKNLNESLIDLQELGKYEQYIK

SEQ ID NO: 2608 - protein, 1211 aa, Artificial Sequence
  SARS-CoV-2/Iceland/319/2020__EPI_ISL_417648 spike protein (1-1211)(T874C_S1055C)
MFVFLVLLPLVSSQCVNLTTRTQLPPAYTNSFTRGVYYPDKVFRSSVLHSTQDLFLPFFSNVTWFHAIHVSGTNGTKRFDNPVLPFNDGVYFASTEKSNIIRGWIFGTTLDSKTQSLLIVNNATNVVIKVCEFQFCNDPFLGVYYHKNNKSWMESEFRVYSSANNCTFEYVSQPFLIDLEGKQGNFKNLREFVFKNIDGYFKIYSKHTPINLVRDLPQGFSALEPLVDLPIGINITRFQTLLALHRSYLTPGDSSSGWTAGAAAYYVGYLQPRTFLLKYNENGTITDAVDCALDPLSETKCTLKSFTVEKGIYQTSNFRVQPTESIVRFPNITNLCPFGEVFNATRFASVYAWNRKRISNCVADYSVLYNSASFSTFKCYGVSPTKLNDLCFTNVYADSFVIRGDEVRQIAPGQTGKIADYNYKLPDDFTGCVIAWNSNNLDSKVGGNYNYLYRLFRKSNLKPFERDISTEIYQAGSTPCNGVEGFNCYFPLQSYGFQPTNGVGYQPYRVVVLSFELLHAPATVCGPKKSTNLVKNKCVNFNFNGLTGTGVLTESNKKFLPFQQFGRDIADTTDAVRDPQTLEILDITPCSFGGVSVITPGTNTSNQVAVLYQGVNCTEVPVAIHADQLTPTWRVYSTGSNVFQTRAGCLIGAEHVNNSYECDIPIGAGICASYQTQTNSPRRARSVASQSIIAYTMSLGAENSVAYSNNSIAIPTNFTISVTTEILPVSMTKTSVDCTMYICGDSTECSNLLLQYGSFCTQLNRALTGIAVEQDKNTQEVFAQVKQIYKTPPIKDFGGFNFSQILPDPSKPSKRSFIEDLLFNKVTLADAGFIKQYGDCLGDIAARDLICAQKFNGLTVLPPLLTDEMIAQYCSALLAGTITSGWTFGAGAALQIPFAMQMAYRFNGIGVTQNVLYENQKLIANQFNSAIGKIQDSLSSTASALGKLQDVVNQNAQALNTLVKQLSSNFGAISSVLNDILSRLDKVEAEVQIDRLITGRLQSLQTYVTQQLIRAAEIRASANLAATKMSECVLGQSKRVDFCGKGYHLMSFPQCAPHGVVFLHVTYVPAQEKNFTTAPAICHDGKAHFPREGVFVSNGTHWFVTQRNFYEPQIITTDNTFVSGNCDVVIGIVNNTVYDPLQPELDSFKEELDKYFKNHTSPDVDLGDISGINASVVNIQKEIDRLNEVAKNLNESLIDLQELGKYEQYIK

SEQ ID NO: 2609 - protein, 1211 aa, Artificial Sequence
  SARS-CoV-2/Congo/94/2020__EPI_ISL_417947 spike protein (1-1211)(T874C_S1055C)
MFVFLVLLPLVSSQCVNLTTRTQLPPAYTNSFTRGVYYPDKVFRSSVLHSTQDLFLPFFSNVTWFHAIHVSGTNGTKRFDNPVLPFNDGVYFASTEKSNIIRGWIFGTTLDSKTQSLLIVNNATNVVIKVCEFQFCNDPFLGVYYHKNNKSWMESEFRVYSSANNCTFEYVSQPFLMDLEGKQGNFKNLREFVFKNIDGYFKIYSKHTPINLVRDLPQGFSALEPLVDLPIGINITRFQTLLALHRSYLTPGDSSSGWTAGAAAYYVGYLQPRTFLLKYNENGTITDAVDCALDPLSETKCTLKSFTVEKGIYQTSNFRVQPTESIVRFPNITNLCPFGEVFNATRFASVYAWNRKRISNCVADYSVLYNSASFSTFKCYGVSPTKLNDLCFTNVYADSFVIRGDEVRQIAPGQTGKIADYNYKLPDDFTGCVIAWNSNNLDSKVGGNYNYLYRLFRKSNLKPFERDISTEIYQAGSTPCNGVEGFNCYFPLQSYGFQPTNGVGYQPYRVVVLSFELLHAPATVCGPKKSTNLVKNKCVNFNFNGLTGTGVLTESNKKFLPFQQFGRDIADTTDAVRDPQTLEILDITPCSFGGVSVITPGTNTSNQVAVLYQGVNCTEVPVAIHADQLTPTWRVYSTGSNVFQTRAGCLIGAEHVNNSYECDIPIGAGICASYQTQTNSPRRARSVASQSIIAYTMSLGAENSVAYSNNSIAIPTNFTISVTTEILPVSMTKTSVDCTMYICGDSTECSNLLLQYGSFCTQLNRALTGIAVEQDKNTQEVFAQVKQIYKTPPIKDFGGFNFSQILPDPSKPSKRSFIEDILFNKVTLADAGFIKQYGDCLGDIAARDLICAQKFNGLTVLPPLLTDEMIAQYCSALLAGTITSGWTFGAGAALQIPFAMQMAYRFNGIGVTQNVLYENQKLIANQFNSAIGKIQDSLSSTASALGKLQDVVNQNAQALNTLVKQLSSNFGAISSVLNDILSRLDKVEAEVQIDRLITGRLQSLQTYVTQQLIRAAEIRASANLAATKMSECVLGQSKRVDFCGKGYHLMSFPQCAPHGVVFLHVTYVPAQEKNFTTAPAICHDGKAHFPREGVFVSNGTHWFVTQRNFYEPQIITTDNTFVSGNCDVVIGIVNNTVYDPLQPELDSFKEELDKYFKNHTSPDVDLGDISGINASVVNIQKEIDRLNEVAKNLNESLIDLQELGKYEQYIK

SEQ ID NO: 2610 - protein, 1211 aa, Artificial Sequence
  SARS-CoV-2/Congo/158/2020__EPI_ISL_417950 spike protein (1-1211)(T874C_S1055C)
MFVFLVLLPLVSSQCVNLTTRTQLPPAYTNSFTRGVYYPDKVFRSSVLHSTQDLFLPFFSNVTWFHAIHVSGTNGTKRFDNPVLPFNDGVYFASTEKSNIIRGWIFGTTLDSKTQSLLIVNNATNVVIKVCEFQFCNDPFLGVYYHKNNKSWMESEFRVYSSANNCTFEYVSQPFLMDLEGKQGNFKNLREFVFKNIDGYFKIYSKHTPINLVRDLPQGFSALEPLVDLPIGINITRFQTLLALHRSYLTPGDSSSGWTAGAAAYYVGYLQPRTFLLKYNENGTITDAVDCALDPLSETKCTLKSFTVEKGIYQTSNFRVQPTESIVRFPNITNLCPFGEVFNATRFASVYAWNRKRISNCVADYSVLYNSASFSTFKCYGVSPTKLNDLCFTNVYADSFVIRGDEVRQIAPGQTGKIADYNYKLPDDFTGCVIAWNSNNLDSKVGGNYNYLYRLFRKSNLKPFERDISTEIYQAGSTPCNGVEGFNCYFPLQSYGFQPTNGVGYQPYRVVVLSFELLHAPATVCGPKKSTNLVKNKCVNFNFNGLTGTGVLTESNKKFLPFQQFGRDIADTTDAVRDPQTLEILDITPCSFGGVSVITPGTNTSNQVAVLYQDVNCTEVPVAIHADQLTPTWRVYSTGSNVFQTRAGCLIGAEHVNNSYECDIPIGAGICASYQTQTNSPRRARSVASQSIIAYTMSLGAENSVAYSNNSIAIPTNFTISVTTEILPVSMTKTSVDCTMYICGDSTECSNLLLQYGSFCTQLNRALTGIAVEQDKNTQEVFAQVKQIYKTPPIKDFGGFNFSQILPDPSKPSKRSFIEDLLFNKVTLADAGFIKQYGDCLGDIAARDLICAQKFNGLTVLPPLLTDEMIAQYCSALLAGTITSGWTFGAGAALQIPFAMQMAYRFNGIGVTQNVLYENQKLIANQFNSAIGKIQDSLSSTASALGKLQDVVNQNAQALNTLVKQLSSNFGAISSVLNDILSRLDKVEAEVQIDRLITGRLQSLQTYVTQQLIRAAEIRASANLAATKMSECVLGQSKRVDFCGKGYHLMSFPQCAPHGVVFLHVTYVPAQEKNFTTAPAICHDGKAHFPREGVFVSNGTHWFVTQRNFYEPQIITTDNTFLSGNCDVVIGIVNNTVYDPLQPELDSFKEELDKYFKNHTSPDVDLGDISGINASVVNIQKEIDRLNEVAKNLNESLIDLQELGKYEQYIK

SEQ ID NO: 2611 - protein, 1211 aa, Artificial Sequence
  SARS-CoV-2/USA/UT-00034/2020__EPI_ISL_417977 spike protein (1-1211)(T874C_S1055C)
MFVFLVLLPLVSSQCVNLTTRTQLPPAYTNSFTRGVYYPDKVFRSSVLHSTQDLFLPFFSNVTWFHAIHVSGTNGTKRFDNPVLPFNDGVYFASTEKSNIIRGWIFGTTLDSKTQSLLIVNNATNVVIKVCEFQFCNDPFLGVYYYKNNKSWMESEFRVYSSANNCTFEYVSQPFLMDLEGKQGNFKNLREFVFKNIDGYFKIYSKHTPINLVRDLPQGFSALEPLVDLPIGINITRFQTLLALHRSYLTPGDSSSGWTAGAAAYYVGYLQPRTFLLKYNENGTITDAVDCALDPLSETKCTLKSFTVEKGIYQTSNFRVQPTESIVRFPNITNLCPFGEVFNATRFASVYAWNRKRISNCVADYSVLYNSASFSTFKCYGVSPTKLNDLCFTNVYADSFVIRGDEVRQIAPGQTGKIADYNYKLPDDFTGCVIAWNSNNLDSKVGGNYNYLYRLFRKSNLKPFERDISTEIYQAGSTPCNGVEGFNCYFPLQSYGFQPTNGVGYQPYRVVVLSFELLHAPATVCGPKKSTNLVKNKCVNFNFNGLTGTGVLTESNKKFLPFQQFGRDIADTTDAVRDPQTLEILDITPCSFGGVSVITPGTNTSNQVAVLYQGVNCTEVPVAIHADQLTPTWRVYSTGSNVFQTRAGCLIGAEHVNNSYECDIPIGAGICASYQTQTNSPRRARSVASQSIIAYTMSLGAENSVAYSNNSIAIPTNFTISVTTEILPVSMTKTSVDCTMYICGDSTECSNLLLQYGSFCTQLNRALTGIAVEQDKNTQEVFAQVKQIYKTPPIKDFGGFNFSQILPDPSKPSKRSFIEDLLFNKVTLADAGFIKQYGDCLGDIAARDLICAQKFNGLTVLPPLLTDEMIAQYCSALLAGTITSGWTFGAGAALQIPFAMQMAYRFNGIGVTQNVLYENQKLIANQFNSAIGKIQDSLSSTASALGKLQDVVNQNAQALNTLVKQLSSNFGAISSVLNDILSRLDKVEAEVQIDRLITGRLQSLQTYVTQQLIRAAEIRASANLAATKMSECVLGQSKRVDFCGKGYHLMSFPQCAPHGVVFLHVTYVPAQEKNFTTAPAICHDGKAHFPREGVFVSNGTHWFVTQRNFYEPQIITTDNTFVSGNCDVVIGIVNNTVYDPLQPELDSFKEELDKYFKNHTSPDVDLGDISGINASVVNIQKEIDRLNEVAKNLNESLIDLQELGKYEQYIK

SEQ ID NO: 2612 - protein, 1211 aa, Artificial Sequence
  SARS-CoV-2/USA/UT-00033/2020__EPI_ISL_417976 spike protein (1-1211)(T874C_S1055C)
MFVFLVLLPLVSSQCVNLTTRTQLPPAYTNSFTRGVYYPDKVFRSSVLHSTQDLFLPFFSNVTWFHAIHVSGTNGTKRFDNPVLPFNDGVYFASTEKSNIIRGWIFGTTLDSKTQSLLIVNNATNVVIKVCEFQFCNDPFLGVYYHKNNKSWMESEFRVYSSANNCTFEYVSQPFLMDLEGKQGNFKNLREFVFKNIDGYFKIYSKHTPINLVRDLPQGFSALEPLVDLPIGINITRFQTLLALHRSYLTPGDSSSGLTAGAAAYYVGYLQPRTFLLKYNENGTITDAVDCALDPLSETKCTLKSFTVEKGIYQTSNFRVQPTESIVRFPNITNLCPFGEVFNATRFASVYAWNRKRISNCVADYSVLYNSASFSTFKCYGVSPTKLNDLCFTNVYADSFVIRGDEVRQIAPGQTGKIADYNYKLPDDFTGCVIAWNSNNLDSKVGGNYNYLYRLFRKSNLKPFERDISTEIYQAGSTPCNGVEGFNCYFPLQSYGFQPTNGVGYQPYRVVVLSFELLHAPATVCGPKKSTNLVKNKCVNFNFNGLTGTGVLTESNKKFLPFQQFGRDIADTTDAVRDPQTLEILDITPCSFGGVSVITPGTNTSNQVAVLYQGVNCTEVPVAIHADQLTPTWRVYSTGSNVFQTRAGCLIGAEHVNNSYECDIPIGAGICASYQTQTNSPRRARSVASQSIIAYTMSLGAENSVAYSNNSIAIPTNFTISVTTEILPVSMTKTSVDCTMYICGDSTECSNLLLQYGSFCTQLNRALTGIAVEQDKNTQEVFAQVKQIYKTPPIKDFGGFNFSQILPDPSKPSKRSFIEDLLFNKVTLADAGFIKQYGDCLGDIAARDLICAQKFNGLTVLPPLLTDEMIAQYCSALLAGTITSGWTFGAGAALQIPFAMQMAYRFNGIGVTQNVLYENQKLIANQFNSAIGKIQDSLSSTASALGKLQDVVNQNAQALNTLVKQLSSNFGAISSVLNDILSRLDKVEAEVQIDRLITGRLQSLQTYVTQQLIRAAEIRASANLAATKMSECVLGQSKRVDFCGKGYHLMSFPQCAPHGVVFLHVTYVPAQEKNFTTAPAICHDGKAHFPREGVFVSNGTHWFVTQRNFYEPQIITTDNTFVSGNCDVVIGIVNNTVYDPLQPELDSFKEELDKYFKNHTSPDVDLGDISGINASVVNIQKEIDRLNEVAKNLNESLIDLQELGKYEQYIK

SEQ ID NO: 2613 - protein, 1211 aa, Artificial Sequence
  SARS-CoV-2/USA/WI-13/2020__EPI_ISL_417516 spike protein (1-1211)(T874C_S1055C)
MFVFLVLLPLVSSQCVNLTTRTQLPPAYTNSFTRGVYYPDKVFRSSVLHSTQDLFLPFFSNVTWFHAIHVSGTNGTKRFDNPVLPFNDGVYFASTEKSNIIRGWIFGTTLDSKTQSLLIVNNATNVVIKVCEFQFCNDPFLGVYYHKNNKSWMESEFRVYSSANNCTFEYVSQPFLMDLEGKQGNFKNLREFVFKNIDGYFKIYSKHTPINLVRDLPQGFSALEPLVDLPIGINITRFQTLLALHRSYLTPGDSSSGWTAGAAAYYVGYLQPRTFLLKYNENGTITDAVDCALDPLSETKCTLKSFTVEKGIYQTSNFRVLPTESIVRFPNITNLCPFGEVFNATRFASVYAWNRKRISNCVADYSVLYNSASFSTFKCYGVSPTKLNDLCFTNVYADSFVIRGDEVRQIAPGQTGKIADYNYKLPDDFTGCVIAWNSNNLDSKVGGNYNYLYRLFRKSNLKPFERDISTEIYQAGSTPCNGVEGFNCYFPLQSYGFQPTNGVGYQPYRVVVLSFELLHAPATVCGPKKSTNLVKNKCVNFNFNGLTGTGVLTESNKKFLPFQQFGRDIADTTDAVRDPQTLEILDITPCSFGGVSVITPGTNTSNQVAVLYQGVNCTEVPVAIHADQLTPTWRVYSTGSNVFQTRAGCLIGAEHVNNSYECDIPIGAGICASYQTQTNSPRRARSVASQSIIAYTMSLGAENSVAYSNNSIAIPTNFTISVTTEILPVSMTKTSVDCTMYICGDSTECSNLLLQYGSFCTQLNRALTGIAVEQDKNTQEVFAQVKQIYKTPPIKDFGGFNFSQILPDPSKPSKRSFIEDLLFNKVTLADAGFIKQYGDCLGDIAARDLICAQKFNGLTVLPPLLTDEMIAQYCSALLAGTITSGWTFGAGAALQIPFAMQMAYRFNGIGVTQNVLYENQKLIANQFNSAIGKIQDSLSSTASALGKLQDVVNQNAQALNTLVKQLSSNFGAISSVLNDILSRLDKVEAEVQIDRLITGRLQSLQTYVTQQLIRAAEIRASANLAATKMSECVLGQSKRVDFCGKGYHLMSFPQCAPHGVVFLHVTYVPAQEKNFTTAPAICHDGKAHFPREGVFVSNGTHWFVTQRNFYEPQIITTDNTFVSGNCDVVIGIVNNTVYDPLQPELDSFKEELDKYFKNHTSPDVDLGDISGINASVVNIQKEIDRLNEVAKNLNESLIDLQELGKYEQYIK

SEQ ID NO: 2614 - protein, 1210 aa, Artificial Sequence
  SARS-CoV-2/India/1-27/2020__EPI_ISL_413522 spike protein (1-1210)(T873C_S1054C)
MFVFLVLLPLVSSQCVNLTTRTQLPPAYTNSFTRGVYYPDKVFRSSVLHSTQDLFLPFFSNVTWFHAIHVSGTNGTKRFDNPVLPFNDGVYFASTEKSNIIRGWIFGTTLDSKTQSLLIVNNATNVVIKVCEFQFCNDPFLGVYHKNNKSWMESEFRVYSSANNCTFEYVSQPFLMDLEGKQGNFKNLREFVFKNIDGYFKIYSKHTPINLVRDLPQGFSALEPLVDLPIGINITRFQTLLALHRSYLTPGDSSSGWTAGAAAYYVGYLQPRTFLLKYNENGTITDAVDCALDPLSETKCTLKSFTVEKGIYQTSNFRVQPTESIVRFPNITNLCPFGEVFNATRFASVYAWNRKRISNCVADYSVLYNSASFSTFKCYGVSPTKLNDLCFTNVYADSFVIRGDEVIQIAPGQTGKIADYNYKLPDDFTGCVIAWNSNNLDSKVGGNYNYLYRLFRKSNLKPFERDISTEIYQAGSTPCNGVEGFNCYFPLQSYGFQPTNGVGYQPYRVVVLSFELLHAPATVCGPKKSTNLVKNKCVNFNFNGLTGTGVLTESNKKFLPFQQFGRDIADTTDAVRDPQTLEILDITPCSFGGVSVITPGTNTSNQVAVLYQDVNCTEVPVAIHADQLTPTWRVYSTGSNVFQTRAGCLIGAEHVNNSYECDIPIGAGICASYQTQTNSPRRARSVASQSIIAYTMSLGAENSVAYSNNSIAIPTNFTISVTTEILPVSMTKTSVDCTMYICGDSTECSNLLLQYGSFCTQLNRALTGIAVEQDKNTQEVFAQVKQIYKTPPIKDFGGFNFSQILPDPSKPSKRSFIEDLLFNKVTLADAGFIKQYGDCLGDIAARDLICAQKFNGLTVLPPLLTDEMIAQYCSALLAGTITSGWTFGAGAALQIPFAMQMAYRFNGIGVTQNVLYENQKLIANQFNSAIGKIQDSLSSTASALGKLQDVVNQNAQALNTLVKQLSSNFGAISSVLNDILSRLDKVEAEVQIDRLITGRLQSLQTYVTQQLIRAAEIRASANLAATKMSECVLGQSKRVDFCGKGYHLMSFPQCAPHGVVFLHVTYVPAQEKNFTTAPAICHDGKAHFPREGVFVSNGTHWFVTQRNFYEPQIITTDNTFVSGNCDVVIGIVNNTVYDPLQPELDSFKEELDKYFKNHTSPDVDLGDISGINASVVNIQKEIDRLNEVAKNLNESLIDLQELGKYEQYIK

SEQ ID NO: 2615 - protein, 1205 aa, Artificial Sequence
  SARS-CoV-2/pangolin/Guangxi/P4L/2017__EPI_ISL_410538 spike protein (1-1205)(T868C_S1049C)
MFVFLFVLPLVSSQCVNLTTRTGIPPGYTNSSTRGVYYPDKVFRSSILHLTQDLFLPFFSNVTWFNTINYQGGFKKFDNPVLPFNDGVYFASTEKSNIIRGWIFGTTLDARTQSLLIVNNATNVVIKVCEFQFCTDPFLGVYYHNNNKTWVENEFRVYSSANNCTFEYISQPFLMDLEGKQGNFKNLREFVFKNVDGYFKIYSKHTPIDLVRDLPRGFAALEPLVDLPIGINITRFQTLLALHRSYLTPGNLESGWTTGAAAYYVGYLQQRTFLLSYNQNGTITDAVDCSLDPLSETKCTLKSLTVEKGIYQTSNFRVQPTISIVRFPNITNLCPFGEVFNASKFASVYAWNRKRISNCVADYSVLYNSTSFSTFKCYGVSPTKLNDLCFTNVYADSFVVKGDEVRQIAPGQTGVIADYNYKLPDDFTGCVIAWNSVKQDALTGGNYGYLYRLFRKSKLKPFERDISTEIYQAGSTPCNGQVGLNCYYPLERYGFHPTTGVNYQPFRVVVLSFELLNGPATVCGPKLSTTLVKDKCVNFNFNGLTGTGVLTTSKKQFLPFQQFGRDISDTTDAVRDPQTLEILDITPCSFGGVSVITPGTNTSNQVAVLYQDVNCTEVPMAIHAEQLTPAWRVYSAGANVFQTRAGCLVGAEHVNNSYECDIPVGAGICASYHSMSSLRSVNQRSIIAYTMSLGAENSVAYSNNSIAIPTNFTISVTTEILPVSMTKTSVDCTMYICGDSIECSNLLLQYGSFCTQLNRALTGIAVEQDKNTQEVFAQVKQIYKTPPIKDFGGFNFSQILPDPSKPSKRSFIEDLLFNKVTLADAGFIKQYGDCLGDIAARDLICAQKFNGLTVLPPLLTDEMIAQYCSALLAGTITSGWTFGAGAALQIPFAMQMAYRFNGIGVTQNVLYENQKLIANQFNSAIGKIQDSLSSTASALGKLQDVVNQNAQALNTLVKQLSSNFGAISSVLNDILSRLDKVEAEVQIDRLITGRLQSLQTYVTQQLIRAAEIRASANLAATKMSECVLGQSKRVDFCGKGYHLMSFPQCAPHGVVFLHVTYVPAQEKNFTTAPAICHEGKAHFPREGVFVSNGTHWFITQRNFYEPQIITTDNTFVSGSCDVVIGIVNNTVYDPLQPELDSFKEELDKYFKNHTSPDVDLGDISGINASVVNIQKEIDRLNEVAKNLNESPIDLQELGKYEQYIK

SEQ ID NO: 2616 - protein, 1205 aa, Artificial Sequence
  SARS-CoV-2/pangolin/Guangxi/P5L/2017__EPI_ISL_410540 spike protein (1-1205)(T868C_S1049C)
MFVFLFVLPLVSSQCVNLTTRTGIPPGYTNSSTRGVYYPDKVFRSSILHLTQDLFLPFFSNVTWFNTINYQGGFKKFDNPVLPFNDGVYFASTEKSNIIRGWIFGTTLDARTQSLLIVNNATNVVIKVCEFQFCTDPFLGVYYHNNNKTWVENEFRVYSSANNCTFEYISQPFLMDLEGKQGNFKNLREFVFKNVDGYFKIYSKHTPIDLVRDLPRGFAALEPLVDLPIGINITRFQTLLALHRSYLTPGKLESGWTTGAAAYYVGYLQQRTFLLSYNQNGTITDAVDCSLDPLSETKCTLKSLTVEKGIYQTSNFRVQPTISIVRFPNITNLCPFGEVFNASKFASVYAWNRKRISNCVADYSVLYNSTSFSTFKCYGVSPTKLNDLCFTNVYADSFVVKGDEVRQIAPGQTGVIADYNYKLPDDFTGCVIAWNSVKQDALTGGNYGYLYRLFRKSKLKPFERDISTEIYQAGSTPCNGQVGLNCYYPLERYGFHPTTGVNYQPFRVVVLSFELLNGPATVCGPKLSTTLVKDKCVNFNFNGLTGTGVLTTSKKQFLPFQQFGRDISDTTDAVRDPQTLEILDITPCSFGGVSVITPGTNTSNQVAVLYQDVNCTEVPMAIHAEQLTPAWRVYSAGANVFQTRAGCLVGAEHVNNSYECDIPVGAGICASYHSMSSFRSVNQRSIIAYTMSLGAENSVAYSNNSIAIPTNFTISVTTEILPVSMTKTSVDCTMYICGDSIECSNLLLQYGSFCTQLNRALTGIAVEQDKNTQEVFAQVKQIYKTPPIKDFGGFNFSQILPDPSKPSKRSFIEDLLFNKVTLADAGFIKQYGDCLGDIAARDLICAQKFNGLTVLPPLLTDEMIAQYCSALLAGTITSGWTFGAGAALQIPFAMQMAYRFNGIGVTQNVLYENQKLIANQFNSAIGKIQDSLSSTASALGKLQDVVNQNAQALNTLVKQLSSNFGAISSVLNDILSRLDKVEAEVQIDRLITGRLQSLQTYVTQQLIRAAEIRASANLAATKMSECVLGQSKRVDFCGKGYHLMSFPQCAPHGVVFLHVTYVPAQEKNFTTAPAICHEGKAHFPREGVFVSNGTHWFITQRNFYEPQIITTDNTFVSGSCDVVIGIVNNTVYDPLQPELDSFKEELDKYFKNHTSPDVDLGDISGINASVVNIQKEIDRLNEVAKNLNESLIDLQELGKYEQYIK

SEQ ID NO: 2617 - protein, 1205 aa, Artificial Sequence
  SARS-CoV-2/pangolin/Guangxi/P5E/2017__EPI_ISL_410541 spike protein (1-1205)(T868C_S1049C)
MFVFLFVLPLVSSQCVNLTTRTGIPPGYTNSSTRGVYYPDKVFRSSILHLTQDLFLPFFSNVTWFNTITYQGGSKKFDNPVLPFNDGVYFASTEKSNIIRGWIFGTTLDARTQSLLIVNNATNVVIKVCEFQFCTDPFLGVYYHNNNKTWVENEFRVYSSANNCTFEYISQPFLMDLEGKQGNFKNLREFVFKNVDGYFKIYSKHTPIDLVRDLPRGFAALEPLVDLPIGINITRFQTLLALHRSYLTPGKLESGWTTGAAAYYVGYLQQRTFLLSYNQNGTITDAVDCSLDPLSETKCTLKSLTVEKGIYQTSNFRVQPTISIVRFPNITNLCPFGEVFNASKFASVYAWNRKRISNCVADYSVLYNSTSFSTFKCYGVSPTKLNDLCFTNVYADSFVVKGDEVRQIAPGQTGVIADYNYKLPDDFTGCVIAWNSVKQDALTGDNYGYLYRLFRKSKLKPFERDISTEIYQAGSTPCNGQVGLNCYYPLERYGFHPTTGVNYQPFRVVVLSFELLNGPATVCGPKLSTTLVKDKCVNFNFNGLTGTGVLTTSKKQFLPFQQFGRDISDTTDAVRDPQTLEILDITPCSFGGVSVITPGTNTSNQVAVLYQDVNCTEVPMAIHAEQLTPAWRVYSAGANVFQTRAGCLVGAEHVNNSYECDIPVGAGICASYHSMSSFRSVNQRSIIAYTMSLGAENSVAYSNNSIAIPTNFTISVTTEILPVSMTKTSVDCTMYICGDSIECSNLLLQYGSFCTQLNRALTGIAVEQDKNTQEVFAQVKQIYKTPPIKDFGGFNFSQILPDPSKPSKRSFIEDLLFNKVTLADAGFIKQYGDCLGDIAARDLICAQKFNGLTVLPPLLTDEMIAQYCSALLAGTITSGWTFGAGAALQIPFAMQMAYRFNGIGVTQNVLYENQKLIANQFNSAIGKIQDSLSSTASALGKLQDVVNQNAQALNTLVKQLSSNFGAISSVLNDILSRLDKVEAEVQIDRLITGRLQSLQTYVTQQLIRAAEIRASANLAATKMSECVLGQSKRVDFCGKGYHLMSFPQCAPHGVVFLHVTYVPAQEKNFTTAPAICHEGKAHFPREGVFVSNGTHWFITQRNFYEPQIITTDNTFVSGSCDVVIGIVNNTVYDPLQPELDSFKEELDKYFKNHTSPDVDLGDISGINASVVNIQKEIDRLNEVAKNLNESLIDLQELGKYEQYIK

SEQ ID NO: 2618 - protein, 1203 aa, Artificial Sequence
  SARS-CoV-2/pangolin/Guangxi/P1E/2017__EPI_ISL_410539 spike protein (1-1203)(T866C_S1047C)
MFVFLFVLPLVSSQCVNLTTRTGIQPGYTNSSTRGVYYPDKVFRSSILHLTQDLFLPFFSNVTWFNTINYQGGFKKFDNPVLPFNDGVYFASTEKSNIIRGWIFGTTLDARTQSLLIVNNATNVVIKVCEFQFCTDPFLGVYYHNNNKTWVENEFRVYSSANNCTFEYISQPFLMDLEGKQGNFKNLREFVFKNVDGYFKIYSKHTPIDLVRDLPRGFAALEPLVDLPIGINITRFQTLLALHRSYLTPGKLESGWTTGAAAYYVGYLQQRTFLLSYNQNGTITDAVDCSLDPLSETKCTLKSLTVEKGIYQTSNFRVQPTISIVRFPNITNLCPFGEVFNASKFASVYAWNRKRISNCVADYSVLYNSTSFSTFKCYGVSPTKLNDLCFTNVYADSFVVKGDEVRQIAPGQTGVIADYNYKLPDDFTGCVIAWNSVKQDALTGGNYLYRLFRKSKLKPFERDISTEIYQAGSTPCNGQVGLNCYYPLERYGFHPTTGVNYQPFRVVVLSFELLNGPATVCGPKLSTTLVKDKCVNFNFNGLTGTGVLTTSKKQFLPFQQFGRDISDTTDAVRDPQTLEILDITPCSFGGVSVITPGTNTSNQVAVLYQDVNCTEVPMAIHAEQLTPAWRVYSAGANVFQTRAGCLVGAEHVNNSYECDIPVGAGICASYHSMSSLRSVNQRSIIAYTMSLGAENSVAYSNNSIAIPTNFTISVTTEILPVSMTKTSVDCTMYICGDSIECSNLLLQYGSFCTQLNRALTGIAVEQDKNTQEVFAQVKQIYKTPPIKDFGGFNFSQILPDPSKPSKRSFIEDLLFNKVTLADAGFIKQYGDCLGDIAARDLICAQKFNGLTVLPPLLTDEMIAQYCSALLAGTITSGWTFGAGAALQIPFAMQMAYRFNGIGVTQNVLYENQKLIANQFNSAIGKIQDSLSSTASALGKLQDVVNQNAQALNTLVKQLSSNFGAISSVLNDILSRLDKVEAEVQIDRLITGRLQSLQTYVTQQLIRAAEIRASANLAATKMSECVLGQSKRVDFCGKGYHLMSFPQCAPHGVVFLHVTYVPAQEKNFTTAPAICHEGKAHFPREGVFVSNGTHWFITQRNFYEPQIITTDNTFVSGSCDVVIGIVNNTVYDPLQPELDSFKEELDKYFKNHTSPDVDLGDISGINASVVNIQKEIDRLNEVAKNLNESLIDLQELGKYEQYIK

SEQ ID NO: 2619 - protein, 1147 aa, Artificial Sequence
  SARS-CoV-2/Wuhan/WIV05/2019__EPI_ISL_402128 spike protein (1-1147)
MFVFLVLLPLVSSQCVNLTTRTQLPPAYTNSFTRGVYYPDKVFRSSVLHSTQDLFLPFFSNVTWFHAIHVSGTNGTKRFDNPVLPFNDGVYFASTEKSNIIRGWIFGTTLDSKTQSLLIVNNATNVVIKVCEFQFCNDPFLGVYYHKNNKSWMESEFRVYSSANNCTFEYVSQPFLMDLEGKQGNFKNLREFVFKNIDGYFKIYSKHTPINLVRDLPQGFSALEPLVDLPIGINITRFQTLLALHRSYLTPGDSSSGWTAGAAAYYVGYLQPRTFLLKYNENGTITDAVDCALDPLSETKCTLKSFTVEKGIYQTSNFRVQPTESIVRFPNITNLCPFGEVFNATRFASVYAWNRKRISNCVADYSVLYNSASFSTFKCYGVSPTKLNDLCFTNVYADSFVIRGDEVRQIAPGQTGKIADYNYKLPDDFTGCVIAWNSNNLDSKVGGNYNYLYRLFRKSNLKPFERDISTEIYQAGSTPCNGVEGFNCYFPLQSYGFQPTNGVGYQPYRVVVLSFELLHAPATVCGPKKSTNLVKNKCVNFNFNGLTGTGVLTESNKKFLPFQQFGRDIADTTDAVRDPQTLEILDITPCSFGGVSVITPGTNTSNQVAVLYQDVNCTEVPVAIHADQLTPTWRVYSTGSNVFQTRAGCLIGAEHVNNSYECDIPIGAGICASYQTQTNSPRRARSVASQSIIAYTMSLGAENSVAYSNNSIAIPTNFTISVTTEILPVSMTKTSVDCTMYICGDSTECSNLLLQYGSFCTQLNRALTGIAVEQDKNTQEVFAQVKQIYKTPPIKDFGGFNFSQILPDPSKPSKRSFIEDLLFNKVTLADAGFIKQYGDCLGDIAARDLICAQKFNGLTVLPPLLTDEMIAQYTSALLAGTITSGWTFGAGAALQIPFAMQMAYRFNGIGVTQNVLYENQKLIANQFNSAIGKIQDSLSSTASALGKLQDVVNQNAQALNTLVKQLSSNFGAISSVLNDILSRLDKVEAEVQIDRLITGRLQSLQTYVTQQLIRAAEIRASANLAATKMSECVLGQSKRVDFCGKGYHLMSFPQSAPHGVVFLHVTYVPAQEKNFTTAPAICHDGKAHFPREGVFVSNGTHWFVTQRNFYEPQIITTDNTFVSGNCDVVIGIVNNTVYDPLQPELDS

SEQ ID NO: 2620 - protein, 1143 aa, Artificial Sequence
  SARS-CoV-2/bat/Yunnan/RaTG13/2013__EPI_ISL_402131 spike protein (1-1143)
MFVFLVLLPLVSSQCVNLTTRTQLPPAYTNSSTRGVYYPDKVFRSSVLHLTQDLFLPFFSNVTWFHAIHVSGTNGIKRFDNPVLPFNDGVYFASTEKSNIIRGWIFGTTLDSKTQSLLIVNNATNVVIKVCEFQFCNDPFLGVYYHKNNKSWMESEFRVYSSANNCTFEYVSQPFLMDLEGKQGNFKNLREFVFKNIDGYFKIYSKHTPINLVRDLPPGFSALEPLVDLPIGINITRFQTLLALHRSYLTPGDSSSGWTAGAAAYYVGYLQPRTFLLKYNENGTITDAVDCALDPLSETKCTLKSFTVEKGIYQTSNFRVQPTDSIVRFPNITNLCPFGEVFNATTFASVYAWNRKRISNCVADYSVLYNSTSFSTFKCYGVSPTKLNDLCFTNVYADSFVITGDEVRQIAPGQTGKIADYNYKLPDDFTGCVIAWNSKHIDAKEGGNFNYLYRLFRKANLKPFERDISTEIYQAGSKPCNGQTGLNCYYPLYRYGFYPTDGVGHQPYRVVVLSFELLNAPATVCGPKKSTNLVKNKCVNFNFNGLTGTGVLTESNKKFLPFQQFGRDIADTTDAVRDPQTLEILDITPCSFGGVSVITPGTNASNQVAVLYQDVNCTEVPVAIHADQLTPTWRVYSTGSNVFQTRAGCLIGAEHVNNSYECDIPIGAGICASYQTQTNSRSVASQSIIAYTMSLGAENSVAYSNNSIAIPTNFTISVTTEILPVSMTKTSVDCTMYICGDSTECSNLLLQYGSFCTQLNRALTGIAVEQDKNTQEVFAQVKQIYKTPPIKDFGGFNFSQILPDPSKPSKRSFIEDLLFNKVTLADAGFIKQYGDCLGDIAARDLICAQKFNGLTVLPPLLTDEMIAQYTSALLAGTITSGWTFGAGAALQIPFAMQMAYRFNGIGVTQNVLYENQKLIANQFNSAIGKIQDSLSSTASALGKLQDVVNQNAQALNTLVKQLSSNFGAISSVLNDILSRLDKVEAEVQIDRLITGRLQSLQTYVTQQLIRAAEIRASANLAATKMSECVLGQSKRVDFCGKGYHLMSFPQSAPHGVVFLHVTYVPAQEKNFTTAPAICHDGKAHFPREGVFVSNGTHWFVTQRNFYEPQIITTDNTFVSGSCDVVIGIVNNTVYDPLQPELDS

SEQ ID NO: 2621 - protein, 1147 aa, Artificial Sequence
  SARS-CoV-2/Wuhan/HBCDC-HB-01/2019__EPI_ISL_402132 spike protein (1-1147)
MFVFLVLLPLVSSQCVNLTTRTQLPPAYTNSITRGVYYPDKVFRSSVLHSTQDLFLPFFSNVTWFHAIHVSGTNGTKRFDNPVLPFNDGVYFASTEKSNIIRGWIFGTTLDSKTQSLLIVNNATNVVIKVCEFQFCNDPFLGVYYHKNNKSWMESEFRVYSSANNCTFEYVSQPFLMDLEGKQGNFKNLREFVFKNIDGYFKIYSKHTPINLVRDLPQGFSALEPLVDLPIGINITRFQTLLALHRSYLTPGDSSSGWTAGAAAYYVGYLQPRTFLLKYNENGTITDAVDCALDPLSETKCTLKSFTVEKGIYQTSNFRVQPTESIVRFPNITNLCPFGEVFNATRFASVYAWNRKRISNCVADYSVLYNSASFSTFKCYGVSPTKLNDLCFTNVYADSFVIRGDEVRQIAPGQTGKIADYNYKLPDDFTGCVIAWNSNNLDSKVGGNYNYLYRLFRKSNLKPFERDISTEIYQAGSTPCNGVEGFNCYFPLQSYGFQPTNGVGYQPYRVVVLSFELLHAPATVCGPKKSTNLVKNKCVNFNFNGLTGTGVLTESNKKFLPFQQFGRDIADTTDAVRDPQTLEILDITPCSFGGVSVITPGTNTSNQVAVLYQDVNCTEVPVAIHADQLTPTWRVYSTGSNVFQTRAGCLIGAEHVNNSYECDIPIGAGICASYQTQTNSPRRARSVASQSIIAYTMSLGAENSVAYSNNSIAIPTNFTISVTTEILPVSMTKTSVDCTMYICGDSTECSNLLLQYGSFCTQLNRALTGIAVEQDKNTQEVFAQVKQIYKTPPIKDFGGFNFSQILPDPSKPSKRSFIEDLLFNKVTLADAGFIKQYGDCLGDIAARDLICAQKFNGLTVLPPLLTDEMIAQYTSALLAGTITSGWTFGAGAALQIPFAMQMAYRFNGIGVTQNVLYENQKLIANQFNSAIGKIQDSLSSTASALGKLQDVVNQNAQALNTLVKQLSSNFGAISSVLNDILSRLDKVEAEVQIDRLITGRLQSLQTYVTQQLIRAAEIRASANLAATKMSECVLGQSKRVDFCGKGYHLMSFPQSAPHGVVFLHVTYVPAQEKNFTTAPAICHDGKAHFPREGVFVSNGTHWFVTQRNFYEPQIITTDNTFVSGNCDVVIGIVNNTVYDPLQPELDS

SEQ ID NO: 2622 - protein, 1147 aa, Artificial Sequence
  SARS-CoV-2/Guangdong/20SF028/2020__EPI_ISL_403936 spike protein (1-1147)
MFVFLVLLPLVSSQCVNLTTRTQLPPAYTNSFTRGVYYPDKVFRSSVLYSTQDLFLPFFSNVTWFHAIHVSGTNGTKRFDNPVLPFNDGVYFASTEKSNIIRGWIFGTTLDSKTQSLLIVNNATNVVIKVCEFQFCNDPFLGVYYHKNNKSWMESEFRVYSSANNCTFEYVSQPFLMDLEGKQGNFKNLREFVFKNIDGYFKIYSKHTPINLVRDLPQGFSALEPLVDLPIGINITRFQTLLALHRSYLTPGDSSSGWTAGAAAYYVGYLQPRTFLLKYNENGTITDAVDCALDPLSETKCTLKSFTVEKGIYQTSNFRVQPTESIVRFPNITNLCPFGEVFNATRFASVYAWNRKRISNCVADYSVLYNSASFSTFKCYGVSPTKLNDLCFTNVYADSFVIRGDEVRQIAPGQTGKIADYNYKLPDDFTGCVIAWNSNNLDSKVGGNYNYLYRLFRKSNLKPFERDISTEIYQAGSTPCNGVEGFNCYFPLQSYGFQPTNGVGYQPYRVVVLSFELLHAPATVCGPKKSTNLVKNKCVNFNFNGLTGTGVLTESNKKFLPFQQFGRDIADTTDAVRDPQTLEILDITPCSFGGVSVITPGTNTSNQVAVLYQDVNCTEVPVAIHADQLTPTWRVYSTGSNVFQTRAGCLIGAEHVNNSYECDIPIGAGICASYQTQTNSPRRARSVASQSIIAYTMSLGAENSVAYSNNSIAIPTNFTISVTTEILPVSMTKTSVDCTMYICGDSTECSNLLLQYGSFCTQLNRALTGIAVEQDKNTQEVFAQVKQIYKTPPIKDFGGFNFSQILPDPSKPSKRSFIEDLLFNKVTLADAGFIKQYGDCLGDIAARDLICAQKFNGLTVLPPLLTDEMIAQYTSALLAGTITSGWTFGAGAALQIPFAMQMAYRFNGIGVTQNVLYENQKLIANQFNSAIGKIQDSLSSTASALGKLQDVVNQNAQALNTLVKQLSSNFGAISSVLNDILSRLDKVEAEVQIDRLITGRLQSLQTYVTQQLIRAAEIRASANLAATKMSECVLGQSKRVDFCGKGYHLMSFPQSAPHGVVFLHVTYVPAQEKNFTTAPAICHDGKAHFPREGVFVSNGTHWFVTQRNFYEPQIITTDNTFVSGNCDVVIGIVNNTVYDPLQPELDS

SEQ ID NO: 2623 - protein, 1147 aa, Artificial Sequence
  SARS-CoV-2/Shenzhen/SZTH-001/2020__EPI_ISL_406592 spike protein (1-1147)
MFVFLVLLPLVSSQCVNLTTRTQLPPAYTNSFTRGVYYPDKVFRSSVLHSTQDLFLPFFSNVTWFHAIHVSGTNGTKRFDNPVLPFNDGVYFASTEKSNIIRGWIFGTTLDSKTQSLLIVNNATNVVIKVCEFQFCNDPFLGVYYHKNNKSWMESEFRVYSSANNCTFEYVSQPFLMDLEGKQGNFKNLREFVFKNIDGYFKIYSKHTPINLVRDLPQGFSALEPLVDLPIGINITRFQTLLALHRSYLTPGDSSSGWTAGAAAYYVGYLQPRTFLLKYNENGTITDAVDCALDPLSETKCTLKSFTVEKGIYQTSNFRVQPTESIVRFPNITNLCPFGEVFNATRFASVYAWNRKRISNCVADYSVLYNSASFSTFKCYGVSPTKLNDLCFTNVYADSFVIRGDEVRQIAPGQTGKIADYNYKLPDDFTGCVIAWNSNNLDSKVGGNYNYLYRLFRKSNLKPFERDISTEIYQAGSTPCNGVEGFNCYFPLQSYGFQPTNGVGYQPYRVVVLSFELLHAPATVCGPKKSTNLVKNKCVNFNFNGLTGTGVLTESNKKFLPFQQFGRDIADTTDAVRDPQTLEILDITPCSFGGVSVITPGTNTSNQVAVLYQDVNCTEVPVAIHADQLTPTWRVYSTGSNVFQTRAGCLIGAEHVNNSYECDIPIGAGICASYQTQTNSPRRARSVASQSIIAYTMSLGAENSVAYSNNSIAIPTNFTISVTTEILPVSMTKTSVDCTMYICGDSTECSNLLLQYGSFCTQLNRALTGIAVEQDKNTQEVFAQVKQIYKTPPIKDFGGFNFSQILPDPSKPSKRSFIEDLLFNKVTLADAGFIKQYGDCLGDIAARDLICAQKFNGLTVLPPLLTDEMIAQYTSALLAGTITSGWTFGAGAALQIPFAMQMAYRFNGIGVTQNVLYENQKLIANQFNSAIGKIQDSLSSTASALGKLQDVVNQNAQALNTLVKQLSSNFGAISSVLNDILSRLDKVEAEVQIDRLITGRLQSLQTYVTQQLIRAAEIRASANLAATKMSECVLGQSKRVDFCGKGYHLMSFPQSAPHGVVFLHVTYVPAQEKNFTTAPAICHDGKAHFPREGVFVSNGTHWFVTQRNFYEPQIITTDNTFVSGNCDVLIGIVNNTVYDPLQPELDS

SEQ ID NO: 2624 - protein, 1147 aa, Artificial Sequence
  SARS-CoV-2/Shenzhen/SZTH-004/2020__EPI_ISL_406595 spike protein (1-1147)
MFVFLVLLPLVSSQCVNLTTRTQLPPAYTNSFTRGVYYPDKVFRSSVLHSTQDLFLPFFSNVTWFHAIHVSGTNGTKRFDNPVLPFNDGVYFASTEKSNIIRGWIFGTTLDSKTQSLLIVNNATNVVIKVCEFQFCNDPFLGVYYHKNNKSWMESEFRVYSSANNCTFEYVSQPFLMDLEGKQGNFKNLREFVFKNIDGYFKIYSKHTPINLVRDLPQGFSALEPLVDLPIGINITRFQTLLALHRSYLTPGDSSSGWTAGAAAYYVGYLQPRTFLLKYNENGTITDAVDCALDPLSETKCTLKSFTVEKGIYQTSNFRVQPTESIVRFPNITNLCPFGEVFNATRFASVYAWDRKRISNCVAYYSVLYNSASFSTFKCYGVSPTKLNDLCFTNVYADSFVIRGDEVRQIAPGQTGKIADYNYKLPDDFTGCVIAWNSNNLDSKVGGNYNYLYRLFRKSNLKPFERDISTEIYQAGSTPCNGVEGFNCYFPLQSYGFQPTNGVGYQPYRVVVLSFELLHAPATVCGPKKSTNLVKNKCVNFNFNGLTGTGVLTESNKKFLPFQQFGRDIADTTDAVRDPQTLEILDITPCSFGGVSVITPGTNTSNQVAVLYQDVNCTEVPVAIHADQLTPTWRVYSTGSNVFQTRAGCLIGAEHVNNSYECDIPIGAGICASYQTQTNSPRRARSVASQSIIAYTMSLGAENSVAYSNNSIAIPTNFTISVTTEILPVSMTKTSVDCTMYICGDSTECSNLLLQYGSFCTQLNRALTGIAVEQDKNTQEVFAQVKQIYKTPPIKDFGGFNFSQILPDPSKPSKRSFIEDLLFNKVTLADAGFIKQYGDCLGDIAARDLICAQKFNGLTVLPPLLTDEMIAQYTSALLAGTITSGWTFGAGAALQIPFAMQMAYRFNGIGVTQNVLYENQKLIANQFNSAIGKIQDSLSSTASALGKLQDVVNQNAQALNTLVKQLSSNFGAISSVLNDILSRLDKVEAEVQIDRLITGRLQSLQTYVTQQLIRAAEIRASANLAATKMSECVLGQSKRVDFCGKGYHLMSFPQSAPHGVVFLHVTYVPAQEKNFTTAPAICHDGKAHFPREGVFVSNGTHWFVTQRNFYEPQIITTDNTFVSGNCDVVIGIVNNTVYDPLQPELDS

SEQ ID NO: 2625 - protein, 1147 aa, Artificial Sequence
  SARS-CoV-2/France/IDF0372/2020__EPI_ISL_406596 spike protein (1-1147)
MFVFLVLLPLVSSQCVNLTTRTQLPPAYTNSFTRGVYYPDKVFRSSVLHSTQDLFLPFFSNVTWFHAIHVSGTNGTKRFDNPVLPFNDGVYFASTEKSNIIRGWIFGTTLDSKTQSLLIVNNATNVVIKVCEFQFCNDPFLGVYYHKNNKSWMESEFRVYSSANNCTFEYVSQPFLMDLEGKQGNFKNLREFVFKNIDGYFKIYSKHTPINLVRDLPQGFSALEPLVDLPIGINITRFQTLLALHRSYLTPGDSSSGWTAGAAAYYVGYLQPRTFLLKYNENGTITDAVDCALDPLSETKCTLKSFTVEKGIYQTSNFRVQPTESIVRFPNITNLCPFGEVFNATRFASVYAWNRKRISNCVADYSFLYNSASFSTFKCYGVSPTKLNDLCFTNVYADSFVIRGDEVRQIAPGQTGKIADYNYKLPDDFTGCVIAWNSNNLDSKVGGNYNYLYRLFRKSNLKPFERDISTEIYQAGSTPCNGVEGFNCYFPLQSYGFQPTNGVGYQPYRVVVLSFELLHAPATVCGPKKSTNLVKNKCVNFNFNGLTGTGVLTESNKKFLPFQQFGRDIADTTDAVRDPQTLEILDITPCSFGGVSVITPGTNTSNQVAVLYQDVNCTEVPVAIHADQLTPTWRVYSTGSNVFQTRAGCLIGAEHVNNSYECDIPIGAGICASYQTQTNSPRRARSVASQSIIAYTMSLGAENSVAYSNNSIAIPTNFTISVTTEILPVSMTKTSVDCTMYICGDSTECSNLLLQYGSFCTQLNRALTGIAVEQDKNTQEVFAQVKQIYKTPPIKDFGGFNFSQILPDPSKPSKRSFIEDLLFNKVTLADAGFIKQYGDCLGDIAARDLICAQKFNGLTVLPPLLTDEMIAQYTSALLAGTITSGWTFGAGAALQIPFAMQMAYRFNGIGVTQNVLYENQKLIANQFNSAIGKIQDSLSSTASALGKLQDVVNQNAQALNTLVKQLSSNFGAISSVLNDILSRLDKVEAEVQIDRLITGRLQSLQTYVTQQLIRAAEIRASANLAATKMSECVLGQSKRVDFCGKGYHLMSFPQSAPHGVVFLHVTYVPAQEKNFTTAPAICHDGKAHFPREGVFVSNGTHWFVTQRNFYEPQIITTDNTFVSGNCDVVIGIVNNTVYDPLQPELDS

SEQ ID NO: 2626 - protein, 1147 aa, Artificial Sequence
  SARS-CoV-2/Australia/VIC01/2020__EPI_ISL_406844 spike protein (1-1147)
MFVFLVLLPLVSSQCVNLTTRTQLPPAYTNSFTRGVYYPDKVFRSSVLHSTQDLFLPFFSNVTWFHAIHVSGTNGTKRFDNPVLPFNDGVYFASTEKSNIIRGWIFGTTLDSKTQSLLIVNNATNVVIKVCEFQFCNDPFLGVYYHKNNKSWMESEFRVYSSANNCTFEYVSQPFLMDLEGKQGNFKNLREFVFKNIDGYFKIYSKHTPINLVRDLPQGFSALEPLVDLPIGINITRFQTLLALHRRYLTPGDSSSGWTAGAAAYYVGYLQPRTFLLKYNENGTITDAVDCALDPLSETKCTLKSFTVEKGIYQTSNFRVQPTESIVRFPNITNLCPFGEVFNATRFASVYAWNRKRISNCVADYSVLYNSASFSTFKCYGVSPTKLNDLCFTNVYADSFVIRGDEVRQIAPGQTGKIADYNYKLPDDFTGCVIAWNSNNLDSKVGGNYNYLYRLFRKSNLKPFERDISTEIYQAGSTPCNGVEGFNCYFPLQSYGFQPTNGVGYQPYRVVVLSFELLHAPATVCGPKKSTNLVKNKCVNFNFNGLTGTGVLTESNKKFLPFQQFGRDIADTTDAVRDPQTLEILDITPCSFGGVSVITPGTNTSNQVAVLYQDVNCTEVPVAIHADQLTPTWRVYSTGSNVFQTRAGCLIGAEHVNNSYECDIPIGAGICASYQTQTNSPRRARSVASQSIIAYTMSLGAENSVAYSNNSIAIPTNFTISVTTEILPVSMTKTSVDCTMYICGDSTECSNLLLQYGSFCTQLNRALTGIAVEQDKNTQEVFAQVKQIYKTPPIKDFGGFNFSQILPDPSKPSKRSFIEDLLFNKVTLADAGFIKQYGDCLGDIAARDLICAQKFNGLTVLPPLLTDEMIAQYTSALLAGTITSGWTFGAGAALQIPFAMQMAYRFNGIGVTQNVLYENQKLIANQFNSAIGKIQDSLSSTASALGKLQDVVNQNAQALNTLVKQLSSNFGAISSVLNDILSRLDKVEAEVQIDRLITGRLQSLQTYVTQQLIRAAEIRASANLAATKMSECVLGQSKRVDFCGKGYHLMSFPQSAPHGVVFLHVTYVPAQEKNFTTAPAICHDGKAHFPREGVFVSNGTHWFVTQRNFYEPQIITTDNTFVSGNCDVVIGIVNNTVYDPLQPELDS

SEQ ID NO: 2627 - protein, 1147 aa, Artificial Sequence
  SARS-CoV-2/Germany/BavPat1/2020__EPI_ISL_406862 spike protein (1-1147)
MFVFLVLLPLVSSQCVNLTTRTQLPPAYTNSFTRGVYYPDKVFRSSVLHSTQDLFLPFFSNVTWFHAIHVSGTNGTKRFDNPVLPFNDGVYFASTEKSNIIRGWIFGTTLDSKTQSLLIVNNATNVVIKVCEFQFCNDPFLGVYYHKNNKSWMESEFRVYSSANNCTFEYVSQPFLMDLEGKQGNFKNLREFVFKNIDGYFKIYSKHTPINLVRDLPQGFSALEPLVDLPIGINITRFQTLLALHRSYLTPGDSSSGWTAGAAAYYVGYLQPRTFLLKYNENGTITDAVDCALDPLSETKCTLKSFTVEKGIYQTSNFRVQPTESIVRFPNITNLCPFGEVFNATRFASVYAWNRKRISNCVADYSVLYNSASFSTFKCYGVSPTKLNDLCFTNVYADSFVIRGDEVRQIAPGQTGKIADYNYKLPDDFTGCVIAWNSNNLDSKVGGNYNYLYRLFRKSNLKPFERDISTEIYQAGSTPCNGVEGFNCYFPLQSYGFQPTNGVGYQPYRVVVLSFELLHAPATVCGPKKSTNLVKNKCVNFNFNGLTGTGVLTESNKKFLPFQQFGRDIADTTDAVRDPQTLEILDITPCSFGGVSVITPGTNTSNQVAVLYQGVNCTEVPVAIHADQLTPTWRVYSTGSNVFQTRAGCLIGAEHVNNSYECDIPIGAGICASYQTQTNSPRRARSVASQSIIAYTMSLGAENSVAYSNNSIAIPTNFTISVTTEILPVSMTKTSVDCTMYICGDSTECSNLLLQYGSFCTQLNRALTGIAVEQDKNTQEVFAQVKQIYKTPPIKDFGGFNFSQILPDPSKPSKRSFIEDLLFNKVTLADAGFIKQYGDCLGDIAARDLICAQKFNGLTVLPPLLTDEMIAQYTSALLAGTITSGWTFGAGAALQIPFAMQMAYRFNGIGVTQNVLYENQKLIANQFNSAIGKIQDSLSSTASALGKLQDVVNQNAQALNTLVKQLSSNFGAISSVLNDILSRLDKVEAEVQIDRLITGRLQSLQTYVTQQLIRAAEIRASANLAATKMSECVLGQSKRVDFCGKGYHLMSFPQSAPHGVVFLHVTYVPAQEKNFTTAPAICHDGKAHFPREGVFVSNGTHWFVTQRNFYEPQIITTDNTFVSGNCDVVIGIVNNTVYDPLQPELDS

SEQ ID NO: 2628 - protein, 1147 aa, Artificial Sequence
  SARS-CoV-2/Wuhan/HBCDC-HB-02/2020__EPI_ISL_412978 spike protein (1-1147)
MFVFLVLLPLVSSQCVNLTTRTQLPPAYTNSFTRGVYYPDKVFRSSVLHSTQDLFLPFFSNVTWFHAIHVSGTNGTKRFDNPVLPFNDGVYFASTEKSNIIRGWIFGTTLDSKTQSLLIVNNATNVVIKVCEFQFCNDPFLGVYYHKNNKSWMESEFRVYSSANNCTFEYVSQPFLMDLEGKQGNFKNLREFVFKNIDGYFKIYSKHTPINLVRDLPQGFSALEPLVDLPIGINITRFQTLLALHRSYLTPGDSSSGWTAGAAAYYVGYLQPRTFLLKYNENGTITDAVDCALDPLSETKCTLKSFTVEKGIYQTSNFRVQPTESIVRFPNITNLCPFGEVFNATRFASVYAWNRKRISNCVADYSVLYNSASFSTFKCYGVSPTKLNDLCFTNVYADSFVIRGDEVRQIAPGQTGKIADYNYKLPDDFTGCVIAWNSNNLDSKVGGNYNYLYRLFRKSNLKPFERDISTEIYQAGSTPCNGVEGFNCYFPLQSYGFQPTNGVGYQPYRVVVLSFELLHAPATVCGPKKSTNLVKNKCVNFNFNGLTGTGVLTESNKKFLPFQQFGRDIADTTDAVRDPQTLEILDITPCSFGGVSVITPGTNTSNQVAVLYQDVNCTEVPVAIHADQLTPTWRVYSTGSNVFQTRAGCLIGAEHVNNSYECDIPIGAGICASYQTQTNSPRRARSVASQSIIAYTMSLGAENSVAYSNNSIAIPTNFTISVTTEILPVSMTKTSVDCTMYICGDSTECSNFLLQYGSFCTQLNRALTGIAVEQDKNTQEVFAQVKQIYKTPPIKDFGGFNFSQILPDPSKPSKRSFIEDLLFNKVTLADAGFIKQYGDCLGDIAARDLICAQKFNGLTVLPPLLTDEMIAQYTSALLAGTITSGWTFGAGAALQIPFAMQMAYRFNGIGVTQNVLYENQKLIANQFNSAIGKIQDSLSSTASALGKLQDVVNQNAQALNTLVKQLSSNFGAISSVLNDILSRLDKVEAEVQIDRLITGRLQSLQTYVTQQLIRAAEIRASANLAATKMSECVLGQSKRVDFCGKGYHLMSFPQSAPHGVVFLHVTYVPAQEKNFTTAPAICHDGKAHFPREGVFVSNGTHWFVTQRNFYEPQIITTDNTFVSGNCDVVIGIVNNTVYDPLQPELDS

SEQ ID NO: 2629 - protein, 1147 aa, Artificial Sequence
  SARS-CoV-2/Australia/QLD02/2020__EPI_ISL_407896 spike protein (1-1147)
MFVFLVLLPLVSSQCVNLTTRTQLPPAYTNSFTRGVYYPDKVFRSSVLHSTQDLFLPFFSNVTWFHAIHVSGTNGTKRFDNPVLPFNDGVYFASTEKSNIIRGWIFGTTLDSKTQSLLIVNNATNVVIKVCEFQFCNDPFLGVYYHKNNKSWMESEFRVYSSANNCTFEYVSQPFLMDLEGKQGNFKNLREFVFKNIDGYFKIYSKHTPINLVRDLPQGFSALEPLVDLPIGINITRFQTLLALHRSYLTPGDSSSGWTAGAAAYYVGYLQPRTFLLKYNENGTITDAVDCALDPLSETKCTLKSFTVEKGIYQTSNFRVQPTESIVRFPNITNLCPFGEVFNATRFASVYAWNRKRISNCVADYSVLYNSASFSTFKCYGVSPTKLNDLCFTNVYADSFVIRGDEVRQIAPGQTGKIADYNYKLPDDFTGCVIAWNSNNLDSKVGGNYNYLYRLFRKSNLKPFERDISTEIYQAGSTPCNGVEGFNCYFPLQSYGFQPTNGVGYQPYRVVVLSFELLHAPATVCGPKKSTNLVKNKCVNFNFNGLTGTGVLTESNKKFLPFQQFGRDIADTTDAVRDPQTLEILDITPCSFGGVSVITPGTNTSNQVAVLYQDVNCTEVPVAIHADQLTPTWRVYSTGSNVFQTRAGCLIGAEHVNNSYECDIPIGAGICASYQTQTNSPRRARSVASQSIIAYTMSLGAENSVAYSNNSIAIPTNFTISVTTEILPVSMTKTSVDCTMYICGDSTECSNLLLQYGSFCTQLNRALTGIAVEQDKNTQEVFAQVKQIYKTPPIKDFGGFNFSQILPDPSKPSKRSFIEDLLFNKVTLADAGFIKQYGDCLGDIAARDLICAQKFNGLTVLPPLLTDEMIAQYTSALLAGTITSGWTFGAGAALQIPFAMQMAYRFNGIGVTQNVLYENQKLIANQFNSAIGKIQDSLSSTASALGKLQDVVNQNAQALNTLVKQLSSNFGAISSVLNDILSRLDKVEAEVQIDRLITGRLQSLQTYVTQQLIRAAEIRASANLAATKMSECVLGQSKRVDFCGKGYHLMSFPQSAPHGVVFLHVTYVPAQEKNFTTAPAICHDGKAHFPREGVFVSNGTHWFVTQRNFYEPQIITTDNTFVSGNCDVVIGIVNNTVYDPLQLELDS

SEQ ID NO: 2630 - protein, 1147 aa, Artificial Sequence
  SARS-CoV-2/India/1-31/2020__EPI_ISL_413523 spike protein (1-1147)
MFVFLVLLPLVSSQCVNLTTRTQLPPAYTNSFTRGVYYPDKVFRSSVLHSTQDLFLPFFSNVTWFHAIHVSGTNGTKRFDNPVLPFNDGVYFASTEKSNIIRGWIFGTTLDSKTQSLLIVNNATNVVIKVCEFQFCNDPFLGVYYHKNNKSWMESEFRVYSSANNCTFEYVSQPFLMDLEGKQGNFKNLREFVFKNIDGYFKIYSKHTPINLVRDLPQGFSALEPLVDLPIGINITRFQTLLALHRSYLTPGDSSSGWTAGAAAYYVGYLQPRTFLLKYNENGTITDAVDCALDPLSETKCTLKSFTVEKGIYQTSNFRVQPTESIVRFPNITNLCPFGEVFNATRFASVYAWNRKRISNCVADYSVLYNSASFSTFKCYGVSPTKLNDLCFTNVYADSFVIRGDEVRQIAPGQTGKIADYNYKLPDDFTGCVIAWNSNNLDSKVGGNYNYLYRLFRKSNLKPFERDISTEIYQAGSTPCNGVEGFNCYFPLQSYGFQPTNGVGYQPYRVVVLSFELLHAPATVCGPKKSTNLVKNKCVNFNFNGLTGTGVLTESNKKFLPFQQFGRDIADTTDAVRDPQTLEILDITPCSFGGVSVITPGTNTSNQVAVLYQDVNCTEVPVAIHADQLTPTWRVYSTGSNVFQTRAGCLIGAEHVNNSYECDIPIGAGICASYQTQTNSPRRARSVASQSIIAYTMSLGAENSVAYSNNSIAIPTNFTISVTTEILPVSMTKTSVDCTMYICGDSTECSNLLLQYGSFCTQLNRALTGIAVEQDKNTQEVFAQVKQIYKTPPIKDFGGFNFSQILPDPSKPSKRSFIEDLLFNKVTLADAGFIKQYGDCLGDIAARDLICAQKFNGLTVLPPLLTDEMIAQYTSALLAGTITSGWTFGAGAALQIPFAMQMAYRFNGIGVTQNVLYENQKLIANQFNSVIGKIQDSLSSTASALGKLQDVVNQNAQALNTLVKQLSSNFGAISSVLNDILSRLDKVEAEVQIDRLITGRLQSLQTYVTQQLIRAAEIRASANLAATKMSECVLGQSKRVDFCGKGYHLMSFPQSAPHGVVFLHVTYVPAQEKNFTTAPAICHDGKAHFPREGVFVSNGTHWFVTQRNFYEPQIITTDNTFVSGNCDVVIGIVNNTVYDPLQPELDS

SEQ ID NO: 2631 - protein, 1147 aa, Artificial Sequence
  SARS-CoV-2/Guangdong/GD2020087-P0008/2020__EPI_ISL_413863 spike protein (1-1147)
MFVFLVLLPLVSSQCVNLTTRTQLPPAYTNSFTRGVYYPDKVFRSSVLHSTQDLFLPFFSNVTWFHAIHVSGTNGTKRFDNPVLPFNDGVYFASTEKSNIIRGWIFGTTLDSKTQSLLIVNNATNVVIKVCEFQFCNDPFLGVYYHKNNKSWMESEFRVYSSANNCTFEYVSQPFLMDLEGKQGNFKNLREFVFKNIDGYFKIYSKHTPINLVRDLPQGFSALEPLVDLPIGINITRFQTLLALHRSYLTPGDSSSGWTAGAAAYYVGYLQPRTFLLKYNENGTITDAVDCALDPLSETKCTLKSFTVEKGIYQTSNFRVQPTESIVRFPNITNLCPFGEVFNATRFASVYAWNRKRISNCVADYSVLYNSASFSTFKCYGVSPTKLNDLCFTNVYADSFVIRGDEVREIAPGQTGKIADYNYKLPDDFTGCVIAWNSNNLDSKVGGNYNYLYRLFRKSNLKPFERDISTEIYQAGSTPCNGVEGFNCYFPLQSYGFQPTNGVGYQPYRVVVLSFELLHAPATVCGPKKSTNLVKNKCVNFNFNGLTGTGVLTESNKKFLPFQQFGRDIADTTDAVRDPQTLEILDITPCSFGGVSVITPGTNTSNQVAVLYQDVNCTEVPVAIHADQLTPTWRVYSTGSNVFQTRAGCLIGAEHVNNSYECDIPIGAGICASYQTQTNSPRRARSVASQSIIAYTMSLGAENSVAYSNNSIAIPTNFTISVTTEILPVSMTKTSVDCTMYICGDSTECSNLLLQYGSFCTQLNRALTGIAVEQDKNTQEVFAQVKQIYKTPPIKDFGGFNFSQILPDPSKPSKRSFIEDLLFNKVTLADAGFIKQYGDCLGDIAARDLICAQKFNGLTVLPPLLTDEMIAQYTSALLAGTITSGWTFGAGAALQIPFAMQMAYRFNGIGVTQNVLYENQKLIANQFNSAIGKIQDSLSSTASALGKLQDVVNQNAQALNTLVKQLSSNFGAISSVLNDILSRLDKVEAEVQIDRLITGRLQSLQTYVTQQLIRAAEIRASANLAATKMSECVLGQSKRVDFCGKGYHLMSFPQSAPHGVVFLHVTYVPAQEKNFTTAPAICHDGKAHFPREGVFVSNGTHWFVTQRNFYEPQIITTDNTFVSGNCDVVIGIVNNTVYDPLQPELDS

SEQ ID NO: 2632 - protein, 1147 aa, Artificial Sequence
  SARS-CoV-2/Sweden/01/2020__EPI_ISL_411951 spike protein (1-1147)
MFVFLVLLPLVSSQCVNLTTRTQLPPAYTNSFTRGVYYPDKVFRSSVLHSTQDLFLPFFSNVTWFHAIHVSGTNGTKRFDNPVLPFNDGVYFASTEKSNIIRGWIFGTTLDSKTQSLLIVNNATNVVIKVCEFQFCNDPFLGVYYHKNNKSWMESEFRVYSSANNCTFEYVSQPFLMDLEGKQGNFKNLREFVFKNIDGYFKIYSKHTPINLVRDLPQGFSALEPLVDLPIGINITRFQTLLALHRSYLTPGDSSSGWTAGAAAYYVGYLQPRTFLLKYNENGTITDAVDCALDPLSETKCTLKSFTVEKGIYQTSNFRVQPTESIVRFPNITNLCPFGEVFNATRFASVYAWNRKRISNCVADYSVLYNSASFSTFKCYGVSPTKLNDLCFTNVYADSFVIRGDEVRQIAPGQTGKIADYNYKLPDDFTGCVIAWNSNNLDSKVGGNYNYLYRLFRKSNLKPFERDISTEIYQAGSTPCNGVEGFNCYFPLQSYGFQPTNGVGYQPYRVVVLSFELLHAPATVCGPKKSTNLVKNKCVNFNFNGLTGTGVLTESNKKFLPFQQFGRDIADTTDAVRDPQTLEILDITPCSFGGVSVITPGTNTSNQVAVLYQDVNCTEVPVAIHADQLTPTWRVYSTGSNVFQTRAGCLIGAEHVNNSYECDIPIGAGICASYQTQTNSPRRARSVASQSIIAYTMSLGAENSVAYSNNSIAIPTNFTISVTTEILPVSMTKTSVDCTMYICGDSTECSNLLLQYGSFCTQLNRALTGIAVEQDKNTQEVFAQVKQIYKTPPIKDCGGFNFSQILPDPSKPSKRSFIEDLLFNKVTLADAGFIKQYGDCLGDIAARDLICAQKFNGLTVLPPLLTDEMIAQYTSALLAGTITSGWTFGAGAALQIPFAMQMAYRFNGIGVTQNVLYENQKLIANQFNSAIGKIQDSLSSTASALGKLQDVVNQNAQALNTLVKQLSSNFGAISSVLNDILSRLDKVEAEVQIDRLITGRLQSLQTYVTQQLIRAAEIRASANLAATKMSECVLGQSKRVDFCGKGYHLMSFPQSAPHGVVFLHVTYVPAQEKNFTTAPAICHDGKAHFPREGVFVSNGTHWFVTQRNFYEPQIITTDNTFVSGNCDVVIGIVNNTVYDPLQPELDS

SEQ ID NO: 2633 - protein, 1147 aa, Artificial Sequence
  SARS-CoV-2/Tianmen/HBCDC-HB-07/2020__EPI_ISL_412983 spike protein (1-1147)
MFVFLVLLPLVSSQCVNLTTRTQLPPAYTNSFTRGVYYPDKVFRSSVLHSTQDLFLPFFSNVTWFHAIHVSGTNGTKRFDNPVLPFNDGVYFASTEKSNIIRGWIFGTTLDSKTQSLLIVNNATNVVIKVCEFQFCNDPFLGVYYHKNNKSWMESEFRVYSSANNCTFEYVSQPFLMDLEGKQGNFKNLREFVFKNIDGYFKIYSKHTPINLVRDLPQGFSALEPLVDLPIGINITRFQTLLALHRSYLTPGDSSSGWTAGAAAYYVGYLQPRTFLLKYNENGTITDAVDCALDPLSETKCTLKSFTVEKGIYQTSNFRVQPTESIVRFPNITNLCPFGEVFNATRFASVYAWNRKRISNCVADYSVLYNSASFSTFKCYGVSPTKLNDLCFTNVYADSFVIRGDEVRQIAPGQTGKIADYNYKLPDDFTGCVIAWNSNNLDSKVGGNYNYLYRLFRKSNLKPFERDISTEIYQAGSTPCNGVEGFNCYFPLQSYGFQPTNGVGYQPYRVVVLSFELLHAPATVCGPKKSTNLVKNKCVNFNFNGLTGTGVLTESNKKFLPFQQFGRDIADTTDAVRDPQTLEILDITPCSFGGVSVITPGTNTSNQVAVLYQDLNCTEVPVAIHADQLTPTWRVYSTGSNVFQTRAGCLIGAEHVNNSYECDIPIGAGICASYQTQTNSPRRARSVASQSIIAYTMSLGAENSVAYSNNSIAIPTNFTISVTTEILPVSMTKTSVDCTMYICGDSTECSNLLLQYGSFCTQLNRALTGIAVEQDKNTQEVFAQVKQIYKTPPIKDFGGFNFSQILPDPSKPSKRSFIEDLLFNKVTLADAGFIKQYGDCLGDIAARDLICAQKFNGLTVLPPLLTDEMIAQYTSALLAGTITSGWTFGAGAALQIPFAMQMAYRFNGIGVTQNVLYENQKLIANQFNSAIGKIQDSLSSTASALGKLQDVVNQNAQALNTLVKQLSSNFGAISSVLNDILSRLDKVEAEVQIDRLITGRLQSLQTYVTQQLIRAAEIRASANLAATKMSECVLGQSKRVDFCGKGYHLMSFPQSAPHGVVFLHVTYVPAQEKNFTTAPAICHDGKAHFPREGVFVSNGTHWFVTQRNFYEPQIITTDNTFVSGNCDVVIGIVNNTVYDPLQPELDS

SEQ ID NO: 2634 - protein, 1147 aa, Artificial Sequence
  SARS-CoV-2/Hong Kong/case42_VM20002493/2020__EPI_ISL_414527 spike protein (1-1147)
MFVFLVLLPLVSSQCVNLTTRTQLPPAYTNSFTRGVYYPDKVFRSSVLHSTQDLFLPFFSNVTWFHAIHVSGTNGTKRFDNPVLPFNDGVYFASTEKSNIIRGWIFGTTLDSKTQSLLIVNNATNVVIKVCEFQFCNDPFLGVYYHKNNKSWMESEFRVYSSANNCTFEYVSQPFLMDLEGKQGNFKNLREFVFKNIDGYFKIYSKHTPINLVRDLPQGFSALEPLVDLPIGINITRFQTLLALHRSYLTPGDSSSGWTAGAAAYYVGYLQPRTFLLKYNENGTITDAVDCALDPLSETKCTLKSFTVEKGIYQTSNFRVQPTESIVRFPNITNLCPFGEVFNATRFASVYAWNRKRISNCVADYSVLYNSASFSTFKCYGVSPTKLNDLCFTNVYADSFVIRGDEVRQIAPGQTGKIADYNYKLPDDFTGCVIAWNSNNLDSKVGGNYNYLYRLFRKSNLKPFERDISTEIYQAGSTPCNGVEGFNCYFPLQSYGFQPTNGVGYQPYRVVVLSFELLHAPATVCGPKKSTNLVKNKCVNFNFNGLTGTGVLTESNKKFLPFQQFGRDIADTTDAVRDPQTLEILDITPCSFGGVSVITPGTNTSNQVAVLYQDVNCTEVPVAIHADQLTPTWRVYSTGSNVFQTRAGCLIGAEHVNNSYECDIPIGAGICASYQTQTNSPRRARSVASQSIIAYTMSLGAENSVAYSNNSIAIPTNFAISVTTEILPVSMTKTSVDCTMYICGDSTECSNLLLQYGSFCTQLNRALTGIAVEQDKNTQEVFAQVKQIYKTPPIKDFGGFNFSQILPDPSKPSKRSFIEDLLFNKVTLADAGFIKQYGDCLGDIAARDLICAQKFNGLTVLPPLLTDEMIAQYTSALLAGTITSGWTFGAGAALQIPFAMQMAYRFNGIGVTQNVLYENQKLIANQFNSAIGKIQDSLSSTASALGKLQDVVNQNAQALNTLVKQLSSNFGAISSVLNDILSRLDKVEAEVQIDRLITGRLQSLQTYVTQQLIRAAEIRASANLAATKMSECVLGQSKRVDFCGKGYHLMSFPQSAPHGVVFLHVTYVPAQEKNFTTAPAICHDGKAHFPREGVFVSNGTHWFVTQRNFYEPQIITTDNTFVSGNCDVVIGIVNNTVYDPLQPELDS

SEQ ID NO: 2635 - protein, 1147 aa, Artificial Sequence
  SARS-CoV-2/USA/CruiseA-23/2020__EPI_ISL_414482 spike protein (1-1147)
MFVFLVLLPLVSSQCVNLTTRTQLPPAYTNSFTRGVYYPDKVFRSSVLHSTQDLFLPFFSNVTWFHAIHVSGTNGTKRFDNPVLPFNDGVYFASTEKSNIIRGWIFGTTLDSKTQSLLIVNNATNVVIKVCEFQFCNDPFLGVYYHKNNKSWMESEFRVYSSANNCTFEYVSQPFLMDLEVKQGNFKNLREFVFKNIDGYFKIYSKHTPINLVRDLPQGFSALEPLVDLPIGINITRFQTLLALHRSYLTPGDSSSGWTAGAAAYYVGYLQPRTFLLKYNENGTITDAVDCALDPLSETKCTLKSFTVEKGIYQTSNFRVQPTESIVRFPNITNLCPFGEVFNATRFASVYAWNRKRISNCVADYSVLYNSASFSTFKCYGVSPTKLNDLCFTNVYADSFVIRGDEVRQIAPGQTGKIADYNYKLPDDFTGCVIAWNSNNLDSKVGGNYNYLYRLFRKSNLKPFERDISTEIYQAGSTPCNGVEGFNCYFPLQSYGFQPTNGVGYQPYRVVVLSFELLHAPATVCGPKKSTNLVKNKCVNFNFNGLTGTGVLTESNKKFLPFQQFGRDIADTTDAVRDPQTLEILDITPCSFGGVSVITPGTNTSNQVAVLYQDVNCTEVPVAIHADQLTPTWRVYSTGSNVFQTRAGCLIGAEHVNNSYECDIPIGAGICASYQTQTNSPRRARSVASQSIIAYTMSLGAENSVAYSNNSIAIPTNFTISVTTEILPVSMTKTSVDCTMYICGDSTECSNLLLQYGSFCTQLNRALTGIAVEQDKNTQEVFAQVKQIYKTPPIKDFGGFNFSQILPDPSKPSKRSFIEDLLFNKVTLADAGFIKQYGDCLGDIAARDLICAQKFNGLTVLPPLLTDEMIAQYTSALLAGTITSGWTFGAGAALQIPFAMQMAYRFNGIGVTQNVLYENQKLIANQFNSAIGKIQDSLSSTASALGKLQDVVNQNAQALNTLVKQLSSNFGAISSVLNDILSRLDKVEAEVQIDRLITGRLQSLQTYVTQQLIRAAEIRASANLAATKMSECVLGQSKRVDFCGKGYHLMSFPQSAPHGVVFLHVTYVPAQEKNFTTAPAICHDGKAHFPREGVFVSNGTHWFVTQRNFYEPQIITTDNTFVSGNCDVVIGIVNNTVYDPLQPELDS

SEQ ID NO: 2636 - protein, 1147 aa, Artificial Sequence
  SARS-CoV-2/Hong Kong/case85_VM20002868/2020__EPI_ISL_414519 spike protein (1-1147)
MFVFLVLVPLVSSQCVNLTTRTQLPPAYTNSFTRGVYYPDKVFRSSVLHSTQDLFLPFFSNVTWFHAIHVSGTNGTKRFDNPVLPFNDGVYFASTEKSNIIRGWIFGTTLDSKTQSLLIVNNATNVVIKVCEFQFCNDPFLGVYYHKNNKSWMESEFRVYSSANNCTFEYVSQPFLMDLEGKQGNFKNLREFVFKNIDGYFKIYSKHTPINLVRDLPQGFSALEPLVDLPIGINITRFQTLLALHRSYLTPGDSSSGWTAGAAAYYVGYLQPRTFLLKYNENGTITDAVDCALDPLSETKCTLKSFTVEKGIYQTSNFRVQPTESIVRFPNITNLCPFGEVFNATRFASVYAWNRKRISNCVADYSVLYNSASFSTFKCYGVSPTKLNDLCFTNVYADSFVIRGDEVRQIAPGQTGKIADYNYKLPDDFTGCVIAWNSNNLDSKVGGNYNYLYRLFRKSNLKPFERDISTEIYQAGSTPCNGVEGFNCYFPLQSYGFQPTNGVGYQPYRVVVLSFELLHAPATVCGPKKSTNLVKNKCVNFNFNGLTGTGVLTESNKKFLPFQQFGRDIADTTDAVRDPQTLEILDITPCSFGGVSVITPGTNTSNQVAVLYQDVNCTEVPVAIHADQLTPTWRVYSTGSNVFQTRAGCLIGAEHVNNSYECDIPIGAGICASYQTQTNSPRRARSVASQSIIAYTMSLGAENSVAYSNNSIAIPTNFTISVTTEILPVSMTKTSVDCTMYICGDSTECSNLLLQYGSFCTQLNRALTGIAVEQDKNTQEVFAQVKQIYKTPPIKDFGGFNFSQILPDPSKPSKRSFIEDLLFNKVTLADAGFIKQYGDCLGDIAARDLICAQKFNGLTVLPPLLTDEMIAQYTSALLAGTITSGWTFGAGAALQIPFAMQMAYRFNGIGVTQNVLYENQKLIANQFNSAIGKIQDSLSSTASALGKLQDVVNQNAQALNTLVKQLSSNFGAISSVLNDILSRLDKVEAEVQIDRLITGRLQSLQTYVTQQLIRAAEIRASANLAATKMSECVLGQSKRVDFCGKGYHLMSFPQSAPHGVVFLHVTYVPAQEKNFTTAPAICHDGKAHFPREGVFVSNGTHWFVTQRNFYEPQIITTDNTFVSGNCDVVIGIVNNTVYDPLQPELDS

SEQ ID NO: 2637 - protein, 1147 aa, Artificial Sequence; identical to SEQ ID NO: 2627
  SARS-CoV-2/England/200990660/2020__EPI_ISL_414523 spike protein (1-1147)

SEQ ID NO: 2638 - protein, 1147 aa, Artificial Sequence
  SARS-CoV-2/Australia/NSW09/2020__EPI_ISL_413595 spike protein (1-1147)
MFVFLVLLPLVSSQCVNLTTRTQLPPAYTNSFTRGVYYPDKVFRSSVLHSTQDLFLPFFSNVTWFHAIHVSGTNGTKRFDNPVLPFNDGVYFASTEKSNIIRGWIFGTTLDSKTQSLLIVNNATNVVIKVCEFQFCNDPFLGVYYHKNNKSWMESEFRVYSSANNCTFEYVSQPFLMDLEGKQGNFKNLREFVFKNIDGYFKIYSKHTPINLVRDLPQGFSALEPLVDLPIGINITRFQTLLALHRSYLTPGDSSSGWTAGAAAYYVGYLQPRTFLLKYNENGTITDAVDCALDPLSETKCTLKSFTVEKGIYQTSNFRVQPTESIVRFPNITNLCPFGEVFNATRFASVYAWNRKRISNCVADYSVLYNSASFSTFKCYGVSPTKLNDLCFTNVYADSFVIRGDEVRQIAPGQTGKIADYNYKLPDDFTGCVIAWNSNNLDSKVGGNYNYLYRLFRKSNLKPFERDISTEIYQAGSTPCNGVEGFNCYFPLQSYGFQPTNGVGYQPYRVVVLSFELLHAPATVCGPKKSTNLVKNKCVNFNFNGLTGTGVLTESNKKFLPFQQFGRDIADTTDAVRDPQTLEILDITPCSFGGVSVITPGTNTSNQVAVLYQDVNCTEVPVAIHADQLTPTWRVYSTGSNVFQTRAGCLIGAEHVNNSYECDIPIGAGICASYQTQTNSPRRARSVASQSIIAYTMSLGAENSVAYSNNSIAIPTNFTISVTTEILPVSMTKTSVDCTMYICGDSTECSNLLLQYGSFCTQLNRALTGIAVEQDKNTQEVFAQVKQIYKTPPIKDFGGFNFSQILPDPSKPSKRSFIEDLLFNKVTLADAGFIKQYGDCLGDIAARDLICAQKFNGLTVLPPLLTDEMIAQYTSALLAGTITSGWTFGAGAALQIPFAMQMAYRFNGIGVTQNVLYENQKLIANQFNSAIGKIQDSLSFTASALGKLQDVVNQNAQALNTLVKQLSSNFGAISSVLNDILSRLDKVEAEVQIDRLITGRLQSLQTYVTQQLIRAAEIRASANLAATKMSECVLGQSKRVDFCGKGYHLMSFPQSAPHGVVFLHVTYVPAQEKNFTTAPAICHDGKAHFPREGVFVSNGTHWFVTQRNFYEPQIITTDNTFVSGNCDVVIGIVNNTVYDPLQPELDS

SEQ ID NO: 2639 - protein, 1147 aa, Artificial Sequence; identical to SEQ ID NO: 2619
  SARS-CoV-2/Australia/NSW10/2020__EPI_ISL_413596 spike protein (1-1147)

SEQ ID NO: 2640 - protein, 1147 aa, Artificial Sequence
  SARS-CoV-2/Switzerland/1000477797/2020__EPI_ISL_413023 spike protein (1-1147)
MFVFLVLLPLVSSQCVNLTTRTQLPPAYTNSFTRGVYYPDKVFRSSVLHSTQDLFLPFFSNVTWFHAIHVSGTNGTKRFDNPVLPFNDGVYFASTEKSNIIRGWIFGTTLDSKTQSLLIVNNATNVVIKVCEFQFCNDPFLGVYYHKNNKSWMESEFRVYSSANNCTFEYVSQPFLMDLEGKQGNFKNLREFVFKNIDGYFNIYSKHTPINLVRDLPQGFSALEPLVDLPIGINITRFQTLLALHRSYLTPGDSSSGWTAGAAAYYVGYLQPRTFLLKYNENGTITDAVDCALDPLSETKCTLKSFTVEKGIYQTSNFRVQPTESIVRFPNITNLCPFGEVFNATRFASVYAWNRKRISNCVADYSVLYNSASFSTFKCYGVSPTKLNDLCFTNVYADSFVIRGDEVRQIAPGQTGKIADYNYKLPDDFTGCVIAWNSNNLDSKVGGNYNYLYRLFRKSNLKPFERDISTEIYQAGSTPCNGVEGFNCYFPLQSYGFQPTNGVGYQPYRVVVLSFELLHAPATVCGPKKSTNLVKNKCVNFNFNGLTGTGVLTESNKKFLPFQQFGRDIADTTDAVRDPQTLEILDITPCSFGGVSVITPGTNTSNQVAVLYQGVNCTEVPVAIHADQLTPTWRVYSTGSNVFQTRAGCLIGAEHVNNSYECDIPIGAGICASYQTQTNSPRRARSVASQSIIAYTMSLGAENSVAYSNNSIAIPTNFTISVTTEILPVSMTKTSVDCTMYICGDSTECSNLLLQYGSFCTQLNRALTGIAVEQDKNTQEVFAQVKQIYKTPPIKDFGGFNFSQILPDPSKPSKRSFIEDLLFNKVTLADAGFIKQYGDCLGDIAARDLICAQKFNGLTVLPPLLTDEMIAQYTSALLAGTITSGWTFGAGAALQIPFAMQMAYRFNGIGVTQNVLYENQKLIANQFNSAIGKIQDSLSSTASALGKLQDVVNQNAQALNTLVKQLSSNFGAISSVLNDILSRLDKVEAEVQIDRLITGRLQSLQTYVTQQLIRAAEIRASANLAATKMSECVLGQSKRVDFCGKGYHLMSFPQSAPHGVVFLHVTYVPAQEKNFTTAPAICHDGKAHFPREGVFVSNGTHWFVTQRNFYEPQIITTDNTFVSGNCDVVIGIVNNTVYDPLQPELDS

SEQ ID NO: 2641 - protein, 1147 aa, Artificial Sequence
  SARS-CoV-2/Belgium/BA-02291/2020__EPI_ISL_415159 spike protein (1-1147)
MFVFLVLLPLVSSQCVNLTTRTQLPPAYTNSFTRGVYYPDKVFRSSVLHSTQDLFLPFFSNVTWFHAIHVSGTNGTKRFDNPVLPFNDGVYFASTEKSNIIRGWIFGTTLDSKTQSLLIVNNATNVVIKVCEFQFCNDPFLGVYYHKNNKSWMESEFRVYSSANNCTFEYVSQPFLMDLEGKQGNFKNLREFVFKNIDGYFKIYSKHTPINLVRDLPQGFSALEPLVDLPIGINITRFQTLLALHRSYLTPGDSSSGWTAGAAAYYVGYLQPRTFLLKYNENGTITDAVDCALDPLSETKCTLKSFTVEKGIYQTSNFRVQPTESIVRFPNITNLCPFGEVFNATRFASVYAWNRKRISNCVADYSVLYNSASFSTFKCYGVSPTKLNDLCFTNVYADSFVIRGDEVRQIAPGQTGKIADYNYKLPDDFTGCVIAWNSNNLDSKVGGNYNYLYRLFRRSNLKPFERDISTEIYQAGSTPCNGVEGFNCYFPLQSYGFQPTNGVGYQPYRVVVLSFELLPAPATVCGPKKSTNLVKNKCVNFNFNGLTGTGVLTESNKKFLPFQQFGRDIADTTDAVRDPQTLEILDITPCSFGGVSVITPGTNTSNQVAVLYQGVNCTEVPVAIHADQLTPTWRVYSTGSNVFQTRAGCLIGAEHVNNSYECDIPIGAGICASYQTQTNSPRRARSVASQSIIAYTMSLGAENSVAYSNNSIAIPTNFTISVTTEILPVSMTKTSVDCTMYICGDSTECSNLLLQYGSFCTQLNRALTGIAVEQDKNTQEVFAQVKQIYKTPPIKDFGGFNFSQILPDPSKPSKRSFIEDLLFNKVTLADAGFIKQYGDCLGDIAARDLICAQKFNGLTVLPPLLTDEMIAQYTSALLAGTITSGWTFGAGAALQIPFAMQMAYRFNGIGVTQNVLYENQKLIANQFNSAIGKIQDSLSSAAPALGKLQDVVNQNAQALNTLVKQLSSNFGAISSVLNDILSRLDKVEAEVQIDRLITGRLQSLQTYVTQQLIRAAEIRASANLAATKMSECVLGQSKRVDFCGKGYHLMSFPQSAPHGVVFLHVTYVPAQEKNFTTAPAICHDGKAHFPREGVFVSNGTHWFVTQRNFYEPQIITTDNTFVSGNCDVVIGIVNNTVYDPLQPELDS

SEQ ID NO: 2642 - protein, 1147 aa, Artificial Sequence
  SARS-CoV-2/USA/WA8-UW5/2020__EPI_ISL_413486 spike protein (1-1147)
MFVFLVLLPLVSSQCVNLTTRTQLPPAYTNSFTRGVYYPDKVFRSSVLHSTQDLFLPFFSNVTWFHAIHVSGTNGTKRFDNPVLPFNDGVYFASTEKSNIIRGWIFGTTLDSKTQSLLIVNNATNVVIKVCEFQFCNDPFLGVYYHKNNKSWMESEFRVYSSANNCTFEYVSQPFLMDLEGKQGNFKNLREFVFKNIDGYFKIYSKHTPINLVRDLPQGFSALEPLVDLPIGINITRFQTLLALHRSYLTPGDSSSGWTAGAAAYYVGYLQPRTFLLKYNENGTITDAVDCALDPLSETKCTLKSFTVEKGIYQTSNFRVQPTESIVRFPNITNLCPFGEVFNATRFASVYAWNRKRISNCVADYSVLYNSASFSTFKCYGVSPTKLNDLCFTNVYADSFVIRGDEVRQIAPGQTGKIADYNYKLPDDFTGCVIAWNSNNLDSKVGGNYNYLYRLFRKSNLKPFERDISTEIYQAGSTPCNGVEGFNCYFPLQSYGFQPTNGVGYQPYRVVVLSFELLHAPATVCGPKKSTNLVKNKCVNFNFNGLTGTGVLTESNKKFLPFQQFGRDIADTTDAVRDPQTLEILDITPCSFGGVSVITPGTNTSNQVAVLYQDVNCTEVPVAIHADQLTPTWRVYSTGSNVFQTRAGCLIGAEYVNNSYECDIPIGAGICASYQTQTNSPRRARSVASQSIIAYTMSLGAENSVAYSNNSIAIPTNFTISVTTEILPVSMTKTSVDCTMYICGDSTECSNLLLQYGSFCTQLNRALTGIAVEQDKNTQEVFAQVKQIYKTPPIKDFGGFNFSQILPDPSKPSKRSFIEDLLFNKVTLADAGFIKQYGDCLGDIAARDLICAQKFNGLTVLPPLLTDEMIAQYTSALLAGTITSGWTFGAGAALQIPFAMQMAYRFNGIGVTQNVLYENQKLIANQFNSAIGKIQDSLSSTASALGKLQDVVNQNAQALNTLVKQLSSNFGAISSVLNDILSRLDKVEAEVQIDRLITGRLQSLQTYVTQQLIRAAEIRASANLAATKMSECVLGQSKRVDFCGKGYHLMSFPQSAPHGVVFLHVTYVPAQEKNFTTAPAICHDGKAHFPREGVFVSNGTHWFVTQRNFYEPQIITTDNTFVSGNCDVVIGIVNNTVYDPLQPELDS

SEQ ID NO: 2643 - protein, 1147 aa, Artificial Sequence
  SARS-CoV-2/England/20102000506/2020__EPI_ISL_415147 spike protein (1-1147)
MFVFLVLLPLVSSQCVNLTTRTQLPPAYTNSFTRGVYYPDKVFRSSVLHSTQDLFLPFFSNVTWFHAIHVSGTNGTKRFDNPVLPFNDGVYFASTEKSNIIRGWIFGTTLDSKTQSLLIVNNATNVVIKVCEFQFCNDPFLGVYYHKNNKSWMESEFRVYSSANNCTFEYVSQPFLMDLEGKQGNFKNLREFVFKNIDGYFKIYSKHTPINLVRDLPQGFSALEPLVDLPIGINITRFQTLLALHRSYLTPGDSSSGWTAGAAAYYVGYLQPRTFLLKYNENGTITDAVDCALDPLSETKCTLKSFTVEKGIYQTSNFRVQPTESIVRFPNITNLCPFGEVFNATRFASVYAWNRKRISNCVADYSVLYNSASFSTFKCYGVSPTKLNDLCFTNVYADSFVIRGDEVRQIAPGQTGKIADYNYKLPDDFTGCVIAWNSNNLDSKVGGNYNYLYRLFRKSNLKPFERDISTEIYQAGSTPCNGVEGFNCYFPLQSYGFQPTNGVGYQPYRVVVLSFELLHAPATVCGPKKSTNLVKNKCVNFNFNGLTGTGVLTESNKKFLPFQQFGRDIADTTDAVRDPQTLEILDITPCSFGGVSVITPGTNTSNQVAVLYQGVNCTEVPVAIHADQLTPTWRVYSTGSNVFQTRAGCLIGAEHVNNSYECDIPIGAGICASYQTQTNSPRRARSVASQSIIAYTMSLGAENSVAYSNNSIAIPTNFTISVTTEILPVSMTKTSVDCTMYICGDSTECSNLLLQYGSFCTQLNRALTGIAVEQDKNTQEVFAQVKQIYKTPPIKDFGGFNFSQILPDPSKPSKRSFIEDLLFNKVTLADAGFIKQYGYCLGDIAARDLICAQKFNGLTVLPPLLTDEMIAQYTSALLAGTITSGWTFGAGAALQIPFAMQMAYRFNGIGVTQNVLYENQKLIANQFNSAIGKIQDSLSSTASALGKLQDVVNQNAQALNTLVKQLSSNFGAISSVLNDILSRLDKVEAEVQIDRLITGRLQSLQTYVTQQLIRAAEIRASANLAATKMSECVLGQSKRVDFCGKGYHLMSFPQSAPHGVVFLHVTYVPAQEKNFTTAPAICHDGKAHFPREGVFVSNGTHWFVTQRNFYEPQIITTDNTFVSGNCDVVIGIVNNTVYDPLQPELDS

SEQ ID NO: 2644 - protein, 1147 aa, Artificial Sequence
  SARS-CoV-2/Belgium/VAG-03013/2020__EPI_ISL_415155 spike protein (1-1147)
MFVFLVLLPLVSSQCVNLTTRTQLPPAYTNSFTRGVYYPDKVFRSSVLHSTQDLFLPFFSNVTWFHAIHVSGTNGTKRFDNPVLPFNDGVYFASTEKSNIIRGWIFGTTLDSKTQSLLIVNNATNVVIKVCEFQFCNDPFLGVYYHKNNKSWMESEFRVYSSANNCTFEYVSQPFLMDLEGKQGNFKNLREFVFKNIDGYFKIYSKHTPINLVRDLPQGFSALEPLVDLPIGINITRFQTLLALHRSYLTPGDSSSGWTAGAAAYYVGYLQPRTFLLKYNENGTITDAVDCALDPLSETKCTLKSFTVEKGIYQTSNFRVQPTESIVRFPNITNLCPFGEVFNATRFASVYAWNRKRISNCVADYSVLYNSASFSTFKCYGVSPTKLNDLCFTNVYADSFVIRGDEVRQIAPGQTGKIADYNYKLPDDFTGCVIAWNSNNLDSKVGGNYNYLYRLFRKSNLKPFERDISTEIYQAGSTPCNGVEGFNCYFPLQSYGFQPTNGVGYQPYRVVVLSFELLHAPATVCGPKKSTNLVKNKCVNFNFNGLTGTGVLTESNKKFLPFQQFGRDIADTTDAVRDPQTLEILDITPCSFGGVSVITPGTNTSNQVAVLYQGVNCTEVPVAIHADQLTPTWRVYSTGSNVFQTRAGCLIGAEHVNNSYECDIPIGAGICASYQTQTNSPRRARSVASQSIIAYTMSLGAENSVAYSNNSIAIPTNFTISVTTEILPVSMTKTSVDCTMYICGDSTECSNLLLQYGSFCTQLNRALTGIAVEQDKNTQEVFAQVKQIYKTPPIKDFGGFNFSQILPDPSKPSKRSFIEDLLFNKVTLADAGFIKQYGDCLGDIAARDLICAQKFNGLTVLPPLLTDEMIAQYTSALLAGTITSGWTFGAGAALQIPFAMQMAYRFNGIGVTQNVLYENQKLIANQFNSAIGKIQDSLSSTATALGKLQDVVNQNAQALNTLVKQLSSNFGAISSVLNDILSRLDKVEAEVQIDRLITGRLQSLQTYVTQQLIRAAEIRASANLAATKMSECVLGQSKRVDFCGKGYHLMSFPQSAPHGVVFLHVTYVPAQEKNFTTAPAICHDGKAHFPREGVFVSNGTHWFVTQRNFYEPQIITTDNTFVSGNCDVVIGIVNNTVYDPLQPELDS

SEQ ID NO: 2645 - protein, 1147 aa, Artificial Sequence
  SARS-CoV-2/Belgium/BC-03016/2020__EPI_ISL_415157 spike protein (1-1147)
MFVFLVLLPLVSSQCVNLTTRTQLPPAYTNSFTRGVYYPDKVFRSSVLHSTQDLFLPFFSNVTWFHAIHVSGTNGTKRFDNPVLPFNDGVYFASTEKSNIIRGWIFGTTLDSKTQSLLIVNNATNVVIKVCEFQFCNDPFLGVYYHKNNKSWMESEFRVYSSANNCTFEYVSQPFLMDLEGKQGNFKNLREFVFKNIDGYFKIYSKHTPINLVRDLPQGFSALEPLVDLPIGINITRFQTLLALHRSYLTPGDSSSGWTAGAAAYYVGYLQPRTFLLKYNENGTITDAVDCALDPLSETKCTLKSFTVEKGIYQTSNFRVQPTESIVRFPNITNLCPFGEVFNATRFASVYAWNRKRISNCVADYSVLYNSASFSTFKCYGVSPTKLNDLCFTNVYADSFVIRGDEVRQIAPGQTGKIADYNYKLPDDFTGCVIAWNSNNLDSKVGGNYNYLYRLFRKSNLKPFERDISTEIYQAGSTPCNGVEGFNCYFPLQSYGFQPTNGVGYQPYRVVVLSFELLHAPATVCGPKKSTNLVKNKCVNFNFNGLTGTGVLTESNKKFLPFQQFGRDIADTTDAVRDPQTLEILDITPCSFGGVSVITPGTNTSNQVAVLYQGVNCTEVPVAIHADQLTPTWRVYSTGSNVFQTRAGCLIGAEHVNNSYECDIPIGAGICASYQTQTNSPRRARSVASQSIIAYTMSLGAENSVAYSNNSIAIPTNFTISVTTEILPVSMTKTSVDCTMYICGDSTECSNLLLQYGSFCTQLNRALTGIAVEQDKNTQEVFAQVKQIYKTPPIKDFGGFNFSQILPDPSKPSKRSFIEDLLFNKVTLADAGFIKQYGDCLGDIAARDLICAQKFNGLTVLPPLLTDEMIAQYTSALLAGTITSGWTFGAGAALQIPFAMQMAYRFNGIGVTQNVLYENQKLIANQFNSAIGKIQDSLSSTAPALGKLQDVVNQNAQALNTLVKQLSSNFGAISSVLNDILSRLDKVEAEVQIDRLITGRLQSLQTYVTQQLIRAAEIRASANLAATKMSECVLGQSKRVDFCGKGYHLMSFPQSAPHGVVFLHVTYVPAQEKNFTTAPAICHDGKAHFPREGVFVSNGTHWFVTQRNFYEPQIITTDNTFVSGNCDVVIGIVNNTVYDPLQPELDS

SEQ ID NO: 2646 - protein, 1147 aa, Artificial Sequence
  SARS-CoV-2/Germany/BavPat3/2020__EPI_ISL_414521 spike protein (1-1147)
MFVFLVLLPLVSSQCVNLTTRTQLPPAYTNSFTRGVYYPDKVFRSSVLHSTQDLFLPFFSNVTWFHAIHVSGTNGTKRFDNPVLPFNDGVYFASTEKSNIIRGWIFGTTLDSKTQSLLIVNNATNVVIKVCEFQFCNDPFLGVYYHKNNKSWMESEFRVYSSANNCTFEYVSQPFLMDLEGKQGNFKNLREFVFKNIDGYFKIYSKHTPINLVRDLPQGFSALEPLVDLPIGINITRFQTLLALHRSYLTPGDSSSGWTAGAAAYYVGYLQPRTFLLKYNENGTITDAVDCALDPLSETKCTLKSFTVEKGIYQTSNFRVQPTESIVRFPNITNLCPFGEVFNATRFASVYAWNRKRISNCVADYSVLYNSASFSTFKCYGVSPTKLNDLCFTNVYADSFVIRGDEVRQIAPGQTGKIADYNYKLPDDFTGCVIAWNSNNLDSKVGGNYNYLYRLFRKSNLKPFERDISTEIYQAGSTPCNGVEGFNCYFPLQSYGFQPTNGVGYQPYRVVVLSFELLHAPATVCGPKKSTNLVKNKCVNFNFNGLTGTGVLTESNKKFLPFQQFGRDIADTTDAVRDPQTLEILDITPCSFGGVSVITPGTNTSNQVAVLYQDVNCTEVPVAIHADQLTPTWRVYSTGSNVFQTRAGCLIGAEHVNNSYECDIPIGAGICASYQTQTNSPRRARSVASQSIIAYTMSLGAENSVAYSNNSIAIPTNFTISVTTEILPVSMTKTSVDCTMYICGDSTECSNLLLQYGSFCTQLNRALTGIAVEQDKNTQQVFAQVKQIYKTPPIKDFGGFNFSQILPDPSKPSKRSFIEDLLFNKVTLADAGFIKQYGDCLGDIAARDLICAQKFNGLTVLPPLLTDEMIAQYTSALLAGTITSGWTFGAGAALQIPFAMQMAYRFNGIGVTQNVLYENQKLIANQFNSAIGKIQDSLSSTASALGKLQDVVNQNAQALNTLVKQLSSNFGAISSVLNDILSRLDKVEAEVQIDRLITGRLQSLQTYVTQQLIRAAEIRASANLAATKMSECVLGQSKRVDFCGKGYHLMSFPQSAPHGVVFLHVTYVPAQEKNFTTAPAICHDGKAHFPREGVFVSNGTHWFVTQRNFYEPQIITTDNTFVSGNCDVVIGIVNNTVYDPLQPELDS

SEQ ID NO: 2647 - protein, 1147 aa, Artificial Sequence
  SARS-CoV-2/France/HF1805/2020__EPI_ISL_414628 spike protein (1-1147)
MFVFLVLLPLVSSQCVNLTTRTQLPPAYTNSFTRGVYYPDKVFRSSVLHSTQDLFLPFFSNVTWFHAIHVSGTNGTKRFDNPVLPFNDGVYFASTEKSNIIRGWIFGTTLDSKTQSLLIVNNATNVVIKVCEFQFCNDPFLGVYYHKNNKSWMESEFRVYSSANNCTFEYVSQPFLMDLEGKQGNFKNLREFVFKNIDGYFKIYSKHTPINLVRDLPQGFSALEPLVDLPIGINITRFQTLLALHRSYLTPGDSSSGWTAGAAAYYVGYLQPRTFLLKYNENGTITDAVDCALDPLSETKCTLKSFTVEKGIYQTSNFRVQPTESIVRFPNITNLCPFGEVFNATRFASVYAWNRKRISNCVADYSVLYNSASFSTFKCYGVSPTKLNDLCFTNVYADSFVIRGDEVRQIAPGQTGKIADYNYKLPDDFTGCVIAWNSNNLDSKVGGNYNYLYRLFRKSNLKPFERDISTEIYQAGSTPCNGVEGFNCYFPLQSYGFQPTNGVGYQPYRVVVLSFELLHAPATVCGPKKSTNLVKNKCVNFNFNGLTGTGVLTESNKKFLPFQQFGRDIADTTDAVRDPQTLEILDITPCSFGGVSVITPGTNTSNQVAVLYQGVNCTEVPVAIHADQLTPTWRVYSTGSNVFQTRAGCLIGAEHVNNSYECDIPIGAGICASYQTQTNSPRRARSVASQSIIAYTMSLGAENSVAYSNNSIAIPTNFTISVTTEILPVSMTKTSVDCTMYICGDSTECSNLLLQYGSFCTQLNRALTGIAVEQDKNTQEVFAQVKQIYKTPPIKDFGGFNFSQILPDPSKPSKRSFIEDLLFNKVTLADAGFIKQYGDCLGDIAARDLICAQKFNGLTVLPPLLTDEMIAQYTSALLAGTITSGWTFGAGAALQIPFAMQMAYRFNGIGVTQNVLYENQKLIANQFNSAIGKIQDSLSSTASALGKLQDVVNQNAQALNTLVKQLSSNFGAISSVLNDILSRLDKVEAEVQIDRLITGRLQSLQTYVTQQLIRAAEIRASANLAATKMSECVLGQSKRVDFCGKGYHLMSFPQSAPHGVVFLHVTYVPAQEKNFTTAPAICHDGKAHFPREGVFVSNGTHWFVTQRNFYEPQIITTDNTFVSGNCDVVIGVVNNTVYDPLQPELDS

SEQ ID NO: 2648 - protein, 1147 aa, Artificial Sequence
  SARS-CoV-2/Netherlands/ZuidHolland_9/2020__EPI_ISL_414445 spike protein (1-1147)
MFVFLVLLPLVSSQCVNLTTRTQLPPAYTNSFTRGVYYPDKVFRSSVLHSTQDLFLPFFSNVTWFHAIHVSGTNGTKRFDNPVLPFNDGVYFASTEKSNIIRGWIFGTTLDSKTQSLLIVNNATNVVIKVCEFQFCNDPFLGVYYHKNNKSWMESEFRVYSSANNCTFEYVSQPFLMDLEGKQGNFKNLREFVFKNIDGYFKIYSKHTPINLVRDLPQGFSALEPLVDLPIGINITRFQTLLALHRSYLTPGDSSSGWTAGAAAYYVGYLQPRTFLLKYNENGTITDAVDCALDPLSETKCTLKSFTVEKGIYQTSNFRVQPTESIVRFPNITNLCPFGEVFNATRFASVYAWNRKRISNCVADYSVLYNSASFSTFKCYGVSPTKLNDLCFTNVYADSFVIRGDEVRQIAPGQTGKIADYNYKLPDDFTGCVIAWNSNNLDSKVGGNYNYLYRLFRKSNLKPFERDISTEIYQAGSTPCNGVEGFNCYFPLQSYGFQPTNGVGYQPYRVVVLSFELLHAPATVCGPKKSTNLVKNKCVNFNFNGLTGTGVLTESNKKFLPFQQFGRDIADTTDAVRDPQTLEILDITPCSFGGVSVITPGTNTSNQVAVLYQGVNCTEVPVAIHADQLTPTWRVYSTGSNVFQTRAGCLIGAEHVNNSYECDIPIGAGICASYQTQTNSPRRARSVASQSIIAYTMSLGAENSVAYSNNSIAIPTNFTISVTTEILPVSMTKTSVDCTMYICGDSTECSNLLLQYGSFCTQLNRALTGIAVEQDKNTQEVFAQVKQIYKTPPIKDFGGFNFSQILPDPSKPSKRSFIEDLLFNKVTLADAGFIKQYGDCLGDIAARDLICVQKFNGLTVLPPLLTDEMIAQYTSALLAGTITSGWTFGAGAALQIPFAMQMAYRFNGIGVTQNVLYENQKLIANQFNSAIGKIQDSLSSTASALGKLQDVVNQNAQALNTLVKQLSSNFGAISSVLNDILSRLDKVEAEVQIDRLITGRLQSLQTYVTQQLIRAAEIRASANLAATKMSECVLGQSKRVDFCGKGYHLMSFPQSAPHGVVFLHVTYVPAQEKNFTTAPAICHDGKAHFPREGVFVSNGTHWFVTQRNFYEPQIITTDNTFVSGNCDVVIGIVNNTVYDPLQPELDS

SEQ ID NO: 2649 - protein, 1147 aa, Artificial Sequence
  SARS-CoV-2/Finland/FIN03032020A/2020__EPI_ISL_413602 spike protein (1-1147)
MFVFLVLLPLVSSQCVNLTTRTQLPPAYTNSFTRGVYYPDKVFRSSVLHSTQDLFLPFFSNVTWFHAIHVSGTNGTKRFDNPVLPFNDGVYFASTEKSNIIRGWIFGTTLDSKTQSLLIVNNATNVVIKVCEFQFCNDPFLGVYYHKNNKSWMESEFRVYSSANNCTFEYVSQPFLMDLEGKQGNFKNLREFVFKNIDGYFKIYSKHTPINLVRDLPQGFSALEPLVDLPIGINITRFQTLLALHRSYLTPGDSSSGWTAGAAAYYVGYLQPRTFLLKYNENGTITDAVDCALDPLSETKCTLKSFTVEKGIYQTSNFRVQPTESIVRFPNITNLCPFGEVFNATRFASVYAWNRKRISNCVADYSVLYNSASFSTFKCYGVSPTKLNDLCFTNVYADSFVIRGDEVRQIAPGQTGKIADYNYKLPDDFTGCVISWNSNNLDSKVGGNYNYLYRLFRKSNLKPFERDISTEIYQAGSTPCNGVEGFNCYFPLQSYGFQPTNGVGYQPYRVVVLSFELLHAPATVCGPKKSTNLVKNKCVNFNFNGLTGTGVLTESNKKFLPFQQFGRDIADTTDAVRDPQTLEILDITPCSFGGVSVITPGTNTSNQVAVLYQGVNCTEVPVAIHADQLTPTWRVYSTGSNVFQTRAGCLIGAEHVNNSYECDIPIGAGICASYQTQTNSPRRARSVASQSIIAYTMSLGAENSVAYSNNSIAIPTNFTISVTTEILPVSMTKTSVDCTMYICGDSTECSNLLLQYGSFCTQLNRALTGIAVEQDKNTQEVFAQVKQIYKTPPIKDFGGFNFSQILPDPSKPSKRSFIEDLLFNKVTLADAGFIKQYGDCLGDIAARDLICAQKFNGLTVLPPLLTDEMIAQYTSALLAGTITSGWTFGAGAALQIPFAMQMAYRFNGIGVTQNVLYENQKLIANQFNSAIGKIQDSLSSTASALGKLQDVVNQNAQALNTLVKQLSSNFGAISSVLNDILSRLDKVEAEVQIDRLITGRLQSLQTYVTQQLIRAAEIRASANLAATKMSECVLGQSKRVDFCGKGYHLMSFPQSAPHGVVFLHVTYVPAQEKNFTTAPAICHDGKAHFPREGVFVSNGTHWFVTQRNFYEPQIITTDNTFVSGNCDVVIGIVNNTVYDPLQPELDS

SEQ ID NO: 2650 - protein, 1147 aa, Artificial Sequence
  SARS-CoV-2/France/GE1977/2020__EPI_ISL_414632 spike protein (1-1147)
MFVFLVLLPLVSSQCVNLTTRTQLPPAYTNSFTRGVYYPDKVFRSSVLHSTQDLFLPFFSNVTWFHAIHVSGTNGTKRFDNPVLPFNDGVYFASTEKSNIIRGWIFGTTLDSKTQSLLIVNNATNVVIKVCEFQFCNDPFLGVYYHKNNKSWMESEFRVYSSANNCTFEYVSQPFLMDLEGKQGNFKNLREFVFKNIDGYFKIYSKHTPINLVRDLPQGFSALEPLVDLPIGINITRFQTLLALHRSYLTPGDSSSGWTAGAAAYYVGYLQPRTFLLKYNENGTITDAVDCALDPLSETKCTLKSFTVEKGIYQTSNFRVQPTESIVRFPNITNLCPFGEVFNATRFASVYAWNRKRISNCVADYSVLYNSASFSTFKCYGVSPTKLNDLCFTNVYADSFVIRGDEVRQIAPGQTGKIADYNYKLPDDFTGCVIAWNSNNLDSKVGGNYNYLYRLFRKSNLKPFERDISTEIYQAGSTPCNGVEGFNCYFPLQSYGFQPTNGVGYQPYRVVVLSFELLHAPATVCGPKKSTNLVKNKCVNFNFNGLTGTGVLTESNKKFLPFQQFGRDIADTTDAVRDPQTLEILDITPCSFGGVSVITPGTNTSNQVAVLYQGVNCTEVPVAIHADQLTPTWRVYSTGSNVFQTRAGCLIGAEHVNNSYECDIPIGAGICASYQTQTNSPRRARSVASQSIIAYTMSLGAENSVAYSNNSIAIPTNFTISVTTEILPVSMTKTSVDCTMYICGDSTECSNLLLQYGSFCTQLNRALTGIAVEQDKNTQEVFAQVKQIYKTPPIKDFGGFNFSQILPDPSKPSKRSFIEDLLFNKVTLADAGFIKQYGDCLGDIAARDLICAQKFNGLTVLPPLLTDEMIAQYTSALLAGTITSGWTFGAGAALQIPFAMQMAYRFNGIGVTQNVLYENQKLIANQFNSAIGKIQDSLFSTASALGKLQDVVNQNAQALNTLVKQLSSNFGAISSVLNDILSRLDKVEAEVQIDRLITGRLQSLQTYVTQQLIRAAEIRASANLAATKMSECVLGQSKRVDFCGKGYHLMSFPQSAPHGVVFLHVTYVPAQEKNFTTAPAICHDGKAHFPREGVFVSNGTHWFVTQRNFYEPQIITTDNTFVSGNCDVVIGIVNNTVYDPLQPELDS

SEQ ID NO: 2651 - protein, 1147 aa, Artificial Sequence
  SARS-CoV-2/Finland/FIN-313/2020__EPI_ISL_414641 spike protein (1-1147)
MFVFLVLLPLVSSQCVNLTTRTQLPPAYTNSFTRGVYYPDKVFRSSVLHSTQDLFLPFFSNVTWFHAIHVSGTNGTKRFDNPVLPFNDGVYFASTEKSNIIRGWIFGTTLDSKTQSLLIVNNATNVVIKVCEFQFCNDPFLGVYYHKNNKSWMESEFRVYSSANNCTFEYVSQPFLMDLEGKQGNFKNLREFVFKNIDGYFKIYSKHTPINLVRDLPQGFSALEPLVDLPIGINITRFKTLLALHRSYLTPGDSSSGWTAGAAAYYVGYLQPRTFLLKYNENGTITDAVDCALDPLSETKCTLKSFTVEKGIYQTSNFRVQPTESIVRFPNITNLCPFGEVFNATRFASVYAWNRKRISNCVADYSVLYNSASFSTFKCYGVSPTKLNDLCFTNVYADSFVIRGDEVRQIAPGQTGKIADYNYKLPDDFTGCVIAWNSNNLDSKVGGNYNYLYRLFRKSNLKPFERDISTEIYQAGSTPCNGVEGFNCYFPLQSYGFQPTNGVGYQPYRVVVLSFELLHAPATVCGPKKSTNLVKNKCVNFNFNGLTGTGVLTESNKKFLPFQQFGRDIADTTDAVRDPQTLEILDITPCSFGGVSVITPGTNTSNQVAVLYQGVNCTEVPVAIHADQLTPTWRVYSTGSNVFQTRAGCLIGAEHVNNSYECDIPIGAGICASYQTQTNSPRRARSVASQSIIAYTMSLGAENSVAYSNNSIAIPTNFTISVTTEILPVSMTKTSVDCTMYICGDSTECSNLLLQYGSFCTQLNRALTGIAVEQDKNTQEVFAQVKQIYKTPPIKDFGGFNFSQILPDPSKPSKRSFIEDLLFNKVTLADAGFIKQYGDCLGDIAARDLICAQKFNGLTVLPPLLTDEMIAQYTSALLAGTITSGWTFGAGAALQIPFAMQMAYRFNGIGVTQNVLYENQKLIANQFNSAIGKIQDSLSSTASALGKLQDVVNQNAQALNTLVKQLSSNFGAISSVLNDILSRLDKVEAEVQIDRLITGRLQSLQTYVTQQLIRAAEIRASANLAATKMSECVLGQSKRVDFCGKGYHLMSFPQSAPHGVVFLHVTYVPAQEKNFTTAPAICHDGKAHFPREGVFVSNGTHWFVTQRNFYEPQIITTDNTFVSGNCDVVIGIVNNTVYDPLQPELDS

SEQ ID NO: 2652 - protein, 1147 aa, Artificial Sequence
  SARS-CoV-2/Netherlands/ZuidHolland_2/2020__EPI_ISL_414556 spike protein (1-1147)
MFVFLVLLPLVSSQCVNLTTRTQLPPAYTNSFTRGVYYPDKVFRSSVLHSTQDLFLPFFSNVTWFHAIHVSGTNGTKRFDNPVLPFNDGVYFASTEKSNIIRGWIFGTTLDSKTQSLLIVNNATNVVIKVCEFQFCNDPFLGVYYHKNNKSWMESEFRVYSSANNCTFEYVSQPFLMDLEGKQGNFKNLREFVFKNIDGYFKIYSKHTPINLVRDLPQGFSALEPLVDLPIGINITRFQTLLALHRSYLTPGDSSSGWTAGAAAYYVGYLQPRTFLLKYNENGTITDAVDCALDPLSETKCTLKSFTVEKGIYQTSNFRVQPTESIVRFPNITNLCPFGEVFNATRFASVYAWNRKRISNCVADYSVLYNSASFSTFKCYGVSPTKLNDLCFTNVYADSFVIRGDEVRQIAPGQTGKIADYNYKLPDDFTGCVIAWNSNNLDSKVGGNYNYLYRLFRKSNLKPFERDISTEIYQAGSTPCNGVEGFNCYFPLQSYGFQPTNGVGYQPYRVVVLSFELLHAPATVCGPKKSTNLVKNKCVNFNFNGLTGTGVLTESNKKFLPFQQFGRDIADTTDAVRDPQTLEILDITPCSFGGVSVITPGTNTSNQVAVLYQGVNCTEVPVAIHADQLTPTWRVYSTGSNVFQTRAGCLIGAEHVNNSYECDIPIGAGICASYQTQTNSPRRARSVASQSIIAYTMSLGAENSVAYSNNSIAIPTNFTISVTTEILPVSMTKTSVDCTMYICGDSTECSNLLLQYGSFCTQLNRALTGIALEQDKNTQEVFAQVKQIYKTPPIKDFGGFNFSQILPDPSKPSKRSFIEDLLFNKVTLADAGFIKQYGDCLGDIAARDLICAQKFNGLTVLPPLLTDEMIAQYTSALLAGTITSGWTFGAGAALQIPFAMQMAYRFNGIGVTQNVLYENQKLIANQFNSAIGKIQDSLSSTASALGKLQDVVNQNAQALNTLVKQLSSNFGAISSVLNDILSRLDKVEAEVQIDRLITGRLQSLQTYVTQQLIRAAEIRASANLAATKMSECVLGQSKRVDFCGKGYHLMSFPQSAPHGVVFLHVTYVPAQEKNFTTAPAICHDGKAHFPREGVFVSNGTHWFVTQRNFYEPQIITTDNTFVSGNCDVVIGIVNNTVYDPLQPELDS

SEQ ID NO: 2653 - protein, 1147 aa, Artificial Sequence
  SARS-CoV-2/USA/WA-UW31/2020__EPI_ISL_414618 spike protein (1-1147)
MFVFLVLLPLVSSQCVNLTTRTQLPPAYTNSFTRGVYYPDKVFRSSVLHSTQDLFLPFFSNVTWFHAIHVSGTNGTKRFDNPVLPFNDGVYFASTEKSNIIRGWIFGTTLDSKTQSLLIVNNATNVVIKVCEFQFCNDPFLGVYYHKNNKSWMESEFRVYSSANNCTFEYVSQPFLMDLEGKQGNFKNLREFVFKNIDGYFKIYSKHTPINLVRDLPQGFSALEPLVDLPIGINITRFQTLLALHRSYLTPGDSSSGWTAGAAAYYVGYLQPRTFLLKYNENGTITDAVDCALDPLSETKCTLKSFTVEKGIYQTSNFRVQPTESIVRFPNITNLCPFGEVFNATRFASVYAWNRKRISNCVADYSVLYNSASFSTFKCYGVSPTKLNDLCFTNVYADSFVIRGDEVRQIAPGQTGKIADYNYKLPDDFTGCVIAWNSNNLDSKVGGNYNYLYRLFRKSNLKPFERDISTEIYQAGSTPCNGAEGFNCYFPLQSYGFQPTNGVGYQPYRVVVLSFELLHAPATVCGPKKSTNLVKNKCVNFNFNGLTGTGVLTESNKKFLPFQQFGRDIADTTDAVRDPQTLEILDITPCSFGGVSVITPGTNTSNQVAVLYQDVNCTEVPVAIHADQLTPTWRVYSTGSNVFQTRAGCLIGAEHVNNSYECDIPIGAGICASYQTQTNSPRRARSVASQSIIAYTMSLGAENSVAYSNNSIAIPTNFTISVTTEILPVSMTKTSVDCTMYICGDSTECSNLLLQYGSFCTQLNRALTGIAVEQDKNTQEVFAQVKQIYKTPPIKDFGGFNFSQILPDPSKPSKRSFIEDLLFNKVTLADAGFIKQYGDCLGDIAARDLICAQKFNGLTVLPPLLTDEMIAQYTSALLAGTITSGWTFGAGAALQIPFAMQMAYRFNGIGVTQNVLYENQKLIANQFNSAIGKIQDSLSSTASALGKLQDVVNQNAQALNTLVKQLSSNFGAISSVLNDILSRLDKVEAEVQIDRLITGRLQSLQTYVTQQLIRAAEIRASANLAATKMSECVLGQSKRVDFCGKGYHLMSFPQSAPHGVVFLHVTYVPAQEKNFTTAPAICHDGKAHFPREGVFVSNGTHWFVTQRNFYEPQIITTDNTFVSGNCDVVIGIVNNTVYDPLQPELDS

SEQ ID NO: 2654 - protein, 1147 aa, Artificial Sequence
  SARS-CoV-2/South Korea/SNU01/2020__EPI_ISL_411929 spike protein (1-1147)
MFVFLVLLPLVSSQCVNLTTRTQLPPAYTNSFTRGVYYPDKVFRSSVLHSTQDLFLPFFSNVTWFHAIHVSGTNGTKRFDNPVLPFNDGVYFASTEKSNIIRGWIFGTTLDSKTQSLLIVNNATNVVIKVCEFQFCNDPFLGVYYHKNNKSWMESEFRVYSSANNCTFEYVSQPFLMDLEGKQGNFKNLREFVFKNIDGYFKIYSKHTPINLVRDLPQGFWALEPLVDLPIGINITRFQTLLALHRSYLTPGDSSSGWTAGAAAYYVGYLQPRTFLLKYNENGTITDAVDCALDPLSETKCTLKSFTVEKGIYQTSNFRVQPTESIVRFPNITNLCPFGEVFNATRFASVYAWNRKRISNCVADYSVLYNSASFSTFKCYGVSPTKLNDLCFTNVYADSFVIRGDEVRQIAPGQTGKIADYNYKLPDDFTGCVIAWNSNNLDSKVGGNYNYLYRLFRKSNLKPFERDISTEIYQAGSTPCNGVEGFNCYFPLQSYGFQPTNGVGYQPYRVVVLSFELLHAPATVCGPKKSTNLVKNKCVNFNFNGLTGTGVLTESNKKFLPFQQFGRDIADTTDAVRDPQTLEILDITPCSFGGVSVITPGTNTSNQVAVLYQDVNCTEVPVAIHADQLTPTWRVYSTGSNVFQTRAGCLIGAEHVNNSYECDIPIGAGICASYQTQTNSPRRARSVASQSIIAYTMSLGAENSVAYSNNSIAIPTNFTISVTTEILPVSMTKTSVDCTMYICGDSTECSNLLLQYGSFCTQLNRALTGIAVEQDKNTQEVFAQVKQIYKTPPIKDFGGFNFSQILPDPSKPSKRSFIEDLLFNKVTLADAGFIKQYGDCLGDIAARDLICAQKFNGLTVLPPLLTDEMIAQYTSALLAGTITSGWTFGAGAALQIPFAMQMAYRFNGIGVTQNVLYENQKLIANQFNSAIGKIQDSLSSTASALGKLQDVVNQNAQALNTLVKQLSSNFGAISSVLNDILSRLDKVEAEVQIDRLITGRLQSLQTYVTQQLIRAAEIRASANLAATKMSECVLGQSKRVDFCGKGYHLMSFPQSAPHGVVFLHVTYVPAQEKNFTTAPAICHDGKAHFPREGVFVSNGTHWFVTQRNFYEPQIITTDNTFVSGNCDVVIGIVNNTVYDPLQPELDS

SEQ ID NO: 2655 - protein, 1147 aa, Artificial Sequence
  SARS-CoV-2/China/WF0004/2020__EPI_ISL_413694 spike protein (1-1147)
MFVFLVLLPLVSSQCVNLTTRTQLPPAYTNSFTRGVYYPDKVFRSSVLHSTQDLFLPFFSNVTWFHAIHVSGTNGTKRFDNPVLPFNDGVYFASTEKSNIIRGWIFGTTLDSKTQSLLIVNNATNVVIKVCEFQFCNDPFLGVYYHKNNKSWTESEFRVYSSANNCTFEYVSQPFLMDLEGKQGNFKNLREFVFKNIDGYFKIYSKHTPINLVRDLPQGFSALEPLVDLPIGINITRFQTLLALHRSYLTPGDSSSGWTAGAAAYYVGYLQPRTFLLKYNENGTITDAVDCALDPLSETKCTLKSFTVEKGIYQTSNFRVQPTESIVRFPNITNLCPFGEVFNATRFASVYAWNRKRISNCVADYSVLYNSASFSTFKCYGVSPTKLNDLCFTNVYADSFVIRGDEVRQIAPGQTGKIADYNYKLPDDFTGCVIAWNSNNLDSKVGGNYNYLYRLFRKSNLKPFERDISTEIYQAGSTPCNGVEGFNCYFPLQSYGFQPTNGVGYQPYRVVVLSFELLHAPATVCGPKKSTNLVKNKCVNFNFNGLTGTGVLTESNKKFLPFQQFGRDIADTTDAVRDPQTLEILDITPCSFGGVSVITPGTNTSNQVAVLYQDVNCTEVPVAIHADQLTPTWRVYSTGSNVFQTRAGCLIGAEHVNNSYECDIPIGAGICASYQTQTNSPRRARSVASQSIIAYTMSLGAENSVAYSNNSIAIPTNFTISVTTEILPVSMTKTSVDCTMYICGDSTECSNLLLQYGSFCTQLNRALTGIAVEQDKNTQEVFAQVKQIYKTPPIKDFGGFNFSQILPDPSKPSKRSFIEDLLFNKVTLADAGFIKQYGDCLGDIAARDLICAQKFNGLTVLPPLLTDEMIAQYTSALLAGTITSGWTFGAGAALQIPFAMQMAYRFNGIGVTQNVLYENQKLIANQFNSAIGKIQDSLSSTASALGKLQDVVNQNAQALNTLVKQLSSNFGAISSVLNDILSRLDKVEAEVQIDRLITGRLQSLQTYVTQQLIRAAEIRASANLAATKMSECVLGQSKRFDFCGKGYHLMSFPQSAPHGVVFLHVTYVPAQEKNFTTAPAICHDGKAHFPREGVFVSNGTHWFVTQRNFYEPQIITTDNTFVSGNCDVVIGIVNNTVYDPLQPELDS

SEQ ID NO: 2656 - protein, 1147 aa, Artificial Sequence
  SARS-CoV-2/China/WF0028/2020__EPI_ISL_413791 spike protein (1-1147)
MFVFLVLLPLVSSQCVNLTTRTQLPPAYTNSFTRGVYYPDKVFRSSVLHSTQDLFLPFFSNVTWFHAIHVSGTNGTKRFDNPVLPFNDGVYFASTEKSNIIRGWIFGTTLDSKTQSLLIVNNATNVVIKVCEFQFCNDPFLGVYYHKNNKSWMESEFRVYSSANNCTFEYVSQPFLMDLEGKQGNFKNLREFVFKNIDGYFKIYSKHTPINLVRDLPQGFSALEPLVDLPIGINITRFQTLLALHRSYLTPGDSSSGWTAGAAAYYVGYLQPRTFLLKYNENGTITDAVDCALDPLSETKCTLKSFTVEKGIYQTSNFRVQPTESIVRFPNITNLCPFGEVFNATRFASVYAWNRKRISNCVADYSVLYNSASFSTFKCYGVSPTKLNDLCFTNVYADSFVIRGDEVRQIAPGQTGKIADYNYKLPDDFTGCVIAWNSNNLDSKVGGNYNYLYRLFRKSNLKPFERDISTEIYQAGSTPCNGVEGFNCYFPLQSYGFQPTNGVGYQPYRVVVLSFELLHAPATVCGPKKSTNLVKNKCVNFNFNGLTGTGVLTESNKKFLPFQQFGRDIADTTDAVRDPQTLEILDITPCSFGGVSVITPGTNTSNQVAVLYQDVNCTEVPVAIHADQLTPTWRVYSTGSNVFQTRAGCLIGAEHVNNSYECDIPIGAGICASYQTQTNSPRRARSVASQSIIAYTMSLGAENSVAYSNNSIAIPTNFTISVTTEILPVSMTKTSVDCTMYICGDSTECSNLLLQYGSFCTQLNRALTGIAVEQDKNTQEVFAQVKQIYKTPPIKDFGGFNFSQILPDPSKPSKRSFIEDLLFNKVTLADAGFIKQYGDCLGDIAARDLICAQKFNGLTVLPPLLTDEMIAQYTSALLAGTITSGWTFGAGAALQIPFAMQMAYRFNGIGVTQNVLYENQKLIANQFNSAIGKIQDSLSSTASALGKLQDVVNQNAQALNTLVKQLSSNFGAISSVLNDILSRLDKVEAEVQIDRLITGRLQSLQTYVTQQLIRAAEIRASANLAATKMSECVLGQSKRVDFCGKGYHLMSFPQSAPHGVVFLHVTYVPAQEKNFTTAPAICHDGKAHFPREGVFVSNGTHWFVTQRNFYEPQIITTDNTFVSGNCDVVIGIVNNTVYDPLQPELES

SEQ ID NO: 2657 - protein, 1147 aa, Artificial Sequence
  SARS-CoV-2/2019-nCoV/USA-CruiseA-18/2020__MT159716.1 spike protein (1-1147)
MFVFLVLLPLVSSQCVNLTTRTQLPPAYTNSFTRGVYYPDKVFRSSVLHSTQDLFLPFFSNVTWFHAIHVSGTNGTKRFDNPVLPFNDGVYFASTEKSNIIRGWIFGTTLDSKTQSLLIVNNATNVVIKVCEFQFCNDPFLGVYYHKNNKSWMESELRVYSSANNCTFEYVSQPFLMDLEGKQGNFKNLREFVFKNIDGYFKIYSKHTPINLVRDLPQGFSALEPLVDLPIGINITRFQTLLALHRSYLTPGDSSSGWTAGAAAYYVGYLQPRTFLLKYNENGTITDAVDCALDPLSETKCTLKSFTVEKGIYQTSNFRVQPTESIVRFPNITNLCPFGEVFNATRFASVYAWNRKRISNCVADYSVLYNSASFSTFKCYGVSPTKLNDLCFTNVYADSFVIRGDEVRQIAPGQTGKIADYNYKLPDDFTGCVIAWNSNNLDSKVGGNYNYLYRLFRKSNLKPFERDISTEIYQAGSTPCNGVEGFNCYFPLQSYGFQPTNGVGYQPYRVVVLSFELLHAPATVCGPKKSTNLVKNKCVNFNFNGLTGTGVLTESNKKFLPFQQFGRDIADTTDAVRDPQTLEILDITPCSFGGVSVITPGTNTSNQVAVLYQDVNCTEVPVAIHADQLTPTWRVYSTGSNVFQTRAGCLIGAEHVNNSYECDIPIGAGICASYQTQTNSPRRARSVASQSIIAYTMSLGAENSVAYSNNSIAIPTNFTISVTTEILPVSMTKTSVDCTMYICGDSTECSNLLLQYGSFCTQLNRALTGIAVEQDKNTQEVFAQVKQIYKTPPIKDFGGFNFSQILPDPSKPSKRSFIEDLLFNKVTLADAGFIKQYGDCLGDIAARDLICAQKFNGLTVLPPLLTDEMIAQYTSALLAGTITSGWTFGAGAALQIPFAMQMAYRFNGIGVTQNVLYENQKLIANQFNSAIGKIQDSLSSTASALGKLQDVVNQNAQALNTLVKQLSSNFGAISSVLNDILSRLDKVEAEVQIDRLITGRLQSLQTYVTQQLIRAAEIRASANLAATKMSECVLGQSKRVDFCGKGYHLMSFPQSAPHGVVFLHVTYVPAQEKNFTTAPAICHDGKAHFPREGVFVSNGTHWFVTQRNFYEPQIITTDNTFVSGNCDVVIGIVNNTVYDPLQPELDS

SEQ ID NO: 2658 - protein, 1147 aa, Artificial Sequence
  SARS-CoV-2/SARS-CoV-2/Yunnan-01/human/2020/CHN__MT049951.1 spike protein (1-1147)
MFVFLVLLPLVSSQCVNLTTRTQLPPANTNSFTRGVYYPDKVFRSSVLHSTQDLFLPFFSNVTWFHAIHVSGTNGTKRFDNPVLPFNDGVYFASTEKSNIIRGWIFGTTLDSKTQSLLIVNNATNVVIKVCEFQFCNDPFLGVYYHKNNKSWMESEFRVYSSANNCTFEYVSQPFLMDLEGKQGNFKNLREFVFKNIDGYFKIYSKHTPINLVRDLPQGFSALEPLVDLPIGINITRFQTLLALHRSYLTPGDSSSGWTAGAAAYYVGYLQPRTFLLKYNENGTITDAVDCALDPLSETKCTLKSFTVEKGIYQTSNFRVQPTESIVRFPNITNLCPFGEVFNATRFASVYAWNRKRISNCVADYSVLYNSASFSTFKCYGVSPTKLNDLCFTNVYADSFVIRGDEVRQIAPGQTGKIADYNYKLPDDFTGCVIAWNSNNLDSKVGGNYNYLYRLFRKSNLKPFERDISTEIYQAGSTPCNGVEGFNCYFPLQSYGFQPTNGVGYQPYRVVVLSFELLHAPATVCGPKKSTNLVKNKCVNFNFNGLTGTGVLTESNKKFLPFQQFGRDIADTTDAVRDPQTLEILDITPCSFGGVSVITPGTNTSNQVAVLYQDVNCTEVPVAIHADQLTPTWRVYSTGSNVFQTRAGCLIGAEHVNNSYECDIPIGAGICASYQTQTNSPRRARSVASQSIIAYTMSLGAENSVAYSNNSIAIPTNFTISVTTEILPVSMTKTSVDCTMYICGDSTECSNLLLQYGSFCTQLNRALTGIAVEQDKNTQEVFAQVKQIYKTPPIKDFGGFNFSQILPDPSKPSKRSFIEDLLFNKVTLADAGFIKQYGDCLGDIAARDLICAQKFNGLTVLPPLLTDEMIAQYTSALLAGTITSGWTFGAGAALQIPFAMQMAYRFNGIGVTQNVLYENQKLIANQFNSAIGKIQDSLSSTASALGKLQDVVNQNAQALNTLVKQLSSNFGAISSVLNDILSRLDKVEAEVQIDRLITGRLQSLQTYVTQQLIRAAEIRASANLAATKMSECVLGQSKRVDFCGKGYHLMSFPQSAPHGVVFLHVTYVPAQEKNFTTAPAICHDGKAHFPREGVFVSNGTHWFVTQRNFYEPQIITTDNTFVSGNCDVVIGIVNNTVYDPLQPELDS

SEQ ID NO: 2659 - protein, 1147 aa, Artificial Sequence
  SARS-CoV-2/USA/WA-UW292/2020__EPI_ISL_418077 spike protein (1-1147)
MFVFLVLLPLVSSQCVNLTTRTQLPPAYTNSFTRGVYYPDKVFRSSVLHSTQDLFLPFFSNVTWFHAIHVSGTNGTKRFDNPVLPFNDGVYFASTEKSNIIRGWIFGTTLDSKTQSLLIVNNATNVVIKVCEFQFCNDPFLGVYYHKNNKSWMESEFRVYSSANNCTFEYVSQPFLMDLEGKQGNFKNLREFVFKNIDGYFKIYSKHTPINLVRDLPQGFSALEPLVDLPIGINITRFQTLLALHRSYLTPGDSSSGWTAGAAAYYVGYLQPRTFLLKYNENGTITDAVDCALDPLSETKCTLKSFTVEKGIYQTSNFRVQPTESIVRFPNITNLCPFGEVFNATRFASVYAWNRKRISNCVADYSVLYNSASFSTFKCYGVSPTKLNDLCFTNVYADSFVIRGDEVRQIAPGQTGKIADYNYKLPDDFTGCVIAWNSNNLDSKVGGNYNYLYRLFRKSNLKPFERDISTEIYQASSTPCNGVEGFNCYFPLQSYGFQPTNGVGYQPYRVVVLSFELLHAPATVCGPKKSTNLVKNKCVNFNFNGLTGTGVLTESNKKFLPFQQFGRDIADTTDAVRDPQTLEILDITPCSFGGVSVITPGTNTSNQVAVLYQDVNCTEVPVAIHADQLTPTWRVYSTGSNVFQTRAGCLIGAEHVNNSYECDIPIGAGICASYQTQTNSPRRARSVASQSIIAYTMSLGAENSVAYSNNSIAIPTNFTISVTTEILPVSMTKTSVDCTMYICGDSTECSNLLLQYGSFCTQLNRALTGIAVEQDKNTQEVFAQVKQIYKTPPIKDFGGFNFSQILPDPSKPSKRSFIEDLLFNKVTLADAGFIKQYGDCLGDIAARDLICAQKFNGLTVLPPLLTDEMIAQYTSALLAGTITSGWTFGAGAALQIPFAMQMAYRFNGIGVTQNVLYENQKLIANQFNSAIGKIQDSLSSTASALGKLQDVVNQNAQALNTLVKQLSSNFGAISSVLNDILSRLDKVEAEVQIDRLITGRLQSLQTYVTQQLIRAAEIRASANLAATKMSECVLGQSKRVDFCGKGYHLMSFPQSAPHGVVFLHVTYVPAQEKNFTTAPAICHDGKAHFPREGVFVSNGTHWFVTQRNFYEPQIITTDNTFVSGNCDVVIGIVNNTVYDPLQPELDS

SEQ ID NO: 2660 - protein, 1147 aa, Artificial Sequence
  SARS-CoV-2/Iceland/192/2020__EPI_ISL_417819 spike protein (1-1147)
MFVFFVLLPLVSSQCVNLTTRTQLPPAYTNSFTRGVYYPDKVFRSSVLHSTQDLFLPFFSNVTWFHAIHVSGTNGTKRFDNPVLPFNDGVYFASTEKSNIIRGWIFGTTLDSKTQSLLIVNNATNVVIKVCEFQFCNDPFLGVYYHKNNKSWMESEFRVYSSANNCTFEYVSQPFLMDLEGKQGNFKNLREFVFKNIDGYFKIYSKHTPINLVRDLPQGFSALEPLVDLPIGINITRFQTLLALHRSYLTPGDSSSGWTAGAAAYYVGYLQPRTFLLKYNENGTITDAVDCALDPLSETKCTLKSFTVEKGIYQTSNFRVQPTESIVRFPNITNLCPFGEVFNATRFASVYAWNRKRISNCVADYSVLYNSASFSTFKCYGVSPTKLNDLCFTNVYADSFVIRGDEVRQIAPGQTGKIADYNYKLPDDFTGCVIAWNSNNLDSKVGGNYNYLYRLFRKSNLKPFERDISTEIYQAGSTPCNGVEGFNCYFPLQSYGFQPTNGVGYQPYRVVVLSFELLHAPATVCGPKKSTNLVKNKCVNFNFNGLTGTGVLTESNKKFLPFQQFGRDIADTTDAVRDPQTLEILDITPCSFGGVSVITPGTNTSNQVAVLYQGVNCTEVPVAIHADQLTPTWRVYSTGSNVFQTRAGCLIGAEHVNNSYECDIPIGAGICASYQTQTNSPRRARSVASQSIIAYTMSLGAENSVAYSNNSIAIPTNFTISVTTEILPVSMTKTSVDCTMYICGDSTECSNLLLQYGSFCTQLNRALTGIAVEQDKNTQEVFAQVKQIYKTPPIKDFGGFNFSQILPDPSKPSKRSFIEDLLFNKVTLADAGFIKQYGDCLGDIAARDLICAQKFNGLTVLPPLLTDEMIAQYTSALLAGTITSGWTFGAGAALQIPFAMQMAYRFNGIGVTQNVLYENQKLIANQFNSAIGKIQDSLSSTASALGKLQDVVNQNAQALNTLVKQLSSNFGAISSVLNDILSRLDKVEAEVQIDRLITGRLQSLQTYVTQQLIRAAEIRASANLAATKMSECVLGQSKRVDFCGKGYHLMSFPQSAPHGVVFLHVTYVPAQEKNFTTAPAICHDGKAHFPREGVFVSNGTHWFVTQRNFYEPQIITTDNTFVSGNCDVVIGIVNNTVYDPLQPELDS

SEQ ID NO: 2661 - protein, 1147 aa, Artificial Sequence
  SARS-CoV-2/Belgium/ULG-6939/2020__EPI_ISL_417020 spike protein (1-1147)
MFVFLVLLPLVSSQCVNLTTRTQLPPAYTNSFTRGVYYPDKVFRSSVLHSTQDLFLPFFSNVTWFHAIHVSGTNGTKRFDNPVLPFNDGVYFASTEKSNIIRGWIFGTTLDSKTQSLLIVNNATNVVIKVCEFQFCNDPFLGVYYHKNNKSWMESEFRVYSSANNCTFEYVSQPFLMDLEGKQGNFKNLREFVFKNIDGYFKIYSKHTPINLVRDLPQGFSALEPLVDLPIGINITRFQTLLALHRSYLTPGDSSSGWTAGAAAYYVGYLQPRTFLLKYNENGTITDAVDCALDPLSETKCTLKSFTVEKGIYQTSNFRVQPTESIVRFPNITNLCPFGEVFNATRFASVYAWNRKRISNCVADYSVLYNSASFSTFKCYGVSPTKLNDLCFTNVYADSFVIRGDEVRQIAPGQTGKIADYNYKLPDDFTGCVIAWNSNNLDSKVGGNYNYLYRLFRKSNLKPFERDISTEIYQAGSTPCNGVEGFNCYFPLQSYGFQPTNGVGYQPYRVVVLSFELLHAPATVCGPKKSTNLVKNKCVNFNFNGLTGTGVLTESNKKFLPFQQFGRDIADTTDAVRDPQTLEILDITPCSFGGVSVITPGTNTSNQVAVLYQGVNCTEVPVAIHADQLTPTWRVYSTGSNVFQTRAGCLIGAEHVNNSYECDIPIGAGICASYQTQTNSPRRARSVASQSIIAYTMSLGAENSVVYSNNSIAIPTNFTISVTTEILPVSMTKTSVDCTMYICGDSTECSNLLLQYGSFCTQLNRALTGIAVEQDKNTQEVFAQVKQIYKTPPIKDFGGFNFSQILPDPSKPSKRSFIEDLLFNKVTLADAGFIKQYGDCLGDIAARDLICAQKFNGLTVLPPLLTDEMIAQYTSALLAGTITSGWTFGAGAALQIPFAMQMAYRFNGIGVTQNVLYENQKLIANQFNSAIGKIQDSLSSTASALGKLQDVVNQNAQALNTLVKQLSSNFGAISSVLNDILSRLDKVEAEVQIDRLITGRLQSLQTYVTQQLIRAAEIRASANLAATKMSECVLGQSKRVDFCGKGYHLMSFPQSAPHGVVFLHVTYVPAQEKNFTTAPAICHDGKAHFPREGVFVSNGTHWFVTQRNFYEPQIITTDNTFVSGNCDVVIGIVNNTVYDPLQPELDS

SEQ ID NO: 2662 - protein, 1147 aa, Artificial Sequence
  SARS-CoV-2/France/HF2496/2020__EPI_ISL_418231 spike protein (1-1147)
MFVFLVLLPLVSSQCVNLTTRTQLPPAYTNSFTRGVYYPDKVFRSSVLHSTQDLFLPFFSNVTWFHAIHVSGTNGTKRFDNPVLPFNDGVYFASTEKSNIIRGWIFGTTLDSKTQSLLIVNNATNVVIKVCEFQFCNDPFLGVYYHKNNKSWMESEFRVYSSANNCTFEYVSQPFLMDLEGKQGNFKNLREFVFKNIDGYFKIYSKHTPINLVRDLPQGFSALEPLVDLPIGINITRFQTLLALHRSYLTPGDSSSGWTAGAAAYYVGYLQPRTFLLKYNENGTITDAVDCALDPLSETKCTLKSFTVEKGIYQTSNFRVQPTESIVRFPNITNLCPFGEVFNATRFASVYAWNRKRISNCVADYSVLYNSASFSTFKCYGVSPTKLNDLCFTNVYADSFVIRGDEVRQIAPGQTGKIADYNYKLPDDFTGCVIAWNSNNLDSKVGGNYNYLYRLFRKSNLKPFERDISTEIYQAGSTPCNGVEGFNCYFPLQSYGFQPTNGVGYQPYRVVVLSFELLHAPATVCGPKKSTNLVKNKCVNFNFNGLTGTGVLTESNKKFLPFQQFGRDIADTTDAVRDPQTLEILDITPCSFGGVSVITPGTNTSNQVAVLYQGVNCTEVPVAIHADQLTPTWRVYSTGSNVFQTRAGCLIGAEHVNNSYECDIPIGAGICASYQTQTNSPRRARSVASQSIIAYTMSLGAENSVAYSNNSIAIPTNFTISVTTEILPVSMTKTSVDCTMYICGDSTECSNLLLQYGSFCTQLNRALTGIAVEQDKNTQEVFAQVKQIYKTPPIKDFGGFNFSQILPDPSKPSKRSFIEDLLFNKVTLADAGFIKQYGDCLGDIVARDLICAQKFNGLTVLPPLLTDEMIAQYTSALLAGTITSGWTFGAGAALQIPFAMQMAYRFNGIGVTQNVLYENQKLIANQFNSAIGKIQDSLSSTASALGKLQDVVNQNAQALNTLVKQLSSNFGAISSVLNDILSRLDKVEAEVQIDRLITGRLQSLQTYVTQQLIRAAEIRASANLAATKMSECVLGQSKRVDFCGKGYHLMSFPQSAPHGVVFLHVTYVPAQEKNFTTAPAICHDGKAHFPREGVFVSNGTHWFVTQRNFYEPQIITTDNTFVSGNCDVVIGIVNNTVYDPLQPELDS

SEQ ID NO: 2663 - protein, 1147 aa, Artificial Sequence
  SARS-CoV-2/USA/WA-UW291/2020__EPI_ISL_418076 spike protein (1-1147)
MFVFLVLLPLVSSQCVNLTTRTQLPPAYTNSFTRGVYYPDKVFRSSVLHSTQDLFLPFFSNVTWFHAIHVSGTNGTKRFDNPVLPFNDGVYFASTEKSNIIRGWIFGTTLDSKTQSLLIVNNATNVVIKVCEFQFCNDPFLGVYYHKNNKSWMESEFRVYSSANNCTFEYVSQPFLMDLEGKQGNFKNLREFVFKNIDGYFKIYSKHTPINLVRDLPQGFSALEPLVDLPIGINITRFQTLLALHRSYLTPGDSSSGWTAGAAAYYVGYLQPRTFLLKYNENGTITDAVDCALDPLSETKCTLKSFTVEKGIYQTSNFRVQPTESIVRFPNITNLCPFGEVFNATRFASVYAWNRKRISNCVADYSVLYNSASFSTFKCYGVSPTKLNDLCFTNVYADSFVIRGDEVRQIAPGQTGKIADYNYKLPDDFTGCVIAWNSNNLDSKVGGNYNYLYRLFRKSNLKPFERDISTEIYQAGSTPCNGVEGFNCYFPLQSYGFQPTNGVGYQPYRVVVLSFELLHAPATVCGPKKSTNLVKNKCVNFNFNGLTGTGVLTESNKKFLPFQQFGRDIADTTDAVRDPQTLEILDITPCSFGGVSVITPGTNTSNQVAVLYQGVNCTEVPVAIHADQLTPTWRVYSTGSNVFQTRAGCLIGAEHVNNSYECDIPIGAGICASYQTQTNSPRRARSVASQSIIAYTMSLGAENSVAYSNNSIAIPTNFTISVTTEILPVSMTKTSVDCTMYICGDSTECSNLLLQYGSFCTQLNRALTGIAVEQDKNTQEVFAQVKQIYKTPPIKDFGGFNFSQILPDPSKPSKRSFIEDLLFNKVTLADAGFIKQYGDCLGDIAARDLICAQKFNGLTVLPPLLTDEMIAQYTSALLAGTITSGWTFGAGAALQIPFAMQMAYRFNGIGVTQNVLYENQKLIANQFNSAIGKIQYSLSSTASALGKLQDVVNQNAQALNTLVKQLSSNFGAISSVLNDILSRLDKVEAEVQIDRLITGRLQSLQTYVTQQLIRAAEIRASANLAATKMSECVLGQSKRVDFCGKGYHLMSFPQSAPHGVVFLHVTYVPAQEKNFTTAPAICHDGKAHFPREGVFVSNGTHWFVTQRNFYEPQIITTDNTFVSGNCDVVIGIVNNTVYDPLQPELDS

SEQ ID NO: 2664 - protein, 1147 aa, Artificial Sequence; identical to SEQ ID NO: 2627
  SARS-CoV-2/Portugal/PT0034/2020__EPI_ISL_418019 spike protein (1-1147)

SEQ ID NO: 2665 - protein, 1147 aa, Artificial Sequence; identical to SEQ ID NO: 2619
  SARS-CoV-2/Iceland/202/2020__EPI_ISL_417750 spike protein (1-1147)

SEQ ID NO: 2666 - protein, 1147 aa, Artificial Sequence
  SARS-CoV-2/USA/WA-UW261/2020__EPI_ISL_418046 spike protein (1-1147)
MFVFLVLLPLVSSQCVNLTTRTQLPPAYTNSFTRGVYYPDKVFRSSVLHSTQDLFLPFFSNVTWFHAIHVSGTNGTKRFDNPVLPFNDGVYFASTEKSNIIRGWIFGTTLDSKTQSLLIVNNATNVVIKVCEFQFCNDPFLGVYYHKNNKSWMESEFRVYSSANNCTFEYVSQPFLMDLEGKQGNFKNLREFVFKNIDGYFKIYSKHTPINLVRDLPQGFSALEPLVDLPIGINITRFQTLLALHRSYLTPGDSSSGWTAGAAAYYVGYLQPRTFLLKYNENGTITDAVDCALDPLSETKCTLKSFTVEKGIYQTSNFRVQPTESIVRFPNITNLCPFGEVFNATRFTSVYAWNRKRISNCVADYSVLYNSASFSTFKCYGVSPTKLNDLCFTNVYADSFVIRGDEVRQIAPGQTGKIADYNYKLPDDFTGCVIAWNSNNLDSKVGGNYNYLYRLFRKSNLKPFERDISTEIYQAGSTPCNGVEGFNCYFPLQSYGFQPTNGVGYQPYRVVVLSFELLHAPATVCGPKKSTNLVKNKCVNFNFNGLTGTGVLTESNKKFLPFQQFGRDIADTTDAVRDPQTLEILDITPCSFGGVSVITPGTNTSNQVAVLYQDVNCTEVPVAIHADQLTPTWRVYSTGSNVFQTRAGCLIGAEHVNNSYECDIPIGAGICASYQTQTNSPRRARSVASQSIIAYTMSLGAENSVAYSNNSIAIPTNFTISVTTEILPVSMTKTSVDCTMYICGDSTECSNLLLQYGSFCTQLNRALTGIAVEQDKNTQEVFAQVKQIYKTPPIKDFGGFNFSQILPDPSKPSKRSFIEDLLFNKVTLADAGFIKQYGDCLGDIAARDLICAQKFNGLTVLPPLLTDEMIAQYTSALLAGTITSGWTFGAGAALQIPFAMQMAYRFNGIGVTQNVLYENQKLIANQFNSAIGKIQDSLSSTASALGKLQDVVNQNAQALNTLVKQLSSNFGAISSVLNDILSRLDKVEAEVQIDRLITGRLQSLQTYVTQQLIRAAEIRASANLAATKMSECVLGQSKRVDFCGKGYHLMSFPQSAPHGVVFLHVTYVPAQEKNFTTAPAICHDGKAHFPREGVFVSNGTHWFVTQRNFYEPQIITTDNTFVSGNCDVVIGIVNNTVYDPLQPELDS

SEQ ID NO: 2667 - protein, 1147 aa, Artificial Sequence
  SARS-CoV-2/Portugal/PT0035/2020__EPI_ISL_418020 spike protein (1-1147)
MFVFLVLLPLVSSQCVNLTTRTQLPPAYTNSFTRGVYYPDKVFRSSVLHSTQDLFLPFFSNVTWFHAIHVSGTNGTKRFDNPVLPFNDGVYFASTEKSNIIRGWIFGTTLDSKTQSLLIVNNATNVVIKVCEFQFCNDPFLGVYYHKNNKSWMESEFRVYSSANNCTFEYVSQPFLMDLEGKQGNFKNLREFVFKNIDGYFKIYSKHTPINLVRDLPQGFSALEPLVDLPIGINITRFQTLLALHRSYLTPGDSSSGWTAGAAAYYVGYLQPRTFLLKYNENGTITDAVDCALDPLSETKCTLKSFTVEKGIYQTSNFRVQPTESIVRFPNITNLCPFGEVFNATRFASVYAWNRKRISNCVADYSVLYNSASFSTFKCYGVSPTKLNDLCFTNVYADSFVIRGDEVRQIAPGQTGKIADYNYKLPDDFTGCVIAWNSNNLDSKVGGNYNYLYRLFRKSNLKPFERDISTEIYQAGSTPCNGVEGFNCYFPLQSYGFQPTNGVGYQPYRVVVLSFELLHAPATVCGPKKSTNLVKNKCVNFNFNGLTGTGVLTESNKKFLPFQQFGRDIADTTDAVRDPQTLEILDITPCSFGGVSVITPGTNTSNQVAVLYQDVNCTEVPVAIHADQLTPTWRVYSTGSNVFQTRAGCLIGAEHVNNSYECDIPIGAGICASYQTQTNSPRRARSVASQSIIAYTMSLGAENSVAYSNNSIAIPTNFTISVTTEILPVSMTKTSVDCTMYICGDSTECSNLLLQYGSFCTQLNRALTGIAVEQDKNTQEVFAQVKQIYKTPPIKDFGGFNFSQILPDPSKPSKRSFIEDLLFNKVTLADAGFIKQYGDCLGDISARDLICAQKFNGLTVLPPLLTDEMIAQYTSALLAGTITSGWTFGAGAALQIPFAMQMAYRFNGIGVTQNVLYENQKLIANQFNSAIGKIQDSLSSTASALGKLQDVVNQNAQALNTLVKQLSSNFGAISSVLNDILSRLDKVEAEVQIDRLITGRLQSLQTYVTQQLIRAAEIRASANLAATKMSECVLGQSKRVDFCGKGYHLMSFPQSAPHGVVFLHVTYVPAQEKNFTTAPAICHDGKAHFPREGVFVSNGTHWFVTQRNFYEPQIITTDNTFVSGNCDVVIGIVNNTVYDPLQPELDS

SEQ ID NO: 2668 - protein, 1147 aa, Artificial Sequence
  SARS-CoV-2/USA/NY-NYUMC7/2020__EPI_ISL_418192 spike protein (1-1147)
MFVFLVLLPLVSSQCVNLTTRTQLPPAYTNSFTRGVYYPDKVFRSSVLHSTQDLFLPFFSNVTWFHAIHVSGTNGTKRFDNPVLPFNDGVYFASTEKSNIIRGWIFGTTLDSKTQSLLIVNNATNVVIKVCEFQFCNDPFLGVYHHKNNKSWMESEFRVYSSANNCTFEYVSQPFLMDLEGKQGNFKNLREFVFKNIDGYFKIYSKHTPINLVRDLPQGFSALEPLVDLPIGINITRFQTLLALHRSYLTPGDSSSGWTAGAAAYYVGYLQPRTFLLKYNENGTITDAVDCALDPLSETKCTLKSFTVEKGIYQTSNFRVQPTESIVRFPNITNLCPFGEVFNATRFASVYAWNRKRISNCVADYSVLYNSASFSTFKCYGVSPTKLNDLCFTNVYADSFVIRGDEVRQIAPGQTGKIADYNYKLPDDFTGCVIAWNSNNLDSKVGGNYNYLYRLFRKSNLKPFERDISTEIYQAGSTPCNGVEGFNCYFPLQSYGFQPTNGVGYQPYRVVVLSFELLHAPATVCGPKKSTNLVKNKCVNFNFNGLTGTGVLTESNKKFLPFQQFGRDIADTTDAVRDPQTLEILDITPCSFGGVSVITPGTNTSNQVAVLYQGVNCTEVPVAIHADQLTPTWRVYSTGSNVFQTRAGCLIGAEHVNNSYECDIPIGAGICASYQTQTNSPRRARSVASQSIIAYTMSLGAENSVAYSNNSIAIPTNFTISVTTEILPVSMTKTSVDCTMYICGDSTECSNLLLQYGSFCTQLNRALTGIAVEQDKNTQEVFAQVKQIYKTPPIKDFGGFNFSQILPDPSKPSKRSFIEDLLFNKVTLADAGFIKQYGDCLGDIAARDLICAQKFNGLTVLPPLLTDEMIAQYTSALLAGTITSGWTFGAGAALQIPFAMQMAYRFNGIGVTQNVLYENQKLIANQFNSAIGKIQDSLSSTASALGKLQDVVNQNAQALNTLVKQLSSNFGAISSVLNDILSRLDKVEAEVQIDRLITGRLQSLQTYVTQQLIRAAEIRASANLAATKMSECVLGQSKRVDFCGKGYHLMSFPQSAPHGVVFLHVTYVPAQEKNFTTAPAICHDGKAHFPREGVFVSNGTHWFVTQRNFYEPQIITTDNTFVSGNCDVVIGIVNNTVYDPLQPELDS

SEQ ID NO: 2669 - protein, 1147 aa, Artificial Sequence
  SARS-CoV-2/Iceland/189/2020__EPI_ISL_417709 spike protein (1-1147)
MFVFLVLLPLVSSQCVNLTTRTQLPPAYTNSFTRGVYYPDKVFRSSVLHSTQDLFLPFFSNVTWFHAIHVSGTNGTKRFDNPVLPFNDGVYFASTEKSNIIRGWIFGTTLDSKTQSLLIVNNATNVVIKVCEFQFCNDPFLGVYYHKNNKSWMESEFRVYSSANNCTFEYVSQPFLMDLEGKQGNFKNLREFVFKNIDGYFKIYSKHTPINLVRDLPQGFSALEPLVDLPIGINITRFQTLLALHRSYLTPGDSSSGWTAGAAAYYVGYLQPRTFLLKYNENGTITDAVDCALDPLSETKCTLKSFTVEKGIYQTSNFRVQPTESIVRFPNITNLCPFGEVFNATRFASVYAWNRKRISNCVADYSVLYNSASFSTFKCYGVSPTKLNDLCFTNVYADSFVIRGDEVRQIAPGQTGKIADYNYKLPDDFTGCVIAWNSNNLDSKVGGNYNYLYRLFRKSNLKPFERDISTEIYQAGSTPCNGVEGFNCYFPLQSYGFQPTNGVGYQPYRVVVLSFELLHAPATVCGPKKSTNLVKNKCVNFNFNGLTGTGVLTESNKKFLPFQQFGRDIADTTDAVRDPQTLEILDITPCSFGGVSVITPGTNTSNQVAVLYQGVNCTEVPVAIHADQLTPTWRVYSTGSNVFQTRAGCLIGAEHVNNSYECDIPIGAGICASYQTQTNSPRRARSVASQSIIAYTMSLGAENSVAYSNNSIAIPTNFTISVTTEILPVSMTKTSVDCTMYICGDSTECSNLLLQYGSFCTQLNRALTGIAVEQDKNTQEVFAQVKQIYKTPPIKDFGGFNFSQILPDPSKPSKRSFIEDLLFNKVTLADAGFTKQYGDCLGDIAARDLICAQKFNGLTVLPPLLTDEMIAQYTSALLAGTITSGWTFGAGAALQIPFAMQMAYRFNGIGVTQNVLYENQKLIANQFNSAIGKIQDSLSSTASALGKLQDVVNQNAQALNTLVKQLSSNFGAISSVLNDILSRLDKVEAEVQIDRLITGRLQSLQTYVTQQLIRAAEIRASANLAATKMSECVLGQSKRVDFCGKGYHLMSFPQSAPHGVVFLHVTYVPAQEKNFTTAPAICHDGKAHFPREGVFVSNGTHWFVTQRNFYEPQIITTDNTFVSGNCDVVIGIVNNTVYDPLQPELDS

SEQ ID NO: 2670 - protein, 1147 aa, Artificial Sequence
  SARS-CoV-2/Australia/NSW56/2020__EPI_ISL_417408 spike protein (1-1147)
MFVFLVLLPLVSSQCVNLTTRTQLPPAYTNSFTRGVYYPDKVFRSSVLHSTQDLFLPFFSNVTWFHAIHVSGTNGTKRFDNPVLPFNDGVYFASTEKSNIIRGWIFGTTLDSKTQSLLIVNNATNVVIKVCEFQFCNDPFLGVYYHKNNKSWMESEFRVYSSANNCTFEYVSQPFLMDLEGKQGNFKNLREFVFKNIDGYFKIYSKHTPINLVRDLPQGFSALEPLVDLPIGINITRFQTLLALHRSYLTPGDSSSGWTAGAAAYYVGYLQPRTFLLKYNENGTITDAVDCALDPLSETKCTLKSFTVEKGIYQTSNFRVQPTESIVRFPNITNLCPFGEVFNATRFASVYAWNRKRISNCVADYSVLYNSASFSTFKCYGVSPTKLNDLCFTNVYADSFVIRGDEVRQIAPGQTGKIADYNYKLPDDFTGCVIAWNSNNLDSKVGGNYNYLYRLFRKSNLKPFERDISTEIYQAGSTPCNGVEGFNCYFPLQSYGFQPTNGVGYQPYRVVVLSFELLHAPATVCGPKKSTNLVKNKCVNFNFNGLTGTGVLTESNKKFLPFQQFGRDIADTTDAVRDPQTLEILDITPCSFGGVSVITPGTNTSNQVAVLYQDVNCTEVPVAIHADQLTPTWRVYSTGSNVFQTRAGCLIGAEHVNNSYECDIPIGAGICASYQTQTNSPRRARSVASQSIIAYTMSLGAENSVAYSNNSIAIPTNFTISVTTEILPVSMTKTSVDCTMYICGDSTECSNLLLQYGSFCTQLNRALTGIAVEQDKNTQEVFAQVKQIYKTPPIKDFGGFNFSQILPDSSKPSKRSFIEDLLFNKVTLADAGFIKQYGDCLGDIAARDLICAQKFNGLTVLPPLLTDEMIAQYTSALLAGTITSGWTFGAGAALQIPFAMQMAYRFNGIGVTQNVLYENQKLIANQFNSAIGKIQDSLSSTASALGKLQDVVNQNAQALNTLVKQLSSNFGAISSVLNDILSRLDKVEAEVQIDRLITGRLQSLQTYVTQQLIRAAEIRASANLAATKMSECVLGQSKRVDFCGKGYHLMSFPQSAPHGVVFLHVTYVPAQEKNFTTAPAICHDGKAHFPREGVFVSNGTHWFVTQRNFYEPQIITTDNTFVSGNCDVVIGIVNNTVYDPLQPELDS

SEQ ID NO: 2671 - protein, 1147 aa, Artificial Sequence
  SARS-CoV-2/Iceland/280/2020__EPI_ISL_417608 spike protein (1-1147)
MFVFLVLLPLVSSQCVNLTTRTQLPPAYTNSFTRGVYYPDKVFRSSVLHSTQDLFLPFFSNVTWFHAIHVSGTNGTKRFDNPVLPFNDGVYFASTEKSNIIRGWIFGTTLDSKTQSLLIVNNATNVVIKVCEFQFCNDPFLGVYYHKNNKSWMESEFRVYSSANNCTFEYVSQPFLMDLEGKQGNFKNLREFVFKNIDGYFKIYSKHTPINLVRDLPQGFSALEPLVDLPIGINITRFQTLLALHRSYLTPGDSSSGWTAGAAAYYVGYLQPRTFLLKYNENGTITDAVDCALDPLSETKCTLKSFTVEKGIYQTSNFRVQPTESIVRFPNITNLCPFGEVFNATRFASVYAWNRKRISNCVADYSVLYNSASFSTFKCYGVSPTKLNDLCFTNVYADSFVIRGDEVRQIAPGQTGKIADYNYKLPDDFTGCVIAWNSNNLDSKVGGNYNYLYRLFRKSNLKPFERDISTEIYQAGSTPCNGVEGFNCYFPLQSYGFQPTNGVGYQPYRVVVLSFELLHAPATVCGPKKSTNLVKNKCVNFNFNGLTGTGVLTESNKKFLPFQQFGRDIADTTDAVRDPQTLEILDITPCSFGGVSVITPGTNTSNQVAVLYQGVNCTEVPVAIHADQLTPTWRVYSTGSNVFQTRAGCLIGAEHVNNSYECDIPIGAGICASYHTQTNSPRRARSVASQSIIAYTMSLGAENSVAYSNNSIAIPTNFTISVTTEILPVSMTKTSVDCTMYICGDSTECSNLLLQYGSFCTQLNRALTGIAVEQDKNTQEVFAQVKQIYKTPPIKDFGGFNFSQILPDPSKPSKRSFIEDLLFNKVTLADAGFIKQYGDCLGDIAARDLICAQKFNGLTVLPPLLTDEMIAQYTSALLAGTITSGWTFGAGAALQIPFAMQMAYRFNGIGVTQNVLYENQKLIANQFNSAIGKIQDSLSSTASALGKLQDVVNQNAQALNTLVKQLSSNFGAISSVLNDILSRLDKVEAEVQIDRLITGRLQSLQTYVTQQLIRAAEIRASANLAATKMSECVLGQSKRVDFCGKGYHLMSFPQSAPHGVVFLHVTYVPAQEKNFTTAPAICHDGKAHFPREGVFVSNGTHWFVTQRNFYEPQIITTDNTFVSGNCDVVIGIVNNTVYDPLQPELDS

SEQ ID NO: 2672 - protein, 1147 aa, Artificial Sequence; identical to SEQ ID NO: 2627
  SARS-CoV-2/Iceland/247/2020__EPI_ISL_417575 spike protein (1-1147)

SEQ ID NO: 2673 - protein, 1147 aa, Artificial Sequence
  SARS-CoV-2/Iceland/238/2020__EPI_ISL_417566 spike protein (1-1147)
MFVFLVLLPLVSSQCVNLTTRTQLPPAYTNSFTRGVYYPDKVFRSSVLHSTQDLFLPFFSNVTWFHAIHVSGTNGTKRFDNPVLPFNDGVYFASTEKSNIIRGWIFGTTLDSKTQSLLIVNNATNVVIKVCEFQFCNDPFLGVYYHKNNKSWMESEFRVYSSANNCTFEYVSQPFLMDLEGKQGNFKNLREFVFKNIDGYFKIYSKHTPINLVRDLPQGFSALEPLVDLPIGINITRFQTLLALHRSYLTPGDSSSGWTAGAAAYYVGYLQPRTFLLKYNENGTITDAVDCALDPLSETKCTLKSFTVEKGIYQTSNFRVQPTESIVRFPNITNLCPFGEVFNATRFASVYAWNRKRISNCVADYSVLYNSASFSTFKCYGVSPTKLNDLCFTNVYADSFVIRGDEVRQIAPGQTGKIADYNYKLPDDFTGCVIAWNSNNLDSKVGGNYNYLYRLFRKSNLKPFERDISTEIYQAGSTPCNGVEGFNCYFPLQSYGFQPTNGVGYQPYRVVVLSFELLHAPATVCGPKKSTNLVKNKCVNFNFNGLTGTGVLTESNKKFLPFQQFGRDIADTTDAVRDPQTLEILDITPCSFGGVSVITPGTNTSNQVAVLYQGVNCTEVPVAIHADQLTPTWRVYSTGSNVFQTRAGCLIGAEHVNNSYECDIPIGAGICASYQTQTNSPRRARSVASQSIIAYTMSLGAENSVAYSNNSIAIPTNFTISVTTEILPVSMTKTSVDCTMYICGDSTECSNLLLQYGSFCTQLNRALTGIAVEQDKNTQEVFAQVKQIYKTPPIKDFGGFNFSQILPDPSKPSKRSFIEDLLFNKVTLADVGFIKQYGDCLGDIAARDLICAQKFNGLTVLPPLLTDEMIAQYTSALLAGTITSGWTFGAGAALQIPFAMQMAYRFNGIGVTQNVLYENQKLIANQFNSAIGKIQDSLSSTASALGKLQDVVNQNAQALNTLVKQLSSNFGAISSVLNDILSRLDKVEAEVQIDRLITGRLQSLQTYVTQQLIRAAEIRASANLAATKMSECVLGQSKRVDFCGKGYHLMSFPQSAPHGVVFLHVTYVPAQEKNFTTAPAICHDGKAHFPREGVFVSNGTHWFVTQRNFYEPQIITTDNTFVSGNCDVVIGIVNNTVYDPLQPELDS

SEQ ID NO: 2674 - protein, 1147 aa, Artificial Sequence
  SARS-CoV-2/Greece/16/2020__EPI_ISL_418265 spike protein (1-1147)
MFVFLVLLPLVSSQCVNLTTRTQLPPAYTNSFTRGVYYPDKVFRSSVLHSTQDLFLPFFSNVTWFHAIHVSGTNGTKRFDNPVLPFNDGVYFASTEKSNIIRGWIFGTTLDSKTQSLLIVNNATNVVIKVCEFQFCNDPFLGVYYHKNNKSWMESEFRVYSSANNCTFEYVSQPFLMDLEGKQGNFKNLREFVFKNVDGYFKIYSKHTPINLVRDLPQGFSALEPLVDLPIGINITRFQTLLALHRSYLTPGDSSSGWTAGAAAYYVGYLQPRTFLLKYNENGTITDAVDCALDPLSETKCTLKSFTVEKGIYQTSNFRVQPTESIVRFPNITNLCPFGEVFNATRFASVYAWNRKRISNCVADYSVLYNSASFSTFKCYGVSPTKLNDLCFTNVYADSFVIRGDEVRQIAPGQTGKIADYNYKLPDDFTGCVIAWNSNNLDSKVGGNYNYLYRLFRKSNLKPFERDISTEIYQAGSTPCNGVEGFNCYFPLQSYGFQPTNGVGYQPYRVVVLSFELLHAPATVCGPKKSTNLVKNKCVNFNFNGLTGTGVLTESNKKFLPFQQFGRDIADTTDAVRDPQTLEILDITPCSFGGVSVITPGTNTSNQVAVLYQDVNCTEVPVAIHADQLTPTWRVYSTGSNVFQTRAGCLIGAEHVNNSYECDIPIGAGICASYQTQTNSPRRARSVASQSIIAYTMSLGAENSVAYSNNSIAIPTNFTISVTTEILPVSMTKTSVDCTMYICGDSTECSNLLLQYGSFCTQLNRALTGIAVEQDKNTQEVFAQVKQIYKTPPIKDFGGFNFSQILPDPSKPSKRSFIEDLLFNKVTLADAGFIKQYGDCLGDIAARDLICAQKFNGLTVLPPLLTDEMIAQYTSALLAGTITSGWTFGAGAALQIPFAMQMAYRFNGIGVTQNVLYENQKLIANQFNSAIGKIQDSLSSTASALGKLQDVVNQNAQALNTLVKQLSSNFGAISSVLNDILSRLDKVEAEVQIDRLITGRLQSLQTYVTQQLIRAAEIRASANLAATKMSECVLGQSKRVDFCGKGYHLMSFPQSAPHGVVFLHVTYVPAQEKNFTTAPAICHDGKAHFPREGVFVSNGTHWFVTQRNFYEPQIITTDNTFVSGNCDVVIGIVNNTVYDPLQPELDS

SEQ ID NO: 2675 - protein, 1147 aa, Artificial Sequence
  SARS-CoV-2/Iceland/319/2020__EPI_ISL_417648 spike protein (1-1147)
MFVFLVLLPLVSSQCVNLTTRTQLPPAYTNSFTRGVYYPDKVFRSSVLHSTQDLFLPFFSNVTWFHAIHVSGTNGTKRFDNPVLPFNDGVYFASTEKSNIIRGWIFGTTLDSKTQSLLIVNNATNVVIKVCEFQFCNDPFLGVYYHKNNKSWMESEFRVYSSANNCTFEYVSQPFLIDLEGKQGNFKNLREFVFKNIDGYFKIYSKHTPINLVRDLPQGFSALEPLVDLPIGINITRFQTLLALHRSYLTPGDSSSGWTAGAAAYYVGYLQPRTFLLKYNENGTITDAVDCALDPLSETKCTLKSFTVEKGIYQTSNFRVQPTESIVRFPNITNLCPFGEVFNATRFASVYAWNRKRISNCVADYSVLYNSASFSTFKCYGVSPTKLNDLCFTNVYADSFVIRGDEVRQIAPGQTGKIADYNYKLPDDFTGCVIAWNSNNLDSKVGGNYNYLYRLFRKSNLKPFERDISTEIYQAGSTPCNGVEGFNCYFPLQSYGFQPTNGVGYQPYRVVVLSFELLHAPATVCGPKKSTNLVKNKCVNFNFNGLTGTGVLTESNKKFLPFQQFGRDIADTTDAVRDPQTLEILDITPCSFGGVSVITPGTNTSNQVAVLYQGVNCTEVPVAIHADQLTPTWRVYSTGSNVFQTRAGCLIGAEHVNNSYECDIPIGAGICASYQTQTNSPRRARSVASQSIIAYTMSLGAENSVAYSNNSIAIPTNFTISVTTEILPVSMTKTSVDCTMYICGDSTECSNLLLQYGSFCTQLNRALTGIAVEQDKNTQEVFAQVKQIYKTPPIKDFGGFNFSQILPDPSKPSKRSFIEDLLFNKVTLADAGFIKQYGDCLGDIAARDLICAQKFNGLTVLPPLLTDEMIAQYTSALLAGTITSGWTFGAGAALQIPFAMQMAYRFNGIGVTQNVLYENQKLIANQFNSAIGKIQDSLSSTASALGKLQDVVNQNAQALNTLVKQLSSNFGAISSVLNDILSRLDKVEAEVQIDRLITGRLQSLQTYVTQQLIRAAEIRASANLAATKMSECVLGQSKRVDFCGKGYHLMSFPQSAPHGVVFLHVTYVPAQEKNFTTAPAICHDGKAHFPREGVFVSNGTHWFVTQRNFYEPQIITTDNTFVSGNCDVVIGIVNNTVYDPLQPELDS

SEQ ID NO: 2676 - protein, 1147 aa, Artificial Sequence
  SARS-CoV-2/Congo/94/2020__EPI_ISL_417947 spike protein (1-1147)
MFVFLVLLPLVSSQCVNLTTRTQLPPAYTNSFTRGVYYPDKVFRSSVLHSTQDLFLPFFSNVTWFHAIHVSGTNGTKRFDNPVLPFNDGVYFASTEKSNIIRGWIFGTTLDSKTQSLLIVNNATNVVIKVCEFQFCNDPFLGVYYHKNNKSWMESEFRVYSSANNCTFEYVSQPFLMDLEGKQGNFKNLREFVFKNIDGYFKIYSKHTPINLVRDLPQGFSALEPLVDLPIGINITRFQTLLALHRSYLTPGDSSSGWTAGAAAYYVGYLQPRTFLLKYNENGTITDAVDCALDPLSETKCTLKSFTVEKGIYQTSNFRVQPTESIVRFPNITNLCPFGEVFNATRFASVYAWNRKRISNCVADYSVLYNSASFSTFKCYGVSPTKLNDLCFTNVYADSFVIRGDEVRQIAPGQTGKIADYNYKLPDDFTGCVIAWNSNNLDSKVGGNYNYLYRLFRKSNLKPFERDISTEIYQAGSTPCNGVEGFNCYFPLQSYGFQPTNGVGYQPYRVVVLSFELLHAPATVCGPKKSTNLVKNKCVNFNFNGLTGTGVLTESNKKFLPFQQFGRDIADTTDAVRDPQTLEILDITPCSFGGVSVITPGTNTSNQVAVLYQGVNCTEVPVAIHADQLTPTWRVYSTGSNVFQTRAGCLIGAEHVNNSYECDIPIGAGICASYQTQTNSPRRARSVASQSIIAYTMSLGAENSVAYSNNSIAIPTNFTISVTTEILPVSMTKTSVDCTMYICGDSTECSNLLLQYGSFCTQLNRALTGIAVEQDKNTQEVFAQVKQIYKTPPIKDFGGFNFSQILPDPSKPSKRSFIEDILFNKVTLADAGFIKQYGDCLGDIAARDLICAQKFNGLTVLPPLLTDEMIAQYTSALLAGTITSGWTFGAGAALQIPFAMQMAYRFNGIGVTQNVLYENQKLIANQFNSAIGKIQDSLSSTASALGKLQDVVNQNAQALNTLVKQLSSNFGAISSVLNDILSRLDKVEAEVQIDRLITGRLQSLQTYVTQQLIRAAEIRASANLAATKMSECVLGQSKRVDFCGKGYHLMSFPQSAPHGVVFLHVTYVPAQEKNFTTAPAICHDGKAHFPREGVFVSNGTHWFVTQRNFYEPQIITTDNTFVSGNCDVVIGIVNNTVYDPLQPELDS

SEQ ID NO: 2677 - protein, 1147 aa, Artificial Sequence
  SARS-CoV-2/Congo/158/2020__EPI_ISL_417950 spike protein (1-1147)
MFVFLVLLPLVSSQCVNLTTRTQLPPAYTNSFTRGVYYPDKVFRSSVLHSTQDLFLPFFSNVTWFHAIHVSGTNGTKRFDNPVLPFNDGVYFASTEKSNIIRGWIFGTTLDSKTQSLLIVNNATNVVIKVCEFQFCNDPFLGVYYHKNNKSWMESEFRVYSSANNCTFEYVSQPFLMDLEGKQGNFKNLREFVFKNIDGYFKIYSKHTPINLVRDLPQGFSALEPLVDLPIGINITRFQTLLALHRSYLTPGDSSSGWTAGAAAYYVGYLQPRTFLLKYNENGTITDAVDCALDPLSETKCTLKSFTVEKGIYQTSNFRVQPTESIVRFPNITNLCPFGEVFNATRFASVYAWNRKRISNCVADYSVLYNSASFSTFKCYGVSPTKLNDLCFTNVYADSFVIRGDEVRQIAPGQTGKIADYNYKLPDDFTGCVIAWNSNNLDSKVGGNYNYLYRLFRKSNLKPFERDISTEIYQAGSTPCNGVEGFNCYFPLQSYGFQPTNGVGYQPYRVVVLSFELLHAPATVCGPKKSTNLVKNKCVNFNFNGLTGTGVLTESNKKFLPFQQFGRDIADTTDAVRDPQTLEILDITPCSFGGVSVITPGTNTSNQVAVLYQDVNCTEVPVAIHADQLTPTWRVYSTGSNVFQTRAGCLIGAEHVNNSYECDIPIGAGICASYQTQTNSPRRARSVASQSIIAYTMSLGAENSVAYSNNSIAIPTNFTISVTTEILPVSMTKTSVDCTMYICGDSTECSNLLLQYGSFCTQLNRALTGIAVEQDKNTQEVFAQVKQIYKTPPIKDFGGFNFSQILPDPSKPSKRSFIEDLLFNKVTLADAGFIKQYGDCLGDIAARDLICAQKFNGLTVLPPLLTDEMIAQYTSALLAGTITSGWTFGAGAALQIPFAMQMAYRFNGIGVTQNVLYENQKLIANQFNSAIGKIQDSLSSTASALGKLQDVVNQNAQALNTLVKQLSSNFGAISSVLNDILSRLDKVEAEVQIDRLITGRLQSLQTYVTQQLIRAAEIRASANLAATKMSECVLGQSKRVDFCGKGYHLMSFPQSAPHGVVFLHVTYVPAQEKNFTTAPAICHDGKAHFPREGVFVSNGTHWFVTQRNFYEPQIITTDNTFLSGNCDVVIGIVNNTVYDPLQPELDS

SEQ ID NO: 2678 - protein, 1147 aa, Artificial Sequence
  SARS-CoV-2/USA/UT-00034/2020__EPI_ISL_417977 spike protein (1-1147)
MFVFLVLLPLVSSQCVNLTTRTQLPPAYTNSFTRGVYYPDKVFRSSVLHSTQDLFLPFFSNVTWFHAIHVSGTNGTKRFDNPVLPFNDGVYFASTEKSNIIRGWIFGTTLDSKTQSLLIVNNATNVVIKVCEFQFCNDPFLGVYYYKNNKSWMESEFRVYSSANNCTFEYVSQPFLMDLEGKQGNFKNLREFVFKNIDGYFKIYSKHTPINLVRDLPQGFSALEPLVDLPIGINITRFQTLLALHRSYLTPGDSSSGWTAGAAAYYVGYLQPRTFLLKYNENGTITDAVDCALDPLSETKCTLKSFTVEKGIYQTSNFRVQPTESIVRFPNITNLCPFGEVFNATRFASVYAWNRKRISNCVADYSVLYNSASFSTFKCYGVSPTKLNDLCFTNVYADSFVIRGDEVRQIAPGQTGKIADYNYKLPDDFTGCVIAWNSNNLDSKVGGNYNYLYRLFRKSNLKPFERDISTEIYQAGSTPCNGVEGFNCYFPLQSYGFQPTNGVGYQPYRVVVLSFELLHAPATVCGPKKSTNLVKNKCVNFNFNGLTGTGVLTESNKKFLPFQQFGRDIADTTDAVRDPQTLEILDITPCSFGGVSVITPGTNTSNQVAVLYQGVNCTEVPVAIHADQLTPTWRVYSTGSNVFQTRAGCLIGAEHVNNSYECDIPIGAGICASYQTQTNSPRRARSVASQSIIAYTMSLGAENSVAYSNNSIAIPTNFTISVTTEILPVSMTKTSVDCTMYICGDSTECSNLLLQYGSFCTQLNRALTGIAVEQDKNTQEVFAQVKQIYKTPPIKDFGGFNFSQILPDPSKPSKRSFIEDLLFNKVTLADAGFIKQYGDCLGDIAARDLICAQKFNGLTVLPPLLTDEMIAQYTSALLAGTITSGWTFGAGAALQIPFAMQMAYRFNGIGVTQNVLYENQKLIANQFNSAIGKIQDSLSSTASALGKLQDVVNQNAQALNTLVKQLSSNFGAISSVLNDILSRLDKVEAEVQIDRLITGRLQSLQTYVTQQLIRAAEIRASANLAATKMSECVLGQSKRVDFCGKGYHLMSFPQSAPHGVVFLHVTYVPAQEKNFTTAPAICHDGKAHFPREGVFVSNGTHWFVTQRNFYEPQIITTDNTFVSGNCDVVIGIVNNTVYDPLQPELDS

SEQ ID NO: 2679 - protein, 1147 aa, Artificial Sequence
  SARS-CoV-2/USA/UT-00033/2020__EPI_ISL_417976 spike protein (1-1147)
MFVFLVLLPLVSSQCVNLTTRTQLPPAYTNSFTRGVYYPDKVFRSSVLHSTQDLFLPFFSNVTWFHAIHVSGTNGTKRFDNPVLPFNDGVYFASTEKSNIIRGWIFGTTLDSKTQSLLIVNNATNVVIKVCEFQFCNDPFLGVYYHKNNKSWMESEFRVYSSANNCTFEYVSQPFLMDLEGKQGNFKNLREFVFKNIDGYFKIYSKHTPINLVRDLPQGFSALEPLVDLPIGINITRFQTLLALHRSYLTPGDSSSGLTAGAAAYYVGYLQPRTFLLKYNENGTITDAVDCALDPLSETKCTLKSFTVEKGIYQTSNFRVQPTESIVRFPNITNLCPFGEVFNATRFASVYAWNRKRISNCVADYSVLYNSASFSTFKCYGVSPTKLNDLCFTNVYADSFVIRGDEVRQIAPGQTGKIADYNYKLPDDFTGCVIAWNSNNLDSKVGGNYNYLYRLFRKSNLKPFERDISTEIYQAGSTPCNGVEGFNCYFPLQSYGFQPTNGVGYQPYRVVVLSFELLHAPATVCGPKKSTNLVKNKCVNFNFNGLTGTGVLTESNKKFLPFQQFGRDIADTTDAVRDPQTLEILDITPCSFGGVSVITPGTNTSNQVAVLYQGVNCTEVPVAIHADQLTPTWRVYSTGSNVFQTRAGCLIGAEHVNNSYECDIPIGAGICASYQTQTNSPRRARSVASQSIIAYTMSLGAENSVAYSNNSIAIPTNFTISVTTEILPVSMTKTSVDCTMYICGDSTECSNLLLQYGSFCTQLNRALTGIAVEQDKNTQEVFAQVKQIYKTPPIKDFGGFNFSQILPDPSKPSKRSFIEDLLFNKVTLADAGFIKQYGDCLGDIAARDLICAQKFNGLTVLPPLLTDEMIAQYTSALLAGTITSGWTFGAGAALQIPFAMQMAYRFNGIGVTQNVLYENQKLIANQFNSAIGKIQDSLSSTASALGKLQDVVNQNAQALNTLVKQLSSNFGAISSVLNDILSRLDKVEAEVQIDRLITGRLQSLQTYVTQQLIRAAEIRASANLAATKMSECVLGQSKRVDFCGKGYHLMSFPQSAPHGVVFLHVTYVPAQEKNFTTAPAICHDGKAHFPREGVFVSNGTHWFVTQRNFYEPQIITTDNTFVSGNCDVVIGIVNNTVYDPLQPELDS

SEQ ID NO: 2680 - protein, 1147 aa, Artificial Sequence
  SARS-CoV-2/USA/WI-13/2020__EPI_ISL_417516 spike protein (1-1147)
MFVFLVLLPLVSSQCVNLTTRTQLPPAYTNSFTRGVYYPDKVFRSSVLHSTQDLFLPFFSNVTWFHAIHVSGTNGTKRFDNPVLPFNDGVYFASTEKSNIIRGWIFGTTLDSKTQSLLIVNNATNVVIKVCEFQFCNDPFLGVYYHKNNKSWMESEFRVYSSANNCTFEYVSQPFLMDLEGKQGNFKNLREFVFKNIDGYFKIYSKHTPINLVRDLPQGFSALEPLVDLPIGINITRFQTLLALHRSYLTPGDSSSGWTAGAAAYYVGYLQPRTFLLKYNENGTITDAVDCALDPLSETKCTLKSFTVEKGIYQTSNFRVLPTESIVRFPNITNLCPFGEVFNATRFASVYAWNRKRISNCVADYSVLYNSASFSTFKCYGVSPTKLNDLCFTNVYADSFVIRGDEVRQIAPGQTGKIADYNYKLPDDFTGCVIAWNSNNLDSKVGGNYNYLYRLFRKSNLKPFERDISTEIYQAGSTPCNGVEGFNCYFPLQSYGFQPTNGVGYQPYRVVVLSFELLHAPATVCGPKKSTNLVKNKCVNFNFNGLTGTGVLTESNKKFLPFQQFGRDIADTTDAVRDPQTLEILDITPCSFGGVSVITPGTNTSNQVAVLYQGVNCTEVPVAIHADQLTPTWRVYSTGSNVFQTRAGCLIGAEHVNNSYECDIPIGAGICASYQTQTNSPRRARSVASQSIIAYTMSLGAENSVAYSNNSIAIPTNFTISVTTEILPVSMTKTSVDCTMYICGDSTECSNLLLQYGSFCTQLNRALTGIAVEQDKNTQEVFAQVKQIYKTPPIKDFGGFNFSQILPDPSKPSKRSFIEDLLFNKVTLADAGFIKQYGDCLGDIAARDLICAQKFNGLTVLPPLLTDEMIAQYTSALLAGTITSGWTFGAGAALQIPFAMQMAYRFNGIGVTQNVLYENQKLIANQFNSAIGKIQDSLSSTASALGKLQDVVNQNAQALNTLVKQLSSNFGAISSVLNDILSRLDKVEAEVQIDRLITGRLQSLQTYVTQQLIRAAEIRASANLAATKMSECVLGQSKRVDFCGKGYHLMSFPQSAPHGVVFLHVTYVPAQEKNFTTAPAICHDGKAHFPREGVFVSNGTHWFVTQRNFYEPQIITTDNTFVSGNCDVVIGIVNNTVYDPLQPELDS

SEQ ID NO: 2681 - protein, 1146 aa, Artificial Sequence
  SARS-CoV-2/India/1-27/2020__EPI_ISL_413522 spike protein (1-1146)
MFVFLVLLPLVSSQCVNLTTRTQLPPAYTNSFTRGVYYPDKVFRSSVLHSTQDLFLPFFSNVTWFHAIHVSGTNGTKRFDNPVLPFNDGVYFASTEKSNIIRGWIFGTTLDSKTQSLLIVNNATNVVIKVCEFQFCNDPFLGVYHKNNKSWMESEFRVYSSANNCTFEYVSQPFLMDLEGKQGNFKNLREFVFKNIDGYFKIYSKHTPINLVRDLPQGFSALEPLVDLPIGINITRFQTLLALHRSYLTPGDSSSGWTAGAAAYYVGYLQPRTFLLKYNENGTITDAVDCALDPLSETKCTLKSFTVEKGIYQTSNFRVQPTESIVRFPNITNLCPFGEVFNATRFASVYAWNRKRISNCVADYSVLYNSASFSTFKCYGVSPTKLNDLCFTNVYADSFVIRGDEVIQIAPGQTGKIADYNYKLPDDFTGCVIAWNSNNLDSKVGGNYNYLYRLFRKSNLKPFERDISTEIYQAGSTPCNGVEGFNCYFPLQSYGFQPTNGVGYQPYRVVVLSFELLHAPATVCGPKKSTNLVKNKCVNFNFNGLTGTGVLTESNKKFLPFQQFGRDIADTTDAVRDPQTLEILDITPCSFGGVSVITPGTNTSNQVAVLYQDVNCTEVPVAIHADQLTPTWRVYSTGSNVFQTRAGCLIGAEHVNNSYECDIPIGAGICASYQTQTNSPRRARSVASQSIIAYTMSLGAENSVAYSNNSIAIPTNFTISVTTEILPVSMTKTSVDCTMYICGDSTECSNLLLQYGSFCTQLNRALTGIAVEQDKNTQEVFAQVKQIYKTPPIKDFGGFNFSQILPDPSKPSKRSFIEDLLFNKVTLADAGFIKQYGDCLGDIAARDLICAQKFNGLTVLPPLLTDEMIAQYTSALLAGTITSGWTFGAGAALQIPFAMQMAYRFNGIGVTQNVLYENQKLIANQFNSAIGKIQDSLSSTASALGKLQDVVNQNAQALNTLVKQLSSNFGAISSVLNDILSRLDKVEAEVQIDRLITGRLQSLQTYVTQQLIRAAEIRASANLAATKMSECVLGQSKRVDFCGKGYHLMSFPQSAPHGVVFLHVTYVPAQEKNFTTAPAICHDGKAHFPREGVFVSNGTHWFVTQRNFYEPQIITTDNTFVSGNCDVVIGIVNNTVYDPLQPELDS

SEQ ID NO: 2682 - protein, 1141 aa, Artificial Sequence
  SARS-CoV-2/pangolin/Guangxi/P4L/2017__EPI_ISL_410538 spike protein (1-1141)
MFVFLFVLPLVSSQCVNLTTRTGIPPGYTNSSTRGVYYPDKVFRSSILHLTQDLFLPFFSNVTWFNTINYQGGFKKFDNPVLPFNDGVYFASTEKSNIIRGWIFGTTLDARTQSLLIVNNATNVVIKVCEFQFCTDPFLGVYYHNNNKTWVENEFRVYSSANNCTFEYISQPFLMDLEGKQGNFKNLREFVFKNVDGYFKIYSKHTPIDLVRDLPRGFAALEPLVDLPIGINITRFQTLLALHRSYLTPGNLESGWTTGAAAYYVGYLQQRTFLLSYNQNGTITDAVDCSLDPLSETKCTLKSLTVEKGIYQTSNFRVQPTISIVRFPNITNLCPFGEVFNASKFASVYAWNRKRISNCVADYSVLYNSTSFSTFKCYGVSPTKLNDLCFTNVYADSFVVKGDEVRQIAPGQTGVIADYNYKLPDDFTGCVIAWNSVKQDALTGGNYGYLYRLFRKSKLKPFERDISTEIYQAGSTPCNGQVGLNCYYPLERYGFHPTTGVNYQPFRVVVLSFELLNGPATVCGPKLSTTLVKDKCVNFNFNGLTGTGVLTTSKKQFLPFQQFGRDISDTTDAVRDPQTLEILDITPCSFGGVSVITPGTNTSNQVAVLYQDVNCTEVPMAIHAEQLTPAWRVYSAGANVFQTRAGCLVGAEHVNNSYECDIPVGAGICASYHSMSSLRSVNQRSIIAYTMSLGAENSVAYSNNSIAIPTNFTISVTTEILPVSMTKTSVDCTMYICGDSIECSNLLLQYGSFCTQLNRALTGIAVEQDKNTQEVFAQVKQIYKTPPIKDFGGFNFSQILPDPSKPSKRSFIEDLLFNKVTLADAGFIKQYGDCLGDIAARDLICAQKFNGLTVLPPLLTDEMIAQYTSALLAGTITSGWTFGAGAALQIPFAMQMAYRFNGIGVTQNVLYENQKLIANQFNSAIGKIQDSLSSTASALGKLQDVVNQNAQALNTLVKQLSSNFGAISSVLNDILSRLDKVEAEVQIDRLITGRLQSLQTYVTQQLIRAAEIRASANLAATKMSECVLGQSKRVDFCGKGYHLMSFPQSAPHGVVFLHVTYVPAQEKNFTTAPAICHEGKAHFPREGVFVSNGTHWFITQRNFYEPQIITTDNTFVSGSCDVVIGIVNNTVYDPLQPELDS

SEQ ID NO: 2683 - protein, 1141 aa, Artificial Sequence
  SARS-CoV-2/pangolin/Guangxi/P5L/2017__EPI_ISL_410540 spike protein (1-1141)
MFVFLFVLPLVSSQCVNLTTRTGIPPGYTNSSTRGVYYPDKVFRSSILHLTQDLFLPFFSNVTWFNTINYQGGFKKFDNPVLPFNDGVYFASTEKSNIIRGWIFGTTLDARTQSLLIVNNATNVVIKVCEFQFCTDPFLGVYYHNNNKTWVENEFRVYSSANNCTFEYISQPFLMDLEGKQGNFKNLREFVFKNVDGYFKIYSKHTPIDLVRDLPRGFAALEPLVDLPIGINITRFQTLLALHRSYLTPGKLESGWTTGAAAYYVGYLQQRTFLLSYNQNGTITDAVDCSLDPLSETKCTLKSLTVEKGIYQTSNFRVQPTISIVRFPNITNLCPFGEVFNASKFASVYAWNRKRISNCVADYSVLYNSTSFSTFKCYGVSPTKLNDLCFTNVYADSFVVKGDEVRQIAPGQTGVIADYNYKLPDDFTGCVIAWNSVKQDALTGGNYGYLYRLFRKSKLKPFERDISTEIYQAGSTPCNGQVGLNCYYPLERYGFHPTTGVNYQPFRVVVLSFELLNGPATVCGPKLSTTLVKDKCVNFNFNGLTGTGVLTTSKKQFLPFQQFGRDISDTTDAVRDPQTLEILDITPCSFGGVSVITPGTNTSNQVAVLYQDVNCTEVPMAIHAEQLTPAWRVYSAGANVFQTRAGCLVGAEHVNNSYECDIPVGAGICASYHSMSSFRSVNQRSIIAYTMSLGAENSVAYSNNSIAIPTNFTISVTTEILPVSMTKTSVDCTMYICGDSIECSNLLLQYGSFCTQLNRALTGIAVEQDKNTQEVFAQVKQIYKTPPIKDFGGFNFSQILPDPSKPSKRSFIEDLLFNKVTLADAGFIKQYGDCLGDIAARDLICAQKFNGLTVLPPLLTDEMIAQYTSALLAGTITSGWTFGAGAALQIPFAMQMAYRFNGIGVTQNVLYENQKLIANQFNSAIGKIQDSLSSTASALGKLQDVVNQNAQALNTLVKQLSSNFGAISSVLNDILSRLDKVEAEVQIDRLITGRLQSLQTYVTQQLIRAAEIRASANLAATKMSECVLGQSKRVDFCGKGYHLMSFPQSAPHGVVFLHVTYVPAQEKNFTTAPAICHEGKAHFPREGVFVSNGTHWFITQRNFYEPQIITTDNTFVSGSCDVVIGIVNNTVYDPLQPELDS

SEQ ID NO: 2684 - protein, 1141 aa, Artificial Sequence
  SARS-CoV-2/pangolin/Guangxi/P5E/2017__EPI_ISL_410541 spike protein (1-1141)
MFVFLFVLPLVSSQCVNLTTRTGIPPGYTNSSTRGVYYPDKVFRSSILHLTQDLFLPFFSNVTWFNTITYQGGSKKFDNPVLPFNDGVYFASTEKSNIIRGWIFGTTLDARTQSLLIVNNATNVVIKVCEFQFCTDPFLGVYYHNNNKTWVENEFRVYSSANNCTFEYISQPFLMDLEGKQGNFKNLREFVFKNVDGYFKIYSKHTPIDLVRDLPRGFAALEPLVDLPIGINITRFQTLLALHRSYLTPGKLESGWTTGAAAYYVGYLQQRTFLLSYNQNGTITDAVDCSLDPLSETKCTLKSLTVEKGIYQTSNFRVQPTISIVRFPNITNLCPFGEVFNASKFASVYAWNRKRISNCVADYSVLYNSTSFSTFKCYGVSPTKLNDLCFTNVYADSFVVKGDEVRQIAPGQTGVIADYNYKLPDDFTGCVIAWNSVKQDALTGDNYGYLYRLFRKSKLKPFERDISTEIYQAGSTPCNGQVGLNCYYPLERYGFHPTTGVNYQPFRVVVLSFELLNGPATVCGPKLSTTLVKDKCVNFNFNGLTGTGVLTTSKKQFLPFQQFGRDISDTTDAVRDPQTLEILDITPCSFGGVSVITPGTNTSNQVAVLYQDVNCTEVPMAIHAEQLTPAWRVYSAGANVFQTRAGCLVGAEHVNNSYECDIPVGAGICASYHSMSSFRSVNQRSIIAYTMSLGAENSVAYSNNSIAIPTNFTISVTTEILPVSMTKTSVDCTMYICGDSIECSNLLLQYGSFCTQLNRALTGIAVEQDKNTQEVFAQVKQIYKTPPIKDFGGFNFSQILPDPSKPSKRSFIEDLLFNKVTLADAGFIKQYGDCLGDIAARDLICAQKFNGLTVLPPLLTDEMIAQYTSALLAGTITSGWTFGAGAALQIPFAMQMAYRFNGIGVTQNVLYENQKLIANQFNSAIGKIQDSLSSTASALGKLQDVVNQNAQALNTLVKQLSSNFGAISSVLNDILSRLDKVEAEVQIDRLITGRLQSLQTYVTQQLIRAAEIRASANLAATKMSECVLGQSKRVDFCGKGYHLMSFPQSAPHGVVFLHVTYVPAQEKNFTTAPAICHEGKAHFPREGVFVSNGTHWFITQRNFYEPQIITTDNTFVSGSCDVVIGIVNNTVYDPLQPELDS

SEQ ID NO: 2685 - protein, 1139 aa, Artificial Sequence
  SARS-CoV-2/pangolin/Guangxi/P1E/2017__EPI_ISL_410539 spike protein (1-1139)
MFVFLFVLPLVSSQCVNLTTRTGIQPGYTNSSTRGVYYPDKVFRSSILHLTQDLFLPFFSNVTWFNTINYQGGFKKFDNPVLPFNDGVYFASTEKSNIIRGWIFGTTLDARTQSLLIVNNATNVVIKVCEFQFCTDPFLGVYYHNNNKTWVENEFRVYSSANNCTFEYISQPFLMDLEGKQGNFKNLREFVFKNVDGYFKIYSKHTPIDLVRDLPRGFAALEPLVDLPIGINITRFQTLLALHRSYLTPGKLESGWTTGAAAYYVGYLQQRTFLLSYNQNGTITDAVDCSLDPLSETKCTLKSLTVEKGIYQTSNFRVQPTISIVRFPNITNLCPFGEVFNASKFASVYAWNRKRISNCVADYSVLYNSTSFSTFKCYGVSPTKLNDLCFTNVYADSFVVKGDEVRQIAPGQTGVIADYNYKLPDDFTGCVIAWNSVKQDALTGGNYLYRLFRKSKLKPFERDISTEIYQAGSTPCNGQVGLNCYYPLERYGFHPTTGVNYQPFRVVVLSFELLNGPATVCGPKLSTTLVKDKCVNFNFNGLTGTGVLTTSKKQFLPFQQFGRDISDTTDAVRDPQTLEILDITPCSFGGVSVITPGTNTSNQVAVLYQDVNCTEVPMAIHAEQLTPAWRVYSAGANVFQTRAGCLVGAEHVNNSYECDIPVGAGICASYHSMSSLRSVNQRSIIAYTMSLGAENSVAYSNNSIAIPTNFTISVTTEILPVSMTKTSVDCTMYICGDSIECSNLLLQYGSFCTQLNRALTGIAVEQDKNTQEVFAQVKQIYKTPPIKDFGGFNFSQILPDPSKPSKRSFIEDLLFNKVTLADAGFIKQYGDCLGDIAARDLICAQKFNGLTVLPPLLTDEMIAQYTSALLAGTITSGWTFGAGAALQIPFAMQMAYRFNGIGVTQNVLYENQKLIANQFNSAIGKIQDSLSSTASALGKLQDVVNQNAQALNTLVKQLSSNFGAISSVLNDILSRLDKVEAEVQIDRLITGRLQSLQTYVTQQLIRAAEIRASANLAATKMSECVLGQSKRVDFCGKGYHLMSFPQSAPHGVVFLHVTYVPAQEKNFTTAPAICHEGKAHFPREGVFVSNGTHWFITQRNFYEPQIITTDNTFVSGSCDVVIGIVNNTVYDPLQPELDS

SEQ ID NO: 2686 - protein, 1147 aa, Artificial Sequence
  SARS-CoV-2/Wuhan/WIV05/2019__EPI_ISL_402128 spike protein (1-1147)(K986P_V987P)
MFVFLVLLPLVSSQCVNLTTRTQLPPAYTNSFTRGVYYPDKVFRSSVLHSTQDLFLPFFSNVTWFHAIHVSGTNGTKRFDNPVLPFNDGVYFASTEKSNIIRGWIFGTTLDSKTQSLLIVNNATNVVIKVCEFQFCNDPFLGVYYHKNNKSWMESEFRVYSSANNCTFEYVSQPFLMDLEGKQGNFKNLREFVFKNIDGYFKIYSKHTPINLVRDLPQGFSALEPLVDLPIGINITRFQTLLALHRSYLTPGDSSSGWTAGAAAYYVGYLQPRTFLLKYNENGTITDAVDCALDPLSETKCTLKSFTVEKGIYQTSNFRVQPTESIVRFPNITNLCPFGEVFNATRFASVYAWNRKRISNCVADYSVLYNSASFSTFKCYGVSPTKLNDLCFTNVYADSFVIRGDEVRQIAPGQTGKIADYNYKLPDDFTGCVIAWNSNNLDSKVGGNYNYLYRLFRKSNLKPFERDISTEIYQAGSTPCNGVEGFNCYFPLQSYGFQPTNGVGYQPYRVVVLSFELLHAPATVCGPKKSTNLVKNKCVNFNFNGLTGTGVLTESNKKFLPFQQFGRDIADTTDAVRDPQTLEILDITPCSFGGVSVITPGTNTSNQVAVLYQDVNCTEVPVAIHADQLTPTWRVYSTGSNVFQTRAGCLIGAEHVNNSYECDIPIGAGICASYQTQTNSPRRARSVASQSIIAYTMSLGAENSVAYSNNSIAIPTNFTISVTTEILPVSMTKTSVDCTMYICGDSTECSNLLLQYGSFCTQLNRALTGIAVEQDKNTQEVFAQVKQIYKTPPIKDFGGFNFSQILPDPSKPSKRSFIEDLLFNKVTLADAGFIKQYGDCLGDIAARDLICAQKFNGLTVLPPLLTDEMIAQYTSALLAGTITSGWTFGAGAALQIPFAMQMAYRFNGIGVTQNVLYENQKLIANQFNSAIGKIQDSLSSTASALGKLQDVVNQNAQALNTLVKQLSSNFGAISSVLNDILSRLDPPEAEVQIDRLITGRLQSLQTYVTQQLIRAAEIRASANLAATKMSECVLGQSKRVDFCGKGYHLMSFPQSAPHGVVFLHVTYVPAQEKNFTTAPAICHDGKAHFPREGVFVSNGTHWFVTQRNFYEPQIITTDNTFVSGNCDVVIGIVNNTVYDPLQPELDS

SEQ ID NO: 2687 - protein, 1143 aa, Artificial Sequence
  SARS-CoV-2/bat/Yunnan/RaTG13/2013__EPI_ISL_402131 spike protein (1-1143)(K982P_V983P)
MFVFLVLLPLVSSQCVNLTTRTQLPPAYTNSSTRGVYYPDKVFRSSVLHLTQDLFLPFFSNVTWFHAIHVSGTNGIKRFDNPVLPFNDGVYFASTEKSNIIRGWIFGTTLDSKTQSLLIVNNATNVVIKVCEFQFCNDPFLGVYYHKNNKSWMESEFRVYSSANNCTFEYVSQPFLMDLEGKQGNFKNLREFVFKNIDGYFKIYSKHTPINLVRDLPPGFSALEPLVDLPIGINITRFQTLLALHRSYLTPGDSSSGWTAGAAAYYVGYLQPRTFLLKYNENGTITDAVDCALDPLSETKCTLKSFTVEKGIYQTSNFRVQPTDSIVRFPNITNLCPFGEVFNATTFASVYAWNRKRISNCVADYSVLYNSTSFSTFKCYGVSPTKLNDLCFTNVYADSFVITGDEVRQIAPGQTGKIADYNYKLPDDFTGCVIAWNSKHIDAKEGGNFNYLYRLFRKANLKPFERDISTEIYQAGSKPCNGQTGLNCYYPLYRYGFYPTDGVGHQPYRVVVLSFELLNAPATVCGPKKSTNLVKNKCVNFNFNGLTGTGVLTESNKKFLPFQQFGRDIADTTDAVRDPQTLEILDITPCSFGGVSVITPGTNASNQVAVLYQDVNCTEVPVAIHADQLTPTWRVYSTGSNVFQTRAGCLIGAEHVNNSYECDIPIGAGICASYQTQTNSRSVASQSIIAYTMSLGAENSVAYSNNSIAIPTNFTISVTTEILPVSMTKTSVDCTMYICGDSTECSNLLLQYGSFCTQLNRALTGIAVEQDKNTQEVFAQVKQIYKTPPIKDFGGFNFSQILPDPSKPSKRSFIEDLLFNKVTLADAGFIKQYGDCLGDIAARDLICAQKFNGLTVLPPLLTDEMIAQYTSALLAGTITSGWTFGAGAALQIPFAMQMAYRFNGIGVTQNVLYENQKLIANQFNSAIGKIQDSLSSTASALGKLQDVVNQNAQALNTLVKQLSSNFGAISSVLNDILSRLDPPEAEVQIDRLITGRLQSLQTYVTQQLIRAAEIRASANLAATKMSECVLGQSKRVDFCGKGYHLMSFPQSAPHGVVFLHVTYVPAQEKNFTTAPAICHDGKAHFPREGVFVSNGTHWFVTQRNFYEPQIITTDNTFVSGSCDVVIGIVNNTVYDPLQPELDS

SEQ ID NO: 2688 - protein, 1147 aa, Artificial Sequence
  SARS-CoV-2/Wuhan/HBCDC-HB-01/2019__EPI_ISL_402132 spike protein (1-1147)(K986P_V987P)
MFVFLVLLPLVSSQCVNLTTRTQLPPAYTNSITRGVYYPDKVFRSSVLHSTQDLFLPFFSNVTWFHAIHVSGTNGTKRFDNPVLPFNDGVYFASTEKSNIIRGWIFGTTLDSKTQSLLIVNNATNVVIKVCEFQFCNDPFLGVYYHKNNKSWMESEFRVYSSANNCTFEYVSQPFLMDLEGKQGNFKNLREFVFKNIDGYFKIYSKHTPINLVRDLPQGFSALEPLVDLPIGINITRFQTLLALHRSYLTPGDSSSGWTAGAAAYYVGYLQPRTFLLKYNENGTITDAVDCALDPLSETKCTLKSFTVEKGIYQTSNFRVQPTESIVRFPNITNLCPFGEVFNATRFASVYAWNRKRISNCVADYSVLYNSASFSTFKCYGVSPTKLNDLCFTNVYADSFVIRGDEVRQIAPGQTGKIADYNYKLPDDFTGCVIAWNSNNLDSKVGGNYNYLYRLFRKSNLKPFERDISTEIYQAGSTPCNGVEGFNCYFPLQSYGFQPTNGVGYQPYRVVVLSFELLHAPATVCGPKKSTNLVKNKCVNFNFNGLTGTGVLTESNKKFLPFQQFGRDIADTTDAVRDPQTLEILDITPCSFGGVSVITPGTNTSNQVAVLYQDVNCTEVPVAIHADQLTPTWRVYSTGSNVFQTRAGCLIGAEHVNNSYECDIPIGAGICASYQTQTNSPRRARSVASQSIIAYTMSLGAENSVAYSNNSIAIPTNFTISVTTEILPVSMTKTSVDCTMYICGDSTECSNLLLQYGSFCTQLNRALTGIAVEQDKNTQEVFAQVKQIYKTPPIKDFGGFNFSQILPDPSKPSKRSFIEDLLFNKVTLADAGFIKQYGDCLGDIAARDLICAQKFNGLTVLPPLLTDEMIAQYTSALLAGTITSGWTFGAGAALQIPFAMQMAYRFNGIGVTQNVLYENQKLIANQFNSAIGKIQDSLSSTASALGKLQDVVNQNAQALNTLVKQLSSNFGAISSVLNDILSRLDPPEAEVQIDRLITGRLQSLQTYVTQQLIRAAEIRASANLAATKMSECVLGQSKRVDFCGKGYHLMSFPQSAPHGVVFLHVTYVPAQEKNFTTAPAICHDGKAHFPREGVFVSNGTHWFVTQRNFYEPQIITTDNTFVSGNCDVVIGIVNNTVYDPLQPELDS

SEQ ID NO: 2689 - protein, 1147 aa, Artificial Sequence
  SARS-CoV-2/Guangdong/20SF028/2020__EPI_ISL_403936 spike protein (1-1147)(K986P_V987P)
MFVFLVLLPLVSSQCVNLTTRTQLPPAYTNSFTRGVYYPDKVFRSSVLYSTQDLFLPFFSNVTWFHAIHVSGTNGTKRFDNPVLPFNDGVYFASTEKSNIIRGWIFGTTLDSKTQSLLIVNNATNVVIKVCEFQFCNDPFLGVYYHKNNKSWMESEFRVYSSANNCTFEYVSQPFLMDLEGKQGNFKNLREFVFKNIDGYFKIYSKHTPINLVRDLPQGFSALEPLVDLPIGINITRFQTLLALHRSYLTPGDSSSGWTAGAAAYYVGYLQPRTFLLKYNENGTITDAVDCALDPLSETKCTLKSFTVEKGIYQTSNFRVQPTESIVRFPNITNLCPFGEVFNATRFASVYAWNRKRISNCVADYSVLYNSASFSTFKCYGVSPTKLNDLCFTNVYADSFVIRGDEVRQIAPGQTGKIADYNYKLPDDFTGCVIAWNSNNLDSKVGGNYNYLYRLFRKSNLKPFERDISTEIYQAGSTPCNGVEGFNCYFPLQSYGFQPTNGVGYQPYRVVVLSFELLHAPATVCGPKKSTNLVKNKCVNFNFNGLTGTGVLTESNKKFLPFQQFGRDIADTTDAVRDPQTLEILDITPCSFGGVSVITPGTNTSNQVAVLYQDVNCTEVPVAIHADQLTPTWRVYSTGSNVFQTRAGCLIGAEHVNNSYECDIPIGAGICASYQTQTNSPRRARSVASQSIIAYTMSLGAENSVAYSNNSIAIPTNFTISVTTEILPVSMTKTSVDCTMYICGDSTECSNLLLQYGSFCTQLNRALTGIAVEQDKNTQEVFAQVKQIYKTPPIKDFGGFNFSQILPDPSKPSKRSFIEDLLFNKVTLADAGFIKQYGDCLGDIAARDLICAQKFNGLTVLPPLLTDEMIAQYTSALLAGTITSGWTFGAGAALQIPFAMQMAYRFNGIGVTQNVLYENQKLIANQFNSAIGKIQDSLSSTASALGKLQDVVNQNAQALNTLVKQLSSNFGAISSVLNDILSRLDPPEAEVQIDRLITGRLQSLQTYVTQQLIRAAEIRASANLAATKMSECVLGQSKRVDFCGKGYHLMSFPQSAPHGVVFLHVTYVPAQEKNFTTAPAICHDGKAHFPREGVFVSNGTHWFVTQRNFYEPQIITTDNTFVSGNCDVVIGIVNNTVYDPLQPELDS

SEQ ID NO: 2690 - protein, 1147 aa, Artificial Sequence
  SARS-CoV-2/Shenzhen/SZTH-001/2020__EPI_ISL_406592 spike protein (1-1147)(K986P_V987P)
MFVFLVLLPLVSSQCVNLTTRTQLPPAYTNSFTRGVYYPDKVFRSSVLHSTQDLFLPFFSNVTWFHAIHVSGTNGTKRFDNPVLPFNDGVYFASTEKSNIIRGWIFGTTLDSKTQSLLIVNNATNVVIKVCEFQFCNDPFLGVYYHKNNKSWMESEFRVYSSANNCTFEYVSQPFLMDLEGKQGNFKNLREFVFKNIDGYFKIYSKHTPINLVRDLPQGFSALEPLVDLPIGINITRFQTLLALHRSYLTPGDSSSGWTAGAAAYYVGYLQPRTFLLKYNENGTITDAVDCALDPLSETKCTLKSFTVEKGIYQTSNFRVQPTESIVRFPNITNLCPFGEVFNATRFASVYAWNRKRISNCVADYSVLYNSASFSTFKCYGVSPTKLNDLCFTNVYADSFVIRGDEVRQIAPGQTGKIADYNYKLPDDFTGCVIAWNSNNLDSKVGGNYNYLYRLFRKSNLKPFERDISTEIYQAGSTPCNGVEGFNCYFPLQSYGFQPTNGVGYQPYRVVVLSFELLHAPATVCGPKKSTNLVKNKCVNFNFNGLTGTGVLTESNKKFLPFQQFGRDIADTTDAVRDPQTLEILDITPCSFGGVSVITPGTNTSNQVAVLYQDVNCTEVPVAIHADQLTPTWRVYSTGSNVFQTRAGCLIGAEHVNNSYECDIPIGAGICASYQTQTNSPRRARSVASQSIIAYTMSLGAENSVAYSNNSIAIPTNFTISVTTEILPVSMTKTSVDCTMYICGDSTECSNLLLQYGSFCTQLNRALTGIAVEQDKNTQEVFAQVKQIYKTPPIKDFGGFNFSQILPDPSKPSKRSFIEDLLFNKVTLADAGFIKQYGDCLGDIAARDLICAQKFNGLTVLPPLLTDEMIAQYTSALLAGTITSGWTFGAGAALQIPFAMQMAYRFNGIGVTQNVLYENQKLIANQFNSAIGKIQDSLSSTASALGKLQDVVNQNAQALNTLVKQLSSNFGAISSVLNDILSRLDPPEAEVQIDRLITGRLQSLQTYVTQQLIRAAEIRASANLAATKMSECVLGQSKRVDFCGKGYHLMSFPQSAPHGVVFLHVTYVPAQEKNFTTAPAICHDGKAHFPREGVFVSNGTHWFVTQRNFYEPQIITTDNTFVSGNCDVLIGIVNNTVYDPLQPELDS

SEQ ID NO: 2691 - protein, 1147 aa, Artificial Sequence
  SARS-CoV-2/Shenzhen/SZTH-004/2020__EPI_ISL_406595 spike protein (1-1147)(K986P_V987P)
MFVFLVLLPLVSSQCVNLTTRTQLPPAYTNSFTRGVYYPDKVFRSSVLHSTQDLFLPFFSNVTWFHAIHVSGTNGTKRFDNPVLPFNDGVYFASTEKSNIIRGWIFGTTLDSKTQSLLIVNNATNVVIKVCEFQFCNDPFLGVYYHKNNKSWMESEFRVYSSANNCTFEYVSQPFLMDLEGKQGNFKNLREFVFKNIDGYFKIYSKHTPINLVRDLPQGFSALEPLVDLPIGINITRFQTLLALHRSYLTPGDSSSGWTAGAAAYYVGYLQPRTFLLKYNENGTITDAVDCALDPLSETKCTLKSFTVEKGIYQTSNFRVQPTESIVRFPNITNLCPFGEVFNATRFASVYAWDRKRISNCVAYYSVLYNSASFSTFKCYGVSPTKLNDLCFTNVYADSFVIRGDEVRQIAPGQTGKIADYNYKLPDDFTGCVIAWNSNNLDSKVGGNYNYLYRLFRKSNLKPFERDISTEIYQAGSTPCNGVEGFNCYFPLQSYGFQPTNGVGYQPYRVVVLSFELLHAPATVCGPKKSTNLVKNKCVNFNFNGLTGTGVLTESNKKFLPFQQFGRDIADTTDAVRDPQTLEILDITPCSFGGVSVITPGTNTSNQVAVLYQDVNCTEVPVAIHADQLTPTWRVYSTGSNVFQTRAGCLIGAEHVNNSYECDIPIGAGICASYQTQTNSPRRARSVASQSIIAYTMSLGAENSVAYSNNSIAIPTNFTISVTTEILPVSMTKTSVDCTMYICGDSTECSNLLLQYGSFCTQLNRALTGIAVEQDKNTQEVFAQVKQIYKTPPIKDFGGFNFSQILPDPSKPSKRSFIEDLLFNKVTLADAGFIKQYGDCLGDIAARDLICAQKFNGLTVLPPLLTDEMIAQYTSALLAGTITSGWTFGAGAALQIPFAMQMAYRFNGIGVTQNVLYENQKLIANQFNSAIGKIQDSLSSTASALGKLQDVVNQNAQALNTLVKQLSSNFGAISSVLNDILSRLDPPEAEVQIDRLITGRLQSLQTYVTQQLIRAAEIRASANLAATKMSECVLGQSKRVDFCGKGYHLMSFPQSAPHGVVFLHVTYVPAQEKNFTTAPAICHDGKAHFPREGVFVSNGTHWFVTQRNFYEPQIITTDNTFVSGNCDVVIGIVNNTVYDPLQPELDS

SEQ ID NO: 2692 - protein, 1147 aa, Artificial Sequence
  SARS-CoV-2/France/IDF0372/2020__EPI_ISL_406596 spike protein (1-1147)(K986P_V987P)
MFVFLVLLPLVSSQCVNLTTRTQLPPAYTNSFTRGVYYPDKVFRSSVLHSTQDLFLPFFSNVTWFHAIHVSGTNGTKRFDNPVLPFNDGVYFASTEKSNIIRGWIFGTTLDSKTQSLLIVNNATNVVIKVCEFQFCNDPFLGVYYHKNNKSWMESEFRVYSSANNCTFEYVSQPFLMDLEGKQGNFKNLREFVFKNIDGYFKIYSKHTPINLVRDLPQGFSALEPLVDLPIGINITRFQTLLALHRSYLTPGDSSSGWTAGAAAYYVGYLQPRTFLLKYNENGTITDAVDCALDPLSETKCTLKSFTVEKGIYQTSNFRVQPTESIVRFPNITNLCPFGEVFNATRFASVYAWNRKRISNCVADYSFLYNSASFSTFKCYGVSPTKLNDLCFTNVYADSFVIRGDEVRQIAPGQTGKIADYNYKLPDDFTGCVIAWNSNNLDSKVGGNYNYLYRLFRKSNLKPFERDISTEIYQAGSTPCNGVEGFNCYFPLQSYGFQPTNGVGYQPYRVVVLSFELLHAPATVCGPKKSTNLVKNKCVNFNFNGLTGTGVLTESNKKFLPFQQFGRDIADTTDAVRDPQTLEILDITPCSFGGVSVITPGTNTSNQVAVLYQDVNCTEVPVAIHADQLTPTWRVYSTGSNVFQTRAGCLIGAEHVNNSYECDIPIGAGICASYQTQTNSPRRARSVASQSIIAYTMSLGAENSVAYSNNSIAIPTNFTISVTTEILPVSMTKTSVDCTMYICGDSTECSNLLLQYGSFCTQLNRALTGIAVEQDKNTQEVFAQVKQIYKTPPIKDFGGFNFSQILPDPSKPSKRSFIEDLLFNKVTLADAGFIKQYGDCLGDIAARDLICAQKFNGLTVLPPLLTDEMIAQYTSALLAGTITSGWTFGAGAALQIPFAMQMAYRFNGIGVTQNVLYENQKLIANQFNSAIGKIQDSLSSTASALGKLQDVVNQNAQALNTLVKQLSSNFGAISSVLNDILSRLDPPEAEVQIDRLITGRLQSLQTYVTQQLIRAAEIRASANLAATKMSECVLGQSKRVDFCGKGYHLMSFPQSAPHGVVFLHVTYVPAQEKNFTTAPAICHDGKAHFPREGVFVSNGTHWFVTQRNFYEPQIITTDNTFVSGNCDVVIGIVNNTVYDPLQPELDS

SEQ ID NO: 2693 - protein, 1147 aa, Artificial Sequence
  SARS-CoV-2/Australia/VIC01/2020__EPI_ISL_406844 spike protein (1-1147)(K986P_V987P)
MFVFLVLLPLVSSQCVNLTTRTQLPPAYTNSFTRGVYYPDKVFRSSVLHSTQDLFLPFFSNVTWFHAIHVSGTNGTKRFDNPVLPFNDGVYFASTEKSNIIRGWIFGTTLDSKTQSLLIVNNATNVVIKVCEFQFCNDPFLGVYYHKNNKSWMESEFRVYSSANNCTFEYVSQPFLMDLEGKQGNFKNLREFVFKNIDGYFKIYSKHTPINLVRDLPQGFSALEPLVDLPIGINITRFQTLLALHRRYLTPGDSSSGWTAGAAAYYVGYLQPRTFLLKYNENGTITDAVDCALDPLSETKCTLKSFTVEKGIYQTSNFRVQPTESIVRFPNITNLCPFGEVFNATRFASVYAWNRKRISNCVADYSVLYNSASFSTFKCYGVSPTKLNDLCFTNVYADSFVIRGDEVRQIAPGQTGKIADYNYKLPDDFTGCVIAWNSNNLDSKVGGNYNYLYRLFRKSNLKPFERDISTEIYQAGSTPCNGVEGFNCYFPLQSYGFQPTNGVGYQPYRVVVLSFELLHAPATVCGPKKSTNLVKNKCVNFNFNGLTGTGVLTESNKKFLPFQQFGRDIADTTDAVRDPQTLEILDITPCSFGGVSVITPGTNTSNQVAVLYQDVNCTEVPVAIHADQLTPTWRVYSTGSNVFQTRAGCLIGAEHVNNSYECDIPIGAGICASYQTQTNSPRRARSVASQSIIAYTMSLGAENSVAYSNNSIAIPTNFTISVTTEILPVSMTKTSVDCTMYICGDSTECSNLLLQYGSFCTQLNRALTGIAVEQDKNTQEVFAQVKQIYKTPPIKDFGGFNFSQILPDPSKPSKRSFIEDLLFNKVTLADAGFIKQYGDCLGDIAARDLICAQKFNGLTVLPPLLTDEMIAQYTSALLAGTITSGWTFGAGAALQIPFAMQMAYRFNGIGVTQNVLYENQKLIANQFNSAIGKIQDSLSSTASALGKLQDVVNQNAQALNTLVKQLSSNFGAISSVLNDILSRLDPPEAEVQIDRLITGRLQSLQTYVTQQLIRAAEIRASANLAATKMSECVLGQSKRVDFCGKGYHLMSFPQSAPHGVVFLHVTYVPAQEKNFTTAPAICHDGKAHFPREGVFVSNGTHWFVTQRNFYEPQIITTDNTFVSGNCDVVIGIVNNTVYDPLQPELDS

SEQ ID NO: 2694 - protein, 1147 aa, Artificial Sequence
  SARS-CoV-2/Germany/BavPat1/2020__EPI_ISL_406862 spike protein (1-1147)(K986P_V987P)
MFVFLVLLPLVSSQCVNLTTRTQLPPAYTNSFTRGVYYPDKVFRSSVLHSTQDLFLPFFSNVTWFHAIHVSGTNGTKRFDNPVLPFNDGVYFASTEKSNIIRGWIFGTTLDSKTQSLLIVNNATNVVIKVCEFQFCNDPFLGVYYHKNNKSWMESEFRVYSSANNCTFEYVSQPFLMDLEGKQGNFKNLREFVFKNIDGYFKIYSKHTPINLVRDLPQGFSALEPLVDLPIGINITRFQTLLALHRSYLTPGDSSSGWTAGAAAYYVGYLQPRTFLLKYNENGTITDAVDCALDPLSETKCTLKSFTVEKGIYQTSNFRVQPTESIVRFPNITNLCPFGEVFNATRFASVYAWNRKRISNCVADYSVLYNSASFSTFKCYGVSPTKLNDLCFTNVYADSFVIRGDEVRQIAPGQTGKIADYNYKLPDDFTGCVIAWNSNNLDSKVGGNYNYLYRLFRKSNLKPFERDISTEIYQAGSTPCNGVEGFNCYFPLQSYGFQPTNGVGYQPYRVVVLSFELLHAPATVCGPKKSTNLVKNKCVNFNFNGLTGTGVLTESNKKFLPFQQFGRDIADTTDAVRDPQTLEILDITPCSFGGVSVITPGTNTSNQVAVLYQGVNCTEVPVAIHADQLTPTWRVYSTGSNVFQTRAGCLIGAEHVNNSYECDIPIGAGICASYQTQTNSPRRARSVASQSIIAYTMSLGAENSVAYSNNSIAIPTNFTISVTTEILPVSMTKTSVDCTMYICGDSTECSNLLLQYGSFCTQLNRALTGIAVEQDKNTQEVFAQVKQIYKTPPIKDFGGFNFSQILPDPSKPSKRSFIEDLLFNKVTLADAGFIKQYGDCLGDIAARDLICAQKFNGLTVLPPLLTDEMIAQYTSALLAGTITSGWTFGAGAALQIPFAMQMAYRFNGIGVTQNVLYENQKLIANQFNSAIGKIQDSLSSTASALGKLQDVVNQNAQALNTLVKQLSSNFGAISSVLNDILSRLDPPEAEVQIDRLITGRLQSLQTYVTQQLIRAAEIRASANLAATKMSECVLGQSKRVDFCGKGYHLMSFPQSAPHGVVFLHVTYVPAQEKNFTTAPAICHDGKAHFPREGVFVSNGTHWFVTQRNFYEPQIITTDNTFVSGNCDVVIGIVNNTVYDPLQPELDS

SEQ ID NO: 2695 - protein, 1147 aa, Artificial Sequence
  SARS-CoV-2/Wuhan/HBCDC-HB-02/2020__EPI_ISL_412978 spike protein (1-1147)(K986P_V987P)
MFVFLVLLPLVSSQCVNLTTRTQLPPAYTNSFTRGVYYPDKVFRSSVLHSTQDLFLPFFSNVTWFHAIHVSGTNGTKRFDNPVLPFNDGVYFASTEKSNIIRGWIFGTTLDSKTQSLLIVNNATNVVIKVCEFQFCNDPFLGVYYHKNNKSWMESEFRVYSSANNCTFEYVSQPFLMDLEGKQGNFKNLREFVFKNIDGYFKIYSKHTPINLVRDLPQGFSALEPLVDLPIGINITRFQTLLALHRSYLTPGDSSSGWTAGAAAYYVGYLQPRTFLLKYNENGTITDAVDCALDPLSETKCTLKSFTVEKGIYQTSNFRVQPTESIVRFPNITNLCPFGEVFNATRFASVYAWNRKRISNCVADYSVLYNSASFSTFKCYGVSPTKLNDLCFTNVYADSFVIRGDEVRQIAPGQTGKIADYNYKLPDDFTGCVIAWNSNNLDSKVGGNYNYLYRLFRKSNLKPFERDISTEIYQAGSTPCNGVEGFNCYFPLQSYGFQPTNGVGYQPYRVVVLSFELLHAPATVCGPKKSTNLVKNKCVNFNFNGLTGTGVLTESNKKFLPFQQFGRDIADTTDAVRDPQTLEILDITPCSFGGVSVITPGTNTSNQVAVLYQDVNCTEVPVAIHADQLTPTWRVYSTGSNVFQTRAGCLIGAEHVNNSYECDIPIGAGICASYQTQTNSPRRARSVASQSIIAYTMSLGAENSVAYSNNSIAIPTNFTISVTTEILPVSMTKTSVDCTMYICGDSTECSNFLLQYGSFCTQLNRALTGIAVEQDKNTQEVFAQVKQIYKTPPIKDFGGFNFSQILPDPSKPSKRSFIEDLLFNKVTLADAGFIKQYGDCLGDIAARDLICAQKFNGLTVLPPLLTDEMIAQYTSALLAGTITSGWTFGAGAALQIPFAMQMAYRFNGIGVTQNVLYENQKLIANQFNSAIGKIQDSLSSTASALGKLQDVVNQNAQALNTLVKQLSSNFGAISSVLNDILSRLDPPEAEVQIDRLITGRLQSLQTYVTQQLIRAAEIRASANLAATKMSECVLGQSKRVDFCGKGYHLMSFPQSAPHGVVFLHVTYVPAQEKNFTTAPAICHDGKAHFPREGVFVSNGTHWFVTQRNFYEPQIITTDNTFVSGNCDVVIGIVNNTVYDPLQPELDS

SEQ ID NO: 2696 - protein, 1147 aa, Artificial Sequence
  SARS-CoV-2/Australia/QLD02/2020__EPI_ISL_407896 spike protein (1-1147)(K986P_V987P)
MFVFLVLLPLVSSQCVNLTTRTQLPPAYTNSFTRGVYYPDKVFRSSVLHSTQDLFLPFFSNVTWFHAIHVSGTNGTKRFDNPVLPFNDGVYFASTEKSNIIRGWIFGTTLDSKTQSLLIVNNATNVVIKVCEFQFCNDPFLGVYYHKNNKSWMESEFRVYSSANNCTFEYVSQPFLMDLEGKQGNFKNLREFVFKNIDGYFKIYSKHTPINLVRDLPQGFSALEPLVDLPIGINITRFQTLLALHRSYLTPGDSSSGWTAGAAAYYVGYLQPRTFLLKYNENGTITDAVDCALDPLSETKCTLKSFTVEKGIYQTSNFRVQPTESIVRFPNITNLCPFGEVFNATRFASVYAWNRKRISNCVADYSVLYNSASFSTFKCYGVSPTKLNDLCFTNVYADSFVIRGDEVRQIAPGQTGKIADYNYKLPDDFTGCVIAWNSNNLDSKVGGNYNYLYRLFRKSNLKPFERDISTEIYQAGSTPCNGVEGFNCYFPLQSYGFQPTNGVGYQPYRVVVLSFELLHAPATVCGPKKSTNLVKNKCVNFNFNGLTGTGVLTESNKKFLPFQQFGRDIADTTDAVRDPQTLEILDITPCSFGGVSVITPGTNTSNQVAVLYQDVNCTEVPVAIHADQLTPTWRVYSTGSNVFQTRAGCLIGAEHVNNSYECDIPIGAGICASYQTQTNSPRRARSVASQSIIAYTMSLGAENSVAYSNNSIAIPTNFTISVTTEILPVSMTKTSVDCTMYICGDSTECSNLLLQYGSFCTQLNRALTGIAVEQDKNTQEVFAQVKQIYKTPPIKDFGGFNFSQILPDPSKPSKRSFIEDLLFNKVTLADAGFIKQYGDCLGDIAARDLICAQKFNGLTVLPPLLTDEMIAQYTSALLAGTITSGWTFGAGAALQIPFAMQMAYRFNGIGVTQNVLYENQKLIANQFNSAIGKIQDSLSSTASALGKLQDVVNQNAQALNTLVKQLSSNFGAISSVLNDILSRLDPPEAEVQIDRLITGRLQSLQTYVTQQLIRAAEIRASANLAATKMSECVLGQSKRVDFCGKGYHLMSFPQSAPHGVVFLHVTYVPAQEKNFTTAPAICHDGKAHFPREGVFVSNGTHWFVTQRNFYEPQIITTDNTFVSGNCDVVIGIVNNTVYDPLQLELDS

SEQ ID NO: 2697 - protein, 1147 aa, Artificial Sequence
  SARS-CoV-2/India/1-31/2020__EPI_ISL_413523 spike protein (1-1147)(K986P_V987P)
MFVFLVLLPLVSSQCVNLTTRTQLPPAYTNSFTRGVYYPDKVFRSSVLHSTQDLFLPFFSNVTWFHAIHVSGTNGTKRFDNPVLPFNDGVYFASTEKSNIIRGWIFGTTLDSKTQSLLIVNNATNVVIKVCEFQFCNDPFLGVYYHKNNKSWMESEFRVYSSANNCTFEYVSQPFLMDLEGKQGNFKNLREFVFKNIDGYFKIYSKHTPINLVRDLPQGFSALEPLVDLPIGINITRFQTLLALHRSYLTPGDSSSGWTAGAAAYYVGYLQPRTFLLKYNENGTITDAVDCALDPLSETKCTLKSFTVEKGIYQTSNFRVQPTESIVRFPNITNLCPFGEVFNATRFASVYAWNRKRISNCVADYSVLYNSASFSTFKCYGVSPTKLNDLCFTNVYADSFVIRGDEVRQIAPGQTGKIADYNYKLPDDFTGCVIAWNSNNLDSKVGGNYNYLYRLFRKSNLKPFERDISTEIYQAGSTPCNGVEGFNCYFPLQSYGFQPTNGVGYQPYRVVVLSFELLHAPATVCGPKKSTNLVKNKCVNFNFNGLTGTGVLTESNKKFLPFQQFGRDIADTTDAVRDPQTLEILDITPCSFGGVSVITPGTNTSNQVAVLYQDVNCTEVPVAIHADQLTPTWRVYSTGSNVFQTRAGCLIGAEHVNNSYECDIPIGAGICASYQTQTNSPRRARSVASQSIIAYTMSLGAENSVAYSNNSIAIPTNFTISVTTEILPVSMTKTSVDCTMYICGDSTECSNLLLQYGSFCTQLNRALTGIAVEQDKNTQEVFAQVKQIYKTPPIKDFGGFNFSQILPDPSKPSKRSFIEDLLFNKVTLADAGFIKQYGDCLGDIAARDLICAQKFNGLTVLPPLLTDEMIAQYTSALLAGTITSGWTFGAGAALQIPFAMQMAYRFNGIGVTQNVLYENQKLIANQFNSVIGKIQDSLSSTASALGKLQDVVNQNAQALNTLVKQLSSNFGAISSVLNDILSRLDPPEAEVQIDRLITGRLQSLQTYVTQQLIRAAEIRASANLAATKMSECVLGQSKRVDFCGKGYHLMSFPQSAPHGVVFLHVTYVPAQEKNFTTAPAICHDGKAHFPREGVFVSNGTHWFVTQRNFYEPQIITTDNTFVSGNCDVVIGIVNNTVYDPLQPELDS

SEQ ID NO: 2698 - protein, 1147 aa, Artificial Sequence
  SARS-CoV-2/Guangdong/GD2020087-P0008/2020__EPI_ISL_413863 spike protein (1-1147)(K986P_V987P)
MFVFLVLLPLVSSQCVNLTTRTQLPPAYTNSFTRGVYYPDKVFRSSVLHSTQDLFLPFFSNVTWFHAIHVSGTNGTKRFDNPVLPFNDGVYFASTEKSNIIRGWIFGTTLDSKTQSLLIVNNATNVVIKVCEFQFCNDPFLGVYYHKNNKSWMESEFRVYSSANNCTFEYVSQPFLMDLEGKQGNFKNLREFVFKNIDGYFKIYSKHTPINLVRDLPQGFSALEPLVDLPIGINITRFQTLLALHRSYLTPGDSSSGWTAGAAAYYVGYLQPRTFLLKYNENGTITDAVDCALDPLSETKCTLKSFTVEKGIYQTSNFRVQPTESIVRFPNITNLCPFGEVFNATRFASVYAWNRKRISNCVADYSVLYNSASFSTFKCYGVSPTKLNDLCFTNVYADSFVIRGDEVREIAPGQTGKIADYNYKLPDDFTGCVIAWNSNNLDSKVGGNYNYLYRLFRKSNLKPFERDISTEIYQAGSTPCNGVEGFNCYFPLQSYGFQPTNGVGYQPYRVVVLSFELLHAPATVCGPKKSTNLVKNKCVNFNFNGLTGTGVLTESNKKFLPFQQFGRDIADTTDAVRDPQTLEILDITPCSFGGVSVITPGTNTSNQVAVLYQDVNCTEVPVAIHADQLTPTWRVYSTGSNVFQTRAGCLIGAEHVNNSYECDIPIGAGICASYQTQTNSPRRARSVASQSIIAYTMSLGAENSVAYSNNSIAIPTNFTISVTTEILPVSMTKTSVDCTMYICGDSTECSNLLLQYGSFCTQLNRALTGIAVEQDKNTQEVFAQVKQIYKTPPIKDFGGFNFSQILPDPSKPSKRSFIEDLLFNKVTLADAGFIKQYGDCLGDIAARDLICAQKFNGLTVLPPLLTDEMIAQYTSALLAGTITSGWTFGAGAALQIPFAMQMAYRFNGIGVTQNVLYENQKLIANQFNSAIGKIQDSLSSTASALGKLQDVVNQNAQALNTLVKQLSSNFGAISSVLNDILSRLDPPEAEVQIDRLITGRLQSLQTYVTQQLIRAAEIRASANLAATKMSECVLGQSKRVDFCGKGYHLMSFPQSAPHGVVFLHVTYVPAQEKNFTTAPAICHDGKAHFPREGVFVSNGTHWFVTQRNFYEPQIITTDNTFVSGNCDVVIGIVNNTVYDPLQPELDS

SEQ ID NO: 2699 - protein, 1147 aa, Artificial Sequence
  SARS-CoV-2/Sweden/01/2020__EPI_ISL_411951 spike protein (1-1147)(K986P_V987P)
MFVFLVLLPLVSSQCVNLTTRTQLPPAYTNSFTRGVYYPDKVFRSSVLHSTQDLFLPFFSNVTWFHAIHVSGTNGTKRFDNPVLPFNDGVYFASTEKSNIIRGWIFGTTLDSKTQSLLIVNNATNVVIKVCEFQFCNDPFLGVYYHKNNKSWMESEFRVYSSANNCTFEYVSQPFLMDLEGKQGNFKNLREFVFKNIDGYFKIYSKHTPINLVRDLPQGFSALEPLVDLPIGINITRFQTLLALHRSYLTPGDSSSGWTAGAAAYYVGYLQPRTFLLKYNENGTITDAVDCALDPLSETKCTLKSFTVEKGIYQTSNFRVQPTESIVRFPNITNLCPFGEVFNATRFASVYAWNRKRISNCVADYSVLYNSASFSTFKCYGVSPTKLNDLCFTNVYADSFVIRGDEVRQIAPGQTGKIADYNYKLPDDFTGCVIAWNSNNLDSKVGGNYNYLYRLFRKSNLKPFERDISTEIYQAGSTPCNGVEGFNCYFPLQSYGFQPTNGVGYQPYRVVVLSFELLHAPATVCGPKKSTNLVKNKCVNFNFNGLTGTGVLTESNKKFLPFQQFGRDIADTTDAVRDPQTLEILDITPCSFGGVSVITPGTNTSNQVAVLYQDVNCTEVPVAIHADQLTPTWRVYSTGSNVFQTRAGCLIGAEHVNNSYECDIPIGAGICASYQTQTNSPRRARSVASQSIIAYTMSLGAENSVAYSNNSIAIPTNFTISVTTEILPVSMTKTSVDCTMYICGDSTECSNLLLQYGSFCTQLNRALTGIAVEQDKNTQEVFAQVKQIYKTPPIKDCGGFNFSQILPDPSKPSKRSFIEDLLFNKVTLADAGFIKQYGDCLGDIAARDLICAQKFNGLTVLPPLLTDEMIAQYTSALLAGTITSGWTFGAGAALQIPFAMQMAYRFNGIGVTQNVLYENQKLIANQFNSAIGKIQDSLSSTASALGKLQDVVNQNAQALNTLVKQLSSNFGAISSVLNDILSRLDPPEAEVQIDRLITGRLQSLQTYVTQQLIRAAEIRASANLAATKMSECVLGQSKRVDFCGKGYHLMSFPQSAPHGVVFLHVTYVPAQEKNFTTAPAICHDGKAHFPREGVFVSNGTHWFVTQRNFYEPQIITTDNTFVSGNCDVVIGIVNNTVYDPLQPELDS

SEQ ID NO: 2700 - protein, 1147 aa, Artificial Sequence
  SARS-CoV-2/Tianmen/HBCDC-HB-07/2020__EPI_ISL_412983 spike protein (1-1147)(K986P_V987P)
MFVFLVLLPLVSSQCVNLTTRTQLPPAYTNSFTRGVYYPDKVFRSSVLHSTQDLFLPFFSNVTWFHAIHVSGTNGTKRFDNPVLPFNDGVYFASTEKSNIIRGWIFGTTLDSKTQSLLIVNNATNVVIKVCEFQFCNDPFLGVYYHKNNKSWMESEFRVYSSANNCTFEYVSQPFLMDLEGKQGNFKNLREFVFKNIDGYFKIYSKHTPINLVRDLPQGFSALEPLVDLPIGINITRFQTLLALHRSYLTPGDSSSGWTAGAAAYYVGYLQPRTFLLKYNENGTITDAVDCALDPLSETKCTLKSFTVEKGIYQTSNFRVQPTESIVRFPNITNLCPFGEVFNATRFASVYAWNRKRISNCVADYSVLYNSASFSTFKCYGVSPTKLNDLCFTNVYADSFVIRGDEVRQIAPGQTGKIADYNYKLPDDFTGCVIAWNSNNLDSKVGGNYNYLYRLFRKSNLKPFERDISTEIYQAGSTPCNGVEGFNCYFPLQSYGFQPTNGVGYQPYRVVVLSFELLHAPATVCGPKKSTNLVKNKCVNFNFNGLTGTGVLTESNKKFLPFQQFGRDIADTTDAVRDPQTLEILDITPCSFGGVSVITPGTNTSNQVAVLYQDLNCTEVPVAIHADQLTPTWRVYSTGSNVFQTRAGCLIGAEHVNNSYECDIPIGAGICASYQTQTNSPRRARSVASQSIIAYTMSLGAENSVAYSNNSIAIPTNFTISVTTEILPVSMTKTSVDCTMYICGDSTECSNLLLQYGSFCTQLNRALTGIAVEQDKNTQEVFAQVKQIYKTPPIKDFGGFNFSQILPDPSKPSKRSFIEDLLFNKVTLADAGFIKQYGDCLGDIAARDLICAQKFNGLTVLPPLLTDEMIAQYTSALLAGTITSGWTFGAGAALQIPFAMQMAYRFNGIGVTQNVLYENQKLIANQFNSAIGKIQDSLSSTASALGKLQDVVNQNAQALNTLVKQLSSNFGAISSVLNDILSRLDPPEAEVQIDRLITGRLQSLQTYVTQQLIRAAEIRASANLAATKMSECVLGQSKRVDFCGKGYHLMSFPQSAPHGVVFLHVTYVPAQEKNFTTAPAICHDGKAHFPREGVFVSNGTHWFVTQRNFYEPQIITTDNTFVSGNCDVVIGIVNNTVYDPLQPELDS

SEQ ID NO: 2701 - protein, 1147 aa, Artificial Sequence
  SARS-CoV-2/Hong Kong/case42_VM20002493/2020__EPI_ISL_414527 spike protein (1-1147)(K986P_V987P)
MFVFLVLLPLVSSQCVNLTTRTQLPPAYTNSFTRGVYYPDKVFRSSVLHSTQDLFLPFFSNVTWFHAIHVSGTNGTKRFDNPVLPFNDGVYFASTEKSNIIRGWIFGTTLDSKTQSLLIVNNATNVVIKVCEFQFCNDPFLGVYYHKNNKSWMESEFRVYSSANNCTFEYVSQPFLMDLEGKQGNFKNLREFVFKNIDGYFKIYSKHTPINLVRDLPQGFSALEPLVDLPIGINITRFQTLLALHRSYLTPGDSSSGWTAGAAAYYVGYLQPRTFLLKYNENGTITDAVDCALDPLSETKCTLKSFTVEKGIYQTSNFRVQPTESIVRFPNITNLCPFGEVFNATRFASVYAWNRKRISNCVADYSVLYNSASFSTFKCYGVSPTKLNDLCFTNVYADSFVIRGDEVRQIAPGQTGKIADYNYKLPDDFTGCVIAWNSNNLDSKVGGNYNYLYRLFRKSNLKPFERDISTEIYQAGSTPCNGVEGFNCYFPLQSYGFQPTNGVGYQPYRVVVLSFELLHAPATVCGPKKSTNLVKNKCVNFNFNGLTGTGVLTESNKKFLPFQQFGRDIADTTDAVRDPQTLEILDITPCSFGGVSVITPGTNTSNQVAVLYQDVNCTEVPVAIHADQLTPTWRVYSTGSNVFQTRAGCLIGAEHVNNSYECDIPIGAGICASYQTQTNSPRRARSVASQSIIAYTMSLGAENSVAYSNNSIAIPTNFAISVTTEILPVSMTKTSVDCTMYICGDSTECSNLLLQYGSFCTQLNRALTGIAVEQDKNTQEVFAQVKQIYKTPPIKDFGGFNFSQILPDPSKPSKRSFIEDLLFNKVTLADAGFIKQYGDCLGDIAARDLICAQKFNGLTVLPPLLTDEMIAQYTSALLAGTITSGWTFGAGAALQIPFAMQMAYRFNGIGVTQNVLYENQKLIANQFNSAIGKIQDSLSSTASALGKLQDVVNQNAQALNTLVKQLSSNFGAISSVLNDILSRLDPPEAEVQIDRLITGRLQSLQTYVTQQLIRAAEIRASANLAATKMSECVLGQSKRVDFCGKGYHLMSFPQSAPHGVVFLHVTYVPAQEKNFTTAPAICHDGKAHFPREGVFVSNGTHWFVTQRNFYEPQIITTDNTFVSGNCDVVIGIVNNTVYDPLQPELDS

SEQ ID NO: 2702 - protein, 1147 aa, Artificial Sequence
  SARS-CoV-2/USA/CruiseA-23/2020__EPI_ISL_414482 spike protein (1-1147)(K986P_V987P)
MFVFLVLLPLVSSQCVNLTTRTQLPPAYTNSFTRGVYYPDKVFRSSVLHSTQDLFLPFFSNVTWFHAIHVSGTNGTKRFDNPVLPFNDGVYFASTEKSNIIRGWIFGTTLDSKTQSLLIVNNATNVVIKVCEFQFCNDPFLGVYYHKNNKSWMESEFRVYSSANNCTFEYVSQPFLMDLEVKQGNFKNLREFVFKNIDGYFKIYSKHTPINLVRDLPQGFSALEPLVDLPIGINITRFQTLLALHRSYLTPGDSSSGWTAGAAAYYVGYLQPRTFLLKYNENGTITDAVDCALDPLSETKCTLKSFTVEKGIYQTSNFRVQPTESIVRFPNITNLCPFGEVFNATRFASVYAWNRKRISNCVADYSVLYNSASFSTFKCYGVSPTKLNDLCFTNVYADSFVIRGDEVRQIAPGQTGKIADYNYKLPDDFTGCVIAWNSNNLDSKVGGNYNYLYRLFRKSNLKPFERDISTEIYQAGSTPCNGVEGFNCYFPLQSYGFQPTNGVGYQPYRVVVLSFELLHAPATVCGPKKSTNLVKNKCVNFNFNGLTGTGVLTESNKKFLPFQQFGRDIADTTDAVRDPQTLEILDITPCSFGGVSVITPGTNTSNQVAVLYQDVNCTEVPVAIHADQLTPTWRVYSTGSNVFQTRAGCLIGAEHVNNSYECDIPIGAGICASYQTQTNSPRRARSVASQSIIAYTMSLGAENSVAYSNNSIAIPTNFTISVTTEILPVSMTKTSVDCTMYICGDSTECSNLLLQYGSFCTQLNRALTGIAVEQDKNTQEVFAQVKQIYKTPPIKDFGGFNFSQILPDPSKPSKRSFIEDLLFNKVTLADAGFIKQYGDCLGDIAARDLICAQKFNGLTVLPPLLTDEMIAQYTSALLAGTITSGWTFGAGAALQIPFAMQMAYRFNGIGVTQNVLYENQKLIANQFNSAIGKIQDSLSSTASALGKLQDVVNQNAQALNTLVKQLSSNFGAISSVLNDILSRLDPPEAEVQIDRLITGRLQSLQTYVTQQLIRAAEIRASANLAATKMSECVLGQSKRVDFCGKGYHLMSFPQSAPHGVVFLHVTYVPAQEKNFTTAPAICHDGKAHFPREGVFVSNGTHWFVTQRNFYEPQIITTDNTFVSGNCDVVIGIVNNTVYDPLQPELDS

SEQ ID NO: 2703 - protein, 1147 aa, Artificial Sequence
  SARS-CoV-2/Hong Kong/case85_VM20002868/2020__EPI_ISL_414519 spike protein (1-1147)(K986P_V987P)
MFVFLVLVPLVSSQCVNLTTRTQLPPAYTNSFTRGVYYPDKVFRSSVLHSTQDLFLPFFSNVTWFHAIHVSGTNGTKRFDNPVLPFNDGVYFASTEKSNIIRGWIFGTTLDSKTQSLLIVNNATNVVIKVCEFQFCNDPFLGVYYHKNNKSWMESEFRVYSSANNCTFEYVSQPFLMDLEGKQGNFKNLREFVFKNIDGYFKIYSKHTPINLVRDLPQGFSALEPLVDLPIGINITRFQTLLALHRSYLTPGDSSSGWTAGAAAYYVGYLQPRTFLLKYNENGTITDAVDCALDPLSETKCTLKSFTVEKGIYQTSNFRVQPTESIVRFPNITNLCPFGEVFNATRFASVYAWNRKRISNCVADYSVLYNSASFSTFKCYGVSPTKLNDLCFTNVYADSFVIRGDEVRQIAPGQTGKIADYNYKLPDDFTGCVIAWNSNNLDSKVGGNYNYLYRLFRKSNLKPFERDISTEIYQAGSTPCNGVEGFNCYFPLQSYGFQPTNGVGYQPYRVVVLSFELLHAPATVCGPKKSTNLVKNKCVNFNFNGLTGTGVLTESNKKFLPFQQFGRDIADTTDAVRDPQTLEILDITPCSFGGVSVITPGTNTSNQVAVLYQDVNCTEVPVAIHADQLTPTWRVYSTGSNVFQTRAGCLIGAEHVNNSYECDIPIGAGICASYQTQTNSPRRARSVASQSIIAYTMSLGAENSVAYSNNSIAIPTNFTISVTTEILPVSMTKTSVDCTMYICGDSTECSNLLLQYGSFCTQLNRALTGIAVEQDKNTQEVFAQVKQIYKTPPIKDFGGFNFSQILPDPSKPSKRSFIEDLLFNKVTLADAGFIKQYGDCLGDIAARDLICAQKFNGLTVLPPLLTDEMIAQYTSALLAGTITSGWTFGAGAALQIPFAMQMAYRFNGIGVTQNVLYENQKLIANQFNSAIGKIQDSLSSTASALGKLQDVVNQNAQALNTLVKQLSSNFGAISSVLNDILSRLDPPEAEVQIDRLITGRLQSLQTYVTQQLIRAAEIRASANLAATKMSECVLGQSKRVDFCGKGYHLMSFPQSAPHGVVFLHVTYVPAQEKNFTTAPAICHDGKAHFPREGVFVSNGTHWFVTQRNFYEPQIITTDNTFVSGNCDVVIGIVNNTVYDPLQPELDS

SEQ ID NO: 2704 - protein, 1147 aa, Artificial Sequence; identical to SEQ ID NO: 2694
  SARS-CoV-2/England/200990660/2020__EPI_ISL_414523 spike protein (1-1147)(K986P_V987P)

SEQ ID NO: 2705 - protein, 1147 aa, Artificial Sequence
  SARS-CoV-2/Australia/NSW09/2020__EPI_ISL_413595 spike protein (1-1147)(K986P_V987P)
MFVFLVLLPLVSSQCVNLTTRTQLPPAYTNSFTRGVYYPDKVFRSSVLHSTQDLFLPFFSNVTWFHAIHVSGTNGTKRFDNPVLPFNDGVYFASTEKSNIIRGWIFGTTLDSKTQSLLIVNNATNVVIKVCEFQFCNDPFLGVYYHKNNKSWMESEFRVYSSANNCTFEYVSQPFLMDLEGKQGNFKNLREFVFKNIDGYFKIYSKHTPINLVRDLPQGFSALEPLVDLPIGINITRFQTLLALHRSYLTPGDSSSGWTAGAAAYYVGYLQPRTFLLKYNENGTITDAVDCALDPLSETKCTLKSFTVEKGIYQTSNFRVQPTESIVRFPNITNLCPFGEVFNATRFASVYAWNRKRISNCVADYSVLYNSASFSTFKCYGVSPTKLNDLCFTNVYADSFVIRGDEVRQIAPGQTGKIADYNYKLPDDFTGCVIAWNSNNLDSKVGGNYNYLYRLFRKSNLKPFERDISTEIYQAGSTPCNGVEGFNCYFPLQSYGFQPTNGVGYQPYRVVVLSFELLHAPATVCGPKKSTNLVKNKCVNFNFNGLTGTGVLTESNKKFLPFQQFGRDIADTTDAVRDPQTLEILDITPCSFGGVSVITPGTNTSNQVAVLYQDVNCTEVPVAIHADQLTPTWRVYSTGSNVFQTRAGCLIGAEHVNNSYECDIPIGAGICASYQTQTNSPRRARSVASQSIIAYTMSLGAENSVAYSNNSIAIPTNFTISVTTEILPVSMTKTSVDCTMYICGDSTECSNLLLQYGSFCTQLNRALTGIAVEQDKNTQEVFAQVKQIYKTPPIKDFGGFNFSQILPDPSKPSKRSFIEDLLFNKVTLADAGFIKQYGDCLGDIAARDLICAQKFNGLTVLPPLLTDEMIAQYTSALLAGTITSGWTFGAGAALQIPFAMQMAYRFNGIGVTQNVLYENQKLIANQFNSAIGKIQDSLSFTASALGKLQDVVNQNAQALNTLVKQLSSNFGAISSVLNDILSRLDPPEAEVQIDRLITGRLQSLQTYVTQQLIRAAEIRASANLAATKMSECVLGQSKRVDFCGKGYHLMSFPQSAPHGVVFLHVTYVPAQEKNFTTAPAICHDGKAHFPREGVFVSNGTHWFVTQRNFYEPQIITTDNTFVSGNCDVVIGIVNNTVYDPLQPELDS

SEQ ID NO: 2706 - protein, 1147 aa, Artificial Sequence; identical to SEQ ID NO: 2686
  SARS-CoV-2/Australia/NSW10/2020__EPI_ISL_413596 spike protein (1-1147)(K986P_V987P)

SEQ ID NO: 2707 - protein, 1147 aa, Artificial Sequence
  SARS-CoV-2/Switzerland/1000477797/2020__EPI_ISL_413023 spike protein (1-1147)(K986P_V987P)
MFVFLVLLPLVSSQCVNLTTRTQLPPAYTNSFTRGVYYPDKVFRSSVLHSTQDLFLPFFSNVTWFHAIHVSGTNGTKRFDNPVLPFNDGVYFASTEKSNIIRGWIFGTTLDSKTQSLLIVNNATNVVIKVCEFQFCNDPFLGVYYHKNNKSWMESEFRVYSSANNCTFEYVSQPFLMDLEGKQGNFKNLREFVFKNIDGYFNIYSKHTPINLVRDLPQGFSALEPLVDLPIGINITRFQTLLALHRSYLTPGDSSSGWTAGAAAYYVGYLQPRTFLLKYNENGTITDAVDCALDPLSETKCTLKSFTVEKGIYQTSNFRVQPTESIVRFPNITNLCPFGEVFNATRFASVYAWNRKRISNCVADYSVLYNSASFSTFKCYGVSPTKLNDLCFTNVYADSFVIRGDEVRQIAPGQTGKIADYNYKLPDDFTGCVIAWNSNNLDSKVGGNYNYLYRLFRKSNLKPFERDISTEIYQAGSTPCNGVEGFNCYFPLQSYGFQPTNGVGYQPYRVVVLSFELLHAPATVCGPKKSTNLVKNKCVNFNFNGLTGTGVLTESNKKFLPFQQFGRDIADTTDAVRDPQTLEILDITPCSFGGVSVITPGTNTSNQVAVLYQGVNCTEVPVAIHADQLTPTWRVYSTGSNVFQTRAGCLIGAEHVNNSYECDIPIGAGICASYQTQTNSPRRARSVASQSIIAYTMSLGAENSVAYSNNSIAIPTNFTISVTTEILPVSMTKTSVDCTMYICGDSTECSNLLLQYGSFCTQLNRALTGIAVEQDKNTQEVFAQVKQIYKTPPIKDFGGFNFSQILPDPSKPSKRSFIEDLLFNKVTLADAGFIKQYGDCLGDIAARDLICAQKFNGLTVLPPLLTDEMIAQYTSALLAGTITSGWTFGAGAALQIPFAMQMAYRFNGIGVTQNVLYENQKLIANQFNSAIGKIQDSLSSTASALGKLQDVVNQNAQALNTLVKQLSSNFGAISSVLNDILSRLDPPEAEVQIDRLITGRLQSLQTYVTQQLIRAAEIRASANLAATKMSECVLGQSKRVDFCGKGYHLMSFPQSAPHGVVFLHVTYVPAQEKNFTTAPAICHDGKAHFPREGVFVSNGTHWFVTQRNFYEPQIITTDNTFVSGNCDVVIGIVNNTVYDPLQPELDS

SEQ ID NO: 2708 - protein, 1147 aa, Artificial Sequence
  SARS-CoV-2/Belgium/BA-02291/2020__EPI_ISL_415159 spike protein (1-1147)(K986P_V987P)
MFVFLVLLPLVSSQCVNLTTRTQLPPAYTNSFTRGVYYPDKVFRSSVLHSTQDLFLPFFSNVTWFHAIHVSGTNGTKRFDNPVLPFNDGVYFASTEKSNIIRGWIFGTTLDSKTQSLLIVNNATNVVIKVCEFQFCNDPFLGVYYHKNNKSWMESEFRVYSSANNCTFEYVSQPFLMDLEGKQGNFKNLREFVFKNIDGYFKIYSKHTPINLVRDLPQGFSALEPLVDLPIGINITRFQTLLALHRSYLTPGDSSSGWTAGAAAYYVGYLQPRTFLLKYNENGTITDAVDCALDPLSETKCTLKSFTVEKGIYQTSNFRVQPTESIVRFPNITNLCPFGEVFNATRFASVYAWNRKRISNCVADYSVLYNSASFSTFKCYGVSPTKLNDLCFTNVYADSFVIRGDEVRQIAPGQTGKIADYNYKLPDDFTGCVIAWNSNNLDSKVGGNYNYLYRLFRRSNLKPFERDISTEIYQAGSTPCNGVEGFNCYFPLQSYGFQPTNGVGYQPYRVVVLSFELLPAPATVCGPKKSTNLVKNKCVNFNFNGLTGTGVLTESNKKFLPFQQFGRDIADTTDAVRDPQTLEILDITPCSFGGVSVITPGTNTSNQVAVLYQGVNCTEVPVAIHADQLTPTWRVYSTGSNVFQTRAGCLIGAEHVNNSYECDIPIGAGICASYQTQTNSPRRARSVASQSIIAYTMSLGAENSVAYSNNSIAIPTNFTISVTTEILPVSMTKTSVDCTMYICGDSTECSNLLLQYGSFCTQLNRALTGIAVEQDKNTQEVFAQVKQIYKTPPIKDFGGFNFSQILPDPSKPSKRSFIEDLLFNKVTLADAGFIKQYGDCLGDIAARDLICAQKFNGLTVLPPLLTDEMIAQYTSALLAGTITSGWTFGAGAALQIPFAMQMAYRFNGIGVTQNVLYENQKLIANQFNSAIGKIQDSLSSAAPALGKLQDVVNQNAQALNTLVKQLSSNFGAISSVLNDILSRLDPPEAEVQIDRLITGRLQSLQTYVTQQLIRAAEIRASANLAATKMSECVLGQSKRVDFCGKGYHLMSFPQSAPHGVVFLHVTYVPAQEKNFTTAPAICHDGKAHFPREGVFVSNGTHWFVTQRNFYEPQIITTDNTFVSGNCDVVIGIVNNTVYDPLQPELDS

SEQ ID NO: 2709 - protein, 1147 aa, Artificial Sequence
  SARS-CoV-2/USA/WA8-UW5/2020__EPI_ISL_413486 spike protein (1-1147)(K986P_V987P)
MFVFLVLLPLVSSQCVNLTTRTQLPPAYTNSFTRGVYYPDKVFRSSVLHSTQDLFLPFFSNVTWFHAIHVSGTNGTKRFDNPVLPFNDGVYFASTEKSNIIRGWIFGTTLDSKTQSLLIVNNATNVVIKVCEFQFCNDPFLGVYYHKNNKSWMESEFRVYSSANNCTFEYVSQPFLMDLEGKQGNFKNLREFVFKNIDGYFKIYSKHTPINLVRDLPQGFSALEPLVDLPIGINITRFQTLLALHRSYLTPGDSSSGWTAGAAAYYVGYLQPRTFLLKYNENGTITDAVDCALDPLSETKCTLKSFTVEKGIYQTSNFRVQPTESIVRFPNITNLCPFGEVFNATRFASVYAWNRKRISNCVADYSVLYNSASFSTFKCYGVSPTKLNDLCFTNVYADSFVIRGDEVRQIAPGQTGKIADYNYKLPDDFTGCVIAWNSNNLDSKVGGNYNYLYRLFRKSNLKPFERDISTEIYQAGSTPCNGVEGFNCYFPLQSYGFQPTNGVGYQPYRVVVLSFELLHAPATVCGPKKSTNLVKNKCVNFNFNGLTGTGVLTESNKKFLPFQQFGRDIADTTDAVRDPQTLEILDITPCSFGGVSVITPGTNTSNQVAVLYQDVNCTEVPVAIHADQLTPTWRVYSTGSNVFQTRAGCLIGAEYVNNSYECDIPIGAGICASYQTQTNSPRRARSVASQSIIAYTMSLGAENSVAYSNNSIAIPTNFTISVTTEILPVSMTKTSVDCTMYICGDSTECSNLLLQYGSFCTQLNRALTGIAVEQDKNTQEVFAQVKQIYKTPPIKDFGGFNFSQILPDPSKPSKRSFIEDLLFNKVTLADAGFIKQYGDCLGDIAARDLICAQKFNGLTVLPPLLTDEMIAQYTSALLAGTITSGWTFGAGAALQIPFAMQMAYRFNGIGVTQNVLYENQKLIANQFNSAIGKIQDSLSSTASALGKLQDVVNQNAQALNTLVKQLSSNFGAISSVLNDILSRLDPPEAEVQIDRLITGRLQSLQTYVTQQLIRAAEIRASANLAATKMSECVLGQSKRVDFCGKGYHLMSFPQSAPHGVVFLHVTYVPAQEKNFTTAPAICHDGKAHFPREGVFVSNGTHWFVTQRNFYEPQIITTDNTFVSGNCDVVIGIVNNTVYDPLQPELDS

SEQ ID NO: 2710 - protein, 1147 aa, Artificial Sequence
  SARS-CoV-2/England/20102000506/2020__EPI_ISL_415147 spike protein (1-1147)(K986P_V987P)
MFVFLVLLPLVSSQCVNLTTRTQLPPAYTNSFTRGVYYPDKVFRSSVLHSTQDLFLPFFSNVTWFHAIHVSGTNGTKRFDNPVLPFNDGVYFASTEKSNIIRGWIFGTTLDSKTQSLLIVNNATNVVIKVCEFQFCNDPFLGVYYHKNNKSWMESEFRVYSSANNCTFEYVSQPFLMDLEGKQGNFKNLREFVFKNIDGYFKIYSKHTPINLVRDLPQGFSALEPLVDLPIGINITRFQTLLALHRSYLTPGDSSSGWTAGAAAYYVGYLQPRTFLLKYNENGTITDAVDCALDPLSETKCTLKSFTVEKGIYQTSNFRVQPTESIVRFPNITNLCPFGEVFNATRFASVYAWNRKRISNCVADYSVLYNSASFSTFKCYGVSPTKLNDLCFTNVYADSFVIRGDEVRQIAPGQTGKIADYNYKLPDDFTGCVIAWNSNNLDSKVGGNYNYLYRLFRKSNLKPFERDISTEIYQAGSTPCNGVEGFNCYFPLQSYGFQPTNGVGYQPYRVVVLSFELLHAPATVCGPKKSTNLVKNKCVNFNFNGLTGTGVLTESNKKFLPFQQFGRDIADTTDAVRDPQTLEILDITPCSFGGVSVITPGTNTSNQVAVLYQGVNCTEVPVAIHADQLTPTWRVYSTGSNVFQTRAGCLIGAEHVNNSYECDIPIGAGICASYQTQTNSPRRARSVASQSIIAYTMSLGAENSVAYSNNSIAIPTNFTISVTTEILPVSMTKTSVDCTMYICGDSTECSNLLLQYGSFCTQLNRALTGIAVEQDKNTQEVFAQVKQIYKTPPIKDFGGFNFSQILPDPSKPSKRSFIEDLLFNKVTLADAGFIKQYGYCLGDIAARDLICAQKFNGLTVLPPLLTDEMIAQYTSALLAGTITSGWTFGAGAALQIPFAMQMAYRFNGIGVTQNVLYENQKLIANQFNSAIGKIQDSLSSTASALGKLQDVVNQNAQALNTLVKQLSSNFGAISSVLNDILSRLDPPEAEVQIDRLITGRLQSLQTYVTQQLIRAAEIRASANLAATKMSECVLGQSKRVDFCGKGYHLMSFPQSAPHGVVFLHVTYVPAQEKNFTTAPAICHDGKAHFPREGVFVSNGTHWFVTQRNFYEPQIITTDNTFVSGNCDVVIGIVNNTVYDPLQPELDS

SEQ ID NO: 2711 - protein, 1147 aa, Artificial Sequence
  SARS-CoV-2/Belgium/VAG-03013/2020__EPI_ISL_415155 spike protein (1-1147)(K986P_V987P)
MFVFLVLLPLVSSQCVNLTTRTQLPPAYTNSFTRGVYYPDKVFRSSVLHSTQDLFLPFFSNVTWFHAIHVSGTNGTKRFDNPVLPFNDGVYFASTEKSNIIRGWIFGTTLDSKTQSLLIVNNATNVVIKVCEFQFCNDPFLGVYYHKNNKSWMESEFRVYSSANNCTFEYVSQPFLMDLEGKQGNFKNLREFVFKNIDGYFKIYSKHTPINLVRDLPQGFSALEPLVDLPIGINITRFQTLLALHRSYLTPGDSSSGWTAGAAAYYVGYLQPRTFLLKYNENGTITDAVDCALDPLSETKCTLKSFTVEKGIYQTSNFRVQPTESIVRFPNITNLCPFGEVFNATRFASVYAWNRKRISNCVADYSVLYNSASFSTFKCYGVSPTKLNDLCFTNVYADSFVIRGDEVRQIAPGQTGKIADYNYKLPDDFTGCVIAWNSNNLDSKVGGNYNYLYRLFRKSNLKPFERDISTEIYQAGSTPCNGVEGFNCYFPLQSYGFQPTNGVGYQPYRVVVLSFELLHAPATVCGPKKSTNLVKNKCVNFNFNGLTGTGVLTESNKKFLPFQQFGRDIADTTDAVRDPQTLEILDITPCSFGGVSVITPGTNTSNQVAVLYQGVNCTEVPVAIHADQLTPTWRVYSTGSNVFQTRAGCLIGAEHVNNSYECDIPIGAGICASYQTQTNSPRRARSVASQSIIAYTMSLGAENSVAYSNNSIAIPTNFTISVTTEILPVSMTKTSVDCTMYICGDSTECSNLLLQYGSFCTQLNRALTGIAVEQDKNTQEVFAQVKQIYKTPPIKDFGGFNFSQILPDPSKPSKRSFIEDLLFNKVTLADAGFIKQYGDCLGDIAARDLICAQKFNGLTVLPPLLTDEMIAQYTSALLAGTITSGWTFGAGAALQIPFAMQMAYRFNGIGVTQNVLYENQKLIANQFNSAIGKIQDSLSSTATALGKLQDVVNQNAQALNTLVKQLSSNFGAISSVLNDILSRLDPPEAEVQIDRLITGRLQSLQTYVTQQLIRAAEIRASANLAATKMSECVLGQSKRVDFCGKGYHLMSFPQSAPHGVVFLHVTYVPAQEKNFTTAPAICHDGKAHFPREGVFVSNGTHWFVTQRNFYEPQIITTDNTFVSGNCDVVIGIVNNTVYDPLQPELDS

SEQ ID NO: 2712 - protein, 1147 aa, Artificial Sequence
  SARS-CoV-2/Belgium/BC-03016/2020__EPI_ISL_415157 spike protein (1-1147)(K986P_V987P)
MFVFLVLLPLVSSQCVNLTTRTQLPPAYTNSFTRGVYYPDKVFRSSVLHSTQDLFLPFFSNVTWFHAIHVSGTNGTKRFDNPVLPFNDGVYFASTEKSNIIRGWIFGTTLDSKTQSLLIVNNATNVVIKVCEFQFCNDPFLGVYYHKNNKSWMESEFRVYSSANNCTFEYVSQPFLMDLEGKQGNFKNLREFVFKNIDGYFKIYSKHTPINLVRDLPQGFSALEPLVDLPIGINITRFQTLLALHRSYLTPGDSSSGWTAGAAAYYVGYLQPRTFLLKYNENGTITDAVDCALDPLSETKCTLKSFTVEKGIYQTSNFRVQPTESIVRFPNITNLCPFGEVFNATRFASVYAWNRKRISNCVADYSVLYNSASFSTFKCYGVSPTKLNDLCFTNVYADSFVIRGDEVRQIAPGQTGKIADYNYKLPDDFTGCVIAWNSNNLDSKVGGNYNYLYRLFRKSNLKPFERDISTEIYQAGSTPCNGVEGFNCYFPLQSYGFQPTNGVGYQPYRVVVLSFELLHAPATVCGPKKSTNLVKNKCVNFNFNGLTGTGVLTESNKKFLPFQQFGRDIADTTDAVRDPQTLEILDITPCSFGGVSVITPGTNTSNQVAVLYQGVNCTEVPVAIHADQLTPTWRVYSTGSNVFQTRAGCLIGAEHVNNSYECDIPIGAGICASYQTQTNSPRRARSVASQSIIAYTMSLGAENSVAYSNNSIAIPTNFTISVTTEILPVSMTKTSVDCTMYICGDSTECSNLLLQYGSFCTQLNRALTGIAVEQDKNTQEVFAQVKQIYKTPPIKDFGGFNFSQILPDPSKPSKRSFIEDLLFNKVTLADAGFIKQYGDCLGDIAARDLICAQKFNGLTVLPPLLTDEMIAQYTSALLAGTITSGWTFGAGAALQIPFAMQMAYRFNGIGVTQNVLYENQKLIANQFNSAIGKIQDSLSSTAPALGKLQDVVNQNAQALNTLVKQLSSNFGAISSVLNDILSRLDPPEAEVQIDRLITGRLQSLQTYVTQQLIRAAEIRASANLAATKMSECVLGQSKRVDFCGKGYHLMSFPQSAPHGVVFLHVTYVPAQEKNFTTAPAICHDGKAHFPREGVFVSNGTHWFVTQRNFYEPQIITTDNTFVSGNCDVVIGIVNNTVYDPLQPELDS

SEQ ID NO: 2713 - protein, 1147 aa, Artificial Sequence
  SARS-CoV-2/Germany/BavPat3/2020__EPI_ISL_414521 spike protein (1-1147)(K986P_V987P)
MFVFLVLLPLVSSQCVNLTTRTQLPPAYTNSFTRGVYYPDKVFRSSVLHSTQDLFLPFFSNVTWFHAIHVSGTNGTKRFDNPVLPFNDGVYFASTEKSNIIRGWIFGTTLDSKTQSLLIVNNATNVVIKVCEFQFCNDPFLGVYYHKNNKSWMESEFRVYSSANNCTFEYVSQPFLMDLEGKQGNFKNLREFVFKNIDGYFKIYSKHTPINLVRDLPQGFSALEPLVDLPIGINITRFQTLLALHRSYLTPGDSSSGWTAGAAAYYVGYLQPRTFLLKYNENGTITDAVDCALDPLSETKCTLKSFTVEKGIYQTSNFRVQPTESIVRFPNITNLCPFGEVFNATRFASVYAWNRKRISNCVADYSVLYNSASFSTFKCYGVSPTKLNDLCFTNVYADSFVIRGDEVRQIAPGQTGKIADYNYKLPDDFTGCVIAWNSNNLDSKVGGNYNYLYRLFRKSNLKPFERDISTEIYQAGSTPCNGVEGFNCYFPLQSYGFQPTNGVGYQPYRVVVLSFELLHAPATVCGPKKSTNLVKNKCVNFNFNGLTGTGVLTESNKKFLPFQQFGRDIADTTDAVRDPQTLEILDITPCSFGGVSVITPGTNTSNQVAVLYQDVNCTEVPVAIHADQLTPTWRVYSTGSNVFQTRAGCLIGAEHVNNSYECDIPIGAGICASYQTQTNSPRRARSVASQSIIAYTMSLGAENSVAYSNNSIAIPTNFTISVTTEILPVSMTKTSVDCTMYICGDSTECSNLLLQYGSFCTQLNRALTGIAVEQDKNTQQVFAQVKQIYKTPPIKDFGGFNFSQILPDPSKPSKRSFIEDLLFNKVTLADAGFIKQYGDCLGDIAARDLICAQKFNGLTVLPPLLTDEMIAQYTSALLAGTITSGWTFGAGAALQIPFAMQMAYRFNGIGVTQNVLYENQKLIANQFNSAIGKIQDSLSSTASALGKLQDVVNQNAQALNTLVKQLSSNFGAISSVLNDILSRLDPPEAEVQIDRLITGRLQSLQTYVTQQLIRAAEIRASANLAATKMSECVLGQSKRVDFCGKGYHLMSFPQSAPHGVVFLHVTYVPAQEKNFTTAPAICHDGKAHFPREGVFVSNGTHWFVTQRNFYEPQIITTDNTFVSGNCDVVIGIVNNTVYDPLQPELDS

SEQ ID NO: 2714 - protein, 1147 aa, Artificial Sequence
  SARS-CoV-2/France/HF1805/2020__EPI_ISL_414628 spike protein (1-1147)(K986P_V987P)
MFVFLVLLPLVSSQCVNLTTRTQLPPAYTNSFTRGVYYPDKVFRSSVLHSTQDLFLPFFSNVTWFHAIHVSGTNGTKRFDNPVLPFNDGVYFASTEKSNIIRGWIFGTTLDSKTQSLLIVNNATNVVIKVCEFQFCNDPFLGVYYHKNNKSWMESEFRVYSSANNCTFEYVSQPFLMDLEGKQGNFKNLREFVFKNIDGYFKIYSKHTPINLVRDLPQGFSALEPLVDLPIGINITRFQTLLALHRSYLTPGDSSSGWTAGAAAYYVGYLQPRTFLLKYNENGTITDAVDCALDPLSETKCTLKSFTVEKGIYQTSNFRVQPTESIVRFPNITNLCPFGEVFNATRFASVYAWNRKRISNCVADYSVLYNSASFSTFKCYGVSPTKLNDLCFTNVYADSFVIRGDEVRQIAPGQTGKIADYNYKLPDDFTGCVIAWNSNNLDSKVGGNYNYLYRLFRKSNLKPFERDISTEIYQAGSTPCNGVEGFNCYFPLQSYGFQPTNGVGYQPYRVVVLSFELLHAPATVCGPKKSTNLVKNKCVNFNFNGLTGTGVLTESNKKFLPFQQFGRDIADTTDAVRDPQTLEILDITPCSFGGVSVITPGTNTSNQVAVLYQGVNCTEVPVAIHADQLTPTWRVYSTGSNVFQTRAGCLIGAEHVNNSYECDIPIGAGICASYQTQTNSPRRARSVASQSIIAYTMSLGAENSVAYSNNSIAIPTNFTISVTTEILPVSMTKTSVDCTMYICGDSTECSNLLLQYGSFCTQLNRALTGIAVEQDKNTQEVFAQVKQIYKTPPIKDFGGFNFSQILPDPSKPSKRSFIEDLLFNKVTLADAGFIKQYGDCLGDIAARDLICAQKFNGLTVLPPLLTDEMIAQYTSALLAGTITSGWTFGAGAALQIPFAMQMAYRFNGIGVTQNVLYENQKLIANQFNSAIGKIQDSLSSTASALGKLQDVVNQNAQALNTLVKQLSSNFGAISSVLNDILSRLDPPEAEVQIDRLITGRLQSLQTYVTQQLIRAAEIRASANLAATKMSECVLGQSKRVDFCGKGYHLMSFPQSAPHGVVFLHVTYVPAQEKNFTTAPAICHDGKAHFPREGVFVSNGTHWFVTQRNFYEPQIITTDNTFVSGNCDVVIGVVNNTVYDPLQPELDS

SEQ ID NO: 2715 - protein, 1147 aa, Artificial Sequence
  SARS-CoV-2/Netherlands/ZuidHolland_9/2020__EPI_ISL_414445 spike protein (1-1147)(K986P_V987P)
MFVFLVLLPLVSSQCVNLTTRTQLPPAYTNSFTRGVYYPDKVFRSSVLHSTQDLFLPFFSNVTWFHAIHVSGTNGTKRFDNPVLPFNDGVYFASTEKSNIIRGWIFGTTLDSKTQSLLIVNNATNVVIKVCEFQFCNDPFLGVYYHKNNKSWMESEFRVYSSANNCTFEYVSQPFLMDLEGKQGNFKNLREFVFKNIDGYFKIYSKHTPINLVRDLPQGFSALEPLVDLPIGINITRFQTLLALHRSYLTPGDSSSGWTAGAAAYYVGYLQPRTFLLKYNENGTITDAVDCALDPLSETKCTLKSFTVEKGIYQTSNFRVQPTESIVRFPNITNLCPFGEVFNATRFASVYAWNRKRISNCVADYSVLYNSASFSTFKCYGVSPTKLNDLCFTNVYADSFVIRGDEVRQIAPGQTGKIADYNYKLPDDFTGCVIAWNSNNLDSKVGGNYNYLYRLFRKSNLKPFERDISTEIYQAGSTPCNGVEGFNCYFPLQSYGFQPTNGVGYQPYRVVVLSFELLHAPATVCGPKKSTNLVKNKCVNFNFNGLTGTGVLTESNKKFLPFQQFGRDIADTTDAVRDPQTLEILDITPCSFGGVSVITPGTNTSNQVAVLYQGVNCTEVPVAIHADQLTPTWRVYSTGSNVFQTRAGCLIGAEHVNNSYECDIPIGAGICASYQTQTNSPRRARSVASQSIIAYTMSLGAENSVAYSNNSIAIPTNFTISVTTEILPVSMTKTSVDCTMYICGDSTECSNLLLQYGSFCTQLNRALTGIAVEQDKNTQEVFAQVKQIYKTPPIKDFGGFNFSQILPDPSKPSKRSFIEDLLFNKVTLADAGFIKQYGDCLGDIAARDLICVQKFNGLTVLPPLLTDEMIAQYTSALLAGTITSGWTFGAGAALQIPFAMQMAYRFNGIGVTQNVLYENQKLIANQFNSAIGKIQDSLSSTASALGKLQDVVNQNAQALNTLVKQLSSNFGAISSVLNDILSRLDPPEAEVQIDRLITGRLQSLQTYVTQQLIRAAEIRASANLAATKMSECVLGQSKRVDFCGKGYHLMSFPQSAPHGVVFLHVTYVPAQEKNFTTAPAICHDGKAHFPREGVFVSNGTHWFVTQRNFYEPQIITTDNTFVSGNCDVVIGIVNNTVYDPLQPELDS

SEQ ID NO: 2716 - protein, 1147 aa, Artificial Sequence
  SARS-CoV-2/Finland/FIN03032020A/2020__EPI_ISL_413602 spike protein (1-1147)(K986P_V987P)
MFVFLVLLPLVSSQCVNLTTRTQLPPAYTNSFTRGVYYPDKVFRSSVLHSTQDLFLPFFSNVTWFHAIHVSGTNGTKRFDNPVLPFNDGVYFASTEKSNIIRGWIFGTTLDSKTQSLLIVNNATNVVIKVCEFQFCNDPFLGVYYHKNNKSWMESEFRVYSSANNCTFEYVSQPFLMDLEGKQGNFKNLREFVFKNIDGYFKIYSKHTPINLVRDLPQGFSALEPLVDLPIGINITRFQTLLALHRSYLTPGDSSSGWTAGAAAYYVGYLQPRTFLLKYNENGTITDAVDCALDPLSETKCTLKSFTVEKGIYQTSNFRVQPTESIVRFPNITNLCPFGEVFNATRFASVYAWNRKRISNCVADYSVLYNSASFSTFKCYGVSPTKLNDLCFTNVYADSFVIRGDEVRQIAPGQTGKIADYNYKLPDDFTGCVISWNSNNLDSKVGGNYNYLYRLFRKSNLKPFERDISTEIYQAGSTPCNGVEGFNCYFPLQSYGFQPTNGVGYQPYRVVVLSFELLHAPATVCGPKKSTNLVKNKCVNFNFNGLTGTGVLTESNKKFLPFQQFGRDIADTTDAVRDPQTLEILDITPCSFGGVSVITPGTNTSNQVAVLYQGVNCTEVPVAIHADQLTPTWRVYSTGSNVFQTRAGCLIGAEHVNNSYECDIPIGAGICASYQTQTNSPRRARSVASQSIIAYTMSLGAENSVAYSNNSIAIPTNFTISVTTEILPVSMTKTSVDCTMYICGDSTECSNLLLQYGSFCTQLNRALTGIAVEQDKNTQEVFAQVKQIYKTPPIKDFGGFNFSQILPDPSKPSKRSFIEDLLFNKVTLADAGFIKQYGDCLGDIAARDLICAQKFNGLTVLPPLLTDEMIAQYTSALLAGTITSGWTFGAGAALQIPFAMQMAYRFNGIGVTQNVLYENQKLIANQFNSAIGKIQDSLSSTASALGKLQDVVNQNAQALNTLVKQLSSNFGAISSVLNDILSRLDPPEAEVQIDRLITGRLQSLQTYVTQQLIRAAEIRASANLAATKMSECVLGQSKRVDFCGKGYHLMSFPQSAPHGVVFLHVTYVPAQEKNFTTAPAICHDGKAHFPREGVFVSNGTHWFVTQRNFYEPQIITTDNTFVSGNCDVVIGIVNNTVYDPLQPELDS

SEQ ID NO: 2717 - protein, 1147 aa, Artificial Sequence
  SARS-CoV-2/France/GE1977/2020__EPI_ISL_414632 spike protein (1-1147)(K986P_V987P)
MFVFLVLLPLVSSQCVNLTTRTQLPPAYTNSFTRGVYYPDKVFRSSVLHSTQDLFLPFFSNVTWFHAIHVSGTNGTKRFDNPVLPFNDGVYFASTEKSNIIRGWIFGTTLDSKTQSLLIVNNATNVVIKVCEFQFCNDPFLGVYYHKNNKSWMESEFRVYSSANNCTFEYVSQPFLMDLEGKQGNFKNLREFVFKNIDGYFKIYSKHTPINLVRDLPQGFSALEPLVDLPIGINITRFQTLLALHRSYLTPGDSSSGWTAGAAAYYVGYLQPRTFLLKYNENGTITDAVDCALDPLSETKCTLKSFTVEKGIYQTSNFRVQPTESIVRFPNITNLCPFGEVFNATRFASVYAWNRKRISNCVADYSVLYNSASFSTFKCYGVSPTKLNDLCFTNVYADSFVIRGDEVRQIAPGQTGKIADYNYKLPDDFTGCVIAWNSNNLDSKVGGNYNYLYRLFRKSNLKPFERDISTEIYQAGSTPCNGVEGFNCYFPLQSYGFQPTNGVGYQPYRVVVLSFELLHAPATVCGPKKSTNLVKNKCVNFNFNGLTGTGVLTESNKKFLPFQQFGRDIADTTDAVRDPQTLEILDITPCSFGGVSVITPGTNTSNQVAVLYQGVNCTEVPVAIHADQLTPTWRVYSTGSNVFQTRAGCLIGAEHVNNSYECDIPIGAGICASYQTQTNSPRRARSVASQSIIAYTMSLGAENSVAYSNNSIAIPTNFTISVTTEILPVSMTKTSVDCTMYICGDSTECSNLLLQYGSFCTQLNRALTGIAVEQDKNTQEVFAQVKQIYKTPPIKDFGGFNFSQILPDPSKPSKRSFIEDLLFNKVTLADAGFIKQYGDCLGDIAARDLICAQKFNGLTVLPPLLTDEMIAQYTSALLAGTITSGWTFGAGAALQIPFAMQMAYRFNGIGVTQNVLYENQKLIANQFNSAIGKIQDSLFSTASALGKLQDVVNQNAQALNTLVKQLSSNFGAISSVLNDILSRLDPPEAEVQIDRLITGRLQSLQTYVTQQLIRAAEIRASANLAATKMSECVLGQSKRVDFCGKGYHLMSFPQSAPHGVVFLHVTYVPAQEKNFTTAPAICHDGKAHFPREGVFVSNGTHWFVTQRNFYEPQIITTDNTFVSGNCDVVIGIVNNTVYDPLQPELDS

SEQ ID NO: 2718 - protein, 1147 aa, Artificial Sequence
  SARS-CoV-2/Finland/FIN-313/2020__EPI_ISL_414641 spike protein (1-1147)(K986P_V987P)
MFVFLVLLPLVSSQCVNLTTRTQLPPAYTNSFTRGVYYPDKVFRSSVLHSTQDLFLPFFSNVTWFHAIHVSGTNGTKRFDNPVLPFNDGVYFASTEKSNIIRGWIFGTTLDSKTQSLLIVNNATNVVIKVCEFQFCNDPFLGVYYHKNNKSWMESEFRVYSSANNCTFEYVSQPFLMDLEGKQGNFKNLREFVFKNIDGYFKIYSKHTPINLVRDLPQGFSALEPLVDLPIGINITRFKTLLALHRSYLTPGDSSSGWTAGAAAYYVGYLQPRTFLLKYNENGTITDAVDCALDPLSETKCTLKSFTVEKGIYQTSNFRVQPTESIVRFPNITNLCPFGEVFNATRFASVYAWNRKRISNCVADYSVLYNSASFSTFKCYGVSPTKLNDLCFTNVYADSFVIRGDEVRQIAPGQTGKIADYNYKLPDDFTGCVIAWNSNNLDSKVGGNYNYLYRLFRKSNLKPFERDISTEIYQAGSTPCNGVEGFNCYFPLQSYGFQPTNGVGYQPYRVVVLSFELLHAPATVCGPKKSTNLVKNKCVNFNFNGLTGTGVLTESNKKFLPFQQFGRDIADTTDAVRDPQTLEILDITPCSFGGVSVITPGTNTSNQVAVLYQGVNCTEVPVAIHADQLTPTWRVYSTGSNVFQTRAGCLIGAEHVNNSYECDIPIGAGICASYQTQTNSPRRARSVASQSIIAYTMSLGAENSVAYSNNSIAIPTNFTISVTTEILPVSMTKTSVDCTMYICGDSTECSNLLLQYGSFCTQLNRALTGIAVEQDKNTQEVFAQVKQIYKTPPIKDFGGFNFSQILPDPSKPSKRSFIEDLLFNKVTLADAGFIKQYGDCLGDIAARDLICAQKFNGLTVLPPLLTDEMIAQYTSALLAGTITSGWTFGAGAALQIPFAMQMAYRFNGIGVTQNVLYENQKLIANQFNSAIGKIQDSLSSTASALGKLQDVVNQNAQALNTLVKQLSSNFGAISSVLNDILSRLDPPEAEVQIDRLITGRLQSLQTYVTQQLIRAAEIRASANLAATKMSECVLGQSKRVDFCGKGYHLMSFPQSAPHGVVFLHVTYVPAQEKNFTTAPAICHDGKAHFPREGVFVSNGTHWFVTQRNFYEPQIITTDNTFVSGNCDVVIGIVNNTVYDPLQPELDS

SEQ ID NO: 2719 - protein, 1147 aa, Artificial Sequence
  SARS-CoV-2/Netherlands/ZuidHolland_2/2020__EPI_ISL_414556 spike protein (1-1147)(K986P_V987P)
MFVFLVLLPLVSSQCVNLTTRTQLPPAYTNSFTRGVYYPDKVFRSSVLHSTQDLFLPFFSNVTWFHAIHVSGTNGTKRFDNPVLPFNDGVYFASTEKSNIIRGWIFGTTLDSKTQSLLIVNNATNVVIKVCEFQFCNDPFLGVYYHKNNKSWMESEFRVYSSANNCTFEYVSQPFLMDLEGKQGNFKNLREFVFKNIDGYFKIYSKHTPINLVRDLPQGFSALEPLVDLPIGINITRFQTLLALHRSYLTPGDSSSGWTAGAAAYYVGYLQPRTFLLKYNENGTITDAVDCALDPLSETKCTLKSFTVEKGIYQTSNFRVQPTESIVRFPNITNLCPFGEVFNATRFASVYAWNRKRISNCVADYSVLYNSASFSTFKCYGVSPTKLNDLCFTNVYADSFVIRGDEVRQIAPGQTGKIADYNYKLPDDFTGCVIAWNSNNLDSKVGGNYNYLYRLFRKSNLKPFERDISTEIYQAGSTPCNGVEGFNCYFPLQSYGFQPTNGVGYQPYRVVVLSFELLHAPATVCGPKKSTNLVKNKCVNFNFNGLTGTGVLTESNKKFLPFQQFGRDIADTTDAVRDPQTLEILDITPCSFGGVSVITPGTNTSNQVAVLYQGVNCTEVPVAIHADQLTPTWRVYSTGSNVFQTRAGCLIGAEHVNNSYECDIPIGAGICASYQTQTNSPRRARSVASQSIIAYTMSLGAENSVAYSNNSIAIPTNFTISVTTEILPVSMTKTSVDCTMYICGDSTECSNLLLQYGSFCTQLNRALTGIALEQDKNTQEVFAQVKQIYKTPPIKDFGGFNFSQILPDPSKPSKRSFIEDLLFNKVTLADAGFIKQYGDCLGDIAARDLICAQKFNGLTVLPPLLTDEMIAQYTSALLAGTITSGWTFGAGAALQIPFAMQMAYRFNGIGVTQNVLYENQKLIANQFNSAIGKIQDSLSSTASALGKLQDVVNQNAQALNTLVKQLSSNFGAISSVLNDILSRLDPPEAEVQIDRLITGRLQSLQTYVTQQLIRAAEIRASANLAATKMSECVLGQSKRVDFCGKGYHLMSFPQSAPHGVVFLHVTYVPAQEKNFTTAPAICHDGKAHFPREGVFVSNGTHWFVTQRNFYEPQIITTDNTFVSGNCDVVIGIVNNTVYDPLQPELDS

SEQ ID NO: 2720 - protein, 1147 aa, Artificial Sequence
  SARS-CoV-2/USA/WA-UW31/2020__EPI_ISL_414618 spike protein (1-1147)(K986P_V987P)
MFVFLVLLPLVSSQCVNLTTRTQLPPAYTNSFTRGVYYPDKVFRSSVLHSTQDLFLPFFSNVTWFHAIHVSGTNGTKRFDNPVLPFNDGVYFASTEKSNIIRGWIFGTTLDSKTQSLLIVNNATNVVIKVCEFQFCNDPFLGVYYHKNNKSWMESEFRVYSSANNCTFEYVSQPFLMDLEGKQGNFKNLREFVFKNIDGYFKIYSKHTPINLVRDLPQGFSALEPLVDLPIGINITRFQTLLALHRSYLTPGDSSSGWTAGAAAYYVGYLQPRTFLLKYNENGTITDAVDCALDPLSETKCTLKSFTVEKGIYQTSNFRVQPTESIVRFPNITNLCPFGEVFNATRFASVYAWNRKRISNCVADYSVLYNSASFSTFKCYGVSPTKLNDLCFTNVYADSFVIRGDEVRQIAPGQTGKIADYNYKLPDDFTGCVIAWNSNNLDSKVGGNYNYLYRLFRKSNLKPFERDISTEIYQAGSTPCNGAEGFNCYFPLQSYGFQPTNGVGYQPYRVVVLSFELLHAPATVCGPKKSTNLVKNKCVNFNFNGLTGTGVLTESNKKFLPFQQFGRDIADTTDAVRDPQTLEILDITPCSFGGVSVITPGTNTSNQVAVLYQDVNCTEVPVAIHADQLTPTWRVYSTGSNVFQTRAGCLIGAEHVNNSYECDIPIGAGICASYQTQTNSPRRARSVASQSIIAYTMSLGAENSVAYSNNSIAIPTNFTISVTTEILPVSMTKTSVDCTMYICGDSTECSNLLLQYGSFCTQLNRALTGIAVEQDKNTQEVFAQVKQIYKTPPIKDFGGFNFSQILPDPSKPSKRSFIEDLLFNKVTLADAGFIKQYGDCLGDIAARDLICAQKFNGLTVLPPLLTDEMIAQYTSALLAGTITSGWTFGAGAALQIPFAMQMAYRFNGIGVTQNVLYENQKLIANQFNSAIGKIQDSLSSTASALGKLQDVVNQNAQALNTLVKQLSSNFGAISSVLNDILSRLDPPEAEVQIDRLITGRLQSLQTYVTQQLIRAAEIRASANLAATKMSECVLGQSKRVDFCGKGYHLMSFPQSAPHGVVFLHVTYVPAQEKNFTTAPAICHDGKAHFPREGVFVSNGTHWFVTQRNFYEPQIITTDNTFVSGNCDVVIGIVNNTVYDPLQPELDS

SEQ ID NO: 2721 - protein, 1147 aa, Artificial Sequence
  SARS-CoV-2/South Korea/SNU01/2020__EPI_ISL_411929 spike protein (1-1147)(K986P_V987P)
MFVFLVLLPLVSSQCVNLTTRTQLPPAYTNSFTRGVYYPDKVFRSSVLHSTQDLFLPFFSNVTWFHAIHVSGTNGTKRFDNPVLPFNDGVYFASTEKSNIIRGWIFGTTLDSKTQSLLIVNNATNVVIKVCEFQFCNDPFLGVYYHKNNKSWMESEFRVYSSANNCTFEYVSQPFLMDLEGKQGNFKNLREFVFKNIDGYFKIYSKHTPINLVRDLPQGFWALEPLVDLPIGINITRFQTLLALHRSYLTPGDSSSGWTAGAAAYYVGYLQPRTFLLKYNENGTITDAVDCALDPLSETKCTLKSFTVEKGIYQTSNFRVQPTESIVRFPNITNLCPFGEVFNATRFASVYAWNRKRISNCVADYSVLYNSASFSTFKCYGVSPTKLNDLCFTNVYADSFVIRGDEVRQIAPGQTGKIADYNYKLPDDFTGCVIAWNSNNLDSKVGGNYNYLYRLFRKSNLKPFERDISTEIYQAGSTPCNGVEGFNCYFPLQSYGFQPTNGVGYQPYRVVVLSFELLHAPATVCGPKKSTNLVKNKCVNFNFNGLTGTGVLTESNKKFLPFQQFGRDIADTTDAVRDPQTLEILDITPCSFGGVSVITPGTNTSNQVAVLYQDVNCTEVPVAIHADQLTPTWRVYSTGSNVFQTRAGCLIGAEHVNNSYECDIPIGAGICASYQTQTNSPRRARSVASQSIIAYTMSLGAENSVAYSNNSIAIPTNFTISVTTEILPVSMTKTSVDCTMYICGDSTECSNLLLQYGSFCTQLNRALTGIAVEQDKNTQEVFAQVKQIYKTPPIKDFGGFNFSQILPDPSKPSKRSFIEDLLFNKVTLADAGFIKQYGDCLGDIAARDLICAQKFNGLTVLPPLLTDEMIAQYTSALLAGTITSGWTFGAGAALQIPFAMQMAYRFNGIGVTQNVLYENQKLIANQFNSAIGKIQDSLSSTASALGKLQDVVNQNAQALNTLVKQLSSNFGAISSVLNDILSRLDPPEAEVQIDRLITGRLQSLQTYVTQQLIRAAEIRASANLAATKMSECVLGQSKRVDFCGKGYHLMSFPQSAPHGVVFLHVTYVPAQEKNFTTAPAICHDGKAHFPREGVFVSNGTHWFVTQRNFYEPQIITTDNTFVSGNCDVVIGIVNNTVYDPLQPELDS

SEQ ID NO: 2722 - protein, 1147 aa, Artificial Sequence
  SARS-CoV-2/China/WF0004/2020__EPI_ISL_413694 spike protein (1-1147)(K986P_V987P)
MFVFLVLLPLVSSQCVNLTTRTQLPPAYTNSFTRGVYYPDKVFRSSVLHSTQDLFLPFFSNVTWFHAIHVSGTNGTKRFDNPVLPFNDGVYFASTEKSNIIRGWIFGTTLDSKTQSLLIVNNATNVVIKVCEFQFCNDPFLGVYYHKNNKSWTESEFRVYSSANNCTFEYVSQPFLMDLEGKQGNFKNLREFVFKNIDGYFKIYSKHTPINLVRDLPQGFSALEPLVDLPIGINITRFQTLLALHRSYLTPGDSSSGWTAGAAAYYVGYLQPRTFLLKYNENGTITDAVDCALDPLSETKCTLKSFTVEKGIYQTSNFRVQPTESIVRFPNITNLCPFGEVFNATRFASVYAWNRKRISNCVADYSVLYNSASFSTFKCYGVSPTKLNDLCFTNVYADSFVIRGDEVRQIAPGQTGKIADYNYKLPDDFTGCVIAWNSNNLDSKVGGNYNYLYRLFRKSNLKPFERDISTEIYQAGSTPCNGVEGFNCYFPLQSYGFQPTNGVGYQPYRVVVLSFELLHAPATVCGPKKSTNLVKNKCVNFNFNGLTGTGVLTESNKKFLPFQQFGRDIADTTDAVRDPQTLEILDITPCSFGGVSVITPGTNTSNQVAVLYQDVNCTEVPVAIHADQLTPTWRVYSTGSNVFQTRAGCLIGAEHVNNSYECDIPIGAGICASYQTQTNSPRRARSVASQSIIAYTMSLGAENSVAYSNNSIAIPTNFTISVTTEILPVSMTKTSVDCTMYICGDSTECSNLLLQYGSFCTQLNRALTGIAVEQDKNTQEVFAQVKQIYKTPPIKDFGGFNFSQILPDPSKPSKRSFIEDLLFNKVTLADAGFIKQYGDCLGDIAARDLICAQKFNGLTVLPPLLTDEMIAQYTSALLAGTITSGWTFGAGAALQIPFAMQMAYRFNGIGVTQNVLYENQKLIANQFNSAIGKIQDSLSSTASALGKLQDVVNQNAQALNTLVKQLSSNFGAISSVLNDILSRLDPPEAEVQIDRLITGRLQSLQTYVTQQLIRAAEIRASANLAATKMSECVLGQSKRFDFCGKGYHLMSFPQSAPHGVVFLHVTYVPAQEKNFTTAPAICHDGKAHFPREGVFVSNGTHWFVTQRNFYEPQIITTDNTFVSGNCDVVIGIVNNTVYDPLQPELDS

SEQ ID NO: 2723 - protein, 1147 aa, Artificial Sequence
  SARS-CoV-2/China/WF0028/2020__EPI_ISL_413791 spike protein (1-1147)(K986P_V987P)
MFVFLVLLPLVSSQCVNLTTRTQLPPAYTNSFTRGVYYPDKVFRSSVLHSTQDLFLPFFSNVTWFHAIHVSGTNGTKRFDNPVLPFNDGVYFASTEKSNIIRGWIFGTTLDSKTQSLLIVNNATNVVIKVCEFQFCNDPFLGVYYHKNNKSWMESEFRVYSSANNCTFEYVSQPFLMDLEGKQGNFKNLREFVFKNIDGYFKIYSKHTPINLVRDLPQGFSALEPLVDLPIGINITRFQTLLALHRSYLTPGDSSSGWTAGAAAYYVGYLQPRTFLLKYNENGTITDAVDCALDPLSETKCTLKSFTVEKGIYQTSNFRVQPTESIVRFPNITNLCPFGEVFNATRFASVYAWNRKRISNCVADYSVLYNSASFSTFKCYGVSPTKLNDLCFTNVYADSFVIRGDEVRQIAPGQTGKIADYNYKLPDDFTGCVIAWNSNNLDSKVGGNYNYLYRLFRKSNLKPFERDISTEIYQAGSTPCNGVEGFNCYFPLQSYGFQPTNGVGYQPYRVVVLSFELLHAPATVCGPKKSTNLVKNKCVNFNFNGLTGTGVLTESNKKFLPFQQFGRDIADTTDAVRDPQTLEILDITPCSFGGVSVITPGTNTSNQVAVLYQDVNCTEVPVAIHADQLTPTWRVYSTGSNVFQTRAGCLIGAEHVNNSYECDIPIGAGICASYQTQTNSPRRARSVASQSIIAYTMSLGAENSVAYSNNSIAIPTNFTISVTTEILPVSMTKTSVDCTMYICGDSTECSNLLLQYGSFCTQLNRALTGIAVEQDKNTQEVFAQVKQIYKTPPIKDFGGFNFSQILPDPSKPSKRSFIEDLLFNKVTLADAGFIKQYGDCLGDIAARDLICAQKFNGLTVLPPLLTDEMIAQYTSALLAGTITSGWTFGAGAALQIPFAMQMAYRFNGIGVTQNVLYENQKLIANQFNSAIGKIQDSLSSTASALGKLQDVVNQNAQALNTLVKQLSSNFGAISSVLNDILSRLDPPEAEVQIDRLITGRLQSLQTYVTQQLIRAAEIRASANLAATKMSECVLGQSKRVDFCGKGYHLMSFPQSAPHGVVFLHVTYVPAQEKNFTTAPAICHDGKAHFPREGVFVSNGTHWFVTQRNFYEPQIITTDNTFVSGNCDVVIGIVNNTVYDPLQPELES

SEQ ID NO: 2724 - protein, 1147 aa, Artificial Sequence
  SARS-CoV-2/2019-nCoV/USA-CruiseA-18/2020__MT159716.1 spike protein (1-1147)(K986P_V987P)
MFVFLVLLPLVSSQCVNLTTRTQLPPAYTNSFTRGVYYPDKVFRSSVLHSTQDLFLPFFSNVTWFHAIHVSGTNGTKRFDNPVLPFNDGVYFASTEKSNIIRGWIFGTTLDSKTQSLLIVNNATNVVIKVCEFQFCNDPFLGVYYHKNNKSWMESELRVYSSANNCTFEYVSQPFLMDLEGKQGNFKNLREFVFKNIDGYFKIYSKHTPINLVRDLPQGFSALEPLVDLPIGINITRFQTLLALHRSYLTPGDSSSGWTAGAAAYYVGYLQPRTFLLKYNENGTITDAVDCALDPLSETKCTLKSFTVEKGIYQTSNFRVQPTESIVRFPNITNLCPFGEVFNATRFASVYAWNRKRISNCVADYSVLYNSASFSTFKCYGVSPTKLNDLCFTNVYADSFVIRGDEVRQIAPGQTGKIADYNYKLPDDFTGCVIAWNSNNLDSKVGGNYNYLYRLFRKSNLKPFERDISTEIYQAGSTPCNGVEGFNCYFPLQSYGFQPTNGVGYQPYRVVVLSFELLHAPATVCGPKKSTNLVKNKCVNFNFNGLTGTGVLTESNKKFLPFQQFGRDIADTTDAVRDPQTLEILDITPCSFGGVSVITPGTNTSNQVAVLYQDVNCTEVPVAIHADQLTPTWRVYSTGSNVFQTRAGCLIGAEHVNNSYECDIPIGAGICASYQTQTNSPRRARSVASQSIIAYTMSLGAENSVAYSNNSIAIPTNFTISVTTEILPVSMTKTSVDCTMYICGDSTECSNLLLQYGSFCTQLNRALTGIAVEQDKNTQEVFAQVKQIYKTPPIKDFGGFNFSQILPDPSKPSKRSFIEDLLFNKVTLADAGFIKQYGDCLGDIAARDLICAQKFNGLTVLPPLLTDEMIAQYTSALLAGTITSGWTFGAGAALQIPFAMQMAYRFNGIGVTQNVLYENQKLIANQFNSAIGKIQDSLSSTASALGKLQDVVNQNAQALNTLVKQLSSNFGAISSVLNDILSRLDPPEAEVQIDRLITGRLQSLQTYVTQQLIRAAEIRASANLAATKMSECVLGQSKRVDFCGKGYHLMSFPQSAPHGVVFLHVTYVPAQEKNFTTAPAICHDGKAHFPREGVFVSNGTHWFVTQRNFYEPQIITTDNTFVSGNCDVVIGIVNNTVYDPLQPELDS

SEQ ID NO: 2725 - protein, 1147 aa, Artificial Sequence
  SARS-CoV-2/SARS-CoV-2/Yunnan-01/human/2020/CHN__MT049951.1 spike protein (1-1147)(K986P_V987P)
MFVFLVLLPLVSSQCVNLTTRTQLPPANTNSFTRGVYYPDKVFRSSVLHSTQDLFLPFFSNVTWFHAIHVSGTNGTKRFDNPVLPFNDGVYFASTEKSNIIRGWIFGTTLDSKTQSLLIVNNATNVVIKVCEFQFCNDPFLGVYYHKNNKSWMESEFRVYSSANNCTFEYVSQPFLMDLEGKQGNFKNLREFVFKNIDGYFKIYSKHTPINLVRDLPQGFSALEPLVDLPIGINITRFQTLLALHRSYLTPGDSSSGWTAGAAAYYVGYLQPRTFLLKYNENGTITDAVDCALDPLSETKCTLKSFTVEKGIYQTSNFRVQPTESIVRFPNITNLCPFGEVFNATRFASVYAWNRKRISNCVADYSVLYNSASFSTFKCYGVSPTKLNDLCFTNVYADSFVIRGDEVRQIAPGQTGKIADYNYKLPDDFTGCVIAWNSNNLDSKVGGNYNYLYRLFRKSNLKPFERDISTEIYQAGSTPCNGVEGFNCYFPLQSYGFQPTNGVGYQPYRVVVLSFELLHAPATVCGPKKSTNLVKNKCVNFNFNGLTGTGVLTESNKKFLPFQQFGRDIADTTDAVRDPQTLEILDITPCSFGGVSVITPGTNTSNQVAVLYQDVNCTEVPVAIHADQLTPTWRVYSTGSNVFQTRAGCLIGAEHVNNSYECDIPIGAGICASYQTQTNSPRRARSVASQSIIAYTMSLGAENSVAYSNNSIAIPTNFTISVTTEILPVSMTKTSVDCTMYICGDSTECSNLLLQYGSFCTQLNRALTGIAVEQDKNTQEVFAQVKQIYKTPPIKDFGGFNFSQILPDPSKPSKRSFIEDLLFNKVTLADAGFIKQYGDCLGDIAARDLICAQKFNGLTVLPPLLTDEMIAQYTSALLAGTITSGWTFGAGAALQIPFAMQMAYRFNGIGVTQNVLYENQKLIANQFNSAIGKIQDSLSSTASALGKLQDVVNQNAQALNTLVKQLSSNFGAISSVLNDILSRLDPPEAEVQIDRLITGRLQSLQTYVTQQLIRAAEIRASANLAATKMSECVLGQSKRVDFCGKGYHLMSFPQSAPHGVVFLHVTYVPAQEKNFTTAPAICHDGKAHFPREGVFVSNGTHWFVTQRNFYEPQIITTDNTFVSGNCDVVIGIVNNTVYDPLQPELDS

SEQ ID NO: 2726 - protein, 1147 aa, Artificial Sequence
  SARS-CoV-2/USA/WA-UW292/2020__EPI_ISL_418077 spike protein (1-1147)(K986P_V987P)
MFVFLVLLPLVSSQCVNLTTRTQLPPAYTNSFTRGVYYPDKVFRSSVLHSTQDLFLPFFSNVTWFHAIHVSGTNGTKRFDNPVLPFNDGVYFASTEKSNIIRGWIFGTTLDSKTQSLLIVNNATNVVIKVCEFQFCNDPFLGVYYHKNNKSWMESEFRVYSSANNCTFEYVSQPFLMDLEGKQGNFKNLREFVFKNIDGYFKIYSKHTPINLVRDLPQGFSALEPLVDLPIGINITRFQTLLALHRSYLTPGDSSSGWTAGAAAYYVGYLQPRTFLLKYNENGTITDAVDCALDPLSETKCTLKSFTVEKGIYQTSNFRVQPTESIVRFPNITNLCPFGEVFNATRFASVYAWNRKRISNCVADYSVLYNSASFSTFKCYGVSPTKLNDLCFTNVYADSFVIRGDEVRQIAPGQTGKIADYNYKLPDDFTGCVIAWNSNNLDSKVGGNYNYLYRLFRKSNLKPFERDISTEIYQASSTPCNGVEGFNCYFPLQSYGFQPTNGVGYQPYRVVVLSFELLHAPATVCGPKKSTNLVKNKCVNFNFNGLTGTGVLTESNKKFLPFQQFGRDIADTTDAVRDPQTLEILDITPCSFGGVSVITPGTNTSNQVAVLYQDVNCTEVPVAIHADQLTPTWRVYSTGSNVFQTRAGCLIGAEHVNNSYECDIPIGAGICASYQTQTNSPRRARSVASQSIIAYTMSLGAENSVAYSNNSIAIPTNFTISVTTEILPVSMTKTSVDCTMYICGDSTECSNLLLQYGSFCTQLNRALTGIAVEQDKNTQEVFAQVKQIYKTPPIKDFGGFNFSQILPDPSKPSKRSFIEDLLFNKVTLADAGFIKQYGDCLGDIAARDLICAQKFNGLTVLPPLLTDEMIAQYTSALLAGTITSGWTFGAGAALQIPFAMQMAYRFNGIGVTQNVLYENQKLIANQFNSAIGKIQDSLSSTASALGKLQDVVNQNAQALNTLVKQLSSNFGAISSVLNDILSRLDPPEAEVQIDRLITGRLQSLQTYVTQQLIRAAEIRASANLAATKMSECVLGQSKRVDFCGKGYHLMSFPQSAPHGVVFLHVTYVPAQEKNFTTAPAICHDGKAHFPREGVFVSNGTHWFVTQRNFYEPQIITTDNTFVSGNCDVVIGIVNNTVYDPLQPELDS

SEQ ID NO: 2727 - protein, 1147 aa, Artificial Sequence
  SARS-CoV-2/Iceland/192/2020__EPI_ISL_417819 spike protein (1-1147)(K986P_V987P)
MFVFFVLLPLVSSQCVNLTTRTQLPPAYTNSFTRGVYYPDKVFRSSVLHSTQDLFLPFFSNVTWFHAIHVSGTNGTKRFDNPVLPFNDGVYFASTEKSNIIRGWIFGTTLDSKTQSLLIVNNATNVVIKVCEFQFCNDPFLGVYYHKNNKSWMESEFRVYSSANNCTFEYVSQPFLMDLEGKQGNFKNLREFVFKNIDGYFKIYSKHTPINLVRDLPQGFSALEPLVDLPIGINITRFQTLLALHRSYLTPGDSSSGWTAGAAAYYVGYLQPRTFLLKYNENGTITDAVDCALDPLSETKCTLKSFTVEKGIYQTSNFRVQPTESIVRFPNITNLCPFGEVFNATRFASVYAWNRKRISNCVADYSVLYNSASFSTFKCYGVSPTKLNDLCFTNVYADSFVIRGDEVRQIAPGQTGKIADYNYKLPDDFTGCVIAWNSNNLDSKVGGNYNYLYRLFRKSNLKPFERDISTEIYQAGSTPCNGVEGFNCYFPLQSYGFQPTNGVGYQPYRVVVLSFELLHAPATVCGPKKSTNLVKNKCVNFNFNGLTGTGVLTESNKKFLPFQQFGRDIADTTDAVRDPQTLEILDITPCSFGGVSVITPGTNTSNQVAVLYQGVNCTEVPVAIHADQLTPTWRVYSTGSNVFQTRAGCLIGAEHVNNSYECDIPIGAGICASYQTQTNSPRRARSVASQSIIAYTMSLGAENSVAYSNNSIAIPTNFTISVTTEILPVSMTKTSVDCTMYICGDSTECSNLLLQYGSFCTQLNRALTGIAVEQDKNTQEVFAQVKQIYKTPPIKDFGGFNFSQILPDPSKPSKRSFIEDLLFNKVTLADAGFIKQYGDCLGDIAARDLICAQKFNGLTVLPPLLTDEMIAQYTSALLAGTITSGWTFGAGAALQIPFAMQMAYRFNGIGVTQNVLYENQKLIANQFNSAIGKIQDSLSSTASALGKLQDVVNQNAQALNTLVKQLSSNFGAISSVLNDILSRLDPPEAEVQIDRLITGRLQSLQTYVTQQLIRAAEIRASANLAATKMSECVLGQSKRVDFCGKGYHLMSFPQSAPHGVVFLHVTYVPAQEKNFTTAPAICHDGKAHFPREGVFVSNGTHWFVTQRNFYEPQIITTDNTFVSGNCDVVIGIVNNTVYDPLQPELDS

SEQ ID NO: 2728 - protein, 1147 aa, Artificial Sequence
  SARS-CoV-2/Belgium/ULG-6939/2020__EPI_ISL_417020 spike protein (1-1147)(K986P_V987P)
MFVFLVLLPLVSSQCVNLTTRTQLPPAYTNSFTRGVYYPDKVFRSSVLHSTQDLFLPFFSNVTWFHAIHVSGTNGTKRFDNPVLPFNDGVYFASTEKSNIIRGWIFGTTLDSKTQSLLIVNNATNVVIKVCEFQFCNDPFLGVYYHKNNKSWMESEFRVYSSANNCTFEYVSQPFLMDLEGKQGNFKNLREFVFKNIDGYFKIYSKHTPINLVRDLPQGFSALEPLVDLPIGINITRFQTLLALHRSYLTPGDSSSGWTAGAAAYYVGYLQPRTFLLKYNENGTITDAVDCALDPLSETKCTLKSFTVEKGIYQTSNFRVQPTESIVRFPNITNLCPFGEVFNATRFASVYAWNRKRISNCVADYSVLYNSASFSTFKCYGVSPTKLNDLCFTNVYADSFVIRGDEVRQIAPGQTGKIADYNYKLPDDFTGCVIAWNSNNLDSKVGGNYNYLYRLFRKSNLKPFERDISTEIYQAGSTPCNGVEGFNCYFPLQSYGFQPTNGVGYQPYRVVVLSFELLHAPATVCGPKKSTNLVKNKCVNFNFNGLTGTGVLTESNKKFLPFQQFGRDIADTTDAVRDPQTLEILDITPCSFGGVSVITPGTNTSNQVAVLYQGVNCTEVPVAIHADQLTPTWRVYSTGSNVFQTRAGCLIGAEHVNNSYECDIPIGAGICASYQTQTNSPRRARSVASQSIIAYTMSLGAENSVVYSNNSIAIPTNFTISVTTEILPVSMTKTSVDCTMYICGDSTECSNLLLQYGSFCTQLNRALTGIAVEQDKNTQEVFAQVKQIYKTPPIKDFGGFNFSQILPDPSKPSKRSFIEDLLFNKVTLADAGFIKQYGDCLGDIAARDLICAQKFNGLTVLPPLLTDEMIAQYTSALLAGTITSGWTFGAGAALQIPFAMQMAYRFNGIGVTQNVLYENQKLIANQFNSAIGKIQDSLSSTASALGKLQDVVNQNAQALNTLVKQLSSNFGAISSVLNDILSRLDPPEAEVQIDRLITGRLQSLQTYVTQQLIRAAEIRASANLAATKMSECVLGQSKRVDFCGKGYHLMSFPQSAPHGVVFLHVTYVPAQEKNFTTAPAICHDGKAHFPREGVFVSNGTHWFVTQRNFYEPQIITTDNTFVSGNCDVVIGIVNNTVYDPLQPELDS

SEQ ID NO: 2729 - protein, 1147 aa, Artificial Sequence
  SARS-CoV-2/France/HF2496/2020__EPI_ISL_418231 spike protein (1-1147)(K986P_V987P)
MFVFLVLLPLVSSQCVNLTTRTQLPPAYTNSFTRGVYYPDKVFRSSVLHSTQDLFLPFFSNVTWFHAIHVSGTNGTKRFDNPVLPFNDGVYFASTEKSNIIRGWIFGTTLDSKTQSLLIVNNATNVVIKVCEFQFCNDPFLGVYYHKNNKSWMESEFRVYSSANNCTFEYVSQPFLMDLEGKQGNFKNLREFVFKNIDGYFKIYSKHTPINLVRDLPQGFSALEPLVDLPIGINITRFQTLLALHRSYLTPGDSSSGWTAGAAAYYVGYLQPRTFLLKYNENGTITDAVDCALDPLSETKCTLKSFTVEKGIYQTSNFRVQPTESIVRFPNITNLCPFGEVFNATRFASVYAWNRKRISNCVADYSVLYNSASFSTFKCYGVSPTKLNDLCFTNVYADSFVIRGDEVRQIAPGQTGKIADYNYKLPDDFTGCVIAWNSNNLDSKVGGNYNYLYRLFRKSNLKPFERDISTEIYQAGSTPCNGVEGFNCYFPLQSYGFQPTNGVGYQPYRVVVLSFELLHAPATVCGPKKSTNLVKNKCVNFNFNGLTGTGVLTESNKKFLPFQQFGRDIADTTDAVRDPQTLEILDITPCSFGGVSVITPGTNTSNQVAVLYQGVNCTEVPVAIHADQLTPTWRVYSTGSNVFQTRAGCLIGAEHVNNSYECDIPIGAGICASYQTQTNSPRRARSVASQSIIAYTMSLGAENSVAYSNNSIAIPTNFTISVTTEILPVSMTKTSVDCTMYICGDSTECSNLLLQYGSFCTQLNRALTGIAVEQDKNTQEVFAQVKQIYKTPPIKDFGGFNFSQILPDPSKPSKRSFIEDLLFNKVTLADAGFIKQYGDCLGDIVARDLICAQKFNGLTVLPPLLTDEMIAQYTSALLAGTITSGWTFGAGAALQIPFAMQMAYRFNGIGVTQNVLYENQKLIANQFNSAIGKIQDSLSSTASALGKLQDVVNQNAQALNTLVKQLSSNFGAISSVLNDILSRLDPPEAEVQIDRLITGRLQSLQTYVTQQLIRAAEIRASANLAATKMSECVLGQSKRVDFCGKGYHLMSFPQSAPHGVVFLHVTYVPAQEKNFTTAPAICHDGKAHFPREGVFVSNGTHWFVTQRNFYEPQIITTDNTFVSGNCDVVIGIVNNTVYDPLQPELDS

SEQ ID NO: 2730 - protein, 1147 aa, Artificial Sequence
  SARS-CoV-2/USA/WA-UW291/2020__EPI_ISL_418076 spike protein (1-1147)(K986P_V987P)
MFVFLVLLPLVSSQCVNLTTRTQLPPAYTNSFTRGVYYPDKVFRSSVLHSTQDLFLPFFSNVTWFHAIHVSGTNGTKRFDNPVLPFNDGVYFASTEKSNIIRGWIFGTTLDSKTQSLLIVNNATNVVIKVCEFQFCNDPFLGVYYHKNNKSWMESEFRVYSSANNCTFEYVSQPFLMDLEGKQGNFKNLREFVFKNIDGYFKIYSKHTPINLVRDLPQGFSALEPLVDLPIGINITRFQTLLALHRSYLTPGDSSSGWTAGAAAYYVGYLQPRTFLLKYNENGTITDAVDCALDPLSETKCTLKSFTVEKGIYQTSNFRVQPTESIVRFPNITNLCPFGEVFNATRFASVYAWNRKRISNCVADYSVLYNSASFSTFKCYGVSPTKLNDLCFTNVYADSFVIRGDEVRQIAPGQTGKIADYNYKLPDDFTGCVIAWNSNNLDSKVGGNYNYLYRLFRKSNLKPFERDISTEIYQAGSTPCNGVEGFNCYFPLQSYGFQPTNGVGYQPYRVVVLSFELLHAPATVCGPKKSTNLVKNKCVNFNFNGLTGTGVLTESNKKFLPFQQFGRDIADTTDAVRDPQTLEILDITPCSFGGVSVITPGTNTSNQVAVLYQGVNCTEVPVAIHADQLTPTWRVYSTGSNVFQTRAGCLIGAEHVNNSYECDIPIGAGICASYQTQTNSPRRARSVASQSIIAYTMSLGAENSVAYSNNSIAIPTNFTISVTTEILPVSMTKTSVDCTMYICGDSTECSNLLLQYGSFCTQLNRALTGIAVEQDKNTQEVFAQVKQIYKTPPIKDFGGFNFSQILPDPSKPSKRSFIEDLLFNKVTLADAGFIKQYGDCLGDIAARDLICAQKFNGLTVLPPLLTDEMIAQYTSALLAGTITSGWTFGAGAALQIPFAMQMAYRFNGIGVTQNVLYENQKLIANQFNSAIGKIQYSLSSTASALGKLQDVVNQNAQALNTLVKQLSSNFGAISSVLNDILSRLDPPEAEVQIDRLITGRLQSLQTYVTQQLIRAAEIRASANLAATKMSECVLGQSKRVDFCGKGYHLMSFPQSAPHGVVFLHVTYVPAQEKNFTTAPAICHDGKAHFPREGVFVSNGTHWFVTQRNFYEPQIITTDNTFVSGNCDVVIGIVNNTVYDPLQPELDS

SEQ ID NO: 2731 - protein, 1147 aa, Artificial Sequence; identical to SEQ ID NO: 2694
  SARS-CoV-2/Portugal/PT0034/2020__EPI_ISL_418019 spike protein (1-1147)(K986P_V987P)

SEQ ID NO: 2732 - protein, 1147 aa, Artificial Sequence; identical to SEQ ID NO: 2686
  SARS-CoV-2/Iceland/202/2020__EPI_ISL_417750 spike protein (1-1147)(K986P_V987P)

SEQ ID NO: 2733 - protein, 1147 aa, Artificial Sequence
  SARS-CoV-2/USA/WA-UW261/2020__EPI_ISL_418046 spike protein (1-1147)(K986P_V987P)
MFVFLVLLPLVSSQCVNLTTRTQLPPAYTNSFTRGVYYPDKVFRSSVLHSTQDLFLPFFSNVTWFHAIHVSGTNGTKRFDNPVLPFNDGVYFASTEKSNIIRGWIFGTTLDSKTQSLLIVNNATNVVIKVCEFQFCNDPFLGVYYHKNNKSWMESEFRVYSSANNCTFEYVSQPFLMDLEGKQGNFKNLREFVFKNIDGYFKIYSKHTPINLVRDLPQGFSALEPLVDLPIGINITRFQTLLALHRSYLTPGDSSSGWTAGAAAYYVGYLQPRTFLLKYNENGTITDAVDCALDPLSETKCTLKSFTVEKGIYQTSNFRVQPTESIVRFPNITNLCPFGEVFNATRFTSVYAWNRKRISNCVADYSVLYNSASFSTFKCYGVSPTKLNDLCFTNVYADSFVIRGDEVRQIAPGQTGKIADYNYKLPDDFTGCVIAWNSNNLDSKVGGNYNYLYRLFRKSNLKPFERDISTEIYQAGSTPCNGVEGFNCYFPLQSYGFQPTNGVGYQPYRVVVLSFELLHAPATVCGPKKSTNLVKNKCVNFNFNGLTGTGVLTESNKKFLPFQQFGRDIADTTDAVRDPQTLEILDITPCSFGGVSVITPGTNTSNQVAVLYQDVNCTEVPVAIHADQLTPTWRVYSTGSNVFQTRAGCLIGAEHVNNSYECDIPIGAGICASYQTQTNSPRRARSVASQSIIAYTMSLGAENSVAYSNNSIAIPTNFTISVTTEILPVSMTKTSVDCTMYICGDSTECSNLLLQYGSFCTQLNRALTGIAVEQDKNTQEVFAQVKQIYKTPPIKDFGGFNFSQILPDPSKPSKRSFIEDLLFNKVTLADAGFIKQYGDCLGDIAARDLICAQKFNGLTVLPPLLTDEMIAQYTSALLAGTITSGWTFGAGAALQIPFAMQMAYRFNGIGVTQNVLYENQKLIANQFNSAIGKIQDSLSSTASALGKLQDVVNQNAQALNTLVKQLSSNFGAISSVLNDILSRLDPPEAEVQIDRLITGRLQSLQTYVTQQLIRAAEIRASANLAATKMSECVLGQSKRVDFCGKGYHLMSFPQSAPHGVVFLHVTYVPAQEKNFTTAPAICHDGKAHFPREGVFVSNGTHWFVTQRNFYEPQIITTDNTFVSGNCDVVIGIVNNTVYDPLQPELDS

SEQ ID NO: 2734 - protein, 1147 aa, Artificial Sequence
  SARS-CoV-2/Portugal/PT0035/2020__EPI_ISL_418020 spike protein (1-1147)(K986P_V987P)
MFVFLVLLPLVSSQCVNLTTRTQLPPAYTNSFTRGVYYPDKVFRSSVLHSTQDLFLPFFSNVTWFHAIHVSGTNGTKRFDNPVLPFNDGVYFASTEKSNIIRGWIFGTTLDSKTQSLLIVNNATNVVIKVCEFQFCNDPFLGVYYHKNNKSWMESEFRVYSSANNCTFEYVSQPFLMDLEGKQGNFKNLREFVFKNIDGYFKIYSKHTPINLVRDLPQGFSALEPLVDLPIGINITRFQTLLALHRSYLTPGDSSSGWTAGAAAYYVGYLQPRTFLLKYNENGTITDAVDCALDPLSETKCTLKSFTVEKGIYQTSNFRVQPTESIVRFPNITNLCPFGEVFNATRFASVYAWNRKRISNCVADYSVLYNSASFSTFKCYGVSPTKLNDLCFTNVYADSFVIRGDEVRQIAPGQTGKIADYNYKLPDDFTGCVIAWNSNNLDSKVGGNYNYLYRLFRKSNLKPFERDISTEIYQAGSTPCNGVEGFNCYFPLQSYGFQPTNGVGYQPYRVVVLSFELLHAPATVCGPKKSTNLVKNKCVNFNFNGLTGTGVLTESNKKFLPFQQFGRDIADTTDAVRDPQTLEILDITPCSFGGVSVITPGTNTSNQVAVLYQDVNCTEVPVAIHADQLTPTWRVYSTGSNVFQTRAGCLIGAEHVNNSYECDIPIGAGICASYQTQTNSPRRARSVASQSIIAYTMSLGAENSVAYSNNSIAIPTNFTISVTTEILPVSMTKTSVDCTMYICGDSTECSNLLLQYGSFCTQLNRALTGIAVEQDKNTQEVFAQVKQIYKTPPIKDFGGFNFSQILPDPSKPSKRSFIEDLLFNKVTLADAGFIKQYGDCLGDISARDLICAQKFNGLTVLPPLLTDEMIAQYTSALLAGTITSGWTFGAGAALQIPFAMQMAYRFNGIGVTQNVLYENQKLIANQFNSAIGKIQDSLSSTASALGKLQDVVNQNAQALNTLVKQLSSNFGAISSVLNDILSRLDPPEAEVQIDRLITGRLQSLQTYVTQQLIRAAEIRASANLAATKMSECVLGQSKRVDFCGKGYHLMSFPQSAPHGVVFLHVTYVPAQEKNFTTAPAICHDGKAHFPREGVFVSNGTHWFVTQRNFYEPQIITTDNTFVSGNCDVVIGIVNNTVYDPLQPELDS

SEQ ID NO: 2735 - protein, 1147 aa, Artificial Sequence
  SARS-CoV-2/USA/NY-NYUMC7/2020__EPI_ISL_418192 spike protein (1-1147)(K986P_V987P)
MFVFLVLLPLVSSQCVNLTTRTQLPPAYTNSFTRGVYYPDKVFRSSVLHSTQDLFLPFFSNVTWFHAIHVSGTNGTKRFDNPVLPFNDGVYFASTEKSNIIRGWIFGTTLDSKTQSLLIVNNATNVVIKVCEFQFCNDPFLGVYHHKNNKSWMESEFRVYSSANNCTFEYVSQPFLMDLEGKQGNFKNLREFVFKNIDGYFKIYSKHTPINLVRDLPQGFSALEPLVDLPIGINITRFQTLLALHRSYLTPGDSSSGWTAGAAAYYVGYLQPRTFLLKYNENGTITDAVDCALDPLSETKCTLKSFTVEKGIYQTSNFRVQPTESIVRFPNITNLCPFGEVFNATRFASVYAWNRKRISNCVADYSVLYNSASFSTFKCYGVSPTKLNDLCFTNVYADSFVIRGDEVRQIAPGQTGKIADYNYKLPDDFTGCVIAWNSNNLDSKVGGNYNYLYRLFRKSNLKPFERDISTEIYQAGSTPCNGVEGFNCYFPLQSYGFQPTNGVGYQPYRVVVLSFELLHAPATVCGPKKSTNLVKNKCVNFNFNGLTGTGVLTESNKKFLPFQQFGRDIADTTDAVRDPQTLEILDITPCSFGGVSVITPGTNTSNQVAVLYQGVNCTEVPVAIHADQLTPTWRVYSTGSNVFQTRAGCLIGAEHVNNSYECDIPIGAGICASYQTQTNSPRRARSVASQSIIAYTMSLGAENSVAYSNNSIAIPTNFTISVTTEILPVSMTKTSVDCTMYICGDSTECSNLLLQYGSFCTQLNRALTGIAVEQDKNTQEVFAQVKQIYKTPPIKDFGGFNFSQILPDPSKPSKRSFIEDLLFNKVTLADAGFIKQYGDCLGDIAARDLICAQKFNGLTVLPPLLTDEMIAQYTSALLAGTITSGWTFGAGAALQIPFAMQMAYRFNGIGVTQNVLYENQKLIANQFNSAIGKIQDSLSSTASALGKLQDVVNQNAQALNTLVKQLSSNFGAISSVLNDILSRLDPPEAEVQIDRLITGRLQSLQTYVTQQLIRAAEIRASANLAATKMSECVLGQSKRVDFCGKGYHLMSFPQSAPHGVVFLHVTYVPAQEKNFTTAPAICHDGKAHFPREGVFVSNGTHWFVTQRNFYEPQIITTDNTFVSGNCDVVIGIVNNTVYDPLQPELDS

SEQ ID NO: 2736 - protein, 1147 aa, Artificial Sequence
  SARS-CoV-2/Iceland/189/2020__EPI_ISL_417709 spike protein (1-1147)(K986P_V987P)
MFVFLVLLPLVSSQCVNLTTRTQLPPAYTNSFTRGVYYPDKVFRSSVLHSTQDLFLPFFSNVTWFHAIHVSGTNGTKRFDNPVLPFNDGVYFASTEKSNIIRGWIFGTTLDSKTQSLLIVNNATNVVIKVCEFQFCNDPFLGVYYHKNNKSWMESEFRVYSSANNCTFEYVSQPFLMDLEGKQGNFKNLREFVFKNIDGYFKIYSKHTPINLVRDLPQGFSALEPLVDLPIGINITRFQTLLALHRSYLTPGDSSSGWTAGAAAYYVGYLQPRTFLLKYNENGTITDAVDCALDPLSETKCTLKSFTVEKGIYQTSNFRVQPTESIVRFPNITNLCPFGEVFNATRFASVYAWNRKRISNCVADYSVLYNSASFSTFKCYGVSPTKLNDLCFTNVYADSFVIRGDEVRQIAPGQTGKIADYNYKLPDDFTGCVIAWNSNNLDSKVGGNYNYLYRLFRKSNLKPFERDISTEIYQAGSTPCNGVEGFNCYFPLQSYGFQPTNGVGYQPYRVVVLSFELLHAPATVCGPKKSTNLVKNKCVNFNFNGLTGTGVLTESNKKFLPFQQFGRDIADTTDAVRDPQTLEILDITPCSFGGVSVITPGTNTSNQVAVLYQGVNCTEVPVAIHADQLTPTWRVYSTGSNVFQTRAGCLIGAEHVNNSYECDIPIGAGICASYQTQTNSPRRARSVASQSIIAYTMSLGAENSVAYSNNSIAIPTNFTISVTTEILPVSMTKTSVDCTMYICGDSTECSNLLLQYGSFCTQLNRALTGIAVEQDKNTQEVFAQVKQIYKTPPIKDFGGFNFSQILPDPSKPSKRSFIEDLLFNKVTLADAGFTKQYGDCLGDIAARDLICAQKFNGLTVLPPLLTDEMIAQYTSALLAGTITSGWTFGAGAALQIPFAMQMAYRFNGIGVTQNVLYENQKLIANQFNSAIGKIQDSLSSTASALGKLQDVVNQNAQALNTLVKQLSSNFGAISSVLNDILSRLDPPEAEVQIDRLITGRLQSLQTYVTQQLIRAAEIRASANLAATKMSECVLGQSKRVDFCGKGYHLMSFPQSAPHGVVFLHVTYVPAQEKNFTTAPAICHDGKAHFPREGVFVSNGTHWFVTQRNFYEPQIITTDNTFVSGNCDVVIGIVNNTVYDPLQPELDS

SEQ ID NO: 2737 - protein, 1147 aa, Artificial Sequence
  SARS-CoV-2/Australia/NSW56/2020__EPI_ISL_417408 spike protein (1-1147)(K986P_V987P)
MFVFLVLLPLVSSQCVNLTTRTQLPPAYTNSFTRGVYYPDKVFRSSVLHSTQDLFLPFFSNVTWFHAIHVSGTNGTKRFDNPVLPFNDGVYFASTEKSNIIRGWIFGTTLDSKTQSLLIVNNATNVVIKVCEFQFCNDPFLGVYYHKNNKSWMESEFRVYSSANNCTFEYVSQPFLMDLEGKQGNFKNLREFVFKNIDGYFKIYSKHTPINLVRDLPQGFSALEPLVDLPIGINITRFQTLLALHRSYLTPGDSSSGWTAGAAAYYVGYLQPRTFLLKYNENGTITDAVDCALDPLSETKCTLKSFTVEKGIYQTSNFRVQPTESIVRFPNITNLCPFGEVFNATRFASVYAWNRKRISNCVADYSVLYNSASFSTFKCYGVSPTKLNDLCFTNVYADSFVIRGDEVRQIAPGQTGKIADYNYKLPDDFTGCVIAWNSNNLDSKVGGNYNYLYRLFRKSNLKPFERDISTEIYQAGSTPCNGVEGFNCYFPLQSYGFQPTNGVGYQPYRVVVLSFELLHAPATVCGPKKSTNLVKNKCVNFNFNGLTGTGVLTESNKKFLPFQQFGRDIADTTDAVRDPQTLEILDITPCSFGGVSVITPGTNTSNQVAVLYQDVNCTEVPVAIHADQLTPTWRVYSTGSNVFQTRAGCLIGAEHVNNSYECDIPIGAGICASYQTQTNSPRRARSVASQSIIAYTMSLGAENSVAYSNNSIAIPTNFTISVTTEILPVSMTKTSVDCTMYICGDSTECSNLLLQYGSFCTQLNRALTGIAVEQDKNTQEVFAQVKQIYKTPPIKDFGGFNFSQILPDSSKPSKRSFIEDLLFNKVTLADAGFIKQYGDCLGDIAARDLICAQKFNGLTVLPPLLTDEMIAQYTSALLAGTITSGWTFGAGAALQIPFAMQMAYRFNGIGVTQNVLYENQKLIANQFNSAIGKIQDSLSSTASALGKLQDVVNQNAQALNTLVKQLSSNFGAISSVLNDILSRLDPPEAEVQIDRLITGRLQSLQTYVTQQLIRAAEIRASANLAATKMSECVLGQSKRVDFCGKGYHLMSFPQSAPHGVVFLHVTYVPAQEKNFTTAPAICHDGKAHFPREGVFVSNGTHWFVTQRNFYEPQIITTDNTFVSGNCDVVIGIVNNTVYDPLQPELDS

SEQ ID NO: 2738 - protein, 1147 aa, Artificial Sequence
  SARS-CoV-2/Iceland/280/2020__EPI_ISL_417608 spike protein (1-1147)(K986P_V987P)
MFVFLVLLPLVSSQCVNLTTRTQLPPAYTNSFTRGVYYPDKVFRSSVLHSTQDLFLPFFSNVTWFHAIHVSGTNGTKRFDNPVLPFNDGVYFASTEKSNIIRGWIFGTTLDSKTQSLLIVNNATNVVIKVCEFQFCNDPFLGVYYHKNNKSWMESEFRVYSSANNCTFEYVSQPFLMDLEGKQGNFKNLREFVFKNIDGYFKIYSKHTPINLVRDLPQGFSALEPLVDLPIGINITRFQTLLALHRSYLTPGDSSSGWTAGAAAYYVGYLQPRTFLLKYNENGTITDAVDCALDPLSETKCTLKSFTVEKGIYQTSNFRVQPTESIVRFPNITNLCPFGEVFNATRFASVYAWNRKRISNCVADYSVLYNSASFSTFKCYGVSPTKLNDLCFTNVYADSFVIRGDEVRQIAPGQTGKIADYNYKLPDDFTGCVIAWNSNNLDSKVGGNYNYLYRLFRKSNLKPFERDISTEIYQAGSTPCNGVEGFNCYFPLQSYGFQPTNGVGYQPYRVVVLSFELLHAPATVCGPKKSTNLVKNKCVNFNFNGLTGTGVLTESNKKFLPFQQFGRDIADTTDAVRDPQTLEILDITPCSFGGVSVITPGTNTSNQVAVLYQGVNCTEVPVAIHADQLTPTWRVYSTGSNVFQTRAGCLIGAEHVNNSYECDIPIGAGICASYHTQTNSPRRARSVASQSIIAYTMSLGAENSVAYSNNSIAIPTNFTISVTTEILPVSMTKTSVDCTMYICGDSTECSNLLLQYGSFCTQLNRALTGIAVEQDKNTQEVFAQVKQIYKTPPIKDFGGFNFSQILPDPSKPSKRSFIEDLLFNKVTLADAGFIKQYGDCLGDIAARDLICAQKFNGLTVLPPLLTDEMIAQYTSALLAGTITSGWTFGAGAALQIPFAMQMAYRFNGIGVTQNVLYENQKLIANQFNSAIGKIQDSLSSTASALGKLQDVVNQNAQALNTLVKQLSSNFGAISSVLNDILSRLDPPEAEVQIDRLITGRLQSLQTYVTQQLIRAAEIRASANLAATKMSECVLGQSKRVDFCGKGYHLMSFPQSAPHGVVFLHVTYVPAQEKNFTTAPAICHDGKAHFPREGVFVSNGTHWFVTQRNFYEPQIITTDNTFVSGNCDVVIGIVNNTVYDPLQPELDS

SEQ ID NO: 2739 - protein, 1147 aa, Artificial Sequence; identical to SEQ ID NO: 2694
  SARS-CoV-2/Iceland/247/2020__EPI_ISL_417575 spike protein (1-1147)(K986P_V987P)

SEQ ID NO: 2740 - protein, 1147 aa, Artificial Sequence
  SARS-CoV-2/Iceland/238/2020__EPI_ISL_417566 spike protein (1-1147)(K986P_V987P)
MFVFLVLLPLVSSQCVNLTTRTQLPPAYTNSFTRGVYYPDKVFRSSVLHSTQDLFLPFFSNVTWFHAIHVSGTNGTKRFDNPVLPFNDGVYFASTEKSNIIRGWIFGTTLDSKTQSLLIVNNATNVVIKVCEFQFCNDPFLGVYYHKNNKSWMESEFRVYSSANNCTFEYVSQPFLMDLEGKQGNFKNLREFVFKNIDGYFKIYSKHTPINLVRDLPQGFSALEPLVDLPIGINITRFQTLLALHRSYLTPGDSSSGWTAGAAAYYVGYLQPRTFLLKYNENGTITDAVDCALDPLSETKCTLKSFTVEKGIYQTSNFRVQPTESIVRFPNITNLCPFGEVFNATRFASVYAWNRKRISNCVADYSVLYNSASFSTFKCYGVSPTKLNDLCFTNVYADSFVIRGDEVRQIAPGQTGKIADYNYKLPDDFTGCVIAWNSNNLDSKVGGNYNYLYRLFRKSNLKPFERDISTEIYQAGSTPCNGVEGFNCYFPLQSYGFQPTNGVGYQPYRVVVLSFELLHAPATVCGPKKSTNLVKNKCVNFNFNGLTGTGVLTESNKKFLPFQQFGRDIADTTDAVRDPQTLEILDITPCSFGGVSVITPGTNTSNQVAVLYQGVNCTEVPVAIHADQLTPTWRVYSTGSNVFQTRAGCLIGAEHVNNSYECDIPIGAGICASYQTQTNSPRRARSVASQSIIAYTMSLGAENSVAYSNNSIAIPTNFTISVTTEILPVSMTKTSVDCTMYICGDSTECSNLLLQYGSFCTQLNRALTGIAVEQDKNTQEVFAQVKQIYKTPPIKDFGGFNFSQILPDPSKPSKRSFIEDLLFNKVTLADVGFIKQYGDCLGDIAARDLICAQKFNGLTVLPPLLTDEMIAQYTSALLAGTITSGWTFGAGAALQIPFAMQMAYRFNGIGVTQNVLYENQKLIANQFNSAIGKIQDSLSSTASALGKLQDVVNQNAQALNTLVKQLSSNFGAISSVLNDILSRLDPPEAEVQIDRLITGRLQSLQTYVTQQLIRAAEIRASANLAATKMSECVLGQSKRVDFCGKGYHLMSFPQSAPHGVVFLHVTYVPAQEKNFTTAPAICHDGKAHFPREGVFVSNGTHWFVTQRNFYEPQIITTDNTFVSGNCDVVIGIVNNTVYDPLQPELDS

SEQ ID NO: 2741 - protein, 1147 aa, Artificial Sequence
  SARS-CoV-2/Greece/16/2020__EPI_ISL_418265 spike protein (1-1147)(K986P_V987P)
MFVFLVLLPLVSSQCVNLTTRTQLPPAYTNSFTRGVYYPDKVFRSSVLHSTQDLFLPFFSNVTWFHAIHVSGTNGTKRFDNPVLPFNDGVYFASTEKSNIIRGWIFGTTLDSKTQSLLIVNNATNVVIKVCEFQFCNDPFLGVYYHKNNKSWMESEFRVYSSANNCTFEYVSQPFLMDLEGKQGNFKNLREFVFKNVDGYFKIYSKHTPINLVRDLPQGFSALEPLVDLPIGINITRFQTLLALHRSYLTPGDSSSGWTAGAAAYYVGYLQPRTFLLKYNENGTITDAVDCALDPLSETKCTLKSFTVEKGIYQTSNFRVQPTESIVRFPNITNLCPFGEVFNATRFASVYAWNRKRISNCVADYSVLYNSASFSTFKCYGVSPTKLNDLCFTNVYADSFVIRGDEVRQIAPGQTGKIADYNYKLPDDFTGCVIAWNSNNLDSKVGGNYNYLYRLFRKSNLKPFERDISTEIYQAGSTPCNGVEGFNCYFPLQSYGFQPTNGVGYQPYRVVVLSFELLHAPATVCGPKKSTNLVKNKCVNFNFNGLTGTGVLTESNKKFLPFQQFGRDIADTTDAVRDPQTLEILDITPCSFGGVSVITPGTNTSNQVAVLYQDVNCTEVPVAIHADQLTPTWRVYSTGSNVFQTRAGCLIGAEHVNNSYECDIPIGAGICASYQTQTNSPRRARSVASQSIIAYTMSLGAENSVAYSNNSIAIPTNFTISVTTEILPVSMTKTSVDCTMYICGDSTECSNLLLQYGSFCTQLNRALTGIAVEQDKNTQEVFAQVKQIYKTPPIKDFGGFNFSQILPDPSKPSKRSFIEDLLFNKVTLADAGFIKQYGDCLGDIAARDLICAQKFNGLTVLPPLLTDEMIAQYTSALLAGTITSGWTFGAGAALQIPFAMQMAYRFNGIGVTQNVLYENQKLIANQFNSAIGKIQDSLSSTASALGKLQDVVNQNAQALNTLVKQLSSNFGAISSVLNDILSRLDPPEAEVQIDRLITGRLQSLQTYVTQQLIRAAEIRASANLAATKMSECVLGQSKRVDFCGKGYHLMSFPQSAPHGVVFLHVTYVPAQEKNFTTAPAICHDGKAHFPREGVFVSNGTHWFVTQRNFYEPQIITTDNTFVSGNCDVVIGIVNNTVYDPLQPELDS

SEQ ID NO: 2742 - protein, 1147 aa, Artificial Sequence
  SARS-CoV-2/Iceland/319/2020__EPI_ISL_417648 spike protein (1-1147)(K986P_V987P)
MFVFLVLLPLVSSQCVNLTTRTQLPPAYTNSFTRGVYYPDKVFRSSVLHSTQDLFLPFFSNVTWFHAIHVSGTNGTKRFDNPVLPFNDGVYFASTEKSNIIRGWIFGTTLDSKTQSLLIVNNATNVVIKVCEFQFCNDPFLGVYYHKNNKSWMESEFRVYSSANNCTFEYVSQPFLIDLEGKQGNFKNLREFVFKNIDGYFKIYSKHTPINLVRDLPQGFSALEPLVDLPIGINITRFQTLLALHRSYLTPGDSSSGWTAGAAAYYVGYLQPRTFLLKYNENGTITDAVDCALDPLSETKCTLKSFTVEKGIYQTSNFRVQPTESIVRFPNITNLCPFGEVFNATRFASVYAWNRKRISNCVADYSVLYNSASFSTFKCYGVSPTKLNDLCFTNVYADSFVIRGDEVRQIAPGQTGKIADYNYKLPDDFTGCVIAWNSNNLDSKVGGNYNYLYRLFRKSNLKPFERDISTEIYQAGSTPCNGVEGFNCYFPLQSYGFQPTNGVGYQPYRVVVLSFELLHAPATVCGPKKSTNLVKNKCVNFNFNGLTGTGVLTESNKKFLPFQQFGRDIADTTDAVRDPQTLEILDITPCSFGGVSVITPGTNTSNQVAVLYQGVNCTEVPVAIHADQLTPTWRVYSTGSNVFQTRAGCLIGAEHVNNSYECDIPIGAGICASYQTQTNSPRRARSVASQSIIAYTMSLGAENSVAYSNNSIAIPTNFTISVTTEILPVSMTKTSVDCTMYICGDSTECSNLLLQYGSFCTQLNRALTGIAVEQDKNTQEVFAQVKQIYKTPPIKDFGGFNFSQILPDPSKPSKRSFIEDLLFNKVTLADAGFIKQYGDCLGDIAARDLICAQKFNGLTVLPPLLTDEMIAQYTSALLAGTITSGWTFGAGAALQIPFAMQMAYRFNGIGVTQNVLYENQKLIANQFNSAIGKIQDSLSSTASALGKLQDVVNQNAQALNTLVKQLSSNFGAISSVLNDILSRLDPPEAEVQIDRLITGRLQSLQTYVTQQLIRAAEIRASANLAATKMSECVLGQSKRVDFCGKGYHLMSFPQSAPHGVVFLHVTYVPAQEKNFTTAPAICHDGKAHFPREGVFVSNGTHWFVTQRNFYEPQIITTDNTFVSGNCDVVIGIVNNTVYDPLQPELDS

SEQ ID NO: 2743 - protein, 1147 aa, Artificial Sequence
  SARS-CoV-2/Congo/94/2020__EPI_ISL_417947 spike protein (1-1147)(K986P_V987P)
MFVFLVLLPLVSSQCVNLTTRTQLPPAYTNSFTRGVYYPDKVFRSSVLHSTQDLFLPFFSNVTWFHAIHVSGTNGTKRFDNPVLPFNDGVYFASTEKSNIIRGWIFGTTLDSKTQSLLIVNNATNVVIKVCEFQFCNDPFLGVYYHKNNKSWMESEFRVYSSANNCTFEYVSQPFLMDLEGKQGNFKNLREFVFKNIDGYFKIYSKHTPINLVRDLPQGFSALEPLVDLPIGINITRFQTLLALHRSYLTPGDSSSGWTAGAAAYYVGYLQPRTFLLKYNENGTITDAVDCALDPLSETKCTLKSFTVEKGIYQTSNFRVQPTESIVRFPNITNLCPFGEVFNATRFASVYAWNRKRISNCVADYSVLYNSASFSTFKCYGVSPTKLNDLCFTNVYADSFVIRGDEVRQIAPGQTGKIADYNYKLPDDFTGCVIAWNSNNLDSKVGGNYNYLYRLFRKSNLKPFERDISTEIYQAGSTPCNGVEGFNCYFPLQSYGFQPTNGVGYQPYRVVVLSFELLHAPATVCGPKKSTNLVKNKCVNFNFNGLTGTGVLTESNKKFLPFQQFGRDIADTTDAVRDPQTLEILDITPCSFGGVSVITPGTNTSNQVAVLYQGVNCTEVPVAIHADQLTPTWRVYSTGSNVFQTRAGCLIGAEHVNNSYECDIPIGAGICASYQTQTNSPRRARSVASQSIIAYTMSLGAENSVAYSNNSIAIPTNFTISVTTEILPVSMTKTSVDCTMYICGDSTECSNLLLQYGSFCTQLNRALTGIAVEQDKNTQEVFAQVKQIYKTPPIKDFGGFNFSQILPDPSKPSKRSFIEDILFNKVTLADAGFIKQYGDCLGDIAARDLICAQKFNGLTVLPPLLTDEMIAQYTSALLAGTITSGWTFGAGAALQIPFAMQMAYRFNGIGVTQNVLYENQKLIANQFNSAIGKIQDSLSSTASALGKLQDVVNQNAQALNTLVKQLSSNFGAISSVLNDILSRLDPPEAEVQIDRLITGRLQSLQTYVTQQLIRAAEIRASANLAATKMSECVLGQSKRVDFCGKGYHLMSFPQSAPHGVVFLHVTYVPAQEKNFTTAPAICHDGKAHFPREGVFVSNGTHWFVTQRNFYEPQIITTDNTFVSGNCDVVIGIVNNTVYDPLQPELDS

SEQ ID NO: 2744 - protein, 1147 aa, Artificial Sequence
  SARS-CoV-2/Congo/158/2020__EPI_ISL_417950 spike protein (1-1147)(K986P_V987P)
MFVFLVLLPLVSSQCVNLTTRTQLPPAYTNSFTRGVYYPDKVFRSSVLHSTQDLFLPFFSNVTWFHAIHVSGTNGTKRFDNPVLPFNDGVYFASTEKSNIIRGWIFGTTLDSKTQSLLIVNNATNVVIKVCEFQFCNDPFLGVYYHKNNKSWMESEFRVYSSANNCTFEYVSQPFLMDLEGKQGNFKNLREFVFKNIDGYFKIYSKHTPINLVRDLPQGFSALEPLVDLPIGINITRFQTLLALHRSYLTPGDSSSGWTAGAAAYYVGYLQPRTFLLKYNENGTITDAVDCALDPLSETKCTLKSFTVEKGIYQTSNFRVQPTESIVRFPNITNLCPFGEVFNATRFASVYAWNRKRISNCVADYSVLYNSASFSTFKCYGVSPTKLNDLCFTNVYADSFVIRGDEVRQIAPGQTGKIADYNYKLPDDFTGCVIAWNSNNLDSKVGGNYNYLYRLFRKSNLKPFERDISTEIYQAGSTPCNGVEGFNCYFPLQSYGFQPTNGVGYQPYRVVVLSFELLHAPATVCGPKKSTNLVKNKCVNFNFNGLTGTGVLTESNKKFLPFQQFGRDIADTTDAVRDPQTLEILDITPCSFGGVSVITPGTNTSNQVAVLYQDVNCTEVPVAIHADQLTPTWRVYSTGSNVFQTRAGCLIGAEHVNNSYECDIPIGAGICASYQTQTNSPRRARSVASQSIIAYTMSLGAENSVAYSNNSIAIPTNFTISVTTEILPVSMTKTSVDCTMYICGDSTECSNLLLQYGSFCTQLNRALTGIAVEQDKNTQEVFAQVKQIYKTPPIKDFGGFNFSQILPDPSKPSKRSFIEDLLFNKVTLADAGFIKQYGDCLGDIAARDLICAQKFNGLTVLPPLLTDEMIAQYTSALLAGTITSGWTFGAGAALQIPFAMQMAYRFNGIGVTQNVLYENQKLIANQFNSAIGKIQDSLSSTASALGKLQDVVNQNAQALNTLVKQLSSNFGAISSVLNDILSRLDPPEAEVQIDRLITGRLQSLQTYVTQQLIRAAEIRASANLAATKMSECVLGQSKRVDFCGKGYHLMSFPQSAPHGVVFLHVTYVPAQEKNFTTAPAICHDGKAHFPREGVFVSNGTHWFVTQRNFYEPQIITTDNTFLSGNCDVVIGIVNNTVYDPLQPELDS

SEQ ID NO: 2745 - protein, 1147 aa, Artificial Sequence
  SARS-CoV-2/USA/UT-00034/2020__EPI_ISL_417977 spike protein (1-1147)(K986P_V987P)
MFVFLVLLPLVSSQCVNLTTRTQLPPAYTNSFTRGVYYPDKVFRSSVLHSTQDLFLPFFSNVTWFHAIHVSGTNGTKRFDNPVLPFNDGVYFASTEKSNIIRGWIFGTTLDSKTQSLLIVNNATNVVIKVCEFQFCNDPFLGVYYYKNNKSWMESEFRVYSSANNCTFEYVSQPFLMDLEGKQGNFKNLREFVFKNIDGYFKIYSKHTPINLVRDLPQGFSALEPLVDLPIGINITRFQTLLALHRSYLTPGDSSSGWTAGAAAYYVGYLQPRTFLLKYNENGTITDAVDCALDPLSETKCTLKSFTVEKGIYQTSNFRVQPTESIVRFPNITNLCPFGEVFNATRFASVYAWNRKRISNCVADYSVLYNSASFSTFKCYGVSPTKLNDLCFTNVYADSFVIRGDEVRQIAPGQTGKIADYNYKLPDDFTGCVIAWNSNNLDSKVGGNYNYLYRLFRKSNLKPFERDISTEIYQAGSTPCNGVEGFNCYFPLQSYGFQPTNGVGYQPYRVVVLSFELLHAPATVCGPKKSTNLVKNKCVNFNFNGLTGTGVLTESNKKFLPFQQFGRDIADTTDAVRDPQTLEILDITPCSFGGVSVITPGTNTSNQVAVLYQGVNCTEVPVAIHADQLTPTWRVYSTGSNVFQTRAGCLIGAEHVNNSYECDIPIGAGICASYQTQTNSPRRARSVASQSIIAYTMSLGAENSVAYSNNSIAIPTNFTISVTTEILPVSMTKTSVDCTMYICGDSTECSNLLLQYGSFCTQLNRALTGIAVEQDKNTQEVFAQVKQIYKTPPIKDFGGFNFSQILPDPSKPSKRSFIEDLLFNKVTLADAGFIKQYGDCLGDIAARDLICAQKFNGLTVLPPLLTDEMIAQYTSALLAGTITSGWTFGAGAALQIPFAMQMAYRFNGIGVTQNVLYENQKLIANQFNSAIGKIQDSLSSTASALGKLQDVVNQNAQALNTLVKQLSSNFGAISSVLNDILSRLDPPEAEVQIDRLITGRLQSLQTYVTQQLIRAAEIRASANLAATKMSECVLGQSKRVDFCGKGYHLMSFPQSAPHGVVFLHVTYVPAQEKNFTTAPAICHDGKAHFPREGVFVSNGTHWFVTQRNFYEPQIITTDNTFVSGNCDVVIGIVNNTVYDPLQPELDS

SEQ ID NO: 2746 - protein, 1147 aa, Artificial Sequence
  SARS-CoV-2/USA/UT-00033/2020__EPI_ISL_417976 spike protein (1-1147)(K986P_V987P)
MFVFLVLLPLVSSQCVNLTTRTQLPPAYTNSFTRGVYYPDKVFRSSVLHSTQDLFLPFFSNVTWFHAIHVSGTNGTKRFDNPVLPFNDGVYFASTEKSNIIRGWIFGTTLDSKTQSLLIVNNATNVVIKVCEFQFCNDPFLGVYYHKNNKSWMESEFRVYSSANNCTFEYVSQPFLMDLEGKQGNFKNLREFVFKNIDGYFKIYSKHTPINLVRDLPQGFSALEPLVDLPIGINITRFQTLLALHRSYLTPGDSSSGLTAGAAAYYVGYLQPRTFLLKYNENGTITDAVDCALDPLSETKCTLKSFTVEKGIYQTSNFRVQPTESIVRFPNITNLCPFGEVFNATRFASVYAWNRKRISNCVADYSVLYNSASFSTFKCYGVSPTKLNDLCFTNVYADSFVIRGDEVRQIAPGQTGKIADYNYKLPDDFTGCVIAWNSNNLDSKVGGNYNYLYRLFRKSNLKPFERDISTEIYQAGSTPCNGVEGFNCYFPLQSYGFQPTNGVGYQPYRVVVLSFELLHAPATVCGPKKSTNLVKNKCVNFNFNGLTGTGVLTESNKKFLPFQQFGRDIADTTDAVRDPQTLEILDITPCSFGGVSVITPGTNTSNQVAVLYQGVNCTEVPVAIHADQLTPTWRVYSTGSNVFQTRAGCLIGAEHVNNSYECDIPIGAGICASYQTQTNSPRRARSVASQSIIAYTMSLGAENSVAYSNNSIAIPTNFTISVTTEILPVSMTKTSVDCTMYICGDSTECSNLLLQYGSFCTQLNRALTGIAVEQDKNTQEVFAQVKQIYKTPPIKDFGGFNFSQILPDPSKPSKRSFIEDLLFNKVTLADAGFIKQYGDCLGDIAARDLICAQKFNGLTVLPPLLTDEMIAQYTSALLAGTITSGWTFGAGAALQIPFAMQMAYRFNGIGVTQNVLYENQKLIANQFNSAIGKIQDSLSSTASALGKLQDVVNQNAQALNTLVKQLSSNFGAISSVLNDILSRLDPPEAEVQIDRLITGRLQSLQTYVTQQLIRAAEIRASANLAATKMSECVLGQSKRVDFCGKGYHLMSFPQSAPHGVVFLHVTYVPAQEKNFTTAPAICHDGKAHFPREGVFVSNGTHWFVTQRNFYEPQIITTDNTFVSGNCDVVIGIVNNTVYDPLQPELDS

SEQ ID NO: 2747 - protein, 1147 aa, Artificial Sequence
  SARS-CoV-2/USA/WI-13/2020__EPI_ISL_417516 spike protein (1-1147)(K986P_V987P)
MFVFLVLLPLVSSQCVNLTTRTQLPPAYTNSFTRGVYYPDKVFRSSVLHSTQDLFLPFFSNVTWFHAIHVSGTNGTKRFDNPVLPFNDGVYFASTEKSNIIRGWIFGTTLDSKTQSLLIVNNATNVVIKVCEFQFCNDPFLGVYYHKNNKSWMESEFRVYSSANNCTFEYVSQPFLMDLEGKQGNFKNLREFVFKNIDGYFKIYSKHTPINLVRDLPQGFSALEPLVDLPIGINITRFQTLLALHRSYLTPGDSSSGWTAGAAAYYVGYLQPRTFLLKYNENGTITDAVDCALDPLSETKCTLKSFTVEKGIYQTSNFRVLPTESIVRFPNITNLCPFGEVFNATRFASVYAWNRKRISNCVADYSVLYNSASFSTFKCYGVSPTKLNDLCFTNVYADSFVIRGDEVRQIAPGQTGKIADYNYKLPDDFTGCVIAWNSNNLDSKVGGNYNYLYRLFRKSNLKPFERDISTEIYQAGSTPCNGVEGFNCYFPLQSYGFQPTNGVGYQPYRVVVLSFELLHAPATVCGPKKSTNLVKNKCVNFNFNGLTGTGVLTESNKKFLPFQQFGRDIADTTDAVRDPQTLEILDITPCSFGGVSVITPGTNTSNQVAVLYQGVNCTEVPVAIHADQLTPTWRVYSTGSNVFQTRAGCLIGAEHVNNSYECDIPIGAGICASYQTQTNSPRRARSVASQSIIAYTMSLGAENSVAYSNNSIAIPTNFTISVTTEILPVSMTKTSVDCTMYICGDSTECSNLLLQYGSFCTQLNRALTGIAVEQDKNTQEVFAQVKQIYKTPPIKDFGGFNFSQILPDPSKPSKRSFIEDLLFNKVTLADAGFIKQYGDCLGDIAARDLICAQKFNGLTVLPPLLTDEMIAQYTSALLAGTITSGWTFGAGAALQIPFAMQMAYRFNGIGVTQNVLYENQKLIANQFNSAIGKIQDSLSSTASALGKLQDVVNQNAQALNTLVKQLSSNFGAISSVLNDILSRLDPPEAEVQIDRLITGRLQSLQTYVTQQLIRAAEIRASANLAATKMSECVLGQSKRVDFCGKGYHLMSFPQSAPHGVVFLHVTYVPAQEKNFTTAPAICHDGKAHFPREGVFVSNGTHWFVTQRNFYEPQIITTDNTFVSGNCDVVIGIVNNTVYDPLQPELDS

SEQ ID NO: 2748 - protein, 1146 aa, Artificial Sequence
  SARS-CoV-2/India/1-27/2020__EPI_ISL_413522 spike protein (1-1146)(K985P_V986P)
MFVFLVLLPLVSSQCVNLTTRTQLPPAYTNSFTRGVYYPDKVFRSSVLHSTQDLFLPFFSNVTWFHAIHVSGTNGTKRFDNPVLPFNDGVYFASTEKSNIIRGWIFGTTLDSKTQSLLIVNNATNVVIKVCEFQFCNDPFLGVYHKNNKSWMESEFRVYSSANNCTFEYVSQPFLMDLEGKQGNFKNLREFVFKNIDGYFKIYSKHTPINLVRDLPQGFSALEPLVDLPIGINITRFQTLLALHRSYLTPGDSSSGWTAGAAAYYVGYLQPRTFLLKYNENGTITDAVDCALDPLSETKCTLKSFTVEKGIYQTSNFRVQPTESIVRFPNITNLCPFGEVFNATRFASVYAWNRKRISNCVADYSVLYNSASFSTFKCYGVSPTKLNDLCFTNVYADSFVIRGDEVIQIAPGQTGKIADYNYKLPDDFTGCVIAWNSNNLDSKVGGNYNYLYRLFRKSNLKPFERDISTEIYQAGSTPCNGVEGFNCYFPLQSYGFQPTNGVGYQPYRVVVLSFELLHAPATVCGPKKSTNLVKNKCVNFNFNGLTGTGVLTESNKKFLPFQQFGRDIADTTDAVRDPQTLEILDITPCSFGGVSVITPGTNTSNQVAVLYQDVNCTEVPVAIHADQLTPTWRVYSTGSNVFQTRAGCLIGAEHVNNSYECDIPIGAGICASYQTQTNSPRRARSVASQSIIAYTMSLGAENSVAYSNNSIAIPTNFTISVTTEILPVSMTKTSVDCTMYICGDSTECSNLLLQYGSFCTQLNRALTGIAVEQDKNTQEVFAQVKQIYKTPPIKDFGGFNFSQILPDPSKPSKRSFIEDLLFNKVTLADAGFIKQYGDCLGDIAARDLICAQKFNGLTVLPPLLTDEMIAQYTSALLAGTITSGWTFGAGAALQIPFAMQMAYRFNGIGVTQNVLYENQKLIANQFNSAIGKIQDSLSSTASALGKLQDVVNQNAQALNTLVKQLSSNFGAISSVLNDILSRLDPPEAEVQIDRLITGRLQSLQTYVTQQLIRAAEIRASANLAATKMSECVLGQSKRVDFCGKGYHLMSFPQSAPHGVVFLHVTYVPAQEKNFTTAPAICHDGKAHFPREGVFVSNGTHWFVTQRNFYEPQIITTDNTFVSGNCDVVIGIVNNTVYDPLQPELDS

SEQ ID NO: 2749 - protein, 1141 aa, Artificial Sequence
  SARS-CoV-2/pangolin/Guangxi/P4L/2017__EPI_ISL_410538 spike protein (1-1141)(K980P_V981P)
MFVFLFVLPLVSSQCVNLTTRTGIPPGYTNSSTRGVYYPDKVFRSSILHLTQDLFLPFFSNVTWFNTINYQGGFKKFDNPVLPFNDGVYFASTEKSNIIRGWIFGTTLDARTQSLLIVNNATNVVIKVCEFQFCTDPFLGVYYHNNNKTWVENEFRVYSSANNCTFEYISQPFLMDLEGKQGNFKNLREFVFKNVDGYFKIYSKHTPIDLVRDLPRGFAALEPLVDLPIGINITRFQTLLALHRSYLTPGNLESGWTTGAAAYYVGYLQQRTFLLSYNQNGTITDAVDCSLDPLSETKCTLKSLTVEKGIYQTSNFRVQPTISIVRFPNITNLCPFGEVFNASKFASVYAWNRKRISNCVADYSVLYNSTSFSTFKCYGVSPTKLNDLCFTNVYADSFVVKGDEVRQIAPGQTGVIADYNYKLPDDFTGCVIAWNSVKQDALTGGNYGYLYRLFRKSKLKPFERDISTEIYQAGSTPCNGQVGLNCYYPLERYGFHPTTGVNYQPFRVVVLSFELLNGPATVCGPKLSTTLVKDKCVNFNFNGLTGTGVLTTSKKQFLPFQQFGRDISDTTDAVRDPQTLEILDITPCSFGGVSVITPGTNTSNQVAVLYQDVNCTEVPMAIHAEQLTPAWRVYSAGANVFQTRAGCLVGAEHVNNSYECDIPVGAGICASYHSMSSLRSVNQRSIIAYTMSLGAENSVAYSNNSIAIPTNFTISVTTEILPVSMTKTSVDCTMYICGDSIECSNLLLQYGSFCTQLNRALTGIAVEQDKNTQEVFAQVKQIYKTPPIKDFGGFNFSQILPDPSKPSKRSFIEDLLFNKVTLADAGFIKQYGDCLGDIAARDLICAQKFNGLTVLPPLLTDEMIAQYTSALLAGTITSGWTFGAGAALQIPFAMQMAYRFNGIGVTQNVLYENQKLIANQFNSAIGKIQDSLSSTASALGKLQDVVNQNAQALNTLVKQLSSNFGAISSVLNDILSRLDPPEAEVQIDRLITGRLQSLQTYVTQQLIRAAEIRASANLAATKMSECVLGQSKRVDFCGKGYHLMSFPQSAPHGVVFLHVTYVPAQEKNFTTAPAICHEGKAHFPREGVFVSNGTHWFITQRNFYEPQIITTDNTFVSGSCDVVIGIVNNTVYDPLQPELDS

SEQ ID NO: 2750 - protein, 1141 aa, Artificial Sequence
  SARS-CoV-2/pangolin/Guangxi/P5L/2017__EPI_ISL_410540 spike protein (1-1141)(K980P_V981P)
MFVFLFVLPLVSSQCVNLTTRTGIPPGYTNSSTRGVYYPDKVFRSSILHLTQDLFLPFFSNVTWFNTINYQGGFKKFDNPVLPFNDGVYFASTEKSNIIRGWIFGTTLDARTQSLLIVNNATNVVIKVCEFQFCTDPFLGVYYHNNNKTWVENEFRVYSSANNCTFEYISQPFLMDLEGKQGNFKNLREFVFKNVDGYFKIYSKHTPIDLVRDLPRGFAALEPLVDLPIGINITRFQTLLALHRSYLTPGKLESGWTTGAAAYYVGYLQQRTFLLSYNQNGTITDAVDCSLDPLSETKCTLKSLTVEKGIYQTSNFRVQPTISIVRFPNITNLCPFGEVFNASKFASVYAWNRKRISNCVADYSVLYNSTSFSTFKCYGVSPTKLNDLCFTNVYADSFVVKGDEVRQIAPGQTGVIADYNYKLPDDFTGCVIAWNSVKQDALTGGNYGYLYRLFRKSKLKPFERDISTEIYQAGSTPCNGQVGLNCYYPLERYGFHPTTGVNYQPFRVVVLSFELLNGPATVCGPKLSTTLVKDKCVNFNFNGLTGTGVLTTSKKQFLPFQQFGRDISDTTDAVRDPQTLEILDITPCSFGGVSVITPGTNTSNQVAVLYQDVNCTEVPMAIHAEQLTPAWRVYSAGANVFQTRAGCLVGAEHVNNSYECDIPVGAGICASYHSMSSFRSVNQRSIIAYTMSLGAENSVAYSNNSIAIPTNFTISVTTEILPVSMTKTSVDCTMYICGDSIECSNLLLQYGSFCTQLNRALTGIAVEQDKNTQEVFAQVKQIYKTPPIKDFGGFNFSQILPDPSKPSKRSFIEDLLFNKVTLADAGFIKQYGDCLGDIAARDLICAQKFNGLTVLPPLLTDEMIAQYTSALLAGTITSGWTFGAGAALQIPFAMQMAYRFNGIGVTQNVLYENQKLIANQFNSAIGKIQDSLSSTASALGKLQDVVNQNAQALNTLVKQLSSNFGAISSVLNDILSRLDPPEAEVQIDRLITGRLQSLQTYVTQQLIRAAEIRASANLAATKMSECVLGQSKRVDFCGKGYHLMSFPQSAPHGVVFLHVTYVPAQEKNFTTAPAICHEGKAHFPREGVFVSNGTHWFITQRNFYEPQIITTDNTFVSGSCDVVIGIVNNTVYDPLQPELDS

SEQ ID NO: 2751 - protein, 1141 aa, Artificial Sequence
  SARS-CoV-2/pangolin/Guangxi/P5E/2017__EPI_ISL_410541 spike protein (1-1141)(K980P_V981P)
MFVFLFVLPLVSSQCVNLTTRTGIPPGYTNSSTRGVYYPDKVFRSSILHLTQDLFLPFFSNVTWFNTITYQGGSKKFDNPVLPFNDGVYFASTEKSNIIRGWIFGTTLDARTQSLLIVNNATNVVIKVCEFQFCTDPFLGVYYHNNNKTWVENEFRVYSSANNCTFEYISQPFLMDLEGKQGNFKNLREFVFKNVDGYFKIYSKHTPIDLVRDLPRGFAALEPLVDLPIGINITRFQTLLALHRSYLTPGKLESGWTTGAAAYYVGYLQQRTFLLSYNQNGTITDAVDCSLDPLSETKCTLKSLTVEKGIYQTSNFRVQPTISIVRFPNITNLCPFGEVFNASKFASVYAWNRKRISNCVADYSVLYNSTSFSTFKCYGVSPTKLNDLCFTNVYADSFVVKGDEVRQIAPGQTGVIADYNYKLPDDFTGCVIAWNSVKQDALTGDNYGYLYRLFRKSKLKPFERDISTEIYQAGSTPCNGQVGLNCYYPLERYGFHPTTGVNYQPFRVVVLSFELLNGPATVCGPKLSTTLVKDKCVNFNFNGLTGTGVLTTSKKQFLPFQQFGRDISDTTDAVRDPQTLEILDITPCSFGGVSVITPGTNTSNQVAVLYQDVNCTEVPMAIHAEQLTPAWRVYSAGANVFQTRAGCLVGAEHVNNSYECDIPVGAGICASYHSMSSFRSVNQRSIIAYTMSLGAENSVAYSNNSIAIPTNFTISVTTEILPVSMTKTSVDCTMYICGDSIECSNLLLQYGSFCTQLNRALTGIAVEQDKNTQEVFAQVKQIYKTPPIKDFGGFNFSQILPDPSKPSKRSFIEDLLFNKVTLADAGFIKQYGDCLGDIAARDLICAQKFNGLTVLPPLLTDEMIAQYTSALLAGTITSGWTFGAGAALQIPFAMQMAYRFNGIGVTQNVLYENQKLIANQFNSAIGKIQDSLSSTASALGKLQDVVNQNAQALNTLVKQLSSNFGAISSVLNDILSRLDPPEAEVQIDRLITGRLQSLQTYVTQQLIRAAEIRASANLAATKMSECVLGQSKRVDFCGKGYHLMSFPQSAPHGVVFLHVTYVPAQEKNFTTAPAICHEGKAHFPREGVFVSNGTHWFITQRNFYEPQIITTDNTFVSGSCDVVIGIVNNTVYDPLQPELDS

SEQ ID NO: 2752 - protein, 1139 aa, Artificial Sequence
  SARS-CoV-2/pangolin/Guangxi/P1E/2017__EPI_ISL_410539 spike protein (1-1139)(K978P_V979P)
MFVFLFVLPLVSSQCVNLTTRTGIQPGYTNSSTRGVYYPDKVFRSSILHLTQDLFLPFFSNVTWFNTINYQGGFKKFDNPVLPFNDGVYFASTEKSNIIRGWIFGTTLDARTQSLLIVNNATNVVIKVCEFQFCTDPFLGVYYHNNNKTWVENEFRVYSSANNCTFEYISQPFLMDLEGKQGNFKNLREFVFKNVDGYFKIYSKHTPIDLVRDLPRGFAALEPLVDLPIGINITRFQTLLALHRSYLTPGKLESGWTTGAAAYYVGYLQQRTFLLSYNQNGTITDAVDCSLDPLSETKCTLKSLTVEKGIYQTSNFRVQPTISIVRFPNITNLCPFGEVFNASKFASVYAWNRKRISNCVADYSVLYNSTSFSTFKCYGVSPTKLNDLCFTNVYADSFVVKGDEVRQIAPGQTGVIADYNYKLPDDFTGCVIAWNSVKQDALTGGNYLYRLFRKSKLKPFERDISTEIYQAGSTPCNGQVGLNCYYPLERYGFHPTTGVNYQPFRVVVLSFELLNGPATVCGPKLSTTLVKDKCVNFNFNGLTGTGVLTTSKKQFLPFQQFGRDISDTTDAVRDPQTLEILDITPCSFGGVSVITPGTNTSNQVAVLYQDVNCTEVPMAIHAEQLTPAWRVYSAGANVFQTRAGCLVGAEHVNNSYECDIPVGAGICASYHSMSSLRSVNQRSIIAYTMSLGAENSVAYSNNSIAIPTNFTISVTTEILPVSMTKTSVDCTMYICGDSIECSNLLLQYGSFCTQLNRALTGIAVEQDKNTQEVFAQVKQIYKTPPIKDFGGFNFSQILPDPSKPSKRSFIEDLLFNKVTLADAGFIKQYGDCLGDIAARDLICAQKFNGLTVLPPLLTDEMIAQYTSALLAGTITSGWTFGAGAALQIPFAMQMAYRFNGIGVTQNVLYENQKLIANQFNSAIGKIQDSLSSTASALGKLQDVVNQNAQALNTLVKQLSSNFGAISSVLNDILSRLDPPEAEVQIDRLITGRLQSLQTYVTQQLIRAAEIRASANLAATKMSECVLGQSKRVDFCGKGYHLMSFPQSAPHGVVFLHVTYVPAQEKNFTTAPAICHEGKAHFPREGVFVSNGTHWFITQRNFYEPQIITTDNTFVSGSCDVVIGIVNNTVYDPLQPELDS

SEQ ID NO: 2753 - protein, 1147 aa, Artificial Sequence
  SARS-CoV-2/Wuhan/WIV05/2019__EPI_ISL_402128 spike protein (1-1147)(K986P_V987P_T887W_A1020W)
MFVFLVLLPLVSSQCVNLTTRTQLPPAYTNSFTRGVYYPDKVFRSSVLHSTQDLFLPFFSNVTWFHAIHVSGTNGTKRFDNPVLPFNDGVYFASTEKSNIIRGWIFGTTLDSKTQSLLIVNNATNVVIKVCEFQFCNDPFLGVYYHKNNKSWMESEFRVYSSANNCTFEYVSQPFLMDLEGKQGNFKNLREFVFKNIDGYFKIYSKHTPINLVRDLPQGFSALEPLVDLPIGINITRFQTLLALHRSYLTPGDSSSGWTAGAAAYYVGYLQPRTFLLKYNENGTITDAVDCALDPLSETKCTLKSFTVEKGIYQTSNFRVQPTESIVRFPNITNLCPFGEVFNATRFASVYAWNRKRISNCVADYSVLYNSASFSTFKCYGVSPTKLNDLCFTNVYADSFVIRGDEVRQIAPGQTGKIADYNYKLPDDFTGCVIAWNSNNLDSKVGGNYNYLYRLFRKSNLKPFERDISTEIYQAGSTPCNGVEGFNCYFPLQSYGFQPTNGVGYQPYRVVVLSFELLHAPATVCGPKKSTNLVKNKCVNFNFNGLTGTGVLTESNKKFLPFQQFGRDIADTTDAVRDPQTLEILDITPCSFGGVSVITPGTNTSNQVAVLYQDVNCTEVPVAIHADQLTPTWRVYSTGSNVFQTRAGCLIGAEHVNNSYECDIPIGAGICASYQTQTNSPRRARSVASQSIIAYTMSLGAENSVAYSNNSIAIPTNFTISVTTEILPVSMTKTSVDCTMYICGDSTECSNLLLQYGSFCTQLNRALTGIAVEQDKNTQEVFAQVKQIYKTPPIKDFGGFNFSQILPDPSKPSKRSFIEDLLFNKVTLADAGFIKQYGDCLGDIAARDLICAQKFNGLTVLPPLLTDEMIAQYTSALLAGTITSGWWFGAGAALQIPFAMQMAYRFNGIGVTQNVLYENQKLIANQFNSAIGKIQDSLSSTASALGKLQDVVNQNAQALNTLVKQLSSNFGAISSVLNDILSRLDPPEAEVQIDRLITGRLQSLQTYVTQQLIRAAEIRWSANLAATKMSECVLGQSKRVDFCGKGYHLMSFPQSAPHGVVFLHVTYVPAQEKNFTTAPAICHDGKAHFPREGVFVSNGTHWFVTQRNFYEPQIITTDNTFVSGNCDVVIGIVNNTVYDPLQPELDS

SEQ ID NO: 2754 - protein, 1143 aa, Artificial Sequence
  SARS-CoV-2/bat/Yunnan/RaTG13/2013__EPI_ISL_402131 spike protein (1-1143)(K982P_V983P_T883W_A1016W)
MFVFLVLLPLVSSQCVNLTTRTQLPPAYTNSSTRGVYYPDKVFRSSVLHLTQDLFLPFFSNVTWFHAIHVSGTNGIKRFDNPVLPFNDGVYFASTEKSNIIRGWIFGTTLDSKTQSLLIVNNATNVVIKVCEFQFCNDPFLGVYYHKNNKSWMESEFRVYSSANNCTFEYVSQPFLMDLEGKQGNFKNLREFVFKNIDGYFKIYSKHTPINLVRDLPPGFSALEPLVDLPIGINITRFQTLLALHRSYLTPGDSSSGWTAGAAAYYVGYLQPRTFLLKYNENGTITDAVDCALDPLSETKCTLKSFTVEKGIYQTSNFRVQPTDSIVRFPNITNLCPFGEVFNATTFASVYAWNRKRISNCVADYSVLYNSTSFSTFKCYGVSPTKLNDLCFTNVYADSFVITGDEVRQIAPGQTGKIADYNYKLPDDFTGCVIAWNSKHIDAKEGGNFNYLYRLFRKANLKPFERDISTEIYQAGSKPCNGQTGLNCYYPLYRYGFYPTDGVGHQPYRVVVLSFELLNAPATVCGPKKSTNLVKNKCVNFNFNGLTGTGVLTESNKKFLPFQQFGRDIADTTDAVRDPQTLEILDITPCSFGGVSVITPGTNASNQVAVLYQDVNCTEVPVAIHADQLTPTWRVYSTGSNVFQTRAGCLIGAEHVNNSYECDIPIGAGICASYQTQTNSRSVASQSIIAYTMSLGAENSVAYSNNSIAIPTNFTISVTTEILPVSMTKTSVDCTMYICGDSTECSNLLLQYGSFCTQLNRALTGIAVEQDKNTQEVFAQVKQIYKTPPIKDFGGFNFSQILPDPSKPSKRSFIEDLLFNKVTLADAGFIKQYGDCLGDIAARDLICAQKFNGLTVLPPLLTDEMIAQYTSALLAGTITSGWWFGAGAALQIPFAMQMAYRFNGIGVTQNVLYENQKLIANQFNSAIGKIQDSLSSTASALGKLQDVVNQNAQALNTLVKQLSSNFGAISSVLNDILSRLDPPEAEVQIDRLITGRLQSLQTYVTQQLIRAAEIRWSANLAATKMSECVLGQSKRVDFCGKGYHLMSFPQSAPHGVVFLHVTYVPAQEKNFTTAPAICHDGKAHFPREGVFVSNGTHWFVTQRNFYEPQIITTDNTFVSGSCDVVIGIVNNTVYDPLQPELDS

SEQ ID NO: 2755 - protein, 1147 aa, Artificial Sequence
  SARS-CoV-2/Wuhan/HBCDC-HB-01/2019__EPI_ISL_402132 spike protein (1-1147)(K986P_V987P_T887W_A1020W)
MFVFLVLLPLVSSQCVNLTTRTQLPPAYTNSITRGVYYPDKVFRSSVLHSTQDLFLPFFSNVTWFHAIHVSGTNGTKRFDNPVLPFNDGVYFASTEKSNIIRGWIFGTTLDSKTQSLLIVNNATNVVIKVCEFQFCNDPFLGVYYHKNNKSWMESEFRVYSSANNCTFEYVSQPFLMDLEGKQGNFKNLREFVFKNIDGYFKIYSKHTPINLVRDLPQGFSALEPLVDLPIGINITRFQTLLALHRSYLTPGDSSSGWTAGAAAYYVGYLQPRTFLLKYNENGTITDAVDCALDPLSETKCTLKSFTVEKGIYQTSNFRVQPTESIVRFPNITNLCPFGEVFNATRFASVYAWNRKRISNCVADYSVLYNSASFSTFKCYGVSPTKLNDLCFTNVYADSFVIRGDEVRQIAPGQTGKIADYNYKLPDDFTGCVIAWNSNNLDSKVGGNYNYLYRLFRKSNLKPFERDISTEIYQAGSTPCNGVEGFNCYFPLQSYGFQPTNGVGYQPYRVVVLSFELLHAPATVCGPKKSTNLVKNKCVNFNFNGLTGTGVLTESNKKFLPFQQFGRDIADTTDAVRDPQTLEILDITPCSFGGVSVITPGTNTSNQVAVLYQDVNCTEVPVAIHADQLTPTWRVYSTGSNVFQTRAGCLIGAEHVNNSYECDIPIGAGICASYQTQTNSPRRARSVASQSIIAYTMSLGAENSVAYSNNSIAIPTNFTISVTTEILPVSMTKTSVDCTMYICGDSTECSNLLLQYGSFCTQLNRALTGIAVEQDKNTQEVFAQVKQIYKTPPIKDFGGFNFSQILPDPSKPSKRSFIEDLLFNKVTLADAGFIKQYGDCLGDIAARDLICAQKFNGLTVLPPLLTDEMIAQYTSALLAGTITSGWWFGAGAALQIPFAMQMAYRFNGIGVTQNVLYENQKLIANQFNSAIGKIQDSLSSTASALGKLQDVVNQNAQALNTLVKQLSSNFGAISSVLNDILSRLDPPEAEVQIDRLITGRLQSLQTYVTQQLIRAAEIRWSANLAATKMSECVLGQSKRVDFCGKGYHLMSFPQSAPHGVVFLHVTYVPAQEKNFTTAPAICHDGKAHFPREGVFVSNGTHWFVTQRNFYEPQIITTDNTFVSGNCDVVIGIVNNTVYDPLQPELDS

SEQ ID NO: 2756 - protein, 1147 aa, Artificial Sequence
  SARS-CoV-2/Guangdong/20SF028/2020__EPI_ISL_403936 spike protein (1-1147)(K986P_V987P_T887W_A1020W)
MFVFLVLLPLVSSQCVNLTTRTQLPPAYTNSFTRGVYYPDKVFRSSVLYSTQDLFLPFFSNVTWFHAIHVSGTNGTKRFDNPVLPFNDGVYFASTEKSNIIRGWIFGTTLDSKTQSLLIVNNATNVVIKVCEFQFCNDPFLGVYYHKNNKSWMESEFRVYSSANNCTFEYVSQPFLMDLEGKQGNFKNLREFVFKNIDGYFKIYSKHTPINLVRDLPQGFSALEPLVDLPIGINITRFQTLLALHRSYLTPGDSSSGWTAGAAAYYVGYLQPRTFLLKYNENGTITDAVDCALDPLSETKCTLKSFTVEKGIYQTSNFRVQPTESIVRFPNITNLCPFGEVFNATRFASVYAWNRKRISNCVADYSVLYNSASFSTFKCYGVSPTKLNDLCFTNVYADSFVIRGDEVRQIAPGQTGKIADYNYKLPDDFTGCVIAWNSNNLDSKVGGNYNYLYRLFRKSNLKPFERDISTEIYQAGSTPCNGVEGFNCYFPLQSYGFQPTNGVGYQPYRVVVLSFELLHAPATVCGPKKSTNLVKNKCVNFNFNGLTGTGVLTESNKKFLPFQQFGRDIADTTDAVRDPQTLEILDITPCSFGGVSVITPGTNTSNQVAVLYQDVNCTEVPVAIHADQLTPTWRVYSTGSNVFQTRAGCLIGAEHVNNSYECDIPIGAGICASYQTQTNSPRRARSVASQSIIAYTMSLGAENSVAYSNNSIAIPTNFTISVTTEILPVSMTKTSVDCTMYICGDSTECSNLLLQYGSFCTQLNRALTGIAVEQDKNTQEVFAQVKQIYKTPPIKDFGGFNFSQILPDPSKPSKRSFIEDLLFNKVTLADAGFIKQYGDCLGDIAARDLICAQKFNGLTVLPPLLTDEMIAQYTSALLAGTITSGWWFGAGAALQIPFAMQMAYRFNGIGVTQNVLYENQKLIANQFNSAIGKIQDSLSSTASALGKLQDVVNQNAQALNTLVKQLSSNFGAISSVLNDILSRLDPPEAEVQIDRLITGRLQSLQTYVTQQLIRAAEIRWSANLAATKMSECVLGQSKRVDFCGKGYHLMSFPQSAPHGVVFLHVTYVPAQEKNFTTAPAICHDGKAHFPREGVFVSNGTHWFVTQRNFYEPQIITTDNTFVSGNCDVVIGIVNNTVYDPLQPELDS

SEQ ID NO: 2757 - protein, 1147 aa, Artificial Sequence
  SARS-CoV-2/Shenzhen/SZTH-001/2020__EPI_ISL_406592 spike protein (1-1147)(K986P_V987P_T887W_A1020W)
MFVFLVLLPLVSSQCVNLTTRTQLPPAYTNSFTRGVYYPDKVFRSSVLHSTQDLFLPFFSNVTWFHAIHVSGTNGTKRFDNPVLPFNDGVYFASTEKSNIIRGWIFGTTLDSKTQSLLIVNNATNVVIKVCEFQFCNDPFLGVYYHKNNKSWMESEFRVYSSANNCTFEYVSQPFLMDLEGKQGNFKNLREFVFKNIDGYFKIYSKHTPINLVRDLPQGFSALEPLVDLPIGINITRFQTLLALHRSYLTPGDSSSGWTAGAAAYYVGYLQPRTFLLKYNENGTITDAVDCALDPLSETKCTLKSFTVEKGIYQTSNFRVQPTESIVRFPNITNLCPFGEVFNATRFASVYAWNRKRISNCVADYSVLYNSASFSTFKCYGVSPTKLNDLCFTNVYADSFVIRGDEVRQIAPGQTGKIADYNYKLPDDFTGCVIAWNSNNLDSKVGGNYNYLYRLFRKSNLKPFERDISTEIYQAGSTPCNGVEGFNCYFPLQSYGFQPTNGVGYQPYRVVVLSFELLHAPATVCGPKKSTNLVKNKCVNFNFNGLTGTGVLTESNKKFLPFQQFGRDIADTTDAVRDPQTLEILDITPCSFGGVSVITPGTNTSNQVAVLYQDVNCTEVPVAIHADQLTPTWRVYSTGSNVFQTRAGCLIGAEHVNNSYECDIPIGAGICASYQTQTNSPRRARSVASQSIIAYTMSLGAENSVAYSNNSIAIPTNFTISVTTEILPVSMTKTSVDCTMYICGDSTECSNLLLQYGSFCTQLNRALTGIAVEQDKNTQEVFAQVKQIYKTPPIKDFGGFNFSQILPDPSKPSKRSFIEDLLFNKVTLADAGFIKQYGDCLGDIAARDLICAQKFNGLTVLPPLLTDEMIAQYTSALLAGTITSGWWFGAGAALQIPFAMQMAYRFNGIGVTQNVLYENQKLIANQFNSAIGKIQDSLSSTASALGKLQDVVNQNAQALNTLVKQLSSNFGAISSVLNDILSRLDPPEAEVQIDRLITGRLQSLQTYVTQQLIRAAEIRWSANLAATKMSECVLGQSKRVDFCGKGYHLMSFPQSAPHGVVFLHVTYVPAQEKNFTTAPAICHDGKAHFPREGVFVSNGTHWFVTQRNFYEPQIITTDNTFVSGNCDVLIGIVNNTVYDPLQPELDS

SEQ ID NO: 2758 - protein, 1147 aa, Artificial Sequence
  SARS-CoV-2/Shenzhen/SZTH-004/2020__EPI_ISL_406595 spike protein (1-1147)(K986P_V987P_T887W_A1020W)
MFVFLVLLPLVSSQCVNLTTRTQLPPAYTNSFTRGVYYPDKVFRSSVLHSTQDLFLPFFSNVTWFHAIHVSGTNGTKRFDNPVLPFNDGVYFASTEKSNIIRGWIFGTTLDSKTQSLLIVNNATNVVIKVCEFQFCNDPFLGVYYHKNNKSWMESEFRVYSSANNCTFEYVSQPFLMDLEGKQGNFKNLREFVFKNIDGYFKIYSKHTPINLVRDLPQGFSALEPLVDLPIGINITRFQTLLALHRSYLTPGDSSSGWTAGAAAYYVGYLQPRTFLLKYNENGTITDAVDCALDPLSETKCTLKSFTVEKGIYQTSNFRVQPTESIVRFPNITNLCPFGEVFNATRFASVYAWDRKRISNCVAYYSVLYNSASFSTFKCYGVSPTKLNDLCFTNVYADSFVIRGDEVRQIAPGQTGKIADYNYKLPDDFTGCVIAWNSNNLDSKVGGNYNYLYRLFRKSNLKPFERDISTEIYQAGSTPCNGVEGFNCYFPLQSYGFQPTNGVGYQPYRVVVLSFELLHAPATVCGPKKSTNLVKNKCVNFNFNGLTGTGVLTESNKKFLPFQQFGRDIADTTDAVRDPQTLEILDITPCSFGGVSVITPGTNTSNQVAVLYQDVNCTEVPVAIHADQLTPTWRVYSTGSNVFQTRAGCLIGAEHVNNSYECDIPIGAGICASYQTQTNSPRRARSVASQSIIAYTMSLGAENSVAYSNNSIAIPTNFTISVTTEILPVSMTKTSVDCTMYICGDSTECSNLLLQYGSFCTQLNRALTGIAVEQDKNTQEVFAQVKQIYKTPPIKDFGGFNFSQILPDPSKPSKRSFIEDLLFNKVTLADAGFIKQYGDCLGDIAARDLICAQKFNGLTVLPPLLTDEMIAQYTSALLAGTITSGWWFGAGAALQIPFAMQMAYRFNGIGVTQNVLYENQKLIANQFNSAIGKIQDSLSSTASALGKLQDVVNQNAQALNTLVKQLSSNFGAISSVLNDILSRLDPPEAEVQIDRLITGRLQSLQTYVTQQLIRAAEIRWSANLAATKMSECVLGQSKRVDFCGKGYHLMSFPQSAPHGVVFLHVTYVPAQEKNFTTAPAICHDGKAHFPREGVFVSNGTHWFVTQRNFYEPQIITTDNTFVSGNCDVVIGIVNNTVYDPLQPELDS

SEQ ID NO: 2759 - protein, 1147 aa, Artificial Sequence
  SARS-CoV-2/France/IDF0372/2020__EPI_ISL_406596 spike protein (1-1147)(K986P_V987P_T887W_A1020W)
MFVFLVLLPLVSSQCVNLTTRTQLPPAYTNSFTRGVYYPDKVFRSSVLHSTQDLFLPFFSNVTWFHAIHVSGTNGTKRFDNPVLPFNDGVYFASTEKSNIIRGWIFGTTLDSKTQSLLIVNNATNVVIKVCEFQFCNDPFLGVYYHKNNKSWMESEFRVYSSANNCTFEYVSQPFLMDLEGKQGNFKNLREFVFKNIDGYFKIYSKHTPINLVRDLPQGFSALEPLVDLPIGINITRFQTLLALHRSYLTPGDSSSGWTAGAAAYYVGYLQPRTFLLKYNENGTITDAVDCALDPLSETKCTLKSFTVEKGIYQTSNFRVQPTESIVRFPNITNLCPFGEVFNATRFASVYAWNRKRISNCVADYSFLYNSASFSTFKCYGVSPTKLNDLCFTNVYADSFVIRGDEVRQIAPGQTGKIADYNYKLPDDFTGCVIAWNSNNLDSKVGGNYNYLYRLFRKSNLKPFERDISTEIYQAGSTPCNGVEGFNCYFPLQSYGFQPTNGVGYQPYRVVVLSFELLHAPATVCGPKKSTNLVKNKCVNFNFNGLTGTGVLTESNKKFLPFQQFGRDIADTTDAVRDPQTLEILDITPCSFGGVSVITPGTNTSNQVAVLYQDVNCTEVPVAIHADQLTPTWRVYSTGSNVFQTRAGCLIGAEHVNNSYECDIPIGAGICASYQTQTNSPRRARSVASQSIIAYTMSLGAENSVAYSNNSIAIPTNFTISVTTEILPVSMTKTSVDCTMYICGDSTECSNLLLQYGSFCTQLNRALTGIAVEQDKNTQEVFAQVKQIYKTPPIKDFGGFNFSQILPDPSKPSKRSFIEDLLFNKVTLADAGFIKQYGDCLGDIAARDLICAQKFNGLTVLPPLLTDEMIAQYTSALLAGTITSGWWFGAGAALQIPFAMQMAYRFNGIGVTQNVLYENQKLIANQFNSAIGKIQDSLSSTASALGKLQDVVNQNAQALNTLVKQLSSNFGAISSVLNDILSRLDPPEAEVQIDRLITGRLQSLQTYVTQQLIRAAEIRWSANLAATKMSECVLGQSKRVDFCGKGYHLMSFPQSAPHGVVFLHVTYVPAQEKNFTTAPAICHDGKAHFPREGVFVSNGTHWFVTQRNFYEPQIITTDNTFVSGNCDVVIGIVNNTVYDPLQPELDS

SEQ ID NO: 2760 - protein, 1147 aa, Artificial Sequence
  SARS-CoV-2/Australia/VIC01/2020__EPI_ISL_406844 spike protein (1-1147)(K986P_V987P_T887W_A1020W)
MFVFLVLLPLVSSQCVNLTTRTQLPPAYTNSFTRGVYYPDKVFRSSVLHSTQDLFLPFFSNVTWFHAIHVSGTNGTKRFDNPVLPFNDGVYFASTEKSNIIRGWIFGTTLDSKTQSLLIVNNATNVVIKVCEFQFCNDPFLGVYYHKNNKSWMESEFRVYSSANNCTFEYVSQPFLMDLEGKQGNFKNLREFVFKNIDGYFKIYSKHTPINLVRDLPQGFSALEPLVDLPIGINITRFQTLLALHRRYLTPGDSSSGWTAGAAAYYVGYLQPRTFLLKYNENGTITDAVDCALDPLSETKCTLKSFTVEKGIYQTSNFRVQPTESIVRFPNITNLCPFGEVFNATRFASVYAWNRKRISNCVADYSVLYNSASFSTFKCYGVSPTKLNDLCFTNVYADSFVIRGDEVRQIAPGQTGKIADYNYKLPDDFTGCVIAWNSNNLDSKVGGNYNYLYRLFRKSNLKPFERDISTEIYQAGSTPCNGVEGFNCYFPLQSYGFQPTNGVGYQPYRVVVLSFELLHAPATVCGPKKSTNLVKNKCVNFNFNGLTGTGVLTESNKKFLPFQQFGRDIADTTDAVRDPQTLEILDITPCSFGGVSVITPGTNTSNQVAVLYQDVNCTEVPVAIHADQLTPTWRVYSTGSNVFQTRAGCLIGAEHVNNSYECDIPIGAGICASYQTQTNSPRRARSVASQSIIAYTMSLGAENSVAYSNNSIAIPTNFTISVTTEILPVSMTKTSVDCTMYICGDSTECSNLLLQYGSFCTQLNRALTGIAVEQDKNTQEVFAQVKQIYKTPPIKDFGGFNFSQILPDPSKPSKRSFIEDLLFNKVTLADAGFIKQYGDCLGDIAARDLICAQKFNGLTVLPPLLTDEMIAQYTSALLAGTITSGWWFGAGAALQIPFAMQMAYRFNGIGVTQNVLYENQKLIANQFNSAIGKIQDSLSSTASALGKLQDVVNQNAQALNTLVKQLSSNFGAISSVLNDILSRLDPPEAEVQIDRLITGRLQSLQTYVTQQLIRAAEIRWSANLAATKMSECVLGQSKRVDFCGKGYHLMSFPQSAPHGVVFLHVTYVPAQEKNFTTAPAICHDGKAHFPREGVFVSNGTHWFVTQRNFYEPQIITTDNTFVSGNCDVVIGIVNNTVYDPLQPELDS

SEQ ID NO: 2761 - protein, 1147 aa, Artificial Sequence
  SARS-CoV-2/Germany/BavPat1/2020__EPI_ISL_406862 spike protein (1-1147)(K986P_V987P_T887W_A1020W)
MFVFLVLLPLVSSQCVNLTTRTQLPPAYTNSFTRGVYYPDKVFRSSVLHSTQDLFLPFFSNVTWFHAIHVSGTNGTKRFDNPVLPFNDGVYFASTEKSNIIRGWIFGTTLDSKTQSLLIVNNATNVVIKVCEFQFCNDPFLGVYYHKNNKSWMESEFRVYSSANNCTFEYVSQPFLMDLEGKQGNFKNLREFVFKNIDGYFKIYSKHTPINLVRDLPQGFSALEPLVDLPIGINITRFQTLLALHRSYLTPGDSSSGWTAGAAAYYVGYLQPRTFLLKYNENGTITDAVDCALDPLSETKCTLKSFTVEKGIYQTSNFRVQPTESIVRFPNITNLCPFGEVFNATRFASVYAWNRKRISNCVADYSVLYNSASFSTFKCYGVSPTKLNDLCFTNVYADSFVIRGDEVRQIAPGQTGKIADYNYKLPDDFTGCVIAWNSNNLDSKVGGNYNYLYRLFRKSNLKPFERDISTEIYQAGSTPCNGVEGFNCYFPLQSYGFQPTNGVGYQPYRVVVLSFELLHAPATVCGPKKSTNLVKNKCVNFNFNGLTGTGVLTESNKKFLPFQQFGRDIADTTDAVRDPQTLEILDITPCSFGGVSVITPGTNTSNQVAVLYQGVNCTEVPVAIHADQLTPTWRVYSTGSNVFQTRAGCLIGAEHVNNSYECDIPIGAGICASYQTQTNSPRRARSVASQSIIAYTMSLGAENSVAYSNNSIAIPTNFTISVTTEILPVSMTKTSVDCTMYICGDSTECSNLLLQYGSFCTQLNRALTGIAVEQDKNTQEVFAQVKQIYKTPPIKDFGGFNFSQILPDPSKPSKRSFIEDLLFNKVTLADAGFIKQYGDCLGDIAARDLICAQKFNGLTVLPPLLTDEMIAQYTSALLAGTITSGWWFGAGAALQIPFAMQMAYRFNGIGVTQNVLYENQKLIANQFNSAIGKIQDSLSSTASALGKLQDVVNQNAQALNTLVKQLSSNFGAISSVLNDILSRLDPPEAEVQIDRLITGRLQSLQTYVTQQLIRAAEIRWSANLAATKMSECVLGQSKRVDFCGKGYHLMSFPQSAPHGVVFLHVTYVPAQEKNFTTAPAICHDGKAHFPREGVFVSNGTHWFVTQRNFYEPQIITTDNTFVSGNCDVVIGIVNNTVYDPLQPELDS

SEQ ID NO: 2762 - protein, 1147 aa, Artificial Sequence
  SARS-CoV-2/Wuhan/HBCDC-HB-02/2020__EPI_ISL_412978 spike protein (1-1147)(K986P_V987P_T887W_A1020W)
MFVFLVLLPLVSSQCVNLTTRTQLPPAYTNSFTRGVYYPDKVFRSSVLHSTQDLFLPFFSNVTWFHAIHVSGTNGTKRFDNPVLPFNDGVYFASTEKSNIIRGWIFGTTLDSKTQSLLIVNNATNVVIKVCEFQFCNDPFLGVYYHKNNKSWMESEFRVYSSANNCTFEYVSQPFLMDLEGKQGNFKNLREFVFKNIDGYFKIYSKHTPINLVRDLPQGFSALEPLVDLPIGINITRFQTLLALHRSYLTPGDSSSGWTAGAAAYYVGYLQPRTFLLKYNENGTITDAVDCALDPLSETKCTLKSFTVEKGIYQTSNFRVQPTESIVRFPNITNLCPFGEVFNATRFASVYAWNRKRISNCVADYSVLYNSASFSTFKCYGVSPTKLNDLCFTNVYADSFVIRGDEVRQIAPGQTGKIADYNYKLPDDFTGCVIAWNSNNLDSKVGGNYNYLYRLFRKSNLKPFERDISTEIYQAGSTPCNGVEGFNCYFPLQSYGFQPTNGVGYQPYRVVVLSFELLHAPATVCGPKKSTNLVKNKCVNFNFNGLTGTGVLTESNKKFLPFQQFGRDIADTTDAVRDPQTLEILDITPCSFGGVSVITPGTNTSNQVAVLYQDVNCTEVPVAIHADQLTPTWRVYSTGSNVFQTRAGCLIGAEHVNNSYECDIPIGAGICASYQTQTNSPRRARSVASQSIIAYTMSLGAENSVAYSNNSIAIPTNFTISVTTEILPVSMTKTSVDCTMYICGDSTECSNFLLQYGSFCTQLNRALTGIAVEQDKNTQEVFAQVKQIYKTPPIKDFGGFNFSQILPDPSKPSKRSFIEDLLFNKVTLADAGFIKQYGDCLGDIAARDLICAQKFNGLTVLPPLLTDEMIAQYTSALLAGTITSGWWFGAGAALQIPFAMQMAYRFNGIGVTQNVLYENQKLIANQFNSAIGKIQDSLSSTASALGKLQDVVNQNAQALNTLVKQLSSNFGAISSVLNDILSRLDPPEAEVQIDRLITGRLQSLQTYVTQQLIRAAEIRWSANLAATKMSECVLGQSKRVDFCGKGYHLMSFPQSAPHGVVFLHVTYVPAQEKNFTTAPAICHDGKAHFPREGVFVSNGTHWFVTQRNFYEPQIITTDNTFVSGNCDVVIGIVNNTVYDPLQPELDS

SEQ ID NO: 2763 - protein, 1147 aa, Artificial Sequence
  SARS-CoV-2/Australia/QLD02/2020__EPI_ISL_407896 spike protein (1-1147)(K986P_V987P_T887W_A1020W)
MFVFLVLLPLVSSQCVNLTTRTQLPPAYTNSFTRGVYYPDKVFRSSVLHSTQDLFLPFFSNVTWFHAIHVSGTNGTKRFDNPVLPFNDGVYFASTEKSNIIRGWIFGTTLDSKTQSLLIVNNATNVVIKVCEFQFCNDPFLGVYYHKNNKSWMESEFRVYSSANNCTFEYVSQPFLMDLEGKQGNFKNLREFVFKNIDGYFKIYSKHTPINLVRDLPQGFSALEPLVDLPIGINITRFQTLLALHRSYLTPGDSSSGWTAGAAAYYVGYLQPRTFLLKYNENGTITDAVDCALDPLSETKCTLKSFTVEKGIYQTSNFRVQPTESIVRFPNITNLCPFGEVFNATRFASVYAWNRKRISNCVADYSVLYNSASFSTFKCYGVSPTKLNDLCFTNVYADSFVIRGDEVRQIAPGQTGKIADYNYKLPDDFTGCVIAWNSNNLDSKVGGNYNYLYRLFRKSNLKPFERDISTEIYQAGSTPCNGVEGFNCYFPLQSYGFQPTNGVGYQPYRVVVLSFELLHAPATVCGPKKSTNLVKNKCVNFNFNGLTGTGVLTESNKKFLPFQQFGRDIADTTDAVRDPQTLEILDITPCSFGGVSVITPGTNTSNQVAVLYQDVNCTEVPVAIHADQLTPTWRVYSTGSNVFQTRAGCLIGAEHVNNSYECDIPIGAGICASYQTQTNSPRRARSVASQSIIAYTMSLGAENSVAYSNNSIAIPTNFTISVTTEILPVSMTKTSVDCTMYICGDSTECSNLLLQYGSFCTQLNRALTGIAVEQDKNTQEVFAQVKQIYKTPPIKDFGGFNFSQILPDPSKPSKRSFIEDLLFNKVTLADAGFIKQYGDCLGDIAARDLICAQKFNGLTVLPPLLTDEMIAQYTSALLAGTITSGWWFGAGAALQIPFAMQMAYRFNGIGVTQNVLYENQKLIANQFNSAIGKIQDSLSSTASALGKLQDVVNQNAQALNTLVKQLSSNFGAISSVLNDILSRLDPPEAEVQIDRLITGRLQSLQTYVTQQLIRAAEIRWSANLAATKMSECVLGQSKRVDFCGKGYHLMSFPQSAPHGVVFLHVTYVPAQEKNFTTAPAICHDGKAHFPREGVFVSNGTHWFVTQRNFYEPQIITTDNTFVSGNCDVVIGIVNNTVYDPLQLELDS

SEQ ID NO: 2764 - protein, 1147 aa, Artificial Sequence
  SARS-CoV-2/India/1-31/2020__EPI_ISL_413523 spike protein (1-1147)(K986P_V987P_T887W_A1020W)
MFVFLVLLPLVSSQCVNLTTRTQLPPAYTNSFTRGVYYPDKVFRSSVLHSTQDLFLPFFSNVTWFHAIHVSGTNGTKRFDNPVLPFNDGVYFASTEKSNIIRGWIFGTTLDSKTQSLLIVNNATNVVIKVCEFQFCNDPFLGVYYHKNNKSWMESEFRVYSSANNCTFEYVSQPFLMDLEGKQGNFKNLREFVFKNIDGYFKIYSKHTPINLVRDLPQGFSALEPLVDLPIGINITRFQTLLALHRSYLTPGDSSSGWTAGAAAYYVGYLQPRTFLLKYNENGTITDAVDCALDPLSETKCTLKSFTVEKGIYQTSNFRVQPTESIVRFPNITNLCPFGEVFNATRFASVYAWNRKRISNCVADYSVLYNSASFSTFKCYGVSPTKLNDLCFTNVYADSFVIRGDEVRQIAPGQTGKIADYNYKLPDDFTGCVIAWNSNNLDSKVGGNYNYLYRLFRKSNLKPFERDISTEIYQAGSTPCNGVEGFNCYFPLQSYGFQPTNGVGYQPYRVVVLSFELLHAPATVCGPKKSTNLVKNKCVNFNFNGLTGTGVLTESNKKFLPFQQFGRDIADTTDAVRDPQTLEILDITPCSFGGVSVITPGTNTSNQVAVLYQDVNCTEVPVAIHADQLTPTWRVYSTGSNVFQTRAGCLIGAEHVNNSYECDIPIGAGICASYQTQTNSPRRARSVASQSIIAYTMSLGAENSVAYSNNSIAIPTNFTISVTTEILPVSMTKTSVDCTMYICGDSTECSNLLLQYGSFCTQLNRALTGIAVEQDKNTQEVFAQVKQIYKTPPIKDFGGFNFSQILPDPSKPSKRSFIEDLLFNKVTLADAGFIKQYGDCLGDIAARDLICAQKFNGLTVLPPLLTDEMIAQYTSALLAGTITSGWWFGAGAALQIPFAMQMAYRFNGIGVTQNVLYENQKLIANQFNSVIGKIQDSLSSTASALGKLQDVVNQNAQALNTLVKQLSSNFGAISSVLNDILSRLDPPEAEVQIDRLITGRLQSLQTYVTQQLIRAAEIRWSANLAATKMSECVLGQSKRVDFCGKGYHLMSFPQSAPHGVVFLHVTYVPAQEKNFTTAPAICHDGKAHFPREGVFVSNGTHWFVTQRNFYEPQIITTDNTFVSGNCDVVIGIVNNTVYDPLQPELDS

SEQ ID NO: 2765 - protein, 1147 aa, Artificial Sequence
  SARS-CoV-2/Guangdong/GD2020087-P0008/2020__EPI_ISL_413863 spike protein (1-1147)(K986P_V987P_T887W_A1020W)
MFVFLVLLPLVSSQCVNLTTRTQLPPAYTNSFTRGVYYPDKVFRSSVLHSTQDLFLPFFSNVTWFHAIHVSGTNGTKRFDNPVLPFNDGVYFASTEKSNIIRGWIFGTTLDSKTQSLLIVNNATNVVIKVCEFQFCNDPFLGVYYHKNNKSWMESEFRVYSSANNCTFEYVSQPFLMDLEGKQGNFKNLREFVFKNIDGYFKIYSKHTPINLVRDLPQGFSALEPLVDLPIGINITRFQTLLALHRSYLTPGDSSSGWTAGAAAYYVGYLQPRTFLLKYNENGTITDAVDCALDPLSETKCTLKSFTVEKGIYQTSNFRVQPTESIVRFPNITNLCPFGEVFNATRFASVYAWNRKRISNCVADYSVLYNSASFSTFKCYGVSPTKLNDLCFTNVYADSFVIRGDEVREIAPGQTGKIADYNYKLPDDFTGCVIAWNSNNLDSKVGGNYNYLYRLFRKSNLKPFERDISTEIYQAGSTPCNGVEGFNCYFPLQSYGFQPTNGVGYQPYRVVVLSFELLHAPATVCGPKKSTNLVKNKCVNFNFNGLTGTGVLTESNKKFLPFQQFGRDIADTTDAVRDPQTLEILDITPCSFGGVSVITPGTNTSNQVAVLYQDVNCTEVPVAIHADQLTPTWRVYSTGSNVFQTRAGCLIGAEHVNNSYECDIPIGAGICASYQTQTNSPRRARSVASQSIIAYTMSLGAENSVAYSNNSIAIPTNFTISVTTEILPVSMTKTSVDCTMYICGDSTECSNLLLQYGSFCTQLNRALTGIAVEQDKNTQEVFAQVKQIYKTPPIKDFGGFNFSQILPDPSKPSKRSFIEDLLFNKVTLADAGFIKQYGDCLGDIAARDLICAQKFNGLTVLPPLLTDEMIAQYTSALLAGTITSGWWFGAGAALQIPFAMQMAYRFNGIGVTQNVLYENQKLIANQFNSAIGKIQDSLSSTASALGKLQDVVNQNAQALNTLVKQLSSNFGAISSVLNDILSRLDPPEAEVQIDRLITGRLQSLQTYVTQQLIRAAEIRWSANLAATKMSECVLGQSKRVDFCGKGYHLMSFPQSAPHGVVFLHVTYVPAQEKNFTTAPAICHDGKAHFPREGVFVSNGTHWFVTQRNFYEPQIITTDNTFVSGNCDVVIGIVNNTVYDPLQPELDS

SEQ ID NO: 2766 - protein, 1147 aa, Artificial Sequence
  SARS-CoV-2/Sweden/01/2020__EPI_ISL_411951 spike protein (1-1147)(K986P_V987P_T887W_A1020W)
MFVFLVLLPLVSSQCVNLTTRTQLPPAYTNSFTRGVYYPDKVFRSSVLHSTQDLFLPFFSNVTWFHAIHVSGTNGTKRFDNPVLPFNDGVYFASTEKSNIIRGWIFGTTLDSKTQSLLIVNNATNVVIKVCEFQFCNDPFLGVYYHKNNKSWMESEFRVYSSANNCTFEYVSQPFLMDLEGKQGNFKNLREFVFKNIDGYFKIYSKHTPINLVRDLPQGFSALEPLVDLPIGINITRFQTLLALHRSYLTPGDSSSGWTAGAAAYYVGYLQPRTFLLKYNENGTITDAVDCALDPLSETKCTLKSFTVEKGIYQTSNFRVQPTESIVRFPNITNLCPFGEVFNATRFASVYAWNRKRISNCVADYSVLYNSASFSTFKCYGVSPTKLNDLCFTNVYADSFVIRGDEVRQIAPGQTGKIADYNYKLPDDFTGCVIAWNSNNLDSKVGGNYNYLYRLFRKSNLKPFERDISTEIYQAGSTPCNGVEGFNCYFPLQSYGFQPTNGVGYQPYRVVVLSFELLHAPATVCGPKKSTNLVKNKCVNFNFNGLTGTGVLTESNKKFLPFQQFGRDIADTTDAVRDPQTLEILDITPCSFGGVSVITPGTNTSNQVAVLYQDVNCTEVPVAIHADQLTPTWRVYSTGSNVFQTRAGCLIGAEHVNNSYECDIPIGAGICASYQTQTNSPRRARSVASQSIIAYTMSLGAENSVAYSNNSIAIPTNFTISVTTEILPVSMTKTSVDCTMYICGDSTECSNLLLQYGSFCTQLNRALTGIAVEQDKNTQEVFAQVKQIYKTPPIKDCGGFNFSQILPDPSKPSKRSFIEDLLFNKVTLADAGFIKQYGDCLGDIAARDLICAQKFNGLTVLPPLLTDEMIAQYTSALLAGTITSGWWFGAGAALQIPFAMQMAYRFNGIGVTQNVLYENQKLIANQFNSAIGKIQDSLSSTASALGKLQDVVNQNAQALNTLVKQLSSNFGAISSVLNDILSRLDPPEAEVQIDRLITGRLQSLQTYVTQQLIRAAEIRWSANLAATKMSECVLGQSKRVDFCGKGYHLMSFPQSAPHGVVFLHVTYVPAQEKNFTTAPAICHDGKAHFPREGVFVSNGTHWFVTQRNFYEPQIITTDNTFVSGNCDVVIGIVNNTVYDPLQPELDS

SEQ ID NO: 2767 - protein, 1147 aa, Artificial Sequence
  SARS-CoV-2/Tianmen/HBCDC-HB-07/2020__EPI_ISL_412983 spike protein (1-1147)(K986P_V987P_T887W_A1020W)
MFVFLVLLPLVSSQCVNLTTRTQLPPAYTNSFTRGVYYPDKVFRSSVLHSTQDLFLPFFSNVTWFHAIHVSGTNGTKRFDNPVLPFNDGVYFASTEKSNIIRGWIFGTTLDSKTQSLLIVNNATNVVIKVCEFQFCNDPFLGVYYHKNNKSWMESEFRVYSSANNCTFEYVSQPFLMDLEGKQGNFKNLREFVFKNIDGYFKIYSKHTPINLVRDLPQGFSALEPLVDLPIGINITRFQTLLALHRSYLTPGDSSSGWTAGAAAYYVGYLQPRTFLLKYNENGTITDAVDCALDPLSETKCTLKSFTVEKGIYQTSNFRVQPTESIVRFPNITNLCPFGEVFNATRFASVYAWNRKRISNCVADYSVLYNSASFSTFKCYGVSPTKLNDLCFTNVYADSFVIRGDEVRQIAPGQTGKIADYNYKLPDDFTGCVIAWNSNNLDSKVGGNYNYLYRLFRKSNLKPFERDISTEIYQAGSTPCNGVEGFNCYFPLQSYGFQPTNGVGYQPYRVVVLSFELLHAPATVCGPKKSTNLVKNKCVNFNFNGLTGTGVLTESNKKFLPFQQFGRDIADTTDAVRDPQTLEILDITPCSFGGVSVITPGTNTSNQVAVLYQDLNCTEVPVAIHADQLTPTWRVYSTGSNVFQTRAGCLIGAEHVNNSYECDIPIGAGICASYQTQTNSPRRARSVASQSIIAYTMSLGAENSVAYSNNSIAIPTNFTISVTTEILPVSMTKTSVDCTMYICGDSTECSNLLLQYGSFCTQLNRALTGIAVEQDKNTQEVFAQVKQIYKTPPIKDFGGFNFSQILPDPSKPSKRSFIEDLLFNKVTLADAGFIKQYGDCLGDIAARDLICAQKFNGLTVLPPLLTDEMIAQYTSALLAGTITSGWWFGAGAALQIPFAMQMAYRFNGIGVTQNVLYENQKLIANQFNSAIGKIQDSLSSTASALGKLQDVVNQNAQALNTLVKQLSSNFGAISSVLNDILSRLDPPEAEVQIDRLITGRLQSLQTYVTQQLIRAAEIRWSANLAATKMSECVLGQSKRVDFCGKGYHLMSFPQSAPHGVVFLHVTYVPAQEKNFTTAPAICHDGKAHFPREGVFVSNGTHWFVTQRNFYEPQIITTDNTFVSGNCDVVIGIVNNTVYDPLQPELDS

SEQ ID NO: 2768 - protein, 1147 aa, Artificial Sequence
  SARS-CoV-2/Hong Kong/case42_VM20002493/2020__EPI_ISL_414527 spike protein (1-1147)(K986P_V987P_T887W_A1020W)
MFVFLVLLPLVSSQCVNLTTRTQLPPAYTNSFTRGVYYPDKVFRSSVLHSTQDLFLPFFSNVTWFHAIHVSGTNGTKRFDNPVLPFNDGVYFASTEKSNIIRGWIFGTTLDSKTQSLLIVNNATNVVIKVCEFQFCNDPFLGVYYHKNNKSWMESEFRVYSSANNCTFEYVSQPFLMDLEGKQGNFKNLREFVFKNIDGYFKIYSKHTPINLVRDLPQGFSALEPLVDLPIGINITRFQTLLALHRSYLTPGDSSSGWTAGAAAYYVGYLQPRTFLLKYNENGTITDAVDCALDPLSETKCTLKSFTVEKGIYQTSNFRVQPTESIVRFPNITNLCPFGEVFNATRFASVYAWNRKRISNCVADYSVLYNSASFSTFKCYGVSPTKLNDLCFTNVYADSFVIRGDEVRQIAPGQTGKIADYNYKLPDDFTGCVIAWNSNNLDSKVGGNYNYLYRLFRKSNLKPFERDISTEIYQAGSTPCNGVEGFNCYFPLQSYGFQPTNGVGYQPYRVVVLSFELLHAPATVCGPKKSTNLVKNKCVNFNFNGLTGTGVLTESNKKFLPFQQFGRDIADTTDAVRDPQTLEILDITPCSFGGVSVITPGTNTSNQVAVLYQDVNCTEVPVAIHADQLTPTWRVYSTGSNVFQTRAGCLIGAEHVNNSYECDIPIGAGICASYQTQTNSPRRARSVASQSIIAYTMSLGAENSVAYSNNSIAIPTNFAISVTTEILPVSMTKTSVDCTMYICGDSTECSNLLLQYGSFCTQLNRALTGIAVEQDKNTQEVFAQVKQIYKTPPIKDFGGFNFSQILPDPSKPSKRSFIEDLLFNKVTLADAGFIKQYGDCLGDIAARDLICAQKFNGLTVLPPLLTDEMIAQYTSALLAGTITSGWWFGAGAALQIPFAMQMAYRFNGIGVTQNVLYENQKLIANQFNSAIGKIQDSLSSTASALGKLQDVVNQNAQALNTLVKQLSSNFGAISSVLNDILSRLDPPEAEVQIDRLITGRLQSLQTYVTQQLIRAAEIRWSANLAATKMSECVLGQSKRVDFCGKGYHLMSFPQSAPHGVVFLHVTYVPAQEKNFTTAPAICHDGKAHFPREGVFVSNGTHWFVTQRNFYEPQIITTDNTFVSGNCDVVIGIVNNTVYDPLQPELDS

SEQ ID NO: 2769 - protein, 1147 aa, Artificial Sequence
  SARS-CoV-2/USA/CruiseA-23/2020__EPI_ISL_414482 spike protein (1-1147)(K986P_V987P_T887W_A1020W)
MFVFLVLLPLVSSQCVNLTTRTQLPPAYTNSFTRGVYYPDKVFRSSVLHSTQDLFLPFFSNVTWFHAIHVSGTNGTKRFDNPVLPFNDGVYFASTEKSNIIRGWIFGTTLDSKTQSLLIVNNATNVVIKVCEFQFCNDPFLGVYYHKNNKSWMESEFRVYSSANNCTFEYVSQPFLMDLEVKQGNFKNLREFVFKNIDGYFKIYSKHTPINLVRDLPQGFSALEPLVDLPIGINITRFQTLLALHRSYLTPGDSSSGWTAGAAAYYVGYLQPRTFLLKYNENGTITDAVDCALDPLSETKCTLKSFTVEKGIYQTSNFRVQPTESIVRFPNITNLCPFGEVFNATRFASVYAWNRKRISNCVADYSVLYNSASFSTFKCYGVSPTKLNDLCFTNVYADSFVIRGDEVRQIAPGQTGKIADYNYKLPDDFTGCVIAWNSNNLDSKVGGNYNYLYRLFRKSNLKPFERDISTEIYQAGSTPCNGVEGFNCYFPLQSYGFQPTNGVGYQPYRVVVLSFELLHAPATVCGPKKSTNLVKNKCVNFNFNGLTGTGVLTESNKKFLPFQQFGRDIADTTDAVRDPQTLEILDITPCSFGGVSVITPGTNTSNQVAVLYQDVNCTEVPVAIHADQLTPTWRVYSTGSNVFQTRAGCLIGAEHVNNSYECDIPIGAGICASYQTQTNSPRRARSVASQSIIAYTMSLGAENSVAYSNNSIAIPTNFTISVTTEILPVSMTKTSVDCTMYICGDSTECSNLLLQYGSFCTQLNRALTGIAVEQDKNTQEVFAQVKQIYKTPPIKDFGGFNFSQILPDPSKPSKRSFIEDLLFNKVTLADAGFIKQYGDCLGDIAARDLICAQKFNGLTVLPPLLTDEMIAQYTSALLAGTITSGWWFGAGAALQIPFAMQMAYRFNGIGVTQNVLYENQKLIANQFNSAIGKIQDSLSSTASALGKLQDVVNQNAQALNTLVKQLSSNFGAISSVLNDILSRLDPPEAEVQIDRLITGRLQSLQTYVTQQLIRAAEIRWSANLAATKMSECVLGQSKRVDFCGKGYHLMSFPQSAPHGVVFLHVTYVPAQEKNFTTAPAICHDGKAHFPREGVFVSNGTHWFVTQRNFYEPQIITTDNTFVSGNCDVVIGIVNNTVYDPLQPELDS

SEQ ID NO: 2770 - protein, 1147 aa, Artificial Sequence
  SARS-CoV-2/Hong Kong/case85_VM20002868/2020__EPI_ISL_414519 spike protein (1-1147)(K986P_V987P_T887W_A1020W)
MFVFLVLVPLVSSQCVNLTTRTQLPPAYTNSFTRGVYYPDKVFRSSVLHSTQDLFLPFFSNVTWFHAIHVSGTNGTKRFDNPVLPFNDGVYFASTEKSNIIRGWIFGTTLDSKTQSLLIVNNATNVVIKVCEFQFCNDPFLGVYYHKNNKSWMESEFRVYSSANNCTFEYVSQPFLMDLEGKQGNFKNLREFVFKNIDGYFKIYSKHTPINLVRDLPQGFSALEPLVDLPIGINITRFQTLLALHRSYLTPGDSSSGWTAGAAAYYVGYLQPRTFLLKYNENGTITDAVDCALDPLSETKCTLKSFTVEKGIYQTSNFRVQPTESIVRFPNITNLCPFGEVFNATRFASVYAWNRKRISNCVADYSVLYNSASFSTFKCYGVSPTKLNDLCFTNVYADSFVIRGDEVRQIAPGQTGKIADYNYKLPDDFTGCVIAWNSNNLDSKVGGNYNYLYRLFRKSNLKPFERDISTEIYQAGSTPCNGVEGFNCYFPLQSYGFQPTNGVGYQPYRVVVLSFELLHAPATVCGPKKSTNLVKNKCVNFNFNGLTGTGVLTESNKKFLPFQQFGRDIADTTDAVRDPQTLEILDITPCSFGGVSVITPGTNTSNQVAVLYQDVNCTEVPVAIHADQLTPTWRVYSTGSNVFQTRAGCLIGAEHVNNSYECDIPIGAGICASYQTQTNSPRRARSVASQSIIAYTMSLGAENSVAYSNNSIAIPTNFTISVTTEILPVSMTKTSVDCTMYICGDSTECSNLLLQYGSFCTQLNRALTGIAVEQDKNTQEVFAQVKQIYKTPPIKDFGGFNFSQILPDPSKPSKRSFIEDLLFNKVTLADAGFIKQYGDCLGDIAARDLICAQKFNGLTVLPPLLTDEMIAQYTSALLAGTITSGWWFGAGAALQIPFAMQMAYRFNGIGVTQNVLYENQKLIANQFNSAIGKIQDSLSSTASALGKLQDVVNQNAQALNTLVKQLSSNFGAISSVLNDILSRLDPPEAEVQIDRLITGRLQSLQTYVTQQLIRAAEIRWSANLAATKMSECVLGQSKRVDFCGKGYHLMSFPQSAPHGVVFLHVTYVPAQEKNFTTAPAICHDGKAHFPREGVFVSNGTHWFVTQRNFYEPQIITTDNTFVSGNCDVVIGIVNNTVYDPLQPELDS

SEQ ID NO: 2771 - protein, 1147 aa, Artificial Sequence; identical to SEQ ID NO: 2761
  SARS-CoV-2/England/200990660/2020__EPI_ISL_414523 spike protein (1-1147)(K986P_V987P_T887W_A1020W)

SEQ ID NO: 2772 - protein, 1147 aa, Artificial Sequence
  SARS-CoV-2/Australia/NSW09/2020__EPI_ISL_413595 spike protein (1-1147)(K986P_V987P_T887W_A1020W)
MFVFLVLLPLVSSQCVNLTTRTQLPPAYTNSFTRGVYYPDKVFRSSVLHSTQDLFLPFFSNVTWFHAIHVSGTNGTKRFDNPVLPFNDGVYFASTEKSNIIRGWIFGTTLDSKTQSLLIVNNATNVVIKVCEFQFCNDPFLGVYYHKNNKSWMESEFRVYSSANNCTFEYVSQPFLMDLEGKQGNFKNLREFVFKNIDGYFKIYSKHTPINLVRDLPQGFSALEPLVDLPIGINITRFQTLLALHRSYLTPGDSSSGWTAGAAAYYVGYLQPRTFLLKYNENGTITDAVDCALDPLSETKCTLKSFTVEKGIYQTSNFRVQPTESIVRFPNITNLCPFGEVFNATRFASVYAWNRKRISNCVADYSVLYNSASFSTFKCYGVSPTKLNDLCFTNVYADSFVIRGDEVRQIAPGQTGKIADYNYKLPDDFTGCVIAWNSNNLDSKVGGNYNYLYRLFRKSNLKPFERDISTEIYQAGSTPCNGVEGFNCYFPLQSYGFQPTNGVGYQPYRVVVLSFELLHAPATVCGPKKSTNLVKNKCVNFNFNGLTGTGVLTESNKKFLPFQQFGRDIADTTDAVRDPQTLEILDITPCSFGGVSVITPGTNTSNQVAVLYQDVNCTEVPVAIHADQLTPTWRVYSTGSNVFQTRAGCLIGAEHVNNSYECDIPIGAGICASYQTQTNSPRRARSVASQSIIAYTMSLGAENSVAYSNNSIAIPTNFTISVTTEILPVSMTKTSVDCTMYICGDSTECSNLLLQYGSFCTQLNRALTGIAVEQDKNTQEVFAQVKQIYKTPPIKDFGGFNFSQILPDPSKPSKRSFIEDLLFNKVTLADAGFIKQYGDCLGDIAARDLICAQKFNGLTVLPPLLTDEMIAQYTSALLAGTITSGWWFGAGAALQIPFAMQMAYRFNGIGVTQNVLYENQKLIANQFNSAIGKIQDSLSFTASALGKLQDVVNQNAQALNTLVKQLSSNFGAISSVLNDILSRLDPPEAEVQIDRLITGRLQSLQTYVTQQLIRAAEIRWSANLAATKMSECVLGQSKRVDFCGKGYHLMSFPQSAPHGVVFLHVTYVPAQEKNFTTAPAICHDGKAHFPREGVFVSNGTHWFVTQRNFYEPQIITTDNTFVSGNCDVVIGIVNNTVYDPLQPELDS

SEQ ID NO: 2773 - protein, 1147 aa, Artificial Sequence; identical to SEQ ID NO: 2753
  SARS-CoV-2/Australia/NSW10/2020__EPI_ISL_413596 spike protein (1-1147)(K986P_V987P_T887W_A1020W)

SEQ ID NO: 2774 - protein, 1147 aa, Artificial Sequence
  SARS-CoV-2/Switzerland/1000477797/2020__EPI_ISL_413023 spike protein (1-1147)(K986P_V987P_T887W_A1020W)
MFVFLVLLPLVSSQCVNLTTRTQLPPAYTNSFTRGVYYPDKVFRSSVLHSTQDLFLPFFSNVTWFHAIHVSGTNGTKRFDNPVLPFNDGVYFASTEKSNIIRGWIFGTTLDSKTQSLLIVNNATNVVIKVCEFQFCNDPFLGVYYHKNNKSWMESEFRVYSSANNCTFEYVSQPFLMDLEGKQGNFKNLREFVFKNIDGYFNIYSKHTPINLVRDLPQGFSALEPLVDLPIGINITRFQTLLALHRSYLTPGDSSSGWTAGAAAYYVGYLQPRTFLLKYNENGTITDAVDCALDPLSETKCTLKSFTVEKGIYQTSNFRVQPTESIVRFPNITNLCPFGEVFNATRFASVYAWNRKRISNCVADYSVLYNSASFSTFKCYGVSPTKLNDLCFTNVYADSFVIRGDEVRQIAPGQTGKIADYNYKLPDDFTGCVIAWNSNNLDSKVGGNYNYLYRLFRKSNLKPFERDISTEIYQAGSTPCNGVEGFNCYFPLQSYGFQPTNGVGYQPYRVVVLSFELLHAPATVCGPKKSTNLVKNKCVNFNFNGLTGTGVLTESNKKFLPFQQFGRDIADTTDAVRDPQTLEILDITPCSFGGVSVITPGTNTSNQVAVLYQGVNCTEVPVAIHADQLTPTWRVYSTGSNVFQTRAGCLIGAEHVNNSYECDIPIGAGICASYQTQTNSPRRARSVASQSIIAYTMSLGAENSVAYSNNSIAIPTNFTISVTTEILPVSMTKTSVDCTMYICGDSTECSNLLLQYGSFCTQLNRALTGIAVEQDKNTQEVFAQVKQIYKTPPIKDFGGFNFSQILPDPSKPSKRSFIEDLLFNKVTLADAGFIKQYGDCLGDIAARDLICAQKFNGLTVLPPLLTDEMIAQYTSALLAGTITSGWWFGAGAALQIPFAMQMAYRFNGIGVTQNVLYENQKLIANQFNSAIGKIQDSLSSTASALGKLQDVVNQNAQALNTLVKQLSSNFGAISSVLNDILSRLDPPEAEVQIDRLITGRLQSLQTYVTQQLIRAAEIRWSANLAATKMSECVLGQSKRVDFCGKGYHLMSFPQSAPHGVVFLHVTYVPAQEKNFTTAPAICHDGKAHFPREGVFVSNGTHWFVTQRNFYEPQIITTDNTFVSGNCDVVIGIVNNTVYDPLQPELDS

SEQ ID NO: 2775 - protein, 1147 aa, Artificial Sequence
  SARS-CoV-2/Belgium/BA-02291/2020__EPI_ISL_415159 spike protein (1-1147)(K986P_V987P_T887W_A1020W)
MFVFLVLLPLVSSQCVNLTTRTQLPPAYTNSFTRGVYYPDKVFRSSVLHSTQDLFLPFFSNVTWFHAIHVSGTNGTKRFDNPVLPFNDGVYFASTEKSNIIRGWIFGTTLDSKTQSLLIVNNATNVVIKVCEFQFCNDPFLGVYYHKNNKSWMESEFRVYSSANNCTFEYVSQPFLMDLEGKQGNFKNLREFVFKNIDGYFKIYSKHTPINLVRDLPQGFSALEPLVDLPIGINITRFQTLLALHRSYLTPGDSSSGWTAGAAAYYVGYLQPRTFLLKYNENGTITDAVDCALDPLSETKCTLKSFTVEKGIYQTSNFRVQPTESIVRFPNITNLCPFGEVFNATRFASVYAWNRKRISNCVADYSVLYNSASFSTFKCYGVSPTKLNDLCFTNVYADSFVIRGDEVRQIAPGQTGKIADYNYKLPDDFTGCVIAWNSNNLDSKVGGNYNYLYRLFRRSNLKPFERDISTEIYQAGSTPCNGVEGFNCYFPLQSYGFQPTNGVGYQPYRVVVLSFELLPAPATVCGPKKSTNLVKNKCVNFNFNGLTGTGVLTESNKKFLPFQQFGRDIADTTDAVRDPQTLEILDITPCSFGGVSVITPGTNTSNQVAVLYQGVNCTEVPVAIHADQLTPTWRVYSTGSNVFQTRAGCLIGAEHVNNSYECDIPIGAGICASYQTQTNSPRRARSVASQSIIAYTMSLGAENSVAYSNNSIAIPTNFTISVTTEILPVSMTKTSVDCTMYICGDSTECSNLLLQYGSFCTQLNRALTGIAVEQDKNTQEVFAQVKQIYKTPPIKDFGGFNFSQILPDPSKPSKRSFIEDLLFNKVTLADAGFIKQYGDCLGDIAARDLICAQKFNGLTVLPPLLTDEMIAQYTSALLAGTITSGWWFGAGAALQIPFAMQMAYRFNGIGVTQNVLYENQKLIANQFNSAIGKIQDSLSSAAPALGKLQDVVNQNAQALNTLVKQLSSNFGAISSVLNDILSRLDPPEAEVQIDRLITGRLQSLQTYVTQQLIRAAEIRWSANLAATKMSECVLGQSKRVDFCGKGYHLMSFPQSAPHGVVFLHVTYVPAQEKNFTTAPAICHDGKAHFPREGVFVSNGTHWFVTQRNFYEPQIITTDNTFVSGNCDVVIGIVNNTVYDPLQPELDS

SEQ ID NO: 2776 - protein, 1147 aa, Artificial Sequence
  SARS-CoV-2/USA/WA8-UW5/2020__EPI_ISL_413486 spike protein (1-1147)(K986P_V987P_T887W_A1020W)
MFVFLVLLPLVSSQCVNLTTRTQLPPAYTNSFTRGVYYPDKVFRSSVLHSTQDLFLPFFSNVTWFHAIHVSGTNGTKRFDNPVLPFNDGVYFASTEKSNIIRGWIFGTTLDSKTQSLLIVNNATNVVIKVCEFQFCNDPFLGVYYHKNNKSWMESEFRVYSSANNCTFEYVSQPFLMDLEGKQGNFKNLREFVFKNIDGYFKIYSKHTPINLVRDLPQGFSALEPLVDLPIGINITRFQTLLALHRSYLTPGDSSSGWTAGAAAYYVGYLQPRTFLLKYNENGTITDAVDCALDPLSETKCTLKSFTVEKGIYQTSNFRVQPTESIVRFPNITNLCPFGEVFNATRFASVYAWNRKRISNCVADYSVLYNSASFSTFKCYGVSPTKLNDLCFTNVYADSFVIRGDEVRQIAPGQTGKIADYNYKLPDDFTGCVIAWNSNNLDSKVGGNYNYLYRLFRKSNLKPFERDISTEIYQAGSTPCNGVEGFNCYFPLQSYGFQPTNGVGYQPYRVVVLSFELLHAPATVCGPKKSTNLVKNKCVNFNFNGLTGTGVLTESNKKFLPFQQFGRDIADTTDAVRDPQTLEILDITPCSFGGVSVITPGTNTSNQVAVLYQDVNCTEVPVAIHADQLTPTWRVYSTGSNVFQTRAGCLIGAEYVNNSYECDIPIGAGICASYQTQTNSPRRARSVASQSIIAYTMSLGAENSVAYSNNSIAIPTNFTISVTTEILPVSMTKTSVDCTMYICGDSTECSNLLLQYGSFCTQLNRALTGIAVEQDKNTQEVFAQVKQIYKTPPIKDFGGFNFSQILPDPSKPSKRSFIEDLLFNKVTLADAGFIKQYGDCLGDIAARDLICAQKFNGLTVLPPLLTDEMIAQYTSALLAGTITSGWWFGAGAALQIPFAMQMAYRFNGIGVTQNVLYENQKLIANQFNSAIGKIQDSLSSTASALGKLQDVVNQNAQALNTLVKQLSSNFGAISSVLNDILSRLDPPEAEVQIDRLITGRLQSLQTYVTQQLIRAAEIRWSANLAATKMSECVLGQSKRVDFCGKGYHLMSFPQSAPHGVVFLHVTYVPAQEKNFTTAPAICHDGKAHFPREGVFVSNGTHWFVTQRNFYEPQIITTDNTFVSGNCDVVIGIVNNTVYDPLQPELDS

SEQ ID NO: 2777 - protein, 1147 aa, Artificial Sequence
  SARS-CoV-2/England/20102000506/2020__EPI_ISL_415147 spike protein (1-1147)(K986P_V987P_T887W_A1020W)
MFVFLVLLPLVSSQCVNLTTRTQLPPAYTNSFTRGVYYPDKVFRSSVLHSTQDLFLPFFSNVTWFHAIHVSGTNGTKRFDNPVLPFNDGVYFASTEKSNIIRGWIFGTTLDSKTQSLLIVNNATNVVIKVCEFQFCNDPFLGVYYHKNNKSWMESEFRVYSSANNCTFEYVSQPFLMDLEGKQGNFKNLREFVFKNIDGYFKIYSKHTPINLVRDLPQGFSALEPLVDLPIGINITRFQTLLALHRSYLTPGDSSSGWTAGAAAYYVGYLQPRTFLLKYNENGTITDAVDCALDPLSETKCTLKSFTVEKGIYQTSNFRVQPTESIVRFPNITNLCPFGEVFNATRFASVYAWNRKRISNCVADYSVLYNSASFSTFKCYGVSPTKLNDLCFTNVYADSFVIRGDEVRQIAPGQTGKIADYNYKLPDDFTGCVIAWNSNNLDSKVGGNYNYLYRLFRKSNLKPFERDISTEIYQAGSTPCNGVEGFNCYFPLQSYGFQPTNGVGYQPYRVVVLSFELLHAPATVCGPKKSTNLVKNKCVNFNFNGLTGTGVLTESNKKFLPFQQFGRDIADTTDAVRDPQTLEILDITPCSFGGVSVITPGTNTSNQVAVLYQGVNCTEVPVAIHADQLTPTWRVYSTGSNVFQTRAGCLIGAEHVNNSYECDIPIGAGICASYQTQTNSPRRARSVASQSIIAYTMSLGAENSVAYSNNSIAIPTNFTISVTTEILPVSMTKTSVDCTMYICGDSTECSNLLLQYGSFCTQLNRALTGIAVEQDKNTQEVFAQVKQIYKTPPIKDFGGFNFSQILPDPSKPSKRSFIEDLLFNKVTLADAGFIKQYGYCLGDIAARDLICAQKFNGLTVLPPLLTDEMIAQYTSALLAGTITSGWWFGAGAALQIPFAMQMAYRFNGIGVTQNVLYENQKLIANQFNSAIGKIQDSLSSTASALGKLQDVVNQNAQALNTLVKQLSSNFGAISSVLNDILSRLDPPEAEVQIDRLITGRLQSLQTYVTQQLIRAAEIRWSANLAATKMSECVLGQSKRVDFCGKGYHLMSFPQSAPHGVVFLHVTYVPAQEKNFTTAPAICHDGKAHFPREGVFVSNGTHWFVTQRNFYEPQIITTDNTFVSGNCDVVIGIVNNTVYDPLQPELDS

SEQ ID NO: 2778 - protein, 1147 aa, Artificial Sequence
  SARS-CoV-2/Belgium/VAG-03013/2020__EPI_ISL_415155 spike protein (1-1147)(K986P_V987P_T887W_A1020W)
MFVFLVLLPLVSSQCVNLTTRTQLPPAYTNSFTRGVYYPDKVFRSSVLHSTQDLFLPFFSNVTWFHAIHVSGTNGTKRFDNPVLPFNDGVYFASTEKSNIIRGWIFGTTLDSKTQSLLIVNNATNVVIKVCEFQFCNDPFLGVYYHKNNKSWMESEFRVYSSANNCTFEYVSQPFLMDLEGKQGNFKNLREFVFKNIDGYFKIYSKHTPINLVRDLPQGFSALEPLVDLPIGINITRFQTLLALHRSYLTPGDSSSGWTAGAAAYYVGYLQPRTFLLKYNENGTITDAVDCALDPLSETKCTLKSFTVEKGIYQTSNFRVQPTESIVRFPNITNLCPFGEVFNATRFASVYAWNRKRISNCVADYSVLYNSASFSTFKCYGVSPTKLNDLCFTNVYADSFVIRGDEVRQIAPGQTGKIADYNYKLPDDFTGCVIAWNSNNLDSKVGGNYNYLYRLFRKSNLKPFERDISTEIYQAGSTPCNGVEGFNCYFPLQSYGFQPTNGVGYQPYRVVVLSFELLHAPATVCGPKKSTNLVKNKCVNFNFNGLTGTGVLTESNKKFLPFQQFGRDIADTTDAVRDPQTLEILDITPCSFGGVSVITPGTNTSNQVAVLYQGVNCTEVPVAIHADQLTPTWRVYSTGSNVFQTRAGCLIGAEHVNNSYECDIPIGAGICASYQTQTNSPRRARSVASQSIIAYTMSLGAENSVAYSNNSIAIPTNFTISVTTEILPVSMTKTSVDCTMYICGDSTECSNLLLQYGSFCTQLNRALTGIAVEQDKNTQEVFAQVKQIYKTPPIKDFGGFNFSQILPDPSKPSKRSFIEDLLFNKVTLADAGFIKQYGDCLGDIAARDLICAQKFNGLTVLPPLLTDEMIAQYTSALLAGTITSGWWFGAGAALQIPFAMQMAYRFNGIGVTQNVLYENQKLIANQFNSAIGKIQDSLSSTATALGKLQDVVNQNAQALNTLVKQLSSNFGAISSVLNDILSRLDPPEAEVQIDRLITGRLQSLQTYVTQQLIRAAEIRWSANLAATKMSECVLGQSKRVDFCGKGYHLMSFPQSAPHGVVFLHVTYVPAQEKNFTTAPAICHDGKAHFPREGVFVSNGTHWFVTQRNFYEPQIITTDNTFVSGNCDVVIGIVNNTVYDPLQPELDS

SEQ ID NO: 2779 - protein, 1147 aa, Artificial Sequence
  SARS-CoV-2/Belgium/BC-03016/2020__EPI_ISL_415157 spike protein (1-1147)(K986P_V987P_T887W_A1020W)
MFVFLVLLPLVSSQCVNLTTRTQLPPAYTNSFTRGVYYPDKVFRSSVLHSTQDLFLPFFSNVTWFHAIHVSGTNGTKRFDNPVLPFNDGVYFASTEKSNIIRGWIFGTTLDSKTQSLLIVNNATNVVIKVCEFQFCNDPFLGVYYHKNNKSWMESEFRVYSSANNCTFEYVSQPFLMDLEGKQGNFKNLREFVFKNIDGYFKIYSKHTPINLVRDLPQGFSALEPLVDLPIGINITRFQTLLALHRSYLTPGDSSSGWTAGAAAYYVGYLQPRTFLLKYNENGTITDAVDCALDPLSETKCTLKSFTVEKGIYQTSNFRVQPTESIVRFPNITNLCPFGEVFNATRFASVYAWNRKRISNCVADYSVLYNSASFSTFKCYGVSPTKLNDLCFTNVYADSFVIRGDEVRQIAPGQTGKIADYNYKLPDDFTGCVIAWNSNNLDSKVGGNYNYLYRLFRKSNLKPFERDISTEIYQAGSTPCNGVEGFNCYFPLQSYGFQPTNGVGYQPYRVVVLSFELLHAPATVCGPKKSTNLVKNKCVNFNFNGLTGTGVLTESNKKFLPFQQFGRDIADTTDAVRDPQTLEILDITPCSFGGVSVITPGTNTSNQVAVLYQGVNCTEVPVAIHADQLTPTWRVYSTGSNVFQTRAGCLIGAEHVNNSYECDIPIGAGICASYQTQTNSPRRARSVASQSIIAYTMSLGAENSVAYSNNSIAIPTNFTISVTTEILPVSMTKTSVDCTMYICGDSTECSNLLLQYGSFCTQLNRALTGIAVEQDKNTQEVFAQVKQIYKTPPIKDFGGFNFSQILPDPSKPSKRSFIEDLLFNKVTLADAGFIKQYGDCLGDIAARDLICAQKFNGLTVLPPLLTDEMIAQYTSALLAGTITSGWWFGAGAALQIPFAMQMAYRFNGIGVTQNVLYENQKLIANQFNSAIGKIQDSLSSTAPALGKLQDVVNQNAQALNTLVKQLSSNFGAISSVLNDILSRLDPPEAEVQIDRLITGRLQSLQTYVTQQLIRAAEIRWSANLAATKMSECVLGQSKRVDFCGKGYHLMSFPQSAPHGVVFLHVTYVPAQEKNFTTAPAICHDGKAHFPREGVFVSNGTHWFVTQRNFYEPQIITTDNTFVSGNCDVVIGIVNNTVYDPLQPELDS

SEQ ID NO: 2780 - protein, 1147 aa, Artificial Sequence
  SARS-CoV-2/Germany/BavPat3/2020__EPI_ISL_414521 spike protein (1-1147)(K986P_V987P_T887W_A1020W)
MFVFLVLLPLVSSQCVNLTTRTQLPPAYTNSFTRGVYYPDKVFRSSVLHSTQDLFLPFFSNVTWFHAIHVSGTNGTKRFDNPVLPFNDGVYFASTEKSNIIRGWIFGTTLDSKTQSLLIVNNATNVVIKVCEFQFCNDPFLGVYYHKNNKSWMESEFRVYSSANNCTFEYVSQPFLMDLEGKQGNFKNLREFVFKNIDGYFKIYSKHTPINLVRDLPQGFSALEPLVDLPIGINITRFQTLLALHRSYLTPGDSSSGWTAGAAAYYVGYLQPRTFLLKYNENGTITDAVDCALDPLSETKCTLKSFTVEKGIYQTSNFRVQPTESIVRFPNITNLCPFGEVFNATRFASVYAWNRKRISNCVADYSVLYNSASFSTFKCYGVSPTKLNDLCFTNVYADSFVIRGDEVRQIAPGQTGKIADYNYKLPDDFTGCVIAWNSNNLDSKVGGNYNYLYRLFRKSNLKPFERDISTEIYQAGSTPCNGVEGFNCYFPLQSYGFQPTNGVGYQPYRVVVLSFELLHAPATVCGPKKSTNLVKNKCVNFNFNGLTGTGVLTESNKKFLPFQQFGRDIADTTDAVRDPQTLEILDITPCSFGGVSVITPGTNTSNQVAVLYQDVNCTEVPVAIHADQLTPTWRVYSTGSNVFQTRAGCLIGAEHVNNSYECDIPIGAGICASYQTQTNSPRRARSVASQSIIAYTMSLGAENSVAYSNNSIAIPTNFTISVTTEILPVSMTKTSVDCTMYICGDSTECSNLLLQYGSFCTQLNRALTGIAVEQDKNTQQVFAQVKQIYKTPPIKDFGGFNFSQILPDPSKPSKRSFIEDLLFNKVTLADAGFIKQYGDCLGDIAARDLICAQKFNGLTVLPPLLTDEMIAQYTSALLAGTITSGWWFGAGAALQIPFAMQMAYRFNGIGVTQNVLYENQKLIANQFNSAIGKIQDSLSSTASALGKLQDVVNQNAQALNTLVKQLSSNFGAISSVLNDILSRLDPPEAEVQIDRLITGRLQSLQTYVTQQLIRAAEIRWSANLAATKMSECVLGQSKRVDFCGKGYHLMSFPQSAPHGVVFLHVTYVPAQEKNFTTAPAICHDGKAHFPREGVFVSNGTHWFVTQRNFYEPQIITTDNTFVSGNCDVVIGIVNNTVYDPLQPELDS

SEQ ID NO: 2781 - protein, 1147 aa, Artificial Sequence
  SARS-CoV-2/France/HF1805/2020__EPI_ISL_414628 spike protein (1-1147)(K986P_V987P_T887W_A1020W)
MFVFLVLLPLVSSQCVNLTTRTQLPPAYTNSFTRGVYYPDKVFRSSVLHSTQDLFLPFFSNVTWFHAIHVSGTNGTKRFDNPVLPFNDGVYFASTEKSNIIRGWIFGTTLDSKTQSLLIVNNATNVVIKVCEFQFCNDPFLGVYYHKNNKSWMESEFRVYSSANNCTFEYVSQPFLMDLEGKQGNFKNLREFVFKNIDGYFKIYSKHTPINLVRDLPQGFSALEPLVDLPIGINITRFQTLLALHRSYLTPGDSSSGWTAGAAAYYVGYLQPRTFLLKYNENGTITDAVDCALDPLSETKCTLKSFTVEKGIYQTSNFRVQPTESIVRFPNITNLCPFGEVFNATRFASVYAWNRKRISNCVADYSVLYNSASFSTFKCYGVSPTKLNDLCFTNVYADSFVIRGDEVRQIAPGQTGKIADYNYKLPDDFTGCVIAWNSNNLDSKVGGNYNYLYRLFRKSNLKPFERDISTEIYQAGSTPCNGVEGFNCYFPLQSYGFQPTNGVGYQPYRVVVLSFELLHAPATVCGPKKSTNLVKNKCVNFNFNGLTGTGVLTESNKKFLPFQQFGRDIADTTDAVRDPQTLEILDITPCSFGGVSVITPGTNTSNQVAVLYQGVNCTEVPVAIHADQLTPTWRVYSTGSNVFQTRAGCLIGAEHVNNSYECDIPIGAGICASYQTQTNSPRRARSVASQSIIAYTMSLGAENSVAYSNNSIAIPTNFTISVTTEILPVSMTKTSVDCTMYICGDSTECSNLLLQYGSFCTQLNRALTGIAVEQDKNTQEVFAQVKQIYKTPPIKDFGGFNFSQILPDPSKPSKRSFIEDLLFNKVTLADAGFIKQYGDCLGDIAARDLICAQKFNGLTVLPPLLTDEMIAQYTSALLAGTITSGWWFGAGAALQIPFAMQMAYRFNGIGVTQNVLYENQKLIANQFNSAIGKIQDSLSSTASALGKLQDVVNQNAQALNTLVKQLSSNFGAISSVLNDILSRLDPPEAEVQIDRLITGRLQSLQTYVTQQLIRAAEIRWSANLAATKMSECVLGQSKRVDFCGKGYHLMSFPQSAPHGVVFLHVTYVPAQEKNFTTAPAICHDGKAHFPREGVFVSNGTHWFVTQRNFYEPQIITTDNTFVSGNCDVVIGVVNNTVYDPLQPELDS

SEQ ID NO: 2782 - protein, 1147 aa, Artificial Sequence
  SARS-CoV-2/Netherlands/ZuidHolland_9/2020__EPI_ISL_414445 spike protein (1-1147)(K986P_V987P_T887W_A1020W)
MFVFLVLLPLVSSQCVNLTTRTQLPPAYTNSFTRGVYYPDKVFRSSVLHSTQDLFLPFFSNVTWFHAIHVSGTNGTKRFDNPVLPFNDGVYFASTEKSNIIRGWIFGTTLDSKTQSLLIVNNATNVVIKVCEFQFCNDPFLGVYYHKNNKSWMESEFRVYSSANNCTFEYVSQPFLMDLEGKQGNFKNLREFVFKNIDGYFKIYSKHTPINLVRDLPQGFSALEPLVDLPIGINITRFQTLLALHRSYLTPGDSSSGWTAGAAAYYVGYLQPRTFLLKYNENGTITDAVDCALDPLSETKCTLKSFTVEKGIYQTSNFRVQPTESIVRFPNITNLCPFGEVFNATRFASVYAWNRKRISNCVADYSVLYNSASFSTFKCYGVSPTKLNDLCFTNVYADSFVIRGDEVRQIAPGQTGKIADYNYKLPDDFTGCVIAWNSNNLDSKVGGNYNYLYRLFRKSNLKPFERDISTEIYQAGSTPCNGVEGFNCYFPLQSYGFQPTNGVGYQPYRVVVLSFELLHAPATVCGPKKSTNLVKNKCVNFNFNGLTGTGVLTESNKKFLPFQQFGRDIADTTDAVRDPQTLEILDITPCSFGGVSVITPGTNTSNQVAVLYQGVNCTEVPVAIHADQLTPTWRVYSTGSNVFQTRAGCLIGAEHVNNSYECDIPIGAGICASYQTQTNSPRRARSVASQSIIAYTMSLGAENSVAYSNNSIAIPTNFTISVTTEILPVSMTKTSVDCTMYICGDSTECSNLLLQYGSFCTQLNRALTGIAVEQDKNTQEVFAQVKQIYKTPPIKDFGGFNFSQILPDPSKPSKRSFIEDLLFNKVTLADAGFIKQYGDCLGDIAARDLICVQKFNGLTVLPPLLTDEMIAQYTSALLAGTITSGWWFGAGAALQIPFAMQMAYRFNGIGVTQNVLYENQKLIANQFNSAIGKIQDSLSSTASALGKLQDVVNQNAQALNTLVKQLSSNFGAISSVLNDILSRLDPPEAEVQIDRLITGRLQSLQTYVTQQLIRAAEIRWSANLAATKMSECVLGQSKRVDFCGKGYHLMSFPQSAPHGVVFLHVTYVPAQEKNFTTAPAICHDGKAHFPREGVFVSNGTHWFVTQRNFYEPQIITTDNTFVSGNCDVVIGIVNNTVYDPLQPELDS

SEQ ID NO: 2783 - protein, 1147 aa, Artificial Sequence
  SARS-CoV-2/Finland/FIN03032020A/2020__EPI_ISL_413602 spike protein (1-1147)(K986P_V987P_T887W_A1020W)
MFVFLVLLPLVSSQCVNLTTRTQLPPAYTNSFTRGVYYPDKVFRSSVLHSTQDLFLPFFSNVTWFHAIHVSGTNGTKRFDNPVLPFNDGVYFASTEKSNIIRGWIFGTTLDSKTQSLLIVNNATNVVIKVCEFQFCNDPFLGVYYHKNNKSWMESEFRVYSSANNCTFEYVSQPFLMDLEGKQGNFKNLREFVFKNIDGYFKIYSKHTPINLVRDLPQGFSALEPLVDLPIGINITRFQTLLALHRSYLTPGDSSSGWTAGAAAYYVGYLQPRTFLLKYNENGTITDAVDCALDPLSETKCTLKSFTVEKGIYQTSNFRVQPTESIVRFPNITNLCPFGEVFNATRFASVYAWNRKRISNCVADYSVLYNSASFSTFKCYGVSPTKLNDLCFTNVYADSFVIRGDEVRQIAPGQTGKIADYNYKLPDDFTGCVISWNSNNLDSKVGGNYNYLYRLFRKSNLKPFERDISTEIYQAGSTPCNGVEGFNCYFPLQSYGFQPTNGVGYQPYRVVVLSFELLHAPATVCGPKKSTNLVKNKCVNFNFNGLTGTGVLTESNKKFLPFQQFGRDIADTTDAVRDPQTLEILDITPCSFGGVSVITPGTNTSNQVAVLYQGVNCTEVPVAIHADQLTPTWRVYSTGSNVFQTRAGCLIGAEHVNNSYECDIPIGAGICASYQTQTNSPRRARSVASQSIIAYTMSLGAENSVAYSNNSIAIPTNFTISVTTEILPVSMTKTSVDCTMYICGDSTECSNLLLQYGSFCTQLNRALTGIAVEQDKNTQEVFAQVKQIYKTPPIKDFGGFNFSQILPDPSKPSKRSFIEDLLFNKVTLADAGFIKQYGDCLGDIAARDLICAQKFNGLTVLPPLLTDEMIAQYTSALLAGTITSGWWFGAGAALQIPFAMQMAYRFNGIGVTQNVLYENQKLIANQFNSAIGKIQDSLSSTASALGKLQDVVNQNAQALNTLVKQLSSNFGAISSVLNDILSRLDPPEAEVQIDRLITGRLQSLQTYVTQQLIRAAEIRWSANLAATKMSECVLGQSKRVDFCGKGYHLMSFPQSAPHGVVFLHVTYVPAQEKNFTTAPAICHDGKAHFPREGVFVSNGTHWFVTQRNFYEPQIITTDNTFVSGNCDVVIGIVNNTVYDPLQPELDS

SEQ ID NO: 2784 - protein, 1147 aa, Artificial Sequence
  SARS-CoV-2/France/GE1977/2020__EPI_ISL_414632 spike protein (1-1147)(K986P_V987P_T887W_A1020W)
MFVFLVLLPLVSSQCVNLTTRTQLPPAYTNSFTRGVYYPDKVFRSSVLHSTQDLFLPFFSNVTWFHAIHVSGTNGTKRFDNPVLPFNDGVYFASTEKSNIIRGWIFGTTLDSKTQSLLIVNNATNVVIKVCEFQFCNDPFLGVYYHKNNKSWMESEFRVYSSANNCTFEYVSQPFLMDLEGKQGNFKNLREFVFKNIDGYFKIYSKHTPINLVRDLPQGFSALEPLVDLPIGINITRFQTLLALHRSYLTPGDSSSGWTAGAAAYYVGYLQPRTFLLKYNENGTITDAVDCALDPLSETKCTLKSFTVEKGIYQTSNFRVQPTESIVRFPNITNLCPFGEVFNATRFASVYAWNRKRISNCVADYSVLYNSASFSTFKCYGVSPTKLNDLCFTNVYADSFVIRGDEVRQIAPGQTGKIADYNYKLPDDFTGCVIAWNSNNLDSKVGGNYNYLYRLFRKSNLKPFERDISTEIYQAGSTPCNGVEGFNCYFPLQSYGFQPTNGVGYQPYRVVVLSFELLHAPATVCGPKKSTNLVKNKCVNFNFNGLTGTGVLTESNKKFLPFQQFGRDIADTTDAVRDPQTLEILDITPCSFGGVSVITPGTNTSNQVAVLYQGVNCTEVPVAIHADQLTPTWRVYSTGSNVFQTRAGCLIGAEHVNNSYECDIPIGAGICASYQTQTNSPRRARSVASQSIIAYTMSLGAENSVAYSNNSIAIPTNFTISVTTEILPVSMTKTSVDCTMYICGDSTECSNLLLQYGSFCTQLNRALTGIAVEQDKNTQEVFAQVKQIYKTPPIKDFGGFNFSQILPDPSKPSKRSFIEDLLFNKVTLADAGFIKQYGDCLGDIAARDLICAQKFNGLTVLPPLLTDEMIAQYTSALLAGTITSGWWFGAGAALQIPFAMQMAYRFNGIGVTQNVLYENQKLIANQFNSAIGKIQDSLFSTASALGKLQDVVNQNAQALNTLVKQLSSNFGAISSVLNDILSRLDPPEAEVQIDRLITGRLQSLQTYVTQQLIRAAEIRWSANLAATKMSECVLGQSKRVDFCGKGYHLMSFPQSAPHGVVFLHVTYVPAQEKNFTTAPAICHDGKAHFPREGVFVSNGTHWFVTQRNFYEPQIITTDNTFVSGNCDVVIGIVNNTVYDPLQPELDS

SEQ ID NO: 2785 - protein, 1147 aa, Artificial Sequence
  SARS-CoV-2/Finland/FIN-313/2020__EPI_ISL_414641 spike protein (1-1147)(K986P_V987P_T887W_A1020W)
MFVFLVLLPLVSSQCVNLTTRTQLPPAYTNSFTRGVYYPDKVFRSSVLHSTQDLFLPFFSNVTWFHAIHVSGTNGTKRFDNPVLPFNDGVYFASTEKSNIIRGWIFGTTLDSKTQSLLIVNNATNVVIKVCEFQFCNDPFLGVYYHKNNKSWMESEFRVYSSANNCTFEYVSQPFLMDLEGKQGNFKNLREFVFKNIDGYFKIYSKHTPINLVRDLPQGFSALEPLVDLPIGINITRFKTLLALHRSYLTPGDSSSGWTAGAAAYYVGYLQPRTFLLKYNENGTITDAVDCALDPLSETKCTLKSFTVEKGIYQTSNFRVQPTESIVRFPNITNLCPFGEVFNATRFASVYAWNRKRISNCVADYSVLYNSASFSTFKCYGVSPTKLNDLCFTNVYADSFVIRGDEVRQIAPGQTGKIADYNYKLPDDFTGCVIAWNSNNLDSKVGGNYNYLYRLFRKSNLKPFERDISTEIYQAGSTPCNGVEGFNCYFPLQSYGFQPTNGVGYQPYRVVVLSFELLHAPATVCGPKKSTNLVKNKCVNFNFNGLTGTGVLTESNKKFLPFQQFGRDIADTTDAVRDPQTLEILDITPCSFGGVSVITPGTNTSNQVAVLYQGVNCTEVPVAIHADQLTPTWRVYSTGSNVFQTRAGCLIGAEHVNNSYECDIPIGAGICASYQTQTNSPRRARSVASQSIIAYTMSLGAENSVAYSNNSIAIPTNFTISVTTEILPVSMTKTSVDCTMYICGDSTECSNLLLQYGSFCTQLNRALTGIAVEQDKNTQEVFAQVKQIYKTPPIKDFGGFNFSQILPDPSKPSKRSFIEDLLFNKVTLADAGFIKQYGDCLGDIAARDLICAQKFNGLTVLPPLLTDEMIAQYTSALLAGTITSGWWFGAGAALQIPFAMQMAYRFNGIGVTQNVLYENQKLIANQFNSAIGKIQDSLSSTASALGKLQDVVNQNAQALNTLVKQLSSNFGAISSVLNDILSRLDPPEAEVQIDRLITGRLQSLQTYVTQQLIRAAEIRWSANLAATKMSECVLGQSKRVDFCGKGYHLMSFPQSAPHGVVFLHVTYVPAQEKNFTTAPAICHDGKAHFPREGVFVSNGTHWFVTQRNFYEPQIITTDNTFVSGNCDVVIGIVNNTVYDPLQPELDS

SEQ ID NO: 2786 - protein, 1147 aa, Artificial Sequence
  SARS-CoV-2/Netherlands/ZuidHolland_2/2020__EPI_ISL_414556 spike protein (1-1147)(K986P_V987P_T887W_A1020W)
MFVFLVLLPLVSSQCVNLTTRTQLPPAYTNSFTRGVYYPDKVFRSSVLHSTQDLFLPFFSNVTWFHAIHVSGTNGTKRFDNPVLPFNDGVYFASTEKSNIIRGWIFGTTLDSKTQSLLIVNNATNVVIKVCEFQFCNDPFLGVYYHKNNKSWMESEFRVYSSANNCTFEYVSQPFLMDLEGKQGNFKNLREFVFKNIDGYFKIYSKHTPINLVRDLPQGFSALEPLVDLPIGINITRFQTLLALHRSYLTPGDSSSGWTAGAAAYYVGYLQPRTFLLKYNENGTITDAVDCALDPLSETKCTLKSFTVEKGIYQTSNFRVQPTESIVRFPNITNLCPFGEVFNATRFASVYAWNRKRISNCVADYSVLYNSASFSTFKCYGVSPTKLNDLCFTNVYADSFVIRGDEVRQIAPGQTGKIADYNYKLPDDFTGCVIAWNSNNLDSKVGGNYNYLYRLFRKSNLKPFERDISTEIYQAGSTPCNGVEGFNCYFPLQSYGFQPTNGVGYQPYRVVVLSFELLHAPATVCGPKKSTNLVKNKCVNFNFNGLTGTGVLTESNKKFLPFQQFGRDIADTTDAVRDPQTLEILDITPCSFGGVSVITPGTNTSNQVAVLYQGVNCTEVPVAIHADQLTPTWRVYSTGSNVFQTRAGCLIGAEHVNNSYECDIPIGAGICASYQTQTNSPRRARSVASQSIIAYTMSLGAENSVAYSNNSIAIPTNFTISVTTEILPVSMTKTSVDCTMYICGDSTECSNLLLQYGSFCTQLNRALTGIALEQDKNTQEVFAQVKQIYKTPPIKDFGGFNFSQILPDPSKPSKRSFIEDLLFNKVTLADAGFIKQYGDCLGDIAARDLICAQKFNGLTVLPPLLTDEMIAQYTSALLAGTITSGWWFGAGAALQIPFAMQMAYRFNGIGVTQNVLYENQKLIANQFNSAIGKIQDSLSSTASALGKLQDVVNQNAQALNTLVKQLSSNFGAISSVLNDILSRLDPPEAEVQIDRLITGRLQSLQTYVTQQLIRAAEIRWSANLAATKMSECVLGQSKRVDFCGKGYHLMSFPQSAPHGVVFLHVTYVPAQEKNFTTAPAICHDGKAHFPREGVFVSNGTHWFVTQRNFYEPQIITTDNTFVSGNCDVVIGIVNNTVYDPLQPELDS

SEQ ID NO: 2787 - protein, 1147 aa, Artificial Sequence
  SARS-CoV-2/USA/WA-UW31/2020__EPI_ISL_414618 spike protein (1-1147)(K986P_V987P_T887W_A1020W)
MFVFLVLLPLVSSQCVNLTTRTQLPPAYTNSFTRGVYYPDKVFRSSVLHSTQDLFLPFFSNVTWFHAIHVSGTNGTKRFDNPVLPFNDGVYFASTEKSNIIRGWIFGTTLDSKTQSLLIVNNATNVVIKVCEFQFCNDPFLGVYYHKNNKSWMESEFRVYSSANNCTFEYVSQPFLMDLEGKQGNFKNLREFVFKNIDGYFKIYSKHTPINLVRDLPQGFSALEPLVDLPIGINITRFQTLLALHRSYLTPGDSSSGWTAGAAAYYVGYLQPRTFLLKYNENGTITDAVDCALDPLSETKCTLKSFTVEKGIYQTSNFRVQPTESIVRFPNITNLCPFGEVFNATRFASVYAWNRKRISNCVADYSVLYNSASFSTFKCYGVSPTKLNDLCFTNVYADSFVIRGDEVRQIAPGQTGKIADYNYKLPDDFTGCVIAWNSNNLDSKVGGNYNYLYRLFRKSNLKPFERDISTEIYQAGSTPCNGAEGFNCYFPLQSYGFQPTNGVGYQPYRVVVLSFELLHAPATVCGPKKSTNLVKNKCVNFNFNGLTGTGVLTESNKKFLPFQQFGRDIADTTDAVRDPQTLEILDITPCSFGGVSVITPGTNTSNQVAVLYQDVNCTEVPVAIHADQLTPTWRVYSTGSNVFQTRAGCLIGAEHVNNSYECDIPIGAGICASYQTQTNSPRRARSVASQSIIAYTMSLGAENSVAYSNNSIAIPTNFTISVTTEILPVSMTKTSVDCTMYICGDSTECSNLLLQYGSFCTQLNRALTGIAVEQDKNTQEVFAQVKQIYKTPPIKDFGGFNFSQILPDPSKPSKRSFIEDLLFNKVTLADAGFIKQYGDCLGDIAARDLICAQKFNGLTVLPPLLTDEMIAQYTSALLAGTITSGWWFGAGAALQIPFAMQMAYRFNGIGVTQNVLYENQKLIANQFNSAIGKIQDSLSSTASALGKLQDVVNQNAQALNTLVKQLSSNFGAISSVLNDILSRLDPPEAEVQIDRLITGRLQSLQTYVTQQLIRAAEIRWSANLAATKMSECVLGQSKRVDFCGKGYHLMSFPQSAPHGVVFLHVTYVPAQEKNFTTAPAICHDGKAHFPREGVFVSNGTHWFVTQRNFYEPQIITTDNTFVSGNCDVVIGIVNNTVYDPLQPELDS

SEQ ID NO: 2788 - protein, 1147 aa, Artificial Sequence
  SARS-CoV-2/South Korea/SNU01/2020__EPI_ISL_411929 spike protein (1-1147)(K986P_V987P_T887W_A1020W)
MFVFLVLLPLVSSQCVNLTTRTQLPPAYTNSFTRGVYYPDKVFRSSVLHSTQDLFLPFFSNVTWFHAIHVSGTNGTKRFDNPVLPFNDGVYFASTEKSNIIRGWIFGTTLDSKTQSLLIVNNATNVVIKVCEFQFCNDPFLGVYYHKNNKSWMESEFRVYSSANNCTFEYVSQPFLMDLEGKQGNFKNLREFVFKNIDGYFKIYSKHTPINLVRDLPQGFWALEPLVDLPIGINITRFQTLLALHRSYLTPGDSSSGWTAGAAAYYVGYLQPRTFLLKYNENGTITDAVDCALDPLSETKCTLKSFTVEKGIYQTSNFRVQPTESIVRFPNITNLCPFGEVFNATRFASVYAWNRKRISNCVADYSVLYNSASFSTFKCYGVSPTKLNDLCFTNVYADSFVIRGDEVRQIAPGQTGKIADYNYKLPDDFTGCVIAWNSNNLDSKVGGNYNYLYRLFRKSNLKPFERDISTEIYQAGSTPCNGVEGFNCYFPLQSYGFQPTNGVGYQPYRVVVLSFELLHAPATVCGPKKSTNLVKNKCVNFNFNGLTGTGVLTESNKKFLPFQQFGRDIADTTDAVRDPQTLEILDITPCSFGGVSVITPGTNTSNQVAVLYQDVNCTEVPVAIHADQLTPTWRVYSTGSNVFQTRAGCLIGAEHVNNSYECDIPIGAGICASYQTQTNSPRRARSVASQSIIAYTMSLGAENSVAYSNNSIAIPTNFTISVTTEILPVSMTKTSVDCTMYICGDSTECSNLLLQYGSFCTQLNRALTGIAVEQDKNTQEVFAQVKQIYKTPPIKDFGGFNFSQILPDPSKPSKRSFIEDLLFNKVTLADAGFIKQYGDCLGDIAARDLICAQKFNGLTVLPPLLTDEMIAQYTSALLAGTITSGWWFGAGAALQIPFAMQMAYRFNGIGVTQNVLYENQKLIANQFNSAIGKIQDSLSSTASALGKLQDVVNQNAQALNTLVKQLSSNFGAISSVLNDILSRLDPPEAEVQIDRLITGRLQSLQTYVTQQLIRAAEIRWSANLAATKMSECVLGQSKRVDFCGKGYHLMSFPQSAPHGVVFLHVTYVPAQEKNFTTAPAICHDGKAHFPREGVFVSNGTHWFVTQRNFYEPQIITTDNTFVSGNCDVVIGIVNNTVYDPLQPELDS

SEQ ID NO: 2789 - protein, 1147 aa, Artificial Sequence
  SARS-CoV-2/China/WF0004/2020__EPI_ISL_413694 spike protein (1-1147)(K986P_V987P_T887W_A1020W)
MFVFLVLLPLVSSQCVNLTTRTQLPPAYTNSFTRGVYYPDKVFRSSVLHSTQDLFLPFFSNVTWFHAIHVSGTNGTKRFDNPVLPFNDGVYFASTEKSNIIRGWIFGTTLDSKTQSLLIVNNATNVVIKVCEFQFCNDPFLGVYYHKNNKSWTESEFRVYSSANNCTFEYVSQPFLMDLEGKQGNFKNLREFVFKNIDGYFKIYSKHTPINLVRDLPQGFSALEPLVDLPIGINITRFQTLLALHRSYLTPGDSSSGWTAGAAAYYVGYLQPRTFLLKYNENGTITDAVDCALDPLSETKCTLKSFTVEKGIYQTSNFRVQPTESIVRFPNITNLCPFGEVFNATRFASVYAWNRKRISNCVADYSVLYNSASFSTFKCYGVSPTKLNDLCFTNVYADSFVIRGDEVRQIAPGQTGKIADYNYKLPDDFTGCVIAWNSNNLDSKVGGNYNYLYRLFRKSNLKPFERDISTEIYQAGSTPCNGVEGFNCYFPLQSYGFQPTNGVGYQPYRVVVLSFELLHAPATVCGPKKSTNLVKNKCVNFNFNGLTGTGVLTESNKKFLPFQQFGRDIADTTDAVRDPQTLEILDITPCSFGGVSVITPGTNTSNQVAVLYQDVNCTEVPVAIHADQLTPTWRVYSTGSNVFQTRAGCLIGAEHVNNSYECDIPIGAGICASYQTQTNSPRRARSVASQSIIAYTMSLGAENSVAYSNNSIAIPTNFTISVTTEILPVSMTKTSVDCTMYICGDSTECSNLLLQYGSFCTQLNRALTGIAVEQDKNTQEVFAQVKQIYKTPPIKDFGGFNFSQILPDPSKPSKRSFIEDLLFNKVTLADAGFIKQYGDCLGDIAARDLICAQKFNGLTVLPPLLTDEMIAQYTSALLAGTITSGWWFGAGAALQIPFAMQMAYRFNGIGVTQNVLYENQKLIANQFNSAIGKIQDSLSSTASALGKLQDVVNQNAQALNTLVKQLSSNFGAISSVLNDILSRLDPPEAEVQIDRLITGRLQSLQTYVTQQLIRAAEIRWSANLAATKMSECVLGQSKRFDFCGKGYHLMSFPQSAPHGVVFLHVTYVPAQEKNFTTAPAICHDGKAHFPREGVFVSNGTHWFVTQRNFYEPQIITTDNTFVSGNCDVVIGIVNNTVYDPLQPELDS

SEQ ID NO: 2790 - protein, 1147 aa, Artificial Sequence
  SARS-CoV-2/China/WF0028/2020__EPI_ISL_413791 spike protein (1-1147)(K986P_V987P_T887W_A1020W)
MFVFLVLLPLVSSQCVNLTTRTQLPPAYTNSFTRGVYYPDKVFRSSVLHSTQDLFLPFFSNVTWFHAIHVSGTNGTKRFDNPVLPFNDGVYFASTEKSNIIRGWIFGTTLDSKTQSLLIVNNATNVVIKVCEFQFCNDPFLGVYYHKNNKSWMESEFRVYSSANNCTFEYVSQPFLMDLEGKQGNFKNLREFVFKNIDGYFKIYSKHTPINLVRDLPQGFSALEPLVDLPIGINITRFQTLLALHRSYLTPGDSSSGWTAGAAAYYVGYLQPRTFLLKYNENGTITDAVDCALDPLSETKCTLKSFTVEKGIYQTSNFRVQPTESIVRFPNITNLCPFGEVFNATRFASVYAWNRKRISNCVADYSVLYNSASFSTFKCYGVSPTKLNDLCFTNVYADSFVIRGDEVRQIAPGQTGKIADYNYKLPDDFTGCVIAWNSNNLDSKVGGNYNYLYRLFRKSNLKPFERDISTEIYQAGSTPCNGVEGFNCYFPLQSYGFQPTNGVGYQPYRVVVLSFELLHAPATVCGPKKSTNLVKNKCVNFNFNGLTGTGVLTESNKKFLPFQQFGRDIADTTDAVRDPQTLEILDITPCSFGGVSVITPGTNTSNQVAVLYQDVNCTEVPVAIHADQLTPTWRVYSTGSNVFQTRAGCLIGAEHVNNSYECDIPIGAGICASYQTQTNSPRRARSVASQSIIAYTMSLGAENSVAYSNNSIAIPTNFTISVTTEILPVSMTKTSVDCTMYICGDSTECSNLLLQYGSFCTQLNRALTGIAVEQDKNTQEVFAQVKQIYKTPPIKDFGGFNFSQILPDPSKPSKRSFIEDLLFNKVTLADAGFIKQYGDCLGDIAARDLICAQKFNGLTVLPPLLTDEMIAQYTSALLAGTITSGWWFGAGAALQIPFAMQMAYRFNGIGVTQNVLYENQKLIANQFNSAIGKIQDSLSSTASALGKLQDVVNQNAQALNTLVKQLSSNFGAISSVLNDILSRLDPPEAEVQIDRLITGRLQSLQTYVTQQLIRAAEIRWSANLAATKMSECVLGQSKRVDFCGKGYHLMSFPQSAPHGVVFLHVTYVPAQEKNFTTAPAICHDGKAHFPREGVFVSNGTHWFVTQRNFYEPQIITTDNTFVSGNCDVVIGIVNNTVYDPLQPELES

SEQ ID NO: 2791 - protein, 1147 aa, Artificial Sequence
  SARS-CoV-2/2019-nCoV/USA-CruiseA-18/2020__MT159716.1 spike protein (1-1147)(K986P_V987P_T887W_A1020W)
MFVFLVLLPLVSSQCVNLTTRTQLPPAYTNSFTRGVYYPDKVFRSSVLHSTQDLFLPFFSNVTWFHAIHVSGTNGTKRFDNPVLPFNDGVYFASTEKSNIIRGWIFGTTLDSKTQSLLIVNNATNVVIKVCEFQFCNDPFLGVYYHKNNKSWMESELRVYSSANNCTFEYVSQPFLMDLEGKQGNFKNLREFVFKNIDGYFKIYSKHTPINLVRDLPQGFSALEPLVDLPIGINITRFQTLLALHRSYLTPGDSSSGWTAGAAAYYVGYLQPRTFLLKYNENGTITDAVDCALDPLSETKCTLKSFTVEKGIYQTSNFRVQPTESIVRFPNITNLCPFGEVFNATRFASVYAWNRKRISNCVADYSVLYNSASFSTFKCYGVSPTKLNDLCFTNVYADSFVIRGDEVRQIAPGQTGKIADYNYKLPDDFTGCVIAWNSNNLDSKVGGNYNYLYRLFRKSNLKPFERDISTEIYQAGSTPCNGVEGFNCYFPLQSYGFQPTNGVGYQPYRVVVLSFELLHAPATVCGPKKSTNLVKNKCVNFNFNGLTGTGVLTESNKKFLPFQQFGRDIADTTDAVRDPQTLEILDITPCSFGGVSVITPGTNTSNQVAVLYQDVNCTEVPVAIHADQLTPTWRVYSTGSNVFQTRAGCLIGAEHVNNSYECDIPIGAGICASYQTQTNSPRRARSVASQSIIAYTMSLGAENSVAYSNNSIAIPTNFTISVTTEILPVSMTKTSVDCTMYICGDSTECSNLLLQYGSFCTQLNRALTGIAVEQDKNTQEVFAQVKQIYKTPPIKDFGGFNFSQILPDPSKPSKRSFIEDLLFNKVTLADAGFIKQYGDCLGDIAARDLICAQKFNGLTVLPPLLTDEMIAQYTSALLAGTITSGWWFGAGAALQIPFAMQMAYRFNGIGVTQNVLYENQKLIANQFNSAIGKIQDSLSSTASALGKLQDVVNQNAQALNTLVKQLSSNFGAISSVLNDILSRLDPPEAEVQIDRLITGRLQSLQTYVTQQLIRAAEIRWSANLAATKMSECVLGQSKRVDFCGKGYHLMSFPQSAPHGVVFLHVTYVPAQEKNFTTAPAICHDGKAHFPREGVFVSNGTHWFVTQRNFYEPQIITTDNTFVSGNCDVVIGIVNNTVYDPLQPELDS

SEQ ID NO: 2792 - protein, 1147 aa, Artificial Sequence
  SARS-CoV-2/SARS-CoV-2/Yunnan-01/human/2020/CHN__MT049951.1 spike protein (1-1147)(K986P_V987P_T887W_A1020W)
MFVFLVLLPLVSSQCVNLTTRTQLPPANTNSFTRGVYYPDKVFRSSVLHSTQDLFLPFFSNVTWFHAIHVSGTNGTKRFDNPVLPFNDGVYFASTEKSNIIRGWIFGTTLDSKTQSLLIVNNATNVVIKVCEFQFCNDPFLGVYYHKNNKSWMESEFRVYSSANNCTFEYVSQPFLMDLEGKQGNFKNLREFVFKNIDGYFKIYSKHTPINLVRDLPQGFSALEPLVDLPIGINITRFQTLLALHRSYLTPGDSSSGWTAGAAAYYVGYLQPRTFLLKYNENGTITDAVDCALDPLSETKCTLKSFTVEKGIYQTSNFRVQPTESIVRFPNITNLCPFGEVFNATRFASVYAWNRKRISNCVADYSVLYNSASFSTFKCYGVSPTKLNDLCFTNVYADSFVIRGDEVRQIAPGQTGKIADYNYKLPDDFTGCVIAWNSNNLDSKVGGNYNYLYRLFRKSNLKPFERDISTEIYQAGSTPCNGVEGFNCYFPLQSYGFQPTNGVGYQPYRVVVLSFELLHAPATVCGPKKSTNLVKNKCVNFNFNGLTGTGVLTESNKKFLPFQQFGRDIADTTDAVRDPQTLEILDITPCSFGGVSVITPGTNTSNQVAVLYQDVNCTEVPVAIHADQLTPTWRVYSTGSNVFQTRAGCLIGAEHVNNSYECDIPIGAGICASYQTQTNSPRRARSVASQSIIAYTMSLGAENSVAYSNNSIAIPTNFTISVTTEILPVSMTKTSVDCTMYICGDSTECSNLLLQYGSFCTQLNRALTGIAVEQDKNTQEVFAQVKQIYKTPPIKDFGGFNFSQILPDPSKPSKRSFIEDLLFNKVTLADAGFIKQYGDCLGDIAARDLICAQKFNGLTVLPPLLTDEMIAQYTSALLAGTITSGWWFGAGAALQIPFAMQMAYRFNGIGVTQNVLYENQKLIANQFNSAIGKIQDSLSSTASALGKLQDVVNQNAQALNTLVKQLSSNFGAISSVLNDILSRLDPPEAEVQIDRLITGRLQSLQTYVTQQLIRAAEIRWSANLAATKMSECVLGQSKRVDFCGKGYHLMSFPQSAPHGVVFLHVTYVPAQEKNFTTAPAICHDGKAHFPREGVFVSNGTHWFVTQRNFYEPQIITTDNTFVSGNCDVVIGIVNNTVYDPLQPELDS

SEQ ID NO: 2793 - protein, 1147 aa, Artificial Sequence
  SARS-CoV-2/USA/WA-UW292/2020__EPI_ISL_418077 spike protein (1-1147)(K986P_V987P_T887W_A1020W)
MFVFLVLLPLVSSQCVNLTTRTQLPPAYTNSFTRGVYYPDKVFRSSVLHSTQDLFLPFFSNVTWFHAIHVSGTNGTKRFDNPVLPFNDGVYFASTEKSNIIRGWIFGTTLDSKTQSLLIVNNATNVVIKVCEFQFCNDPFLGVYYHKNNKSWMESEFRVYSSANNCTFEYVSQPFLMDLEGKQGNFKNLREFVFKNIDGYFKIYSKHTPINLVRDLPQGFSALEPLVDLPIGINITRFQTLLALHRSYLTPGDSSSGWTAGAAAYYVGYLQPRTFLLKYNENGTITDAVDCALDPLSETKCTLKSFTVEKGIYQTSNFRVQPTESIVRFPNITNLCPFGEVFNATRFASVYAWNRKRISNCVADYSVLYNSASFSTFKCYGVSPTKLNDLCFTNVYADSFVIRGDEVRQIAPGQTGKIADYNYKLPDDFTGCVIAWNSNNLDSKVGGNYNYLYRLFRKSNLKPFERDISTEIYQASSTPCNGVEGFNCYFPLQSYGFQPTNGVGYQPYRVVVLSFELLHAPATVCGPKKSTNLVKNKCVNFNFNGLTGTGVLTESNKKFLPFQQFGRDIADTTDAVRDPQTLEILDITPCSFGGVSVITPGTNTSNQVAVLYQDVNCTEVPVAIHADQLTPTWRVYSTGSNVFQTRAGCLIGAEHVNNSYECDIPIGAGICASYQTQTNSPRRARSVASQSIIAYTMSLGAENSVAYSNNSIAIPTNFTISVTTEILPVSMTKTSVDCTMYICGDSTECSNLLLQYGSFCTQLNRALTGIAVEQDKNTQEVFAQVKQIYKTPPIKDFGGFNFSQILPDPSKPSKRSFIEDLLFNKVTLADAGFIKQYGDCLGDIAARDLICAQKFNGLTVLPPLLTDEMIAQYTSALLAGTITSGWWFGAGAALQIPFAMQMAYRFNGIGVTQNVLYENQKLIANQFNSAIGKIQDSLSSTASALGKLQDVVNQNAQALNTLVKQLSSNFGAISSVLNDILSRLDPPEAEVQIDRLITGRLQSLQTYVTQQLIRAAEIRWSANLAATKMSECVLGQSKRVDFCGKGYHLMSFPQSAPHGVVFLHVTYVPAQEKNFTTAPAICHDGKAHFPREGVFVSNGTHWFVTQRNFYEPQIITTDNTFVSGNCDVVIGIVNNTVYDPLQPELDS

SEQ ID NO: 2794 - protein, 1147 aa, Artificial Sequence
  SARS-CoV-2/Iceland/192/2020__EPI_ISL_417819 spike protein (1-1147)(K986P_V987P_T887W_A1020W)
MFVFFVLLPLVSSQCVNLTTRTQLPPAYTNSFTRGVYYPDKVFRSSVLHSTQDLFLPFFSNVTWFHAIHVSGTNGTKRFDNPVLPFNDGVYFASTEKSNIIRGWIFGTTLDSKTQSLLIVNNATNVVIKVCEFQFCNDPFLGVYYHKNNKSWMESEFRVYSSANNCTFEYVSQPFLMDLEGKQGNFKNLREFVFKNIDGYFKIYSKHTPINLVRDLPQGFSALEPLVDLPIGINITRFQTLLALHRSYLTPGDSSSGWTAGAAAYYVGYLQPRTFLLKYNENGTITDAVDCALDPLSETKCTLKSFTVEKGIYQTSNFRVQPTESIVRFPNITNLCPFGEVFNATRFASVYAWNRKRISNCVADYSVLYNSASFSTFKCYGVSPTKLNDLCFTNVYADSFVIRGDEVRQIAPGQTGKIADYNYKLPDDFTGCVIAWNSNNLDSKVGGNYNYLYRLFRKSNLKPFERDISTEIYQAGSTPCNGVEGFNCYFPLQSYGFQPTNGVGYQPYRVVVLSFELLHAPATVCGPKKSTNLVKNKCVNFNFNGLTGTGVLTESNKKFLPFQQFGRDIADTTDAVRDPQTLEILDITPCSFGGVSVITPGTNTSNQVAVLYQGVNCTEVPVAIHADQLTPTWRVYSTGSNVFQTRAGCLIGAEHVNNSYECDIPIGAGICASYQTQTNSPRRARSVASQSIIAYTMSLGAENSVAYSNNSIAIPTNFTISVTTEILPVSMTKTSVDCTMYICGDSTECSNLLLQYGSFCTQLNRALTGIAVEQDKNTQEVFAQVKQIYKTPPIKDFGGFNFSQILPDPSKPSKRSFIEDLLFNKVTLADAGFIKQYGDCLGDIAARDLICAQKFNGLTVLPPLLTDEMIAQYTSALLAGTITSGWWFGAGAALQIPFAMQMAYRFNGIGVTQNVLYENQKLIANQFNSAIGKIQDSLSSTASALGKLQDVVNQNAQALNTLVKQLSSNFGAISSVLNDILSRLDPPEAEVQIDRLITGRLQSLQTYVTQQLIRAAEIRWSANLAATKMSECVLGQSKRVDFCGKGYHLMSFPQSAPHGVVFLHVTYVPAQEKNFTTAPAICHDGKAHFPREGVFVSNGTHWFVTQRNFYEPQIITTDNTFVSGNCDVVIGIVNNTVYDPLQPELDS

SEQ ID NO: 2795 - protein, 1147 aa, Artificial Sequence
  SARS-CoV-2/Belgium/ULG-6939/2020__EPI_ISL_417020 spike protein (1-1147)(K986P_V987P_T887W_A1020W)
MFVFLVLLPLVSSQCVNLTTRTQLPPAYTNSFTRGVYYPDKVFRSSVLHSTQDLFLPFFSNVTWFHAIHVSGTNGTKRFDNPVLPFNDGVYFASTEKSNIIRGWIFGTTLDSKTQSLLIVNNATNVVIKVCEFQFCNDPFLGVYYHKNNKSWMESEFRVYSSANNCTFEYVSQPFLMDLEGKQGNFKNLREFVFKNIDGYFKIYSKHTPINLVRDLPQGFSALEPLVDLPIGINITRFQTLLALHRSYLTPGDSSSGWTAGAAAYYVGYLQPRTFLLKYNENGTITDAVDCALDPLSETKCTLKSFTVEKGIYQTSNFRVQPTESIVRFPNITNLCPFGEVFNATRFASVYAWNRKRISNCVADYSVLYNSASFSTFKCYGVSPTKLNDLCFTNVYADSFVIRGDEVRQIAPGQTGKIADYNYKLPDDFTGCVIAWNSNNLDSKVGGNYNYLYRLFRKSNLKPFERDISTEIYQAGSTPCNGVEGFNCYFPLQSYGFQPTNGVGYQPYRVVVLSFELLHAPATVCGPKKSTNLVKNKCVNFNFNGLTGTGVLTESNKKFLPFQQFGRDIADTTDAVRDPQTLEILDITPCSFGGVSVITPGTNTSNQVAVLYQGVNCTEVPVAIHADQLTPTWRVYSTGSNVFQTRAGCLIGAEHVNNSYECDIPIGAGICASYQTQTNSPRRARSVASQSIIAYTMSLGAENSVVYSNNSIAIPTNFTISVTTEILPVSMTKTSVDCTMYICGDSTECSNLLLQYGSFCTQLNRALTGIAVEQDKNTQEVFAQVKQIYKTPPIKDFGGFNFSQILPDPSKPSKRSFIEDLLFNKVTLADAGFIKQYGDCLGDIAARDLICAQKFNGLTVLPPLLTDEMIAQYTSALLAGTITSGWWFGAGAALQIPFAMQMAYRFNGIGVTQNVLYENQKLIANQFNSAIGKIQDSLSSTASALGKLQDVVNQNAQALNTLVKQLSSNFGAISSVLNDILSRLDPPEAEVQIDRLITGRLQSLQTYVTQQLIRAAEIRWSANLAATKMSECVLGQSKRVDFCGKGYHLMSFPQSAPHGVVFLHVTYVPAQEKNFTTAPAICHDGKAHFPREGVFVSNGTHWFVTQRNFYEPQIITTDNTFVSGNCDVVIGIVNNTVYDPLQPELDS

SEQ ID NO: 2796 - protein, 1147 aa, Artificial Sequence
  SARS-CoV-2/France/HF2496/2020__EPI_ISL_418231 spike protein (1-1147)(K986P_V987P_T887W_A1020W)
MFVFLVLLPLVSSQCVNLTTRTQLPPAYTNSFTRGVYYPDKVFRSSVLHSTQDLFLPFFSNVTWFHAIHVSGTNGTKRFDNPVLPFNDGVYFASTEKSNIIRGWIFGTTLDSKTQSLLIVNNATNVVIKVCEFQFCNDPFLGVYYHKNNKSWMESEFRVYSSANNCTFEYVSQPFLMDLEGKQGNFKNLREFVFKNIDGYFKIYSKHTPINLVRDLPQGFSALEPLVDLPIGINITRFQTLLALHRSYLTPGDSSSGWTAGAAAYYVGYLQPRTFLLKYNENGTITDAVDCALDPLSETKCTLKSFTVEKGIYQTSNFRVQPTESIVRFPNITNLCPFGEVFNATRFASVYAWNRKRISNCVADYSVLYNSASFSTFKCYGVSPTKLNDLCFTNVYADSFVIRGDEVRQIAPGQTGKIADYNYKLPDDFTGCVIAWNSNNLDSKVGGNYNYLYRLFRKSNLKPFERDISTEIYQAGSTPCNGVEGFNCYFPLQSYGFQPTNGVGYQPYRVVVLSFELLHAPATVCGPKKSTNLVKNKCVNFNFNGLTGTGVLTESNKKFLPFQQFGRDIADTTDAVRDPQTLEILDITPCSFGGVSVITPGTNTSNQVAVLYQGVNCTEVPVAIHADQLTPTWRVYSTGSNVFQTRAGCLIGAEHVNNSYECDIPIGAGICASYQTQTNSPRRARSVASQSIIAYTMSLGAENSVAYSNNSIAIPTNFTISVTTEILPVSMTKTSVDCTMYICGDSTECSNLLLQYGSFCTQLNRALTGIAVEQDKNTQEVFAQVKQIYKTPPIKDFGGFNFSQILPDPSKPSKRSFIEDLLFNKVTLADAGFIKQYGDCLGDIVARDLICAQKFNGLTVLPPLLTDEMIAQYTSALLAGTITSGWWFGAGAALQIPFAMQMAYRFNGIGVTQNVLYENQKLIANQFNSAIGKIQDSLSSTASALGKLQDVVNQNAQALNTLVKQLSSNFGAISSVLNDILSRLDPPEAEVQIDRLITGRLQSLQTYVTQQLIRAAEIRWSANLAATKMSECVLGQSKRVDFCGKGYHLMSFPQSAPHGVVFLHVTYVPAQEKNFTTAPAICHDGKAHFPREGVFVSNGTHWFVTQRNFYEPQIITTDNTFVSGNCDVVIGIVNNTVYDPLQPELDS

SEQ ID NO: 2797 - protein, 1147 aa, Artificial Sequence
  SARS-CoV-2/USA/WA-UW291/2020__EPI_ISL_418076 spike protein (1-1147)(K986P_V987P_T887W_A1020W)
MFVFLVLLPLVSSQCVNLTTRTQLPPAYTNSFTRGVYYPDKVFRSSVLHSTQDLFLPFFSNVTWFHAIHVSGTNGTKRFDNPVLPFNDGVYFASTEKSNIIRGWIFGTTLDSKTQSLLIVNNATNVVIKVCEFQFCNDPFLGVYYHKNNKSWMESEFRVYSSANNCTFEYVSQPFLMDLEGKQGNFKNLREFVFKNIDGYFKIYSKHTPINLVRDLPQGFSALEPLVDLPIGINITRFQTLLALHRSYLTPGDSSSGWTAGAAAYYVGYLQPRTFLLKYNENGTITDAVDCALDPLSETKCTLKSFTVEKGIYQTSNFRVQPTESIVRFPNITNLCPFGEVFNATRFASVYAWNRKRISNCVADYSVLYNSASFSTFKCYGVSPTKLNDLCFTNVYADSFVIRGDEVRQIAPGQTGKIADYNYKLPDDFTGCVIAWNSNNLDSKVGGNYNYLYRLFRKSNLKPFERDISTEIYQAGSTPCNGVEGFNCYFPLQSYGFQPTNGVGYQPYRVVVLSFELLHAPATVCGPKKSTNLVKNKCVNFNFNGLTGTGVLTESNKKFLPFQQFGRDIADTTDAVRDPQTLEILDITPCSFGGVSVITPGTNTSNQVAVLYQGVNCTEVPVAIHADQLTPTWRVYSTGSNVFQTRAGCLIGAEHVNNSYECDIPIGAGICASYQTQTNSPRRARSVASQSIIAYTMSLGAENSVAYSNNSIAIPTNFTISVTTEILPVSMTKTSVDCTMYICGDSTECSNLLLQYGSFCTQLNRALTGIAVEQDKNTQEVFAQVKQIYKTPPIKDFGGFNFSQILPDPSKPSKRSFIEDLLFNKVTLADAGFIKQYGDCLGDIAARDLICAQKFNGLTVLPPLLTDEMIAQYTSALLAGTITSGWWFGAGAALQIPFAMQMAYRFNGIGVTQNVLYENQKLIANQFNSAIGKIQYSLSSTASALGKLQDVVNQNAQALNTLVKQLSSNFGAISSVLNDILSRLDPPEAEVQIDRLITGRLQSLQTYVTQQLIRAAEIRWSANLAATKMSECVLGQSKRVDFCGKGYHLMSFPQSAPHGVVFLHVTYVPAQEKNFTTAPAICHDGKAHFPREGVFVSNGTHWFVTQRNFYEPQIITTDNTFVSGNCDVVIGIVNNTVYDPLQPELDS

SEQ ID NO: 2798 - protein, 1147 aa, Artificial Sequence; identical to SEQ ID NO: 2761
  SARS-CoV-2/Portugal/PT0034/2020__EPI_ISL_418019 spike protein (1-1147)(K986P_V987P_T887W_A1020W)

SEQ ID NO: 2799 - protein, 1147 aa, Artificial Sequence; identical to SEQ ID NO: 2753
  SARS-CoV-2/Iceland/202/2020__EPI_ISL_417750 spike protein (1-1147)(K986P_V987P_T887W_A1020W)

SEQ ID NO: 2800 - protein, 1147 aa, Artificial Sequence
  SARS-CoV-2/USA/WA-UW261/2020__EPI_ISL_418046 spike protein (1-1147)(K986P_V987P_T887W_A1020W)
MFVFLVLLPLVSSQCVNLTTRTQLPPAYTNSFTRGVYYPDKVFRSSVLHSTQDLFLPFFSNVTWFHAIHVSGTNGTKRFDNPVLPFNDGVYFASTEKSNIIRGWIFGTTLDSKTQSLLIVNNATNVVIKVCEFQFCNDPFLGVYYHKNNKSWMESEFRVYSSANNCTFEYVSQPFLMDLEGKQGNFKNLREFVFKNIDGYFKIYSKHTPINLVRDLPQGFSALEPLVDLPIGINITRFQTLLALHRSYLTPGDSSSGWTAGAAAYYVGYLQPRTFLLKYNENGTITDAVDCALDPLSETKCTLKSFTVEKGIYQTSNFRVQPTESIVRFPNITNLCPFGEVFNATRFTSVYAWNRKRISNCVADYSVLYNSASFSTFKCYGVSPTKLNDLCFTNVYADSFVIRGDEVRQIAPGQTGKIADYNYKLPDDFTGCVIAWNSNNLDSKVGGNYNYLYRLFRKSNLKPFERDISTEIYQAGSTPCNGVEGFNCYFPLQSYGFQPTNGVGYQPYRVVVLSFELLHAPATVCGPKKSTNLVKNKCVNFNFNGLTGTGVLTESNKKFLPFQQFGRDIADTTDAVRDPQTLEILDITPCSFGGVSVITPGTNTSNQVAVLYQDVNCTEVPVAIHADQLTPTWRVYSTGSNVFQTRAGCLIGAEHVNNSYECDIPIGAGICASYQTQTNSPRRARSVASQSIIAYTMSLGAENSVAYSNNSIAIPTNFTISVTTEILPVSMTKTSVDCTMYICGDSTECSNLLLQYGSFCTQLNRALTGIAVEQDKNTQEVFAQVKQIYKTPPIKDFGGFNFSQILPDPSKPSKRSFIEDLLFNKVTLADAGFIKQYGDCLGDIAARDLICAQKFNGLTVLPPLLTDEMIAQYTSALLAGTITSGWWFGAGAALQIPFAMQMAYRFNGIGVTQNVLYENQKLIANQFNSAIGKIQDSLSSTASALGKLQDVVNQNAQALNTLVKQLSSNFGAISSVLNDILSRLDPPEAEVQIDRLITGRLQSLQTYVTQQLIRAAEIRWSANLAATKMSECVLGQSKRVDFCGKGYHLMSFPQSAPHGVVFLHVTYVPAQEKNFTTAPAICHDGKAHFPREGVFVSNGTHWFVTQRNFYEPQIITTDNTFVSGNCDVVIGIVNNTVYDPLQPELDS

SEQ ID NO: 2801 - protein, 1147 aa, Artificial Sequence
  SARS-CoV-2/Portugal/PT0035/2020__EPI_ISL_418020 spike protein (1-1147)(K986P_V987P_T887W_A1020W)
MFVFLVLLPLVSSQCVNLTTRTQLPPAYTNSFTRGVYYPDKVFRSSVLHSTQDLFLPFFSNVTWFHAIHVSGTNGTKRFDNPVLPFNDGVYFASTEKSNIIRGWIFGTTLDSKTQSLLIVNNATNVVIKVCEFQFCNDPFLGVYYHKNNKSWMESEFRVYSSANNCTFEYVSQPFLMDLEGKQGNFKNLREFVFKNIDGYFKIYSKHTPINLVRDLPQGFSALEPLVDLPIGINITRFQTLLALHRSYLTPGDSSSGWTAGAAAYYVGYLQPRTFLLKYNENGTITDAVDCALDPLSETKCTLKSFTVEKGIYQTSNFRVQPTESIVRFPNITNLCPFGEVFNATRFASVYAWNRKRISNCVADYSVLYNSASFSTFKCYGVSPTKLNDLCFTNVYADSFVIRGDEVRQIAPGQTGKIADYNYKLPDDFTGCVIAWNSNNLDSKVGGNYNYLYRLFRKSNLKPFERDISTEIYQAGSTPCNGVEGFNCYFPLQSYGFQPTNGVGYQPYRVVVLSFELLHAPATVCGPKKSTNLVKNKCVNFNFNGLTGTGVLTESNKKFLPFQQFGRDIADTTDAVRDPQTLEILDITPCSFGGVSVITPGTNTSNQVAVLYQDVNCTEVPVAIHADQLTPTWRVYSTGSNVFQTRAGCLIGAEHVNNSYECDIPIGAGICASYQTQTNSPRRARSVASQSIIAYTMSLGAENSVAYSNNSIAIPTNFTISVTTEILPVSMTKTSVDCTMYICGDSTECSNLLLQYGSFCTQLNRALTGIAVEQDKNTQEVFAQVKQIYKTPPIKDFGGFNFSQILPDPSKPSKRSFIEDLLFNKVTLADAGFIKQYGDCLGDISARDLICAQKFNGLTVLPPLLTDEMIAQYTSALLAGTITSGWWFGAGAALQIPFAMQMAYRFNGIGVTQNVLYENQKLIANQFNSAIGKIQDSLSSTASALGKLQDVVNQNAQALNTLVKQLSSNFGAISSVLNDILSRLDPPEAEVQIDRLITGRLQSLQTYVTQQLIRAAEIRWSANLAATKMSECVLGQSKRVDFCGKGYHLMSFPQSAPHGVVFLHVTYVPAQEKNFTTAPAICHDGKAHFPREGVFVSNGTHWFVTQRNFYEPQIITTDNTFVSGNCDVVIGIVNNTVYDPLQPELDS

SEQ ID NO: 2802 - protein, 1147 aa, Artificial Sequence
  SARS-CoV-2/USA/NY-NYUMC7/2020__EPI_ISL_418192 spike protein (1-1147)(K986P_V987P_T887W_A1020W)
MFVFLVLLPLVSSQCVNLTTRTQLPPAYTNSFTRGVYYPDKVFRSSVLHSTQDLFLPFFSNVTWFHAIHVSGTNGTKRFDNPVLPFNDGVYFASTEKSNIIRGWIFGTTLDSKTQSLLIVNNATNVVIKVCEFQFCNDPFLGVYHHKNNKSWMESEFRVYSSANNCTFEYVSQPFLMDLEGKQGNFKNLREFVFKNIDGYFKIYSKHTPINLVRDLPQGFSALEPLVDLPIGINITRFQTLLALHRSYLTPGDSSSGWTAGAAAYYVGYLQPRTFLLKYNENGTITDAVDCALDPLSETKCTLKSFTVEKGIYQTSNFRVQPTESIVRFPNITNLCPFGEVFNATRFASVYAWNRKRISNCVADYSVLYNSASFSTFKCYGVSPTKLNDLCFTNVYADSFVIRGDEVRQIAPGQTGKIADYNYKLPDDFTGCVIAWNSNNLDSKVGGNYNYLYRLFRKSNLKPFERDISTEIYQAGSTPCNGVEGFNCYFPLQSYGFQPTNGVGYQPYRVVVLSFELLHAPATVCGPKKSTNLVKNKCVNFNFNGLTGTGVLTESNKKFLPFQQFGRDIADTTDAVRDPQTLEILDITPCSFGGVSVITPGTNTSNQVAVLYQGVNCTEVPVAIHADQLTPTWRVYSTGSNVFQTRAGCLIGAEHVNNSYECDIPIGAGICASYQTQTNSPRRARSVASQSIIAYTMSLGAENSVAYSNNSIAIPTNFTISVTTEILPVSMTKTSVDCTMYICGDSTECSNLLLQYGSFCTQLNRALTGIAVEQDKNTQEVFAQVKQIYKTPPIKDFGGFNFSQILPDPSKPSKRSFIEDLLFNKVTLADAGFIKQYGDCLGDIAARDLICAQKFNGLTVLPPLLTDEMIAQYTSALLAGTITSGWWFGAGAALQIPFAMQMAYRFNGIGVTQNVLYENQKLIANQFNSAIGKIQDSLSSTASALGKLQDVVNQNAQALNTLVKQLSSNFGAISSVLNDILSRLDPPEAEVQIDRLITGRLQSLQTYVTQQLIRAAEIRWSANLAATKMSECVLGQSKRVDFCGKGYHLMSFPQSAPHGVVFLHVTYVPAQEKNFTTAPAICHDGKAHFPREGVFVSNGTHWFVTQRNFYEPQIITTDNTFVSGNCDVVIGIVNNTVYDPLQPELDS

SEQ ID NO: 2803 - protein, 1147 aa, Artificial Sequence
  SARS-CoV-2/Iceland/189/2020__EPI_ISL_417709 spike protein (1-1147)(K986P_V987P_T887W_A1020W)
MFVFLVLLPLVSSQCVNLTTRTQLPPAYTNSFTRGVYYPDKVFRSSVLHSTQDLFLPFFSNVTWFHAIHVSGTNGTKRFDNPVLPFNDGVYFASTEKSNIIRGWIFGTTLDSKTQSLLIVNNATNVVIKVCEFQFCNDPFLGVYYHKNNKSWMESEFRVYSSANNCTFEYVSQPFLMDLEGKQGNFKNLREFVFKNIDGYFKIYSKHTPINLVRDLPQGFSALEPLVDLPIGINITRFQTLLALHRSYLTPGDSSSGWTAGAAAYYVGYLQPRTFLLKYNENGTITDAVDCALDPLSETKCTLKSFTVEKGIYQTSNFRVQPTESIVRFPNITNLCPFGEVFNATRFASVYAWNRKRISNCVADYSVLYNSASFSTFKCYGVSPTKLNDLCFTNVYADSFVIRGDEVRQIAPGQTGKIADYNYKLPDDFTGCVIAWNSNNLDSKVGGNYNYLYRLFRKSNLKPFERDISTEIYQAGSTPCNGVEGFNCYFPLQSYGFQPTNGVGYQPYRVVVLSFELLHAPATVCGPKKSTNLVKNKCVNFNFNGLTGTGVLTESNKKFLPFQQFGRDIADTTDAVRDPQTLEILDITPCSFGGVSVITPGTNTSNQVAVLYQGVNCTEVPVAIHADQLTPTWRVYSTGSNVFQTRAGCLIGAEHVNNSYECDIPIGAGICASYQTQTNSPRRARSVASQSIIAYTMSLGAENSVAYSNNSIAIPTNFTISVTTEILPVSMTKTSVDCTMYICGDSTECSNLLLQYGSFCTQLNRALTGIAVEQDKNTQEVFAQVKQIYKTPPIKDFGGFNFSQILPDPSKPSKRSFIEDLLFNKVTLADAGFTKQYGDCLGDIAARDLICAQKFNGLTVLPPLLTDEMIAQYTSALLAGTITSGWWFGAGAALQIPFAMQMAYRFNGIGVTQNVLYENQKLIANQFNSAIGKIQDSLSSTASALGKLQDVVNQNAQALNTLVKQLSSNFGAISSVLNDILSRLDPPEAEVQIDRLITGRLQSLQTYVTQQLIRAAEIRWSANLAATKMSECVLGQSKRVDFCGKGYHLMSFPQSAPHGVVFLHVTYVPAQEKNFTTAPAICHDGKAHFPREGVFVSNGTHWFVTQRNFYEPQIITTDNTFVSGNCDVVIGIVNNTVYDPLQPELDS

SEQ ID NO: 2804 - protein, 1147 aa, Artificial Sequence
  SARS-CoV-2/Australia/NSW56/2020__EPI_ISL_417408 spike protein (1-1147)(K986P_V987P_T887W_A1020W)
MFVFLVLLPLVSSQCVNLTTRTQLPPAYTNSFTRGVYYPDKVFRSSVLHSTQDLFLPFFSNVTWFHAIHVSGTNGTKRFDNPVLPFNDGVYFASTEKSNIIRGWIFGTTLDSKTQSLLIVNNATNVVIKVCEFQFCNDPFLGVYYHKNNKSWMESEFRVYSSANNCTFEYVSQPFLMDLEGKQGNFKNLREFVFKNIDGYFKIYSKHTPINLVRDLPQGFSALEPLVDLPIGINITRFQTLLALHRSYLTPGDSSSGWTAGAAAYYVGYLQPRTFLLKYNENGTITDAVDCALDPLSETKCTLKSFTVEKGIYQTSNFRVQPTESIVRFPNITNLCPFGEVFNATRFASVYAWNRKRISNCVADYSVLYNSASFSTFKCYGVSPTKLNDLCFTNVYADSFVIRGDEVRQIAPGQTGKIADYNYKLPDDFTGCVIAWNSNNLDSKVGGNYNYLYRLFRKSNLKPFERDISTEIYQAGSTPCNGVEGFNCYFPLQSYGFQPTNGVGYQPYRVVVLSFELLHAPATVCGPKKSTNLVKNKCVNFNFNGLTGTGVLTESNKKFLPFQQFGRDIADTTDAVRDPQTLEILDITPCSFGGVSVITPGTNTSNQVAVLYQDVNCTEVPVAIHADQLTPTWRVYSTGSNVFQTRAGCLIGAEHVNNSYECDIPIGAGICASYQTQTNSPRRARSVASQSIIAYTMSLGAENSVAYSNNSIAIPTNFTISVTTEILPVSMTKTSVDCTMYICGDSTECSNLLLQYGSFCTQLNRALTGIAVEQDKNTQEVFAQVKQIYKTPPIKDFGGFNFSQILPDSSKPSKRSFIEDLLFNKVTLADAGFIKQYGDCLGDIAARDLICAQKFNGLTVLPPLLTDEMIAQYTSALLAGTITSGWWFGAGAALQIPFAMQMAYRFNGIGVTQNVLYENQKLIANQFNSAIGKIQDSLSSTASALGKLQDVVNQNAQALNTLVKQLSSNFGAISSVLNDILSRLDPPEAEVQIDRLITGRLQSLQTYVTQQLIRAAEIRWSANLAATKMSECVLGQSKRVDFCGKGYHLMSFPQSAPHGVVFLHVTYVPAQEKNFTTAPAICHDGKAHFPREGVFVSNGTHWFVTQRNFYEPQIITTDNTFVSGNCDVVIGIVNNTVYDPLQPELDS

SEQ ID NO: 2805 - protein, 1147 aa, Artificial Sequence
  SARS-CoV-2/Iceland/280/2020__EPI_ISL_417608 spike protein (1-1147)(K986P_V987P_T887W_A1020W)
MFVFLVLLPLVSSQCVNLTTRTQLPPAYTNSFTRGVYYPDKVFRSSVLHSTQDLFLPFFSNVTWFHAIHVSGTNGTKRFDNPVLPFNDGVYFASTEKSNIIRGWIFGTTLDSKTQSLLIVNNATNVVIKVCEFQFCNDPFLGVYYHKNNKSWMESEFRVYSSANNCTFEYVSQPFLMDLEGKQGNFKNLREFVFKNIDGYFKIYSKHTPINLVRDLPQGFSALEPLVDLPIGINITRFQTLLALHRSYLTPGDSSSGWTAGAAAYYVGYLQPRTFLLKYNENGTITDAVDCALDPLSETKCTLKSFTVEKGIYQTSNFRVQPTESIVRFPNITNLCPFGEVFNATRFASVYAWNRKRISNCVADYSVLYNSASFSTFKCYGVSPTKLNDLCFTNVYADSFVIRGDEVRQIAPGQTGKIADYNYKLPDDFTGCVIAWNSNNLDSKVGGNYNYLYRLFRKSNLKPFERDISTEIYQAGSTPCNGVEGFNCYFPLQSYGFQPTNGVGYQPYRVVVLSFELLHAPATVCGPKKSTNLVKNKCVNFNFNGLTGTGVLTESNKKFLPFQQFGRDIADTTDAVRDPQTLEILDITPCSFGGVSVITPGTNTSNQVAVLYQGVNCTEVPVAIHADQLTPTWRVYSTGSNVFQTRAGCLIGAEHVNNSYECDIPIGAGICASYHTQTNSPRRARSVASQSIIAYTMSLGAENSVAYSNNSIAIPTNFTISVTTEILPVSMTKTSVDCTMYICGDSTECSNLLLQYGSFCTQLNRALTGIAVEQDKNTQEVFAQVKQIYKTPPIKDFGGFNFSQILPDPSKPSKRSFIEDLLFNKVTLADAGFIKQYGDCLGDIAARDLICAQKFNGLTVLPPLLTDEMIAQYTSALLAGTITSGWWFGAGAALQIPFAMQMAYRFNGIGVTQNVLYENQKLIANQFNSAIGKIQDSLSSTASALGKLQDVVNQNAQALNTLVKQLSSNFGAISSVLNDILSRLDPPEAEVQIDRLITGRLQSLQTYVTQQLIRAAEIRWSANLAATKMSECVLGQSKRVDFCGKGYHLMSFPQSAPHGVVFLHVTYVPAQEKNFTTAPAICHDGKAHFPREGVFVSNGTHWFVTQRNFYEPQIITTDNTFVSGNCDVVIGIVNNTVYDPLQPELDS

SEQ ID NO: 2806 - protein, 1147 aa, Artificial Sequence; identical to SEQ ID NO: 2761
  SARS-CoV-2/Iceland/247/2020__EPI_ISL_417575 spike protein (1-1147)(K986P_V987P_T887W_A1020W)

SEQ ID NO: 2807 - protein, 1147 aa, Artificial Sequence
  SARS-CoV-2/Iceland/238/2020__EPI_ISL_417566 spike protein (1-1147)(K986P_V987P_T887W_A1020W)
MFVFLVLLPLVSSQCVNLTTRTQLPPAYTNSFTRGVYYPDKVFRSSVLHSTQDLFLPFFSNVTWFHAIHVSGTNGTKRFDNPVLPFNDGVYFASTEKSNIIRGWIFGTTLDSKTQSLLIVNNATNVVIKVCEFQFCNDPFLGVYYHKNNKSWMESEFRVYSSANNCTFEYVSQPFLMDLEGKQGNFKNLREFVFKNIDGYFKIYSKHTPINLVRDLPQGFSALEPLVDLPIGINITRFQTLLALHRSYLTPGDSSSGWTAGAAAYYVGYLQPRTFLLKYNENGTITDAVDCALDPLSETKCTLKSFTVEKGIYQTSNFRVQPTESIVRFPNITNLCPFGEVFNATRFASVYAWNRKRISNCVADYSVLYNSASFSTFKCYGVSPTKLNDLCFTNVYADSFVIRGDEVRQIAPGQTGKIADYNYKLPDDFTGCVIAWNSNNLDSKVGGNYNYLYRLFRKSNLKPFERDISTEIYQAGSTPCNGVEGFNCYFPLQSYGFQPTNGVGYQPYRVVVLSFELLHAPATVCGPKKSTNLVKNKCVNFNFNGLTGTGVLTESNKKFLPFQQFGRDIADTTDAVRDPQTLEILDITPCSFGGVSVITPGTNTSNQVAVLYQGVNCTEVPVAIHADQLTPTWRVYSTGSNVFQTRAGCLIGAEHVNNSYECDIPIGAGICASYQTQTNSPRRARSVASQSIIAYTMSLGAENSVAYSNNSIAIPTNFTISVTTEILPVSMTKTSVDCTMYICGDSTECSNLLLQYGSFCTQLNRALTGIAVEQDKNTQEVFAQVKQIYKTPPIKDFGGFNFSQILPDPSKPSKRSFIEDLLFNKVTLADVGFIKQYGDCLGDIAARDLICAQKFNGLTVLPPLLTDEMIAQYTSALLAGTITSGWWFGAGAALQIPFAMQMAYRFNGIGVTQNVLYENQKLIANQFNSAIGKIQDSLSSTASALGKLQDVVNQNAQALNTLVKQLSSNFGAISSVLNDILSRLDPPEAEVQIDRLITGRLQSLQTYVTQQLIRAAEIRWSANLAATKMSECVLGQSKRVDFCGKGYHLMSFPQSAPHGVVFLHVTYVPAQEKNFTTAPAICHDGKAHFPREGVFVSNGTHWFVTQRNFYEPQIITTDNTFVSGNCDVVIGIVNNTVYDPLQPELDS

SEQ ID NO: 2808 - protein, 1147 aa, Artificial Sequence
  SARS-CoV-2/Greece/16/2020__EPI_ISL_418265 spike protein (1-1147)(K986P_V987P_T887W_A1020W)
MFVFLVLLPLVSSQCVNLTTRTQLPPAYTNSFTRGVYYPDKVFRSSVLHSTQDLFLPFFSNVTWFHAIHVSGTNGTKRFDNPVLPFNDGVYFASTEKSNIIRGWIFGTTLDSKTQSLLIVNNATNVVIKVCEFQFCNDPFLGVYYHKNNKSWMESEFRVYSSANNCTFEYVSQPFLMDLEGKQGNFKNLREFVFKNVDGYFKIYSKHTPINLVRDLPQGFSALEPLVDLPIGINITRFQTLLALHRSYLTPGDSSSGWTAGAAAYYVGYLQPRTFLLKYNENGTITDAVDCALDPLSETKCTLKSFTVEKGIYQTSNFRVQPTESIVRFPNITNLCPFGEVFNATRFASVYAWNRKRISNCVADYSVLYNSASFSTFKCYGVSPTKLNDLCFTNVYADSFVIRGDEVRQIAPGQTGKIADYNYKLPDDFTGCVIAWNSNNLDSKVGGNYNYLYRLFRKSNLKPFERDISTEIYQAGSTPCNGVEGFNCYFPLQSYGFQPTNGVGYQPYRVVVLSFELLHAPATVCGPKKSTNLVKNKCVNFNFNGLTGTGVLTESNKKFLPFQQFGRDIADTTDAVRDPQTLEILDITPCSFGGVSVITPGTNTSNQVAVLYQDVNCTEVPVAIHADQLTPTWRVYSTGSNVFQTRAGCLIGAEHVNNSYECDIPIGAGICASYQTQTNSPRRARSVASQSIIAYTMSLGAENSVAYSNNSIAIPTNFTISVTTEILPVSMTKTSVDCTMYICGDSTECSNLLLQYGSFCTQLNRALTGIAVEQDKNTQEVFAQVKQIYKTPPIKDFGGFNFSQILPDPSKPSKRSFIEDLLFNKVTLADAGFIKQYGDCLGDIAARDLICAQKFNGLTVLPPLLTDEMIAQYTSALLAGTITSGWWFGAGAALQIPFAMQMAYRFNGIGVTQNVLYENQKLIANQFNSAIGKIQDSLSSTASALGKLQDVVNQNAQALNTLVKQLSSNFGAISSVLNDILSRLDPPEAEVQIDRLITGRLQSLQTYVTQQLIRAAEIRWSANLAATKMSECVLGQSKRVDFCGKGYHLMSFPQSAPHGVVFLHVTYVPAQEKNFTTAPAICHDGKAHFPREGVFVSNGTHWFVTQRNFYEPQIITTDNTFVSGNCDVVIGIVNNTVYDPLQPELDS

SEQ ID NO: 2809 - protein, 1147 aa, Artificial Sequence
  SARS-CoV-2/Iceland/319/2020__EPI_ISL_417648 spike protein (1-1147)(K986P_V987P_T887W_A1020W)
MFVFLVLLPLVSSQCVNLTTRTQLPPAYTNSFTRGVYYPDKVFRSSVLHSTQDLFLPFFSNVTWFHAIHVSGTNGTKRFDNPVLPFNDGVYFASTEKSNIIRGWIFGTTLDSKTQSLLIVNNATNVVIKVCEFQFCNDPFLGVYYHKNNKSWMESEFRVYSSANNCTFEYVSQPFLIDLEGKQGNFKNLREFVFKNIDGYFKIYSKHTPINLVRDLPQGFSALEPLVDLPIGINITRFQTLLALHRSYLTPGDSSSGWTAGAAAYYVGYLQPRTFLLKYNENGTITDAVDCALDPLSETKCTLKSFTVEKGIYQTSNFRVQPTESIVRFPNITNLCPFGEVFNATRFASVYAWNRKRISNCVADYSVLYNSASFSTFKCYGVSPTKLNDLCFTNVYADSFVIRGDEVRQIAPGQTGKIADYNYKLPDDFTGCVIAWNSNNLDSKVGGNYNYLYRLFRKSNLKPFERDISTEIYQAGSTPCNGVEGFNCYFPLQSYGFQPTNGVGYQPYRVVVLSFELLHAPATVCGPKKSTNLVKNKCVNFNFNGLTGTGVLTESNKKFLPFQQFGRDIADTTDAVRDPQTLEILDITPCSFGGVSVITPGTNTSNQVAVLYQGVNCTEVPVAIHADQLTPTWRVYSTGSNVFQTRAGCLIGAEHVNNSYECDIPIGAGICASYQTQTNSPRRARSVASQSIIAYTMSLGAENSVAYSNNSIAIPTNFTISVTTEILPVSMTKTSVDCTMYICGDSTECSNLLLQYGSFCTQLNRALTGIAVEQDKNTQEVFAQVKQIYKTPPIKDFGGFNFSQILPDPSKPSKRSFIEDLLFNKVTLADAGFIKQYGDCLGDIAARDLICAQKFNGLTVLPPLLTDEMIAQYTSALLAGTITSGWWFGAGAALQIPFAMQMAYRFNGIGVTQNVLYENQKLIANQFNSAIGKIQDSLSSTASALGKLQDVVNQNAQALNTLVKQLSSNFGAISSVLNDILSRLDPPEAEVQIDRLITGRLQSLQTYVTQQLIRAAEIRWSANLAATKMSECVLGQSKRVDFCGKGYHLMSFPQSAPHGVVFLHVTYVPAQEKNFTTAPAICHDGKAHFPREGVFVSNGTHWFVTQRNFYEPQIITTDNTFVSGNCDVVIGIVNNTVYDPLQPELDS

SEQ ID NO: 2810 - protein, 1147 aa, Artificial Sequence
  SARS-CoV-2/Congo/94/2020__EPI_ISL_417947 spike protein (1-1147)(K986P_V987P_T887W_A1020W)
MFVFLVLLPLVSSQCVNLTTRTQLPPAYTNSFTRGVYYPDKVFRSSVLHSTQDLFLPFFSNVTWFHAIHVSGTNGTKRFDNPVLPFNDGVYFASTEKSNIIRGWIFGTTLDSKTQSLLIVNNATNVVIKVCEFQFCNDPFLGVYYHKNNKSWMESEFRVYSSANNCTFEYVSQPFLMDLEGKQGNFKNLREFVFKNIDGYFKIYSKHTPINLVRDLPQGFSALEPLVDLPIGINITRFQTLLALHRSYLTPGDSSSGWTAGAAAYYVGYLQPRTFLLKYNENGTITDAVDCALDPLSETKCTLKSFTVEKGIYQTSNFRVQPTESIVRFPNITNLCPFGEVFNATRFASVYAWNRKRISNCVADYSVLYNSASFSTFKCYGVSPTKLNDLCFTNVYADSFVIRGDEVRQIAPGQTGKIADYNYKLPDDFTGCVIAWNSNNLDSKVGGNYNYLYRLFRKSNLKPFERDISTEIYQAGSTPCNGVEGFNCYFPLQSYGFQPTNGVGYQPYRVVVLSFELLHAPATVCGPKKSTNLVKNKCVNFNFNGLTGTGVLTESNKKFLPFQQFGRDIADTTDAVRDPQTLEILDITPCSFGGVSVITPGTNTSNQVAVLYQGVNCTEVPVAIHADQLTPTWRVYSTGSNVFQTRAGCLIGAEHVNNSYECDIPIGAGICASYQTQTNSPRRARSVASQSIIAYTMSLGAENSVAYSNNSIAIPTNFTISVTTEILPVSMTKTSVDCTMYICGDSTECSNLLLQYGSFCTQLNRALTGIAVEQDKNTQEVFAQVKQIYKTPPIKDFGGFNFSQILPDPSKPSKRSFIEDILFNKVTLADAGFIKQYGDCLGDIAARDLICAQKFNGLTVLPPLLTDEMIAQYTSALLAGTITSGWWFGAGAALQIPFAMQMAYRFNGIGVTQNVLYENQKLIANQFNSAIGKIQDSLSSTASALGKLQDVVNQNAQALNTLVKQLSSNFGAISSVLNDILSRLDPPEAEVQIDRLITGRLQSLQTYVTQQLIRAAEIRWSANLAATKMSECVLGQSKRVDFCGKGYHLMSFPQSAPHGVVFLHVTYVPAQEKNFTTAPAICHDGKAHFPREGVFVSNGTHWFVTQRNFYEPQIITTDNTFVSGNCDVVIGIVNNTVYDPLQPELDS

SEQ ID NO: 2811 - protein, 1147 aa, Artificial Sequence
  SARS-CoV-2/Congo/158/2020__EPI_ISL_417950 spike protein (1-1147)(K986P_V987P_T887W_A1020W)
MFVFLVLLPLVSSQCVNLTTRTQLPPAYTNSFTRGVYYPDKVFRSSVLHSTQDLFLPFFSNVTWFHAIHVSGTNGTKRFDNPVLPFNDGVYFASTEKSNIIRGWIFGTTLDSKTQSLLIVNNATNVVIKVCEFQFCNDPFLGVYYHKNNKSWMESEFRVYSSANNCTFEYVSQPFLMDLEGKQGNFKNLREFVFKNIDGYFKIYSKHTPINLVRDLPQGFSALEPLVDLPIGINITRFQTLLALHRSYLTPGDSSSGWTAGAAAYYVGYLQPRTFLLKYNENGTITDAVDCALDPLSETKCTLKSFTVEKGIYQTSNFRVQPTESIVRFPNITNLCPFGEVFNATRFASVYAWNRKRISNCVADYSVLYNSASFSTFKCYGVSPTKLNDLCFTNVYADSFVIRGDEVRQIAPGQTGKIADYNYKLPDDFTGCVIAWNSNNLDSKVGGNYNYLYRLFRKSNLKPFERDISTEIYQAGSTPCNGVEGFNCYFPLQSYGFQPTNGVGYQPYRVVVLSFELLHAPATVCGPKKSTNLVKNKCVNFNFNGLTGTGVLTESNKKFLPFQQFGRDIADTTDAVRDPQTLEILDITPCSFGGVSVITPGTNTSNQVAVLYQDVNCTEVPVAIHADQLTPTWRVYSTGSNVFQTRAGCLIGAEHVNNSYECDIPIGAGICASYQTQTNSPRRARSVASQSIIAYTMSLGAENSVAYSNNSIAIPTNFTISVTTEILPVSMTKTSVDCTMYICGDSTECSNLLLQYGSFCTQLNRALTGIAVEQDKNTQEVFAQVKQIYKTPPIKDFGGFNFSQILPDPSKPSKRSFIEDLLFNKVTLADAGFIKQYGDCLGDIAARDLICAQKFNGLTVLPPLLTDEMIAQYTSALLAGTITSGWWFGAGAALQIPFAMQMAYRFNGIGVTQNVLYENQKLIANQFNSAIGKIQDSLSSTASALGKLQDVVNQNAQALNTLVKQLSSNFGAISSVLNDILSRLDPPEAEVQIDRLITGRLQSLQTYVTQQLIRAAEIRWSANLAATKMSECVLGQSKRVDFCGKGYHLMSFPQSAPHGVVFLHVTYVPAQEKNFTTAPAICHDGKAHFPREGVFVSNGTHWFVTQRNFYEPQIITTDNTFLSGNCDVVIGIVNNTVYDPLQPELDS

SEQ ID NO: 2812 - protein, 1147 aa, Artificial Sequence
  SARS-CoV-2/USA/UT-00034/2020__EPI_ISL_417977 spike protein (1-1147)(K986P_V987P_T887W_A1020W)
MFVFLVLLPLVSSQCVNLTTRTQLPPAYTNSFTRGVYYPDKVFRSSVLHSTQDLFLPFFSNVTWFHAIHVSGTNGTKRFDNPVLPFNDGVYFASTEKSNIIRGWIFGTTLDSKTQSLLIVNNATNVVIKVCEFQFCNDPFLGVYYYKNNKSWMESEFRVYSSANNCTFEYVSQPFLMDLEGKQGNFKNLREFVFKNIDGYFKIYSKHTPINLVRDLPQGFSALEPLVDLPIGINITRFQTLLALHRSYLTPGDSSSGWTAGAAAYYVGYLQPRTFLLKYNENGTITDAVDCALDPLSETKCTLKSFTVEKGIYQTSNFRVQPTESIVRFPNITNLCPFGEVFNATRFASVYAWNRKRISNCVADYSVLYNSASFSTFKCYGVSPTKLNDLCFTNVYADSFVIRGDEVRQIAPGQTGKIADYNYKLPDDFTGCVIAWNSNNLDSKVGGNYNYLYRLFRKSNLKPFERDISTEIYQAGSTPCNGVEGFNCYFPLQSYGFQPTNGVGYQPYRVVVLSFELLHAPATVCGPKKSTNLVKNKCVNFNFNGLTGTGVLTESNKKFLPFQQFGRDIADTTDAVRDPQTLEILDITPCSFGGVSVITPGTNTSNQVAVLYQGVNCTEVPVAIHADQLTPTWRVYSTGSNVFQTRAGCLIGAEHVNNSYECDIPIGAGICASYQTQTNSPRRARSVASQSIIAYTMSLGAENSVAYSNNSIAIPTNFTISVTTEILPVSMTKTSVDCTMYICGDSTECSNLLLQYGSFCTQLNRALTGIAVEQDKNTQEVFAQVKQIYKTPPIKDFGGFNFSQILPDPSKPSKRSFIEDLLFNKVTLADAGFIKQYGDCLGDIAARDLICAQKFNGLTVLPPLLTDEMIAQYTSALLAGTITSGWWFGAGAALQIPFAMQMAYRFNGIGVTQNVLYENQKLIANQFNSAIGKIQDSLSSTASALGKLQDVVNQNAQALNTLVKQLSSNFGAISSVLNDILSRLDPPEAEVQIDRLITGRLQSLQTYVTQQLIRAAEIRWSANLAATKMSECVLGQSKRVDFCGKGYHLMSFPQSAPHGVVFLHVTYVPAQEKNFTTAPAICHDGKAHFPREGVFVSNGTHWFVTQRNFYEPQIITTDNTFVSGNCDVVIGIVNNTVYDPLQPELDS

SEQ ID NO: 2813 - protein, 1147 aa, Artificial Sequence
  SARS-CoV-2/USA/UT-00033/2020__EPI_ISL_417976 spike protein (1-1147)(K986P_V987P_T887W_A1020W)
MFVFLVLLPLVSSQCVNLTTRTQLPPAYTNSFTRGVYYPDKVFRSSVLHSTQDLFLPFFSNVTWFHAIHVSGTNGTKRFDNPVLPFNDGVYFASTEKSNIIRGWIFGTTLDSKTQSLLIVNNATNVVIKVCEFQFCNDPFLGVYYHKNNKSWMESEFRVYSSANNCTFEYVSQPFLMDLEGKQGNFKNLREFVFKNIDGYFKIYSKHTPINLVRDLPQGFSALEPLVDLPIGINITRFQTLLALHRSYLTPGDSSSGLTAGAAAYYVGYLQPRTFLLKYNENGTITDAVDCALDPLSETKCTLKSFTVEKGIYQTSNFRVQPTESIVRFPNITNLCPFGEVFNATRFASVYAWNRKRISNCVADYSVLYNSASFSTFKCYGVSPTKLNDLCFTNVYADSFVIRGDEVRQIAPGQTGKIADYNYKLPDDFTGCVIAWNSNNLDSKVGGNYNYLYRLFRKSNLKPFERDISTEIYQAGSTPCNGVEGFNCYFPLQSYGFQPTNGVGYQPYRVVVLSFELLHAPATVCGPKKSTNLVKNKCVNFNFNGLTGTGVLTESNKKFLPFQQFGRDIADTTDAVRDPQTLEILDITPCSFGGVSVITPGTNTSNQVAVLYQGVNCTEVPVAIHADQLTPTWRVYSTGSNVFQTRAGCLIGAEHVNNSYECDIPIGAGICASYQTQTNSPRRARSVASQSIIAYTMSLGAENSVAYSNNSIAIPTNFTISVTTEILPVSMTKTSVDCTMYICGDSTECSNLLLQYGSFCTQLNRALTGIAVEQDKNTQEVFAQVKQIYKTPPIKDFGGFNFSQILPDPSKPSKRSFIEDLLFNKVTLADAGFIKQYGDCLGDIAARDLICAQKFNGLTVLPPLLTDEMIAQYTSALLAGTITSGWWFGAGAALQIPFAMQMAYRFNGIGVTQNVLYENQKLIANQFNSAIGKIQDSLSSTASALGKLQDVVNQNAQALNTLVKQLSSNFGAISSVLNDILSRLDPPEAEVQIDRLITGRLQSLQTYVTQQLIRAAEIRWSANLAATKMSECVLGQSKRVDFCGKGYHLMSFPQSAPHGVVFLHVTYVPAQEKNFTTAPAICHDGKAHFPREGVFVSNGTHWFVTQRNFYEPQIITTDNTFVSGNCDVVIGIVNNTVYDPLQPELDS

SEQ ID NO: 2814 - protein, 1147 aa, Artificial Sequence
  SARS-CoV-2/USA/WI-13/2020__EPI_ISL_417516 spike protein (1-1147)(K986P_V987P_T887W_A1020W)
MFVFLVLLPLVSSQCVNLTTRTQLPPAYTNSFTRGVYYPDKVFRSSVLHSTQDLFLPFFSNVTWFHAIHVSGTNGTKRFDNPVLPFNDGVYFASTEKSNIIRGWIFGTTLDSKTQSLLIVNNATNVVIKVCEFQFCNDPFLGVYYHKNNKSWMESEFRVYSSANNCTFEYVSQPFLMDLEGKQGNFKNLREFVFKNIDGYFKIYSKHTPINLVRDLPQGFSALEPLVDLPIGINITRFQTLLALHRSYLTPGDSSSGWTAGAAAYYVGYLQPRTFLLKYNENGTITDAVDCALDPLSETKCTLKSFTVEKGIYQTSNFRVLPTESIVRFPNITNLCPFGEVFNATRFASVYAWNRKRISNCVADYSVLYNSASFSTFKCYGVSPTKLNDLCFTNVYADSFVIRGDEVRQIAPGQTGKIADYNYKLPDDFTGCVIAWNSNNLDSKVGGNYNYLYRLFRKSNLKPFERDISTEIYQAGSTPCNGVEGFNCYFPLQSYGFQPTNGVGYQPYRVVVLSFELLHAPATVCGPKKSTNLVKNKCVNFNFNGLTGTGVLTESNKKFLPFQQFGRDIADTTDAVRDPQTLEILDITPCSFGGVSVITPGTNTSNQVAVLYQGVNCTEVPVAIHADQLTPTWRVYSTGSNVFQTRAGCLIGAEHVNNSYECDIPIGAGICASYQTQTNSPRRARSVASQSIIAYTMSLGAENSVAYSNNSIAIPTNFTISVTTEILPVSMTKTSVDCTMYICGDSTECSNLLLQYGSFCTQLNRALTGIAVEQDKNTQEVFAQVKQIYKTPPIKDFGGFNFSQILPDPSKPSKRSFIEDLLFNKVTLADAGFIKQYGDCLGDIAARDLICAQKFNGLTVLPPLLTDEMIAQYTSALLAGTITSGWWFGAGAALQIPFAMQMAYRFNGIGVTQNVLYENQKLIANQFNSAIGKIQDSLSSTASALGKLQDVVNQNAQALNTLVKQLSSNFGAISSVLNDILSRLDPPEAEVQIDRLITGRLQSLQTYVTQQLIRAAEIRWSANLAATKMSECVLGQSKRVDFCGKGYHLMSFPQSAPHGVVFLHVTYVPAQEKNFTTAPAICHDGKAHFPREGVFVSNGTHWFVTQRNFYEPQIITTDNTFVSGNCDVVIGIVNNTVYDPLQPELDS

SEQ ID NO: 2815 - protein, 1146 aa, Artificial Sequence
  SARS-CoV-2/India/1-27/2020__EPI_ISL_413522 spike protein (1-1146)(K985P_V986P_T886W_A1019W)
MFVFLVLLPLVSSQCVNLTTRTQLPPAYTNSFTRGVYYPDKVFRSSVLHSTQDLFLPFFSNVTWFHAIHVSGTNGTKRFDNPVLPFNDGVYFASTEKSNIIRGWIFGTTLDSKTQSLLIVNNATNVVIKVCEFQFCNDPFLGVYHKNNKSWMESEFRVYSSANNCTFEYVSQPFLMDLEGKQGNFKNLREFVFKNIDGYFKIYSKHTPINLVRDLPQGFSALEPLVDLPIGINITRFQTLLALHRSYLTPGDSSSGWTAGAAAYYVGYLQPRTFLLKYNENGTITDAVDCALDPLSETKCTLKSFTVEKGIYQTSNFRVQPTESIVRFPNITNLCPFGEVFNATRFASVYAWNRKRISNCVADYSVLYNSASFSTFKCYGVSPTKLNDLCFTNVYADSFVIRGDEVIQIAPGQTGKIADYNYKLPDDFTGCVIAWNSNNLDSKVGGNYNYLYRLFRKSNLKPFERDISTEIYQAGSTPCNGVEGFNCYFPLQSYGFQPTNGVGYQPYRVVVLSFELLHAPATVCGPKKSTNLVKNKCVNFNFNGLTGTGVLTESNKKFLPFQQFGRDIADTTDAVRDPQTLEILDITPCSFGGVSVITPGTNTSNQVAVLYQDVNCTEVPVAIHADQLTPTWRVYSTGSNVFQTRAGCLIGAEHVNNSYECDIPIGAGICASYQTQTNSPRRARSVASQSIIAYTMSLGAENSVAYSNNSIAIPTNFTISVTTEILPVSMTKTSVDCTMYICGDSTECSNLLLQYGSFCTQLNRALTGIAVEQDKNTQEVFAQVKQIYKTPPIKDFGGFNFSQILPDPSKPSKRSFIEDLLFNKVTLADAGFIKQYGDCLGDIAARDLICAQKFNGLTVLPPLLTDEMIAQYTSALLAGTITSGWWFGAGAALQIPFAMQMAYRFNGIGVTQNVLYENQKLIANQFNSAIGKIQDSLSSTASALGKLQDVVNQNAQALNTLVKQLSSNFGAISSVLNDILSRLDPPEAEVQIDRLITGRLQSLQTYVTQQLIRAAEIRWSANLAATKMSECVLGQSKRVDFCGKGYHLMSFPQSAPHGVVFLHVTYVPAQEKNFTTAPAICHDGKAHFPREGVFVSNGTHWFVTQRNFYEPQIITTDNTFVSGNCDVVIGIVNNTVYDPLQPELDS

SEQ ID NO: 2816 - protein, 1141 aa, Artificial Sequence
  SARS-CoV-2/pangolin/Guangxi/P4L/2017__EPI_ISL_410538 spike protein (1-1141)(K980P_V981P_T881W_A1014W)
MFVFLFVLPLVSSQCVNLTTRTGIPPGYTNSSTRGVYYPDKVFRSSILHLTQDLFLPFFSNVTWFNTINYQGGFKKFDNPVLPFNDGVYFASTEKSNIIRGWIFGTTLDARTQSLLIVNNATNVVIKVCEFQFCTDPFLGVYYHNNNKTWVENEFRVYSSANNCTFEYISQPFLMDLEGKQGNFKNLREFVFKNVDGYFKIYSKHTPIDLVRDLPRGFAALEPLVDLPIGINITRFQTLLALHRSYLTPGNLESGWTTGAAAYYVGYLQQRTFLLSYNQNGTITDAVDCSLDPLSETKCTLKSLTVEKGIYQTSNFRVQPTISIVRFPNITNLCPFGEVFNASKFASVYAWNRKRISNCVADYSVLYNSTSFSTFKCYGVSPTKLNDLCFTNVYADSFVVKGDEVRQIAPGQTGVIADYNYKLPDDFTGCVIAWNSVKQDALTGGNYGYLYRLFRKSKLKPFERDISTEIYQAGSTPCNGQVGLNCYYPLERYGFHPTTGVNYQPFRVVVLSFELLNGPATVCGPKLSTTLVKDKCVNFNFNGLTGTGVLTTSKKQFLPFQQFGRDISDTTDAVRDPQTLEILDITPCSFGGVSVITPGTNTSNQVAVLYQDVNCTEVPMAIHAEQLTPAWRVYSAGANVFQTRAGCLVGAEHVNNSYECDIPVGAGICASYHSMSSLRSVNQRSIIAYTMSLGAENSVAYSNNSIAIPTNFTISVTTEILPVSMTKTSVDCTMYICGDSIECSNLLLQYGSFCTQLNRALTGIAVEQDKNTQEVFAQVKQIYKTPPIKDFGGFNFSQILPDPSKPSKRSFIEDLLFNKVTLADAGFIKQYGDCLGDIAARDLICAQKFNGLTVLPPLLTDEMIAQYTSALLAGTITSGWWFGAGAALQIPFAMQMAYRFNGIGVTQNVLYENQKLIANQFNSAIGKIQDSLSSTASALGKLQDVVNQNAQALNTLVKQLSSNFGAISSVLNDILSRLDPPEAEVQIDRLITGRLQSLQTYVTQQLIRAAEIRWSANLAATKMSECVLGQSKRVDFCGKGYHLMSFPQSAPHGVVFLHVTYVPAQEKNFTTAPAICHEGKAHFPREGVFVSNGTHWFITQRNFYEPQIITTDNTFVSGSCDVVIGIVNNTVYDPLQPELDS

SEQ ID NO: 2817 - protein, 1141 aa, Artificial Sequence
  SARS-CoV-2/pangolin/Guangxi/P5L/2017__EPI_ISL_410540 spike protein (1-1141)(K980P_V981P_T881W_A1014W)
MFVFLFVLPLVSSQCVNLTTRTGIPPGYTNSSTRGVYYPDKVFRSSILHLTQDLFLPFFSNVTWFNTINYQGGFKKFDNPVLPFNDGVYFASTEKSNIIRGWIFGTTLDARTQSLLIVNNATNVVIKVCEFQFCTDPFLGVYYHNNNKTWVENEFRVYSSANNCTFEYISQPFLMDLEGKQGNFKNLREFVFKNVDGYFKIYSKHTPIDLVRDLPRGFAALEPLVDLPIGINITRFQTLLALHRSYLTPGKLESGWTTGAAAYYVGYLQQRTFLLSYNQNGTITDAVDCSLDPLSETKCTLKSLTVEKGIYQTSNFRVQPTISIVRFPNITNLCPFGEVFNASKFASVYAWNRKRISNCVADYSVLYNSTSFSTFKCYGVSPTKLNDLCFTNVYADSFVVKGDEVRQIAPGQTGVIADYNYKLPDDFTGCVIAWNSVKQDALTGGNYGYLYRLFRKSKLKPFERDISTEIYQAGSTPCNGQVGLNCYYPLERYGFHPTTGVNYQPFRVVVLSFELLNGPATVCGPKLSTTLVKDKCVNFNFNGLTGTGVLTTSKKQFLPFQQFGRDISDTTDAVRDPQTLEILDITPCSFGGVSVITPGTNTSNQVAVLYQDVNCTEVPMAIHAEQLTPAWRVYSAGANVFQTRAGCLVGAEHVNNSYECDIPVGAGICASYHSMSSFRSVNQRSIIAYTMSLGAENSVAYSNNSIAIPTNFTISVTTEILPVSMTKTSVDCTMYICGDSIECSNLLLQYGSFCTQLNRALTGIAVEQDKNTQEVFAQVKQIYKTPPIKDFGGFNFSQILPDPSKPSKRSFIEDLLFNKVTLADAGFIKQYGDCLGDIAARDLICAQKFNGLTVLPPLLTDEMIAQYTSALLAGTITSGWWFGAGAALQIPFAMQMAYRFNGIGVTQNVLYENQKLIANQFNSAIGKIQDSLSSTASALGKLQDVVNQNAQALNTLVKQLSSNFGAISSVLNDILSRLDPPEAEVQIDRLITGRLQSLQTYVTQQLIRAAEIRWSANLAATKMSECVLGQSKRVDFCGKGYHLMSFPQSAPHGVVFLHVTYVPAQEKNFTTAPAICHEGKAHFPREGVFVSNGTHWFITQRNFYEPQIITTDNTFVSGSCDVVIGIVNNTVYDPLQPELDS

SEQ ID NO: 2818 - protein, 1141 aa, Artificial Sequence
  SARS-CoV-2/pangolin/Guangxi/P5E/2017__EPI_ISL_410541 spike protein (1-1141)(K980P_V981P_T881W_A1014W)
MFVFLFVLPLVSSQCVNLTTRTGIPPGYTNSSTRGVYYPDKVFRSSILHLTQDLFLPFFSNVTWFNTITYQGGSKKFDNPVLPFNDGVYFASTEKSNIIRGWIFGTTLDARTQSLLIVNNATNVVIKVCEFQFCTDPFLGVYYHNNNKTWVENEFRVYSSANNCTFEYISQPFLMDLEGKQGNFKNLREFVFKNVDGYFKIYSKHTPIDLVRDLPRGFAALEPLVDLPIGINITRFQTLLALHRSYLTPGKLESGWTTGAAAYYVGYLQQRTFLLSYNQNGTITDAVDCSLDPLSETKCTLKSLTVEKGIYQTSNFRVQPTISIVRFPNITNLCPFGEVFNASKFASVYAWNRKRISNCVADYSVLYNSTSFSTFKCYGVSPTKLNDLCFTNVYADSFVVKGDEVRQIAPGQTGVIADYNYKLPDDFTGCVIAWNSVKQDALTGDNYGYLYRLFRKSKLKPFERDISTEIYQAGSTPCNGQVGLNCYYPLERYGFHPTTGVNYQPFRVVVLSFELLNGPATVCGPKLSTTLVKDKCVNFNFNGLTGTGVLTTSKKQFLPFQQFGRDISDTTDAVRDPQTLEILDITPCSFGGVSVITPGTNTSNQVAVLYQDVNCTEVPMAIHAEQLTPAWRVYSAGANVFQTRAGCLVGAEHVNNSYECDIPVGAGICASYHSMSSFRSVNQRSIIAYTMSLGAENSVAYSNNSIAIPTNFTISVTTEILPVSMTKTSVDCTMYICGDSIECSNLLLQYGSFCTQLNRALTGIAVEQDKNTQEVFAQVKQIYKTPPIKDFGGFNFSQILPDPSKPSKRSFIEDLLFNKVTLADAGFIKQYGDCLGDIAARDLICAQKFNGLTVLPPLLTDEMIAQYTSALLAGTITSGWWFGAGAALQIPFAMQMAYRFNGIGVTQNVLYENQKLIANQFNSAIGKIQDSLSSTASALGKLQDVVNQNAQALNTLVKQLSSNFGAISSVLNDILSRLDPPEAEVQIDRLITGRLQSLQTYVTQQLIRAAEIRWSANLAATKMSECVLGQSKRVDFCGKGYHLMSFPQSAPHGVVFLHVTYVPAQEKNFTTAPAICHEGKAHFPREGVFVSNGTHWFITQRNFYEPQIITTDNTFVSGSCDVVIGIVNNTVYDPLQPELDS

SEQ ID NO: 2819 - protein, 1139 aa, Artificial Sequence
  SARS-CoV-2/pangolin/Guangxi/P1E/2017__EPI_ISL_410539 spike protein (1-1139)(K978P_V979P_T879W_A1012W)
MFVFLFVLPLVSSQCVNLTTRTGIQPGYTNSSTRGVYYPDKVFRSSILHLTQDLFLPFFSNVTWFNTINYQGGFKKFDNPVLPFNDGVYFASTEKSNIIRGWIFGTTLDARTQSLLIVNNATNVVIKVCEFQFCTDPFLGVYYHNNNKTWVENEFRVYSSANNCTFEYISQPFLMDLEGKQGNFKNLREFVFKNVDGYFKIYSKHTPIDLVRDLPRGFAALEPLVDLPIGINITRFQTLLALHRSYLTPGKLESGWTTGAAAYYVGYLQQRTFLLSYNQNGTITDAVDCSLDPLSETKCTLKSLTVEKGIYQTSNFRVQPTISIVRFPNITNLCPFGEVFNASKFASVYAWNRKRISNCVADYSVLYNSTSFSTFKCYGVSPTKLNDLCFTNVYADSFVVKGDEVRQIAPGQTGVIADYNYKLPDDFTGCVIAWNSVKQDALTGGNYLYRLFRKSKLKPFERDISTEIYQAGSTPCNGQVGLNCYYPLERYGFHPTTGVNYQPFRVVVLSFELLNGPATVCGPKLSTTLVKDKCVNFNFNGLTGTGVLTTSKKQFLPFQQFGRDISDTTDAVRDPQTLEILDITPCSFGGVSVITPGTNTSNQVAVLYQDVNCTEVPMAIHAEQLTPAWRVYSAGANVFQTRAGCLVGAEHVNNSYECDIPVGAGICASYHSMSSLRSVNQRSIIAYTMSLGAENSVAYSNNSIAIPTNFTISVTTEILPVSMTKTSVDCTMYICGDSIECSNLLLQYGSFCTQLNRALTGIAVEQDKNTQEVFAQVKQIYKTPPIKDFGGFNFSQILPDPSKPSKRSFIEDLLFNKVTLADAGFIKQYGDCLGDIAARDLICAQKFNGLTVLPPLLTDEMIAQYTSALLAGTITSGWWFGAGAALQIPFAMQMAYRFNGIGVTQNVLYENQKLIANQFNSAIGKIQDSLSSTASALGKLQDVVNQNAQALNTLVKQLSSNFGAISSVLNDILSRLDPPEAEVQIDRLITGRLQSLQTYVTQQLIRAAEIRWSANLAATKMSECVLGQSKRVDFCGKGYHLMSFPQSAPHGVVFLHVTYVPAQEKNFTTAPAICHEGKAHFPREGVFVSNGTHWFITQRNFYEPQIITTDNTFVSGSCDVVIGIVNNTVYDPLQPELDS

SEQ ID NO: 2820 - protein, 1147 aa, Artificial Sequence
  SARS-CoV-2/Wuhan/WIV05/2019__EPI_ISL_402128 spike protein (1-1147)(K986P_V987P_P1069F)
MFVFLVLLPLVSSQCVNLTTRTQLPPAYTNSFTRGVYYPDKVFRSSVLHSTQDLFLPFFSNVTWFHAIHVSGTNGTKRFDNPVLPFNDGVYFASTEKSNIIRGWIFGTTLDSKTQSLLIVNNATNVVIKVCEFQFCNDPFLGVYYHKNNKSWMESEFRVYSSANNCTFEYVSQPFLMDLEGKQGNFKNLREFVFKNIDGYFKIYSKHTPINLVRDLPQGFSALEPLVDLPIGINITRFQTLLALHRSYLTPGDSSSGWTAGAAAYYVGYLQPRTFLLKYNENGTITDAVDCALDPLSETKCTLKSFTVEKGIYQTSNFRVQPTESIVRFPNITNLCPFGEVFNATRFASVYAWNRKRISNCVADYSVLYNSASFSTFKCYGVSPTKLNDLCFTNVYADSFVIRGDEVRQIAPGQTGKIADYNYKLPDDFTGCVIAWNSNNLDSKVGGNYNYLYRLFRKSNLKPFERDISTEIYQAGSTPCNGVEGFNCYFPLQSYGFQPTNGVGYQPYRVVVLSFELLHAPATVCGPKKSTNLVKNKCVNFNFNGLTGTGVLTESNKKFLPFQQFGRDIADTTDAVRDPQTLEILDITPCSFGGVSVITPGTNTSNQVAVLYQDVNCTEVPVAIHADQLTPTWRVYSTGSNVFQTRAGCLIGAEHVNNSYECDIPIGAGICASYQTQTNSPRRARSVASQSIIAYTMSLGAENSVAYSNNSIAIPTNFTISVTTEILPVSMTKTSVDCTMYICGDSTECSNLLLQYGSFCTQLNRALTGIAVEQDKNTQEVFAQVKQIYKTPPIKDFGGFNFSQILPDPSKPSKRSFIEDLLFNKVTLADAGFIKQYGDCLGDIAARDLICAQKFNGLTVLPPLLTDEMIAQYTSALLAGTITSGWTFGAGAALQIPFAMQMAYRFNGIGVTQNVLYENQKLIANQFNSAIGKIQDSLSSTASALGKLQDVVNQNAQALNTLVKQLSSNFGAISSVLNDILSRLDPPEAEVQIDRLITGRLQSLQTYVTQQLIRAAEIRASANLAATKMSECVLGQSKRVDFCGKGYHLMSFPQSAPHGVVFLHVTYVFAQEKNFTTAPAICHDGKAHFPREGVFVSNGTHWFVTQRNFYEPQIITTDNTFVSGNCDVVIGIVNNTVYDPLQPELDS

SEQ ID NO: 2821 - protein, 1143 aa, Artificial Sequence
  SARS-CoV-2/bat/Yunnan/RaTG13/2013__EPI_ISL_402131 spike protein (1-1143)(K982P_V983P_P1065F)
MFVFLVLLPLVSSQCVNLTTRTQLPPAYTNSSTRGVYYPDKVFRSSVLHLTQDLFLPFFSNVTWFHAIHVSGTNGIKRFDNPVLPFNDGVYFASTEKSNIIRGWIFGTTLDSKTQSLLIVNNATNVVIKVCEFQFCNDPFLGVYYHKNNKSWMESEFRVYSSANNCTFEYVSQPFLMDLEGKQGNFKNLREFVFKNIDGYFKIYSKHTPINLVRDLPPGFSALEPLVDLPIGINITRFQTLLALHRSYLTPGDSSSGWTAGAAAYYVGYLQPRTFLLKYNENGTITDAVDCALDPLSETKCTLKSFTVEKGIYQTSNFRVQPTDSIVRFPNITNLCPFGEVFNATTFASVYAWNRKRISNCVADYSVLYNSTSFSTFKCYGVSPTKLNDLCFTNVYADSFVITGDEVRQIAPGQTGKIADYNYKLPDDFTGCVIAWNSKHIDAKEGGNFNYLYRLFRKANLKPFERDISTEIYQAGSKPCNGQTGLNCYYPLYRYGFYPTDGVGHQPYRVVVLSFELLNAPATVCGPKKSTNLVKNKCVNFNFNGLTGTGVLTESNKKFLPFQQFGRDIADTTDAVRDPQTLEILDITPCSFGGVSVITPGTNASNQVAVLYQDVNCTEVPVAIHADQLTPTWRVYSTGSNVFQTRAGCLIGAEHVNNSYECDIPIGAGICASYQTQTNSRSVASQSIIAYTMSLGAENSVAYSNNSIAIPTNFTISVTTEILPVSMTKTSVDCTMYICGDSTECSNLLLQYGSFCTQLNRALTGIAVEQDKNTQEVFAQVKQIYKTPPIKDFGGFNFSQILPDPSKPSKRSFIEDLLFNKVTLADAGFIKQYGDCLGDIAARDLICAQKFNGLTVLPPLLTDEMIAQYTSALLAGTITSGWTFGAGAALQIPFAMQMAYRFNGIGVTQNVLYENQKLIANQFNSAIGKIQDSLSSTASALGKLQDVVNQNAQALNTLVKQLSSNFGAISSVLNDILSRLDPPEAEVQIDRLITGRLQSLQTYVTQQLIRAAEIRASANLAATKMSECVLGQSKRVDFCGKGYHLMSFPQSAPHGVVFLHVTYVFAQEKNFTTAPAICHDGKAHFPREGVFVSNGTHWFVTQRNFYEPQIITTDNTFVSGSCDVVIGIVNNTVYDPLQPELDS

SEQ ID NO: 2822 - protein, 1147 aa, Artificial Sequence
  SARS-CoV-2/Wuhan/HBCDC-HB-01/2019__EPI_ISL_402132 spike protein (1-1147)(K986P_V987P_P1069F)
MFVFLVLLPLVSSQCVNLTTRTQLPPAYTNSITRGVYYPDKVFRSSVLHSTQDLFLPFFSNVTWFHAIHVSGTNGTKRFDNPVLPFNDGVYFASTEKSNIIRGWIFGTTLDSKTQSLLIVNNATNVVIKVCEFQFCNDPFLGVYYHKNNKSWMESEFRVYSSANNCTFEYVSQPFLMDLEGKQGNFKNLREFVFKNIDGYFKIYSKHTPINLVRDLPQGFSALEPLVDLPIGINITRFQTLLALHRSYLTPGDSSSGWTAGAAAYYVGYLQPRTFLLKYNENGTITDAVDCALDPLSETKCTLKSFTVEKGIYQTSNFRVQPTESIVRFPNITNLCPFGEVFNATRFASVYAWNRKRISNCVADYSVLYNSASFSTFKCYGVSPTKLNDLCFTNVYADSFVIRGDEVRQIAPGQTGKIADYNYKLPDDFTGCVIAWNSNNLDSKVGGNYNYLYRLFRKSNLKPFERDISTEIYQAGSTPCNGVEGFNCYFPLQSYGFQPTNGVGYQPYRVVVLSFELLHAPATVCGPKKSTNLVKNKCVNFNFNGLTGTGVLTESNKKFLPFQQFGRDIADTTDAVRDPQTLEILDITPCSFGGVSVITPGTNTSNQVAVLYQDVNCTEVPVAIHADQLTPTWRVYSTGSNVFQTRAGCLIGAEHVNNSYECDIPIGAGICASYQTQTNSPRRARSVASQSIIAYTMSLGAENSVAYSNNSIAIPTNFTISVTTEILPVSMTKTSVDCTMYICGDSTECSNLLLQYGSFCTQLNRALTGIAVEQDKNTQEVFAQVKQIYKTPPIKDFGGFNFSQILPDPSKPSKRSFIEDLLFNKVTLADAGFIKQYGDCLGDIAARDLICAQKFNGLTVLPPLLTDEMIAQYTSALLAGTITSGWTFGAGAALQIPFAMQMAYRFNGIGVTQNVLYENQKLIANQFNSAIGKIQDSLSSTASALGKLQDVVNQNAQALNTLVKQLSSNFGAISSVLNDILSRLDPPEAEVQIDRLITGRLQSLQTYVTQQLIRAAEIRASANLAATKMSECVLGQSKRVDFCGKGYHLMSFPQSAPHGVVFLHVTYVFAQEKNFTTAPAICHDGKAHFPREGVFVSNGTHWFVTQRNFYEPQIITTDNTFVSGNCDVVIGIVNNTVYDPLQPELDS

SEQ ID NO: 2823 - protein, 1147 aa, Artificial Sequence
  SARS-CoV-2/Guangdong/20SF028/2020__EPI_ISL_403936 spike protein (1-1147)(K986P_V987P_P1069F)
MFVFLVLLPLVSSQCVNLTTRTQLPPAYTNSFTRGVYYPDKVFRSSVLYSTQDLFLPFFSNVTWFHAIHVSGTNGTKRFDNPVLPFNDGVYFASTEKSNIIRGWIFGTTLDSKTQSLLIVNNATNVVIKVCEFQFCNDPFLGVYYHKNNKSWMESEFRVYSSANNCTFEYVSQPFLMDLEGKQGNFKNLREFVFKNIDGYFKIYSKHTPINLVRDLPQGFSALEPLVDLPIGINITRFQTLLALHRSYLTPGDSSSGWTAGAAAYYVGYLQPRTFLLKYNENGTITDAVDCALDPLSETKCTLKSFTVEKGIYQTSNFRVQPTESIVRFPNITNLCPFGEVFNATRFASVYAWNRKRISNCVADYSVLYNSASFSTFKCYGVSPTKLNDLCFTNVYADSFVIRGDEVRQIAPGQTGKIADYNYKLPDDFTGCVIAWNSNNLDSKVGGNYNYLYRLFRKSNLKPFERDISTEIYQAGSTPCNGVEGFNCYFPLQSYGFQPTNGVGYQPYRVVVLSFELLHAPATVCGPKKSTNLVKNKCVNFNFNGLTGTGVLTESNKKFLPFQQFGRDIADTTDAVRDPQTLEILDITPCSFGGVSVITPGTNTSNQVAVLYQDVNCTEVPVAIHADQLTPTWRVYSTGSNVFQTRAGCLIGAEHVNNSYECDIPIGAGICASYQTQTNSPRRARSVASQSIIAYTMSLGAENSVAYSNNSIAIPTNFTISVTTEILPVSMTKTSVDCTMYICGDSTECSNLLLQYGSFCTQLNRALTGIAVEQDKNTQEVFAQVKQIYKTPPIKDFGGFNFSQILPDPSKPSKRSFIEDLLFNKVTLADAGFIKQYGDCLGDIAARDLICAQKFNGLTVLPPLLTDEMIAQYTSALLAGTITSGWTFGAGAALQIPFAMQMAYRFNGIGVTQNVLYENQKLIANQFNSAIGKIQDSLSSTASALGKLQDVVNQNAQALNTLVKQLSSNFGAISSVLNDILSRLDPPEAEVQIDRLITGRLQSLQTYVTQQLIRAAEIRASANLAATKMSECVLGQSKRVDFCGKGYHLMSFPQSAPHGVVFLHVTYVFAQEKNFTTAPAICHDGKAHFPREGVFVSNGTHWFVTQRNFYEPQIITTDNTFVSGNCDVVIGIVNNTVYDPLQPELDS

SEQ ID NO: 2824 - protein, 1147 aa, Artificial Sequence
  SARS-CoV-2/Shenzhen/SZTH-001/2020__EPI_ISL_406592 spike protein (1-1147)(K986P_V987P_P1069F)
MFVFLVLLPLVSSQCVNLTTRTQLPPAYTNSFTRGVYYPDKVFRSSVLHSTQDLFLPFFSNVTWFHAIHVSGTNGTKRFDNPVLPFNDGVYFASTEKSNIIRGWIFGTTLDSKTQSLLIVNNATNVVIKVCEFQFCNDPFLGVYYHKNNKSWMESEFRVYSSANNCTFEYVSQPFLMDLEGKQGNFKNLREFVFKNIDGYFKIYSKHTPINLVRDLPQGFSALEPLVDLPIGINITRFQTLLALHRSYLTPGDSSSGWTAGAAAYYVGYLQPRTFLLKYNENGTITDAVDCALDPLSETKCTLKSFTVEKGIYQTSNFRVQPTESIVRFPNITNLCPFGEVFNATRFASVYAWNRKRISNCVADYSVLYNSASFSTFKCYGVSPTKLNDLCFTNVYADSFVIRGDEVRQIAPGQTGKIADYNYKLPDDFTGCVIAWNSNNLDSKVGGNYNYLYRLFRKSNLKPFERDISTEIYQAGSTPCNGVEGFNCYFPLQSYGFQPTNGVGYQPYRVVVLSFELLHAPATVCGPKKSTNLVKNKCVNFNFNGLTGTGVLTESNKKFLPFQQFGRDIADTTDAVRDPQTLEILDITPCSFGGVSVITPGTNTSNQVAVLYQDVNCTEVPVAIHADQLTPTWRVYSTGSNVFQTRAGCLIGAEHVNNSYECDIPIGAGICASYQTQTNSPRRARSVASQSIIAYTMSLGAENSVAYSNNSIAIPTNFTISVTTEILPVSMTKTSVDCTMYICGDSTECSNLLLQYGSFCTQLNRALTGIAVEQDKNTQEVFAQVKQIYKTPPIKDFGGFNFSQILPDPSKPSKRSFIEDLLFNKVTLADAGFIKQYGDCLGDIAARDLICAQKFNGLTVLPPLLTDEMIAQYTSALLAGTITSGWTFGAGAALQIPFAMQMAYRFNGIGVTQNVLYENQKLIANQFNSAIGKIQDSLSSTASALGKLQDVVNQNAQALNTLVKQLSSNFGAISSVLNDILSRLDPPEAEVQIDRLITGRLQSLQTYVTQQLIRAAEIRASANLAATKMSECVLGQSKRVDFCGKGYHLMSFPQSAPHGVVFLHVTYVFAQEKNFTTAPAICHDGKAHFPREGVFVSNGTHWFVTQRNFYEPQIITTDNTFVSGNCDVLIGIVNNTVYDPLQPELDS

SEQ ID NO: 2825 - protein, 1147 aa, Artificial Sequence
  SARS-CoV-2/Shenzhen/SZTH-004/2020__EPI_ISL_406595 spike protein (1-1147)(K986P_V987P_P1069F)
MFVFLVLLPLVSSQCVNLTTRTQLPPAYTNSFTRGVYYPDKVFRSSVLHSTQDLFLPFFSNVTWFHAIHVSGTNGTKRFDNPVLPFNDGVYFASTEKSNIIRGWIFGTTLDSKTQSLLIVNNATNVVIKVCEFQFCNDPFLGVYYHKNNKSWMESEFRVYSSANNCTFEYVSQPFLMDLEGKQGNFKNLREFVFKNIDGYFKIYSKHTPINLVRDLPQGFSALEPLVDLPIGINITRFQTLLALHRSYLTPGDSSSGWTAGAAAYYVGYLQPRTFLLKYNENGTITDAVDCALDPLSETKCTLKSFTVEKGIYQTSNFRVQPTESIVRFPNITNLCPFGEVFNATRFASVYAWDRKRISNCVAYYSVLYNSASFSTFKCYGVSPTKLNDLCFTNVYADSFVIRGDEVRQIAPGQTGKIADYNYKLPDDFTGCVIAWNSNNLDSKVGGNYNYLYRLFRKSNLKPFERDISTEIYQAGSTPCNGVEGFNCYFPLQSYGFQPTNGVGYQPYRVVVLSFELLHAPATVCGPKKSTNLVKNKCVNFNFNGLTGTGVLTESNKKFLPFQQFGRDIADTTDAVRDPQTLEILDITPCSFGGVSVITPGTNTSNQVAVLYQDVNCTEVPVAIHADQLTPTWRVYSTGSNVFQTRAGCLIGAEHVNNSYECDIPIGAGICASYQTQTNSPRRARSVASQSIIAYTMSLGAENSVAYSNNSIAIPTNFTISVTTEILPVSMTKTSVDCTMYICGDSTECSNLLLQYGSFCTQLNRALTGIAVEQDKNTQEVFAQVKQIYKTPPIKDFGGFNFSQILPDPSKPSKRSFIEDLLFNKVTLADAGFIKQYGDCLGDIAARDLICAQKFNGLTVLPPLLTDEMIAQYTSALLAGTITSGWTFGAGAALQIPFAMQMAYRFNGIGVTQNVLYENQKLIANQFNSAIGKIQDSLSSTASALGKLQDVVNQNAQALNTLVKQLSSNFGAISSVLNDILSRLDPPEAEVQIDRLITGRLQSLQTYVTQQLIRAAEIRASANLAATKMSECVLGQSKRVDFCGKGYHLMSFPQSAPHGVVFLHVTYVFAQEKNFTTAPAICHDGKAHFPREGVFVSNGTHWFVTQRNFYEPQIITTDNTFVSGNCDVVIGIVNNTVYDPLQPELDS

SEQ ID NO: 2826 - protein, 1147 aa, Artificial Sequence
  SARS-CoV-2/France/IDF0372/2020__EPI_ISL_406596 spike protein (1-1147)(K986P_V987P_P1069F)
MFVFLVLLPLVSSQCVNLTTRTQLPPAYTNSFTRGVYYPDKVFRSSVLHSTQDLFLPFFSNVTWFHAIHVSGTNGTKRFDNPVLPFNDGVYFASTEKSNIIRGWIFGTTLDSKTQSLLIVNNATNVVIKVCEFQFCNDPFLGVYYHKNNKSWMESEFRVYSSANNCTFEYVSQPFLMDLEGKQGNFKNLREFVFKNIDGYFKIYSKHTPINLVRDLPQGFSALEPLVDLPIGINITRFQTLLALHRSYLTPGDSSSGWTAGAAAYYVGYLQPRTFLLKYNENGTITDAVDCALDPLSETKCTLKSFTVEKGIYQTSNFRVQPTESIVRFPNITNLCPFGEVFNATRFASVYAWNRKRISNCVADYSFLYNSASFSTFKCYGVSPTKLNDLCFTNVYADSFVIRGDEVRQIAPGQTGKIADYNYKLPDDFTGCVIAWNSNNLDSKVGGNYNYLYRLFRKSNLKPFERDISTEIYQAGSTPCNGVEGFNCYFPLQSYGFQPTNGVGYQPYRVVVLSFELLHAPATVCGPKKSTNLVKNKCVNFNFNGLTGTGVLTESNKKFLPFQQFGRDIADTTDAVRDPQTLEILDITPCSFGGVSVITPGTNTSNQVAVLYQDVNCTEVPVAIHADQLTPTWRVYSTGSNVFQTRAGCLIGAEHVNNSYECDIPIGAGICASYQTQTNSPRRARSVASQSIIAYTMSLGAENSVAYSNNSIAIPTNFTISVTTEILPVSMTKTSVDCTMYICGDSTECSNLLLQYGSFCTQLNRALTGIAVEQDKNTQEVFAQVKQIYKTPPIKDFGGFNFSQILPDPSKPSKRSFIEDLLFNKVTLADAGFIKQYGDCLGDIAARDLICAQKFNGLTVLPPLLTDEMIAQYTSALLAGTITSGWTFGAGAALQIPFAMQMAYRFNGIGVTQNVLYENQKLIANQFNSAIGKIQDSLSSTASALGKLQDVVNQNAQALNTLVKQLSSNFGAISSVLNDILSRLDPPEAEVQIDRLITGRLQSLQTYVTQQLIRAAEIRASANLAATKMSECVLGQSKRVDFCGKGYHLMSFPQSAPHGVVFLHVTYVFAQEKNFTTAPAICHDGKAHFPREGVFVSNGTHWFVTQRNFYEPQIITTDNTFVSGNCDVVIGIVNNTVYDPLQPELDS

SEQ ID NO: 2827 - protein, 1147 aa, Artificial Sequence
  SARS-CoV-2/Australia/VIC01/2020__EPI_ISL_406844 spike protein (1-1147)(K986P_V987P_P1069F)
MFVFLVLLPLVSSQCVNLTTRTQLPPAYTNSFTRGVYYPDKVFRSSVLHSTQDLFLPFFSNVTWFHAIHVSGTNGTKRFDNPVLPFNDGVYFASTEKSNIIRGWIFGTTLDSKTQSLLIVNNATNVVIKVCEFQFCNDPFLGVYYHKNNKSWMESEFRVYSSANNCTFEYVSQPFLMDLEGKQGNFKNLREFVFKNIDGYFKIYSKHTPINLVRDLPQGFSALEPLVDLPIGINITRFQTLLALHRRYLTPGDSSSGWTAGAAAYYVGYLQPRTFLLKYNENGTITDAVDCALDPLSETKCTLKSFTVEKGIYQTSNFRVQPTESIVRFPNITNLCPFGEVFNATRFASVYAWNRKRISNCVADYSVLYNSASFSTFKCYGVSPTKLNDLCFTNVYADSFVIRGDEVRQIAPGQTGKIADYNYKLPDDFTGCVIAWNSNNLDSKVGGNYNYLYRLFRKSNLKPFERDISTEIYQAGSTPCNGVEGFNCYFPLQSYGFQPTNGVGYQPYRVVVLSFELLHAPATVCGPKKSTNLVKNKCVNFNFNGLTGTGVLTESNKKFLPFQQFGRDIADTTDAVRDPQTLEILDITPCSFGGVSVITPGTNTSNQVAVLYQDVNCTEVPVAIHADQLTPTWRVYSTGSNVFQTRAGCLIGAEHVNNSYECDIPIGAGICASYQTQTNSPRRARSVASQSIIAYTMSLGAENSVAYSNNSIAIPTNFTISVTTEILPVSMTKTSVDCTMYICGDSTECSNLLLQYGSFCTQLNRALTGIAVEQDKNTQEVFAQVKQIYKTPPIKDFGGFNFSQILPDPSKPSKRSFIEDLLFNKVTLADAGFIKQYGDCLGDIAARDLICAQKFNGLTVLPPLLTDEMIAQYTSALLAGTITSGWTFGAGAALQIPFAMQMAYRFNGIGVTQNVLYENQKLIANQFNSAIGKIQDSLSSTASALGKLQDVVNQNAQALNTLVKQLSSNFGAISSVLNDILSRLDPPEAEVQIDRLITGRLQSLQTYVTQQLIRAAEIRASANLAATKMSECVLGQSKRVDFCGKGYHLMSFPQSAPHGVVFLHVTYVFAQEKNFTTAPAICHDGKAHFPREGVFVSNGTHWFVTQRNFYEPQIITTDNTFVSGNCDVVIGIVNNTVYDPLQPELDS

SEQ ID NO: 2828 - protein, 1147 aa, Artificial Sequence
  SARS-CoV-2/Germany/BavPat1/2020__EPI_ISL_406862 spike protein (1-1147)(K986P_V987P_P1069F)
MFVFLVLLPLVSSQCVNLTTRTQLPPAYTNSFTRGVYYPDKVFRSSVLHSTQDLFLPFFSNVTWFHAIHVSGTNGTKRFDNPVLPFNDGVYFASTEKSNIIRGWIFGTTLDSKTQSLLIVNNATNVVIKVCEFQFCNDPFLGVYYHKNNKSWMESEFRVYSSANNCTFEYVSQPFLMDLEGKQGNFKNLREFVFKNIDGYFKIYSKHTPINLVRDLPQGFSALEPLVDLPIGINITRFQTLLALHRSYLTPGDSSSGWTAGAAAYYVGYLQPRTFLLKYNENGTITDAVDCALDPLSETKCTLKSFTVEKGIYQTSNFRVQPTESIVRFPNITNLCPFGEVFNATRFASVYAWNRKRISNCVADYSVLYNSASFSTFKCYGVSPTKLNDLCFTNVYADSFVIRGDEVRQIAPGQTGKIADYNYKLPDDFTGCVIAWNSNNLDSKVGGNYNYLYRLFRKSNLKPFERDISTEIYQAGSTPCNGVEGFNCYFPLQSYGFQPTNGVGYQPYRVVVLSFELLHAPATVCGPKKSTNLVKNKCVNFNFNGLTGTGVLTESNKKFLPFQQFGRDIADTTDAVRDPQTLEILDITPCSFGGVSVITPGTNTSNQVAVLYQGVNCTEVPVAIHADQLTPTWRVYSTGSNVFQTRAGCLIGAEHVNNSYECDIPIGAGICASYQTQTNSPRRARSVASQSIIAYTMSLGAENSVAYSNNSIAIPTNFTISVTTEILPVSMTKTSVDCTMYICGDSTECSNLLLQYGSFCTQLNRALTGIAVEQDKNTQEVFAQVKQIYKTPPIKDFGGFNFSQILPDPSKPSKRSFIEDLLFNKVTLADAGFIKQYGDCLGDIAARDLICAQKFNGLTVLPPLLTDEMIAQYTSALLAGTITSGWTFGAGAALQIPFAMQMAYRFNGIGVTQNVLYENQKLIANQFNSAIGKIQDSLSSTASALGKLQDVVNQNAQALNTLVKQLSSNFGAISSVLNDILSRLDPPEAEVQIDRLITGRLQSLQTYVTQQLIRAAEIRASANLAATKMSECVLGQSKRVDFCGKGYHLMSFPQSAPHGVVFLHVTYVFAQEKNFTTAPAICHDGKAHFPREGVFVSNGTHWFVTQRNFYEPQIITTDNTFVSGNCDVVIGIVNNTVYDPLQPELDS

SEQ ID NO: 2829 - protein, 1147 aa, Artificial Sequence
  SARS-CoV-2/Wuhan/HBCDC-HB-02/2020__EPI_ISL_412978 spike protein (1-1147)(K986P_V987P_P1069F)
MFVFLVLLPLVSSQCVNLTTRTQLPPAYTNSFTRGVYYPDKVFRSSVLHSTQDLFLPFFSNVTWFHAIHVSGTNGTKRFDNPVLPFNDGVYFASTEKSNIIRGWIFGTTLDSKTQSLLIVNNATNVVIKVCEFQFCNDPFLGVYYHKNNKSWMESEFRVYSSANNCTFEYVSQPFLMDLEGKQGNFKNLREFVFKNIDGYFKIYSKHTPINLVRDLPQGFSALEPLVDLPIGINITRFQTLLALHRSYLTPGDSSSGWTAGAAAYYVGYLQPRTFLLKYNENGTITDAVDCALDPLSETKCTLKSFTVEKGIYQTSNFRVQPTESIVRFPNITNLCPFGEVFNATRFASVYAWNRKRISNCVADYSVLYNSASFSTFKCYGVSPTKLNDLCFTNVYADSFVIRGDEVRQIAPGQTGKIADYNYKLPDDFTGCVIAWNSNNLDSKVGGNYNYLYRLFRKSNLKPFERDISTEIYQAGSTPCNGVEGFNCYFPLQSYGFQPTNGVGYQPYRVVVLSFELLHAPATVCGPKKSTNLVKNKCVNFNFNGLTGTGVLTESNKKFLPFQQFGRDIADTTDAVRDPQTLEILDITPCSFGGVSVITPGTNTSNQVAVLYQDVNCTEVPVAIHADQLTPTWRVYSTGSNVFQTRAGCLIGAEHVNNSYECDIPIGAGICASYQTQTNSPRRARSVASQSIIAYTMSLGAENSVAYSNNSIAIPTNFTISVTTEILPVSMTKTSVDCTMYICGDSTECSNFLLQYGSFCTQLNRALTGIAVEQDKNTQEVFAQVKQIYKTPPIKDFGGFNFSQILPDPSKPSKRSFIEDLLFNKVTLADAGFIKQYGDCLGDIAARDLICAQKFNGLTVLPPLLTDEMIAQYTSALLAGTITSGWTFGAGAALQIPFAMQMAYRFNGIGVTQNVLYENQKLIANQFNSAIGKIQDSLSSTASALGKLQDVVNQNAQALNTLVKQLSSNFGAISSVLNDILSRLDPPEAEVQIDRLITGRLQSLQTYVTQQLIRAAEIRASANLAATKMSECVLGQSKRVDFCGKGYHLMSFPQSAPHGVVFLHVTYVFAQEKNFTTAPAICHDGKAHFPREGVFVSNGTHWFVTQRNFYEPQIITTDNTFVSGNCDVVIGIVNNTVYDPLQPELDS

SEQ ID NO: 2830 - protein, 1147 aa, Artificial Sequence
  SARS-CoV-2/Australia/QLD02/2020__EPI_ISL_407896 spike protein (1-1147)(K986P_V987P_P1069F)
MFVFLVLLPLVSSQCVNLTTRTQLPPAYTNSFTRGVYYPDKVFRSSVLHSTQDLFLPFFSNVTWFHAIHVSGTNGTKRFDNPVLPFNDGVYFASTEKSNIIRGWIFGTTLDSKTQSLLIVNNATNVVIKVCEFQFCNDPFLGVYYHKNNKSWMESEFRVYSSANNCTFEYVSQPFLMDLEGKQGNFKNLREFVFKNIDGYFKIYSKHTPINLVRDLPQGFSALEPLVDLPIGINITRFQTLLALHRSYLTPGDSSSGWTAGAAAYYVGYLQPRTFLLKYNENGTITDAVDCALDPLSETKCTLKSFTVEKGIYQTSNFRVQPTESIVRFPNITNLCPFGEVFNATRFASVYAWNRKRISNCVADYSVLYNSASFSTFKCYGVSPTKLNDLCFTNVYADSFVIRGDEVRQIAPGQTGKIADYNYKLPDDFTGCVIAWNSNNLDSKVGGNYNYLYRLFRKSNLKPFERDISTEIYQAGSTPCNGVEGFNCYFPLQSYGFQPTNGVGYQPYRVVVLSFELLHAPATVCGPKKSTNLVKNKCVNFNFNGLTGTGVLTESNKKFLPFQQFGRDIADTTDAVRDPQTLEILDITPCSFGGVSVITPGTNTSNQVAVLYQDVNCTEVPVAIHADQLTPTWRVYSTGSNVFQTRAGCLIGAEHVNNSYECDIPIGAGICASYQTQTNSPRRARSVASQSIIAYTMSLGAENSVAYSNNSIAIPTNFTISVTTEILPVSMTKTSVDCTMYICGDSTECSNLLLQYGSFCTQLNRALTGIAVEQDKNTQEVFAQVKQIYKTPPIKDFGGFNFSQILPDPSKPSKRSFIEDLLFNKVTLADAGFIKQYGDCLGDIAARDLICAQKFNGLTVLPPLLTDEMIAQYTSALLAGTITSGWTFGAGAALQIPFAMQMAYRFNGIGVTQNVLYENQKLIANQFNSAIGKIQDSLSSTASALGKLQDVVNQNAQALNTLVKQLSSNFGAISSVLNDILSRLDPPEAEVQIDRLITGRLQSLQTYVTQQLIRAAEIRASANLAATKMSECVLGQSKRVDFCGKGYHLMSFPQSAPHGVVFLHVTYVFAQEKNFTTAPAICHDGKAHFPREGVFVSNGTHWFVTQRNFYEPQIITTDNTFVSGNCDVVIGIVNNTVYDPLQLELDS

SEQ ID NO: 2831 - protein, 1147 aa, Artificial Sequence
  SARS-CoV-2/India/1-31/2020__EPI_ISL_413523 spike protein (1-1147)(K986P_V987P_P1069F)
MFVFLVLLPLVSSQCVNLTTRTQLPPAYTNSFTRGVYYPDKVFRSSVLHSTQDLFLPFFSNVTWFHAIHVSGTNGTKRFDNPVLPFNDGVYFASTEKSNIIRGWIFGTTLDSKTQSLLIVNNATNVVIKVCEFQFCNDPFLGVYYHKNNKSWMESEFRVYSSANNCTFEYVSQPFLMDLEGKQGNFKNLREFVFKNIDGYFKIYSKHTPINLVRDLPQGFSALEPLVDLPIGINITRFQTLLALHRSYLTPGDSSSGWTAGAAAYYVGYLQPRTFLLKYNENGTITDAVDCALDPLSETKCTLKSFTVEKGIYQTSNFRVQPTESIVRFPNITNLCPFGEVFNATRFASVYAWNRKRISNCVADYSVLYNSASFSTFKCYGVSPTKLNDLCFTNVYADSFVIRGDEVRQIAPGQTGKIADYNYKLPDDFTGCVIAWNSNNLDSKVGGNYNYLYRLFRKSNLKPFERDISTEIYQAGSTPCNGVEGFNCYFPLQSYGFQPTNGVGYQPYRVVVLSFELLHAPATVCGPKKSTNLVKNKCVNFNFNGLTGTGVLTESNKKFLPFQQFGRDIADTTDAVRDPQTLEILDITPCSFGGVSVITPGTNTSNQVAVLYQDVNCTEVPVAIHADQLTPTWRVYSTGSNVFQTRAGCLIGAEHVNNSYECDIPIGAGICASYQTQTNSPRRARSVASQSIIAYTMSLGAENSVAYSNNSIAIPTNFTISVTTEILPVSMTKTSVDCTMYICGDSTECSNLLLQYGSFCTQLNRALTGIAVEQDKNTQEVFAQVKQIYKTPPIKDFGGFNFSQILPDPSKPSKRSFIEDLLFNKVTLADAGFIKQYGDCLGDIAARDLICAQKFNGLTVLPPLLTDEMIAQYTSALLAGTITSGWTFGAGAALQIPFAMQMAYRFNGIGVTQNVLYENQKLIANQFNSVIGKIQDSLSSTASALGKLQDVVNQNAQALNTLVKQLSSNFGAISSVLNDILSRLDPPEAEVQIDRLITGRLQSLQTYVTQQLIRAAEIRASANLAATKMSECVLGQSKRVDFCGKGYHLMSFPQSAPHGVVFLHVTYVFAQEKNFTTAPAICHDGKAHFPREGVFVSNGTHWFVTQRNFYEPQIITTDNTFVSGNCDVVIGIVNNTVYDPLQPELDS

SEQ ID NO: 2832 - protein, 1147 aa, Artificial Sequence
  SARS-CoV-2/Guangdong/GD2020087-P0008/2020__EPI_ISL_413863 spike protein (1-1147)(K986P_V987P_P1069F)
MFVFLVLLPLVSSQCVNLTTRTQLPPAYTNSFTRGVYYPDKVFRSSVLHSTQDLFLPFFSNVTWFHAIHVSGTNGTKRFDNPVLPFNDGVYFASTEKSNIIRGWIFGTTLDSKTQSLLIVNNATNVVIKVCEFQFCNDPFLGVYYHKNNKSWMESEFRVYSSANNCTFEYVSQPFLMDLEGKQGNFKNLREFVFKNIDGYFKIYSKHTPINLVRDLPQGFSALEPLVDLPIGINITRFQTLLALHRSYLTPGDSSSGWTAGAAAYYVGYLQPRTFLLKYNENGTITDAVDCALDPLSETKCTLKSFTVEKGIYQTSNFRVQPTESIVRFPNITNLCPFGEVFNATRFASVYAWNRKRISNCVADYSVLYNSASFSTFKCYGVSPTKLNDLCFTNVYADSFVIRGDEVREIAPGQTGKIADYNYKLPDDFTGCVIAWNSNNLDSKVGGNYNYLYRLFRKSNLKPFERDISTEIYQAGSTPCNGVEGFNCYFPLQSYGFQPTNGVGYQPYRVVVLSFELLHAPATVCGPKKSTNLVKNKCVNFNFNGLTGTGVLTESNKKFLPFQQFGRDIADTTDAVRDPQTLEILDITPCSFGGVSVITPGTNTSNQVAVLYQDVNCTEVPVAIHADQLTPTWRVYSTGSNVFQTRAGCLIGAEHVNNSYECDIPIGAGICASYQTQTNSPRRARSVASQSIIAYTMSLGAENSVAYSNNSIAIPTNFTISVTTEILPVSMTKTSVDCTMYICGDSTECSNLLLQYGSFCTQLNRALTGIAVEQDKNTQEVFAQVKQIYKTPPIKDFGGFNFSQILPDPSKPSKRSFIEDLLFNKVTLADAGFIKQYGDCLGDIAARDLICAQKFNGLTVLPPLLTDEMIAQYTSALLAGTITSGWTFGAGAALQIPFAMQMAYRFNGIGVTQNVLYENQKLIANQFNSAIGKIQDSLSSTASALGKLQDVVNQNAQALNTLVKQLSSNFGAISSVLNDILSRLDPPEAEVQIDRLITGRLQSLQTYVTQQLIRAAEIRASANLAATKMSECVLGQSKRVDFCGKGYHLMSFPQSAPHGVVFLHVTYVFAQEKNFTTAPAICHDGKAHFPREGVFVSNGTHWFVTQRNFYEPQIITTDNTFVSGNCDVVIGIVNNTVYDPLQPELDS

SEQ ID NO: 2833 - protein, 1147 aa, Artificial Sequence
  SARS-CoV-2/Sweden/01/2020__EPI_ISL_411951 spike protein (1-1147)(K986P_V987P_P1069F)
MFVFLVLLPLVSSQCVNLTTRTQLPPAYTNSFTRGVYYPDKVFRSSVLHSTQDLFLPFFSNVTWFHAIHVSGTNGTKRFDNPVLPFNDGVYFASTEKSNIIRGWIFGTTLDSKTQSLLIVNNATNVVIKVCEFQFCNDPFLGVYYHKNNKSWMESEFRVYSSANNCTFEYVSQPFLMDLEGKQGNFKNLREFVFKNIDGYFKIYSKHTPINLVRDLPQGFSALEPLVDLPIGINITRFQTLLALHRSYLTPGDSSSGWTAGAAAYYVGYLQPRTFLLKYNENGTITDAVDCALDPLSETKCTLKSFTVEKGIYQTSNFRVQPTESIVRFPNITNLCPFGEVFNATRFASVYAWNRKRISNCVADYSVLYNSASFSTFKCYGVSPTKLNDLCFTNVYADSFVIRGDEVRQIAPGQTGKIADYNYKLPDDFTGCVIAWNSNNLDSKVGGNYNYLYRLFRKSNLKPFERDISTEIYQAGSTPCNGVEGFNCYFPLQSYGFQPTNGVGYQPYRVVVLSFELLHAPATVCGPKKSTNLVKNKCVNFNFNGLTGTGVLTESNKKFLPFQQFGRDIADTTDAVRDPQTLEILDITPCSFGGVSVITPGTNTSNQVAVLYQDVNCTEVPVAIHADQLTPTWRVYSTGSNVFQTRAGCLIGAEHVNNSYECDIPIGAGICASYQTQTNSPRRARSVASQSIIAYTMSLGAENSVAYSNNSIAIPTNFTISVTTEILPVSMTKTSVDCTMYICGDSTECSNLLLQYGSFCTQLNRALTGIAVEQDKNTQEVFAQVKQIYKTPPIKDCGGFNFSQILPDPSKPSKRSFIEDLLFNKVTLADAGFIKQYGDCLGDIAARDLICAQKFNGLTVLPPLLTDEMIAQYTSALLAGTITSGWTFGAGAALQIPFAMQMAYRFNGIGVTQNVLYENQKLIANQFNSAIGKIQDSLSSTASALGKLQDVVNQNAQALNTLVKQLSSNFGAISSVLNDILSRLDPPEAEVQIDRLITGRLQSLQTYVTQQLIRAAEIRASANLAATKMSECVLGQSKRVDFCGKGYHLMSFPQSAPHGVVFLHVTYVFAQEKNFTTAPAICHDGKAHFPREGVFVSNGTHWFVTQRNFYEPQIITTDNTFVSGNCDVVIGIVNNTVYDPLQPELDS

SEQ ID NO: 2834 - protein, 1147 aa, Artificial Sequence
  SARS-CoV-2/Tianmen/HBCDC-HB-07/2020__EPI_ISL_412983 spike protein (1-1147)(K986P_V987P_P1069F)
MFVFLVLLPLVSSQCVNLTTRTQLPPAYTNSFTRGVYYPDKVFRSSVLHSTQDLFLPFFSNVTWFHAIHVSGTNGTKRFDNPVLPFNDGVYFASTEKSNIIRGWIFGTTLDSKTQSLLIVNNATNVVIKVCEFQFCNDPFLGVYYHKNNKSWMESEFRVYSSANNCTFEYVSQPFLMDLEGKQGNFKNLREFVFKNIDGYFKIYSKHTPINLVRDLPQGFSALEPLVDLPIGINITRFQTLLALHRSYLTPGDSSSGWTAGAAAYYVGYLQPRTFLLKYNENGTITDAVDCALDPLSETKCTLKSFTVEKGIYQTSNFRVQPTESIVRFPNITNLCPFGEVFNATRFASVYAWNRKRISNCVADYSVLYNSASFSTFKCYGVSPTKLNDLCFTNVYADSFVIRGDEVRQIAPGQTGKIADYNYKLPDDFTGCVIAWNSNNLDSKVGGNYNYLYRLFRKSNLKPFERDISTEIYQAGSTPCNGVEGFNCYFPLQSYGFQPTNGVGYQPYRVVVLSFELLHAPATVCGPKKSTNLVKNKCVNFNFNGLTGTGVLTESNKKFLPFQQFGRDIADTTDAVRDPQTLEILDITPCSFGGVSVITPGTNTSNQVAVLYQDLNCTEVPVAIHADQLTPTWRVYSTGSNVFQTRAGCLIGAEHVNNSYECDIPIGAGICASYQTQTNSPRRARSVASQSIIAYTMSLGAENSVAYSNNSIAIPTNFTISVTTEILPVSMTKTSVDCTMYICGDSTECSNLLLQYGSFCTQLNRALTGIAVEQDKNTQEVFAQVKQIYKTPPIKDFGGFNFSQILPDPSKPSKRSFIEDLLFNKVTLADAGFIKQYGDCLGDIAARDLICAQKFNGLTVLPPLLTDEMIAQYTSALLAGTITSGWTFGAGAALQIPFAMQMAYRFNGIGVTQNVLYENQKLIANQFNSAIGKIQDSLSSTASALGKLQDVVNQNAQALNTLVKQLSSNFGAISSVLNDILSRLDPPEAEVQIDRLITGRLQSLQTYVTQQLIRAAEIRASANLAATKMSECVLGQSKRVDFCGKGYHLMSFPQSAPHGVVFLHVTYVFAQEKNFTTAPAICHDGKAHFPREGVFVSNGTHWFVTQRNFYEPQIITTDNTFVSGNCDVVIGIVNNTVYDPLQPELDS

SEQ ID NO: 2835 - protein, 1147 aa, Artificial Sequence
  SARS-CoV-2/Hong Kong/case42_VM20002493/2020__EPI_ISL_414527 spike protein (1-1147)(K986P_V987P_P1069F)
MFVFLVLLPLVSSQCVNLTTRTQLPPAYTNSFTRGVYYPDKVFRSSVLHSTQDLFLPFFSNVTWFHAIHVSGTNGTKRFDNPVLPFNDGVYFASTEKSNIIRGWIFGTTLDSKTQSLLIVNNATNVVIKVCEFQFCNDPFLGVYYHKNNKSWMESEFRVYSSANNCTFEYVSQPFLMDLEGKQGNFKNLREFVFKNIDGYFKIYSKHTPINLVRDLPQGFSALEPLVDLPIGINITRFQTLLALHRSYLTPGDSSSGWTAGAAAYYVGYLQPRTFLLKYNENGTITDAVDCALDPLSETKCTLKSFTVEKGIYQTSNFRVQPTESIVRFPNITNLCPFGEVFNATRFASVYAWNRKRISNCVADYSVLYNSASFSTFKCYGVSPTKLNDLCFTNVYADSFVIRGDEVRQIAPGQTGKIADYNYKLPDDFTGCVIAWNSNNLDSKVGGNYNYLYRLFRKSNLKPFERDISTEIYQAGSTPCNGVEGFNCYFPLQSYGFQPTNGVGYQPYRVVVLSFELLHAPATVCGPKKSTNLVKNKCVNFNFNGLTGTGVLTESNKKFLPFQQFGRDIADTTDAVRDPQTLEILDITPCSFGGVSVITPGTNTSNQVAVLYQDVNCTEVPVAIHADQLTPTWRVYSTGSNVFQTRAGCLIGAEHVNNSYECDIPIGAGICASYQTQTNSPRRARSVASQSIIAYTMSLGAENSVAYSNNSIAIPTNFAISVTTEILPVSMTKTSVDCTMYICGDSTECSNLLLQYGSFCTQLNRALTGIAVEQDKNTQEVFAQVKQIYKTPPIKDFGGFNFSQILPDPSKPSKRSFIEDLLFNKVTLADAGFIKQYGDCLGDIAARDLICAQKFNGLTVLPPLLTDEMIAQYTSALLAGTITSGWTFGAGAALQIPFAMQMAYRFNGIGVTQNVLYENQKLIANQFNSAIGKIQDSLSSTASALGKLQDVVNQNAQALNTLVKQLSSNFGAISSVLNDILSRLDPPEAEVQIDRLITGRLQSLQTYVTQQLIRAAEIRASANLAATKMSECVLGQSKRVDFCGKGYHLMSFPQSAPHGVVFLHVTYVFAQEKNFTTAPAICHDGKAHFPREGVFVSNGTHWFVTQRNFYEPQIITTDNTFVSGNCDVVIGIVNNTVYDPLQPELDS

SEQ ID NO: 2836 - protein, 1147 aa, Artificial Sequence
  SARS-CoV-2/USA/CruiseA-23/2020__EPI_ISL_414482 spike protein (1-1147)(K986P_V987P_P1069F)
MFVFLVLLPLVSSQCVNLTTRTQLPPAYTNSFTRGVYYPDKVFRSSVLHSTQDLFLPFFSNVTWFHAIHVSGTNGTKRFDNPVLPFNDGVYFASTEKSNIIRGWIFGTTLDSKTQSLLIVNNATNVVIKVCEFQFCNDPFLGVYYHKNNKSWMESEFRVYSSANNCTFEYVSQPFLMDLEVKQGNFKNLREFVFKNIDGYFKIYSKHTPINLVRDLPQGFSALEPLVDLPIGINITRFQTLLALHRSYLTPGDSSSGWTAGAAAYYVGYLQPRTFLLKYNENGTITDAVDCALDPLSETKCTLKSFTVEKGIYQTSNFRVQPTESIVRFPNITNLCPFGEVFNATRFASVYAWNRKRISNCVADYSVLYNSASFSTFKCYGVSPTKLNDLCFTNVYADSFVIRGDEVRQIAPGQTGKIADYNYKLPDDFTGCVIAWNSNNLDSKVGGNYNYLYRLFRKSNLKPFERDISTEIYQAGSTPCNGVEGFNCYFPLQSYGFQPTNGVGYQPYRVVVLSFELLHAPATVCGPKKSTNLVKNKCVNFNFNGLTGTGVLTESNKKFLPFQQFGRDIADTTDAVRDPQTLEILDITPCSFGGVSVITPGTNTSNQVAVLYQDVNCTEVPVAIHADQLTPTWRVYSTGSNVFQTRAGCLIGAEHVNNSYECDIPIGAGICASYQTQTNSPRRARSVASQSIIAYTMSLGAENSVAYSNNSIAIPTNFTISVTTEILPVSMTKTSVDCTMYICGDSTECSNLLLQYGSFCTQLNRALTGIAVEQDKNTQEVFAQVKQIYKTPPIKDFGGFNFSQILPDPSKPSKRSFIEDLLFNKVTLADAGFIKQYGDCLGDIAARDLICAQKFNGLTVLPPLLTDEMIAQYTSALLAGTITSGWTFGAGAALQIPFAMQMAYRFNGIGVTQNVLYENQKLIANQFNSAIGKIQDSLSSTASALGKLQDVVNQNAQALNTLVKQLSSNFGAISSVLNDILSRLDPPEAEVQIDRLITGRLQSLQTYVTQQLIRAAEIRASANLAATKMSECVLGQSKRVDFCGKGYHLMSFPQSAPHGVVFLHVTYVFAQEKNFTTAPAICHDGKAHFPREGVFVSNGTHWFVTQRNFYEPQIITTDNTFVSGNCDVVIGIVNNTVYDPLQPELDS

SEQ ID NO: 2837 - protein, 1147 aa, Artificial Sequence
  SARS-CoV-2/Hong Kong/case85_VM20002868/2020__EPI_ISL_414519 spike protein (1-1147)(K986P_V987P_P1069F)
MFVFLVLVPLVSSQCVNLTTRTQLPPAYTNSFTRGVYYPDKVFRSSVLHSTQDLFLPFFSNVTWFHAIHVSGTNGTKRFDNPVLPFNDGVYFASTEKSNIIRGWIFGTTLDSKTQSLLIVNNATNVVIKVCEFQFCNDPFLGVYYHKNNKSWMESEFRVYSSANNCTFEYVSQPFLMDLEGKQGNFKNLREFVFKNIDGYFKIYSKHTPINLVRDLPQGFSALEPLVDLPIGINITRFQTLLALHRSYLTPGDSSSGWTAGAAAYYVGYLQPRTFLLKYNENGTITDAVDCALDPLSETKCTLKSFTVEKGIYQTSNFRVQPTESIVRFPNITNLCPFGEVFNATRFASVYAWNRKRISNCVADYSVLYNSASFSTFKCYGVSPTKLNDLCFTNVYADSFVIRGDEVRQIAPGQTGKIADYNYKLPDDFTGCVIAWNSNNLDSKVGGNYNYLYRLFRKSNLKPFERDISTEIYQAGSTPCNGVEGFNCYFPLQSYGFQPTNGVGYQPYRVVVLSFELLHAPATVCGPKKSTNLVKNKCVNFNFNGLTGTGVLTESNKKFLPFQQFGRDIADTTDAVRDPQTLEILDITPCSFGGVSVITPGTNTSNQVAVLYQDVNCTEVPVAIHADQLTPTWRVYSTGSNVFQTRAGCLIGAEHVNNSYECDIPIGAGICASYQTQTNSPRRARSVASQSIIAYTMSLGAENSVAYSNNSIAIPTNFTISVTTEILPVSMTKTSVDCTMYICGDSTECSNLLLQYGSFCTQLNRALTGIAVEQDKNTQEVFAQVKQIYKTPPIKDFGGFNFSQILPDPSKPSKRSFIEDLLFNKVTLADAGFIKQYGDCLGDIAARDLICAQKFNGLTVLPPLLTDEMIAQYTSALLAGTITSGWTFGAGAALQIPFAMQMAYRFNGIGVTQNVLYENQKLIANQFNSAIGKIQDSLSSTASALGKLQDVVNQNAQALNTLVKQLSSNFGAISSVLNDILSRLDPPEAEVQIDRLITGRLQSLQTYVTQQLIRAAEIRASANLAATKMSECVLGQSKRVDFCGKGYHLMSFPQSAPHGVVFLHVTYVFAQEKNFTTAPAICHDGKAHFPREGVFVSNGTHWFVTQRNFYEPQIITTDNTFVSGNCDVVIGIVNNTVYDPLQPELDS

SEQ ID NO: 2838 - protein, 1147 aa, Artificial Sequence; identical to SEQ ID NO: 2828
  SARS-CoV-2/England/200990660/2020__EPI_ISL_414523 spike protein (1-1147)(K986P_V987P_P1069F)

SEQ ID NO: 2839 - protein, 1147 aa, Artificial Sequence
  SARS-CoV-2/Australia/NSW09/2020__EPI_ISL_413595 spike protein (1-1147)(K986P_V987P_P1069F)
MFVFLVLLPLVSSQCVNLTTRTQLPPAYTNSFTRGVYYPDKVFRSSVLHSTQDLFLPFFSNVTWFHAIHVSGTNGTKRFDNPVLPFNDGVYFASTEKSNIIRGWIFGTTLDSKTQSLLIVNNATNVVIKVCEFQFCNDPFLGVYYHKNNKSWMESEFRVYSSANNCTFEYVSQPFLMDLEGKQGNFKNLREFVFKNIDGYFKIYSKHTPINLVRDLPQGFSALEPLVDLPIGINITRFQTLLALHRSYLTPGDSSSGWTAGAAAYYVGYLQPRTFLLKYNENGTITDAVDCALDPLSETKCTLKSFTVEKGIYQTSNFRVQPTESIVRFPNITNLCPFGEVFNATRFASVYAWNRKRISNCVADYSVLYNSASFSTFKCYGVSPTKLNDLCFTNVYADSFVIRGDEVRQIAPGQTGKIADYNYKLPDDFTGCVIAWNSNNLDSKVGGNYNYLYRLFRKSNLKPFERDISTEIYQAGSTPCNGVEGFNCYFPLQSYGFQPTNGVGYQPYRVVVLSFELLHAPATVCGPKKSTNLVKNKCVNFNFNGLTGTGVLTESNKKFLPFQQFGRDIADTTDAVRDPQTLEILDITPCSFGGVSVITPGTNTSNQVAVLYQDVNCTEVPVAIHADQLTPTWRVYSTGSNVFQTRAGCLIGAEHVNNSYECDIPIGAGICASYQTQTNSPRRARSVASQSIIAYTMSLGAENSVAYSNNSIAIPTNFTISVTTEILPVSMTKTSVDCTMYICGDSTECSNLLLQYGSFCTQLNRALTGIAVEQDKNTQEVFAQVKQIYKTPPIKDFGGFNFSQILPDPSKPSKRSFIEDLLFNKVTLADAGFIKQYGDCLGDIAARDLICAQKFNGLTVLPPLLTDEMIAQYTSALLAGTITSGWTFGAGAALQIPFAMQMAYRFNGIGVTQNVLYENQKLIANQFNSAIGKIQDSLSFTASALGKLQDVVNQNAQALNTLVKQLSSNFGAISSVLNDILSRLDPPEAEVQIDRLITGRLQSLQTYVTQQLIRAAEIRASANLAATKMSECVLGQSKRVDFCGKGYHLMSFPQSAPHGVVFLHVTYVFAQEKNFTTAPAICHDGKAHFPREGVFVSNGTHWFVTQRNFYEPQIITTDNTFVSGNCDVVIGIVNNTVYDPLQPELDS

SEQ ID NO: 2840 - protein, 1147 aa, Artificial Sequence; identical to SEQ ID NO: 2820
  SARS-CoV-2/Australia/NSW10/2020__EPI_ISL_413596 spike protein (1-1147)(K986P_V987P_P1069F)

SEQ ID NO: 2841 - protein, 1147 aa, Artificial Sequence
  SARS-CoV-2/Switzerland/1000477797/2020__EPI_ISL_413023 spike protein (1-1147)(K986P_V987P_P1069F)
MFVFLVLLPLVSSQCVNLTTRTQLPPAYTNSFTRGVYYPDKVFRSSVLHSTQDLFLPFFSNVTWFHAIHVSGTNGTKRFDNPVLPFNDGVYFASTEKSNIIRGWIFGTTLDSKTQSLLIVNNATNVVIKVCEFQFCNDPFLGVYYHKNNKSWMESEFRVYSSANNCTFEYVSQPFLMDLEGKQGNFKNLREFVFKNIDGYFNIYSKHTPINLVRDLPQGFSALEPLVDLPIGINITRFQTLLALHRSYLTPGDSSSGWTAGAAAYYVGYLQPRTFLLKYNENGTITDAVDCALDPLSETKCTLKSFTVEKGIYQTSNFRVQPTESIVRFPNITNLCPFGEVFNATRFASVYAWNRKRISNCVADYSVLYNSASFSTFKCYGVSPTKLNDLCFTNVYADSFVIRGDEVRQIAPGQTGKIADYNYKLPDDFTGCVIAWNSNNLDSKVGGNYNYLYRLFRKSNLKPFERDISTEIYQAGSTPCNGVEGFNCYFPLQSYGFQPTNGVGYQPYRVVVLSFELLHAPATVCGPKKSTNLVKNKCVNFNFNGLTGTGVLTESNKKFLPFQQFGRDIADTTDAVRDPQTLEILDITPCSFGGVSVITPGTNTSNQVAVLYQGVNCTEVPVAIHADQLTPTWRVYSTGSNVFQTRAGCLIGAEHVNNSYECDIPIGAGICASYQTQTNSPRRARSVASQSIIAYTMSLGAENSVAYSNNSIAIPTNFTISVTTEILPVSMTKTSVDCTMYICGDSTECSNLLLQYGSFCTQLNRALTGIAVEQDKNTQEVFAQVKQIYKTPPIKDFGGFNFSQILPDPSKPSKRSFIEDLLFNKVTLADAGFIKQYGDCLGDIAARDLICAQKFNGLTVLPPLLTDEMIAQYTSALLAGTITSGWTFGAGAALQIPFAMQMAYRFNGIGVTQNVLYENQKLIANQFNSAIGKIQDSLSSTASALGKLQDVVNQNAQALNTLVKQLSSNFGAISSVLNDILSRLDPPEAEVQIDRLITGRLQSLQTYVTQQLIRAAEIRASANLAATKMSECVLGQSKRVDFCGKGYHLMSFPQSAPHGVVFLHVTYVFAQEKNFTTAPAICHDGKAHFPREGVFVSNGTHWFVTQRNFYEPQIITTDNTFVSGNCDVVIGIVNNTVYDPLQPELDS

SEQ ID NO: 2842 - protein, 1147 aa, Artificial Sequence
  SARS-CoV-2/Belgium/BA-02291/2020__EPI_ISL_415159 spike protein (1-1147)(K986P_V987P_P1069F)
MFVFLVLLPLVSSQCVNLTTRTQLPPAYTNSFTRGVYYPDKVFRSSVLHSTQDLFLPFFSNVTWFHAIHVSGTNGTKRFDNPVLPFNDGVYFASTEKSNIIRGWIFGTTLDSKTQSLLIVNNATNVVIKVCEFQFCNDPFLGVYYHKNNKSWMESEFRVYSSANNCTFEYVSQPFLMDLEGKQGNFKNLREFVFKNIDGYFKIYSKHTPINLVRDLPQGFSALEPLVDLPIGINITRFQTLLALHRSYLTPGDSSSGWTAGAAAYYVGYLQPRTFLLKYNENGTITDAVDCALDPLSETKCTLKSFTVEKGIYQTSNFRVQPTESIVRFPNITNLCPFGEVFNATRFASVYAWNRKRISNCVADYSVLYNSASFSTFKCYGVSPTKLNDLCFTNVYADSFVIRGDEVRQIAPGQTGKIADYNYKLPDDFTGCVIAWNSNNLDSKVGGNYNYLYRLFRRSNLKPFERDISTEIYQAGSTPCNGVEGFNCYFPLQSYGFQPTNGVGYQPYRVVVLSFELLPAPATVCGPKKSTNLVKNKCVNFNFNGLTGTGVLTESNKKFLPFQQFGRDIADTTDAVRDPQTLEILDITPCSFGGVSVITPGTNTSNQVAVLYQGVNCTEVPVAIHADQLTPTWRVYSTGSNVFQTRAGCLIGAEHVNNSYECDIPIGAGICASYQTQTNSPRRARSVASQSIIAYTMSLGAENSVAYSNNSIAIPTNFTISVTTEILPVSMTKTSVDCTMYICGDSTECSNLLLQYGSFCTQLNRALTGIAVEQDKNTQEVFAQVKQIYKTPPIKDFGGFNFSQILPDPSKPSKRSFIEDLLFNKVTLADAGFIKQYGDCLGDIAARDLICAQKFNGLTVLPPLLTDEMIAQYTSALLAGTITSGWTFGAGAALQIPFAMQMAYRFNGIGVTQNVLYENQKLIANQFNSAIGKIQDSLSSAAPALGKLQDVVNQNAQALNTLVKQLSSNFGAISSVLNDILSRLDPPEAEVQIDRLITGRLQSLQTYVTQQLIRAAEIRASANLAATKMSECVLGQSKRVDFCGKGYHLMSFPQSAPHGVVFLHVTYVFAQEKNFTTAPAICHDGKAHFPREGVFVSNGTHWFVTQRNFYEPQIITTDNTFVSGNCDVVIGIVNNTVYDPLQPELDS

SEQ ID NO: 2843 - protein, 1147 aa, Artificial Sequence
  SARS-CoV-2/USA/WA8-UW5/2020__EPI_ISL_413486 spike protein (1-1147)(K986P_V987P_P1069F)
MFVFLVLLPLVSSQCVNLTTRTQLPPAYTNSFTRGVYYPDKVFRSSVLHSTQDLFLPFFSNVTWFHAIHVSGTNGTKRFDNPVLPFNDGVYFASTEKSNIIRGWIFGTTLDSKTQSLLIVNNATNVVIKVCEFQFCNDPFLGVYYHKNNKSWMESEFRVYSSANNCTFEYVSQPFLMDLEGKQGNFKNLREFVFKNIDGYFKIYSKHTPINLVRDLPQGFSALEPLVDLPIGINITRFQTLLALHRSYLTPGDSSSGWTAGAAAYYVGYLQPRTFLLKYNENGTITDAVDCALDPLSETKCTLKSFTVEKGIYQTSNFRVQPTESIVRFPNITNLCPFGEVFNATRFASVYAWNRKRISNCVADYSVLYNSASFSTFKCYGVSPTKLNDLCFTNVYADSFVIRGDEVRQIAPGQTGKIADYNYKLPDDFTGCVIAWNSNNLDSKVGGNYNYLYRLFRKSNLKPFERDISTEIYQAGSTPCNGVEGFNCYFPLQSYGFQPTNGVGYQPYRVVVLSFELLHAPATVCGPKKSTNLVKNKCVNFNFNGLTGTGVLTESNKKFLPFQQFGRDIADTTDAVRDPQTLEILDITPCSFGGVSVITPGTNTSNQVAVLYQDVNCTEVPVAIHADQLTPTWRVYSTGSNVFQTRAGCLIGAEYVNNSYECDIPIGAGICASYQTQTNSPRRARSVASQSIIAYTMSLGAENSVAYSNNSIAIPTNFTISVTTEILPVSMTKTSVDCTMYICGDSTECSNLLLQYGSFCTQLNRALTGIAVEQDKNTQEVFAQVKQIYKTPPIKDFGGFNFSQILPDPSKPSKRSFIEDLLFNKVTLADAGFIKQYGDCLGDIAARDLICAQKFNGLTVLPPLLTDEMIAQYTSALLAGTITSGWTFGAGAALQIPFAMQMAYRFNGIGVTQNVLYENQKLIANQFNSAIGKIQDSLSSTASALGKLQDVVNQNAQALNTLVKQLSSNFGAISSVLNDILSRLDPPEAEVQIDRLITGRLQSLQTYVTQQLIRAAEIRASANLAATKMSECVLGQSKRVDFCGKGYHLMSFPQSAPHGVVFLHVTYVFAQEKNFTTAPAICHDGKAHFPREGVFVSNGTHWFVTQRNFYEPQIITTDNTFVSGNCDVVIGIVNNTVYDPLQPELDS

SEQ ID NO: 2844 - protein, 1147 aa, Artificial Sequence
  SARS-CoV-2/England/20102000506/2020__EPI_ISL_415147 spike protein (1-1147)(K986P_V987P_P1069F)
MFVFLVLLPLVSSQCVNLTTRTQLPPAYTNSFTRGVYYPDKVFRSSVLHSTQDLFLPFFSNVTWFHAIHVSGTNGTKRFDNPVLPFNDGVYFASTEKSNIIRGWIFGTTLDSKTQSLLIVNNATNVVIKVCEFQFCNDPFLGVYYHKNNKSWMESEFRVYSSANNCTFEYVSQPFLMDLEGKQGNFKNLREFVFKNIDGYFKIYSKHTPINLVRDLPQGFSALEPLVDLPIGINITRFQTLLALHRSYLTPGDSSSGWTAGAAAYYVGYLQPRTFLLKYNENGTITDAVDCALDPLSETKCTLKSFTVEKGIYQTSNFRVQPTESIVRFPNITNLCPFGEVFNATRFASVYAWNRKRISNCVADYSVLYNSASFSTFKCYGVSPTKLNDLCFTNVYADSFVIRGDEVRQIAPGQTGKIADYNYKLPDDFTGCVIAWNSNNLDSKVGGNYNYLYRLFRKSNLKPFERDISTEIYQAGSTPCNGVEGFNCYFPLQSYGFQPTNGVGYQPYRVVVLSFELLHAPATVCGPKKSTNLVKNKCVNFNFNGLTGTGVLTESNKKFLPFQQFGRDIADTTDAVRDPQTLEILDITPCSFGGVSVITPGTNTSNQVAVLYQGVNCTEVPVAIHADQLTPTWRVYSTGSNVFQTRAGCLIGAEHVNNSYECDIPIGAGICASYQTQTNSPRRARSVASQSIIAYTMSLGAENSVAYSNNSIAIPTNFTISVTTEILPVSMTKTSVDCTMYICGDSTECSNLLLQYGSFCTQLNRALTGIAVEQDKNTQEVFAQVKQIYKTPPIKDFGGFNFSQILPDPSKPSKRSFIEDLLFNKVTLADAGFIKQYGYCLGDIAARDLICAQKFNGLTVLPPLLTDEMIAQYTSALLAGTITSGWTFGAGAALQIPFAMQMAYRFNGIGVTQNVLYENQKLIANQFNSAIGKIQDSLSSTASALGKLQDVVNQNAQALNTLVKQLSSNFGAISSVLNDILSRLDPPEAEVQIDRLITGRLQSLQTYVTQQLIRAAEIRASANLAATKMSECVLGQSKRVDFCGKGYHLMSFPQSAPHGVVFLHVTYVFAQEKNFTTAPAICHDGKAHFPREGVFVSNGTHWFVTQRNFYEPQIITTDNTFVSGNCDVVIGIVNNTVYDPLQPELDS

SEQ ID NO: 2845 - protein, 1147 aa, Artificial Sequence
  SARS-CoV-2/Belgium/VAG-03013/2020__EPI_ISL_415155 spike protein (1-1147)(K986P_V987P_P1069F)
MFVFLVLLPLVSSQCVNLTTRTQLPPAYTNSFTRGVYYPDKVFRSSVLHSTQDLFLPFFSNVTWFHAIHVSGTNGTKRFDNPVLPFNDGVYFASTEKSNIIRGWIFGTTLDSKTQSLLIVNNATNVVIKVCEFQFCNDPFLGVYYHKNNKSWMESEFRVYSSANNCTFEYVSQPFLMDLEGKQGNFKNLREFVFKNIDGYFKIYSKHTPINLVRDLPQGFSALEPLVDLPIGINITRFQTLLALHRSYLTPGDSSSGWTAGAAAYYVGYLQPRTFLLKYNENGTITDAVDCALDPLSETKCTLKSFTVEKGIYQTSNFRVQPTESIVRFPNITNLCPFGEVFNATRFASVYAWNRKRISNCVADYSVLYNSASFSTFKCYGVSPTKLNDLCFTNVYADSFVIRGDEVRQIAPGQTGKIADYNYKLPDDFTGCVIAWNSNNLDSKVGGNYNYLYRLFRKSNLKPFERDISTEIYQAGSTPCNGVEGFNCYFPLQSYGFQPTNGVGYQPYRVVVLSFELLHAPATVCGPKKSTNLVKNKCVNFNFNGLTGTGVLTESNKKFLPFQQFGRDIADTTDAVRDPQTLEILDITPCSFGGVSVITPGTNTSNQVAVLYQGVNCTEVPVAIHADQLTPTWRVYSTGSNVFQTRAGCLIGAEHVNNSYECDIPIGAGICASYQTQTNSPRRARSVASQSIIAYTMSLGAENSVAYSNNSIAIPTNFTISVTTEILPVSMTKTSVDCTMYICGDSTECSNLLLQYGSFCTQLNRALTGIAVEQDKNTQEVFAQVKQIYKTPPIKDFGGFNFSQILPDPSKPSKRSFIEDLLFNKVTLADAGFIKQYGDCLGDIAARDLICAQKFNGLTVLPPLLTDEMIAQYTSALLAGTITSGWTFGAGAALQIPFAMQMAYRFNGIGVTQNVLYENQKLIANQFNSAIGKIQDSLSSTATALGKLQDVVNQNAQALNTLVKQLSSNFGAISSVLNDILSRLDPPEAEVQIDRLITGRLQSLQTYVTQQLIRAAEIRASANLAATKMSECVLGQSKRVDFCGKGYHLMSFPQSAPHGVVFLHVTYVFAQEKNFTTAPAICHDGKAHFPREGVFVSNGTHWFVTQRNFYEPQIITTDNTFVSGNCDVVIGIVNNTVYDPLQPELDS

SEQ ID NO: 2846 - protein, 1147 aa, Artificial Sequence
  SARS-CoV-2/Belgium/BC-03016/2020__EPI_ISL_415157 spike protein (1-1147)(K986P_V987P_P1069F)
MFVFLVLLPLVSSQCVNLTTRTQLPPAYTNSFTRGVYYPDKVFRSSVLHSTQDLFLPFFSNVTWFHAIHVSGTNGTKRFDNPVLPFNDGVYFASTEKSNIIRGWIFGTTLDSKTQSLLIVNNATNVVIKVCEFQFCNDPFLGVYYHKNNKSWMESEFRVYSSANNCTFEYVSQPFLMDLEGKQGNFKNLREFVFKNIDGYFKIYSKHTPINLVRDLPQGFSALEPLVDLPIGINITRFQTLLALHRSYLTPGDSSSGWTAGAAAYYVGYLQPRTFLLKYNENGTITDAVDCALDPLSETKCTLKSFTVEKGIYQTSNFRVQPTESIVRFPNITNLCPFGEVFNATRFASVYAWNRKRISNCVADYSVLYNSASFSTFKCYGVSPTKLNDLCFTNVYADSFVIRGDEVRQIAPGQTGKIADYNYKLPDDFTGCVIAWNSNNLDSKVGGNYNYLYRLFRKSNLKPFERDISTEIYQAGSTPCNGVEGFNCYFPLQSYGFQPTNGVGYQPYRVVVLSFELLHAPATVCGPKKSTNLVKNKCVNFNFNGLTGTGVLTESNKKFLPFQQFGRDIADTTDAVRDPQTLEILDITPCSFGGVSVITPGTNTSNQVAVLYQGVNCTEVPVAIHADQLTPTWRVYSTGSNVFQTRAGCLIGAEHVNNSYECDIPIGAGICASYQTQTNSPRRARSVASQSIIAYTMSLGAENSVAYSNNSIAIPTNFTISVTTEILPVSMTKTSVDCTMYICGDSTECSNLLLQYGSFCTQLNRALTGIAVEQDKNTQEVFAQVKQIYKTPPIKDFGGFNFSQILPDPSKPSKRSFIEDLLFNKVTLADAGFIKQYGDCLGDIAARDLICAQKFNGLTVLPPLLTDEMIAQYTSALLAGTITSGWTFGAGAALQIPFAMQMAYRFNGIGVTQNVLYENQKLIANQFNSAIGKIQDSLSSTAPALGKLQDVVNQNAQALNTLVKQLSSNFGAISSVLNDILSRLDPPEAEVQIDRLITGRLQSLQTYVTQQLIRAAEIRASANLAATKMSECVLGQSKRVDFCGKGYHLMSFPQSAPHGVVFLHVTYVFAQEKNFTTAPAICHDGKAHFPREGVFVSNGTHWFVTQRNFYEPQIITTDNTFVSGNCDVVIGIVNNTVYDPLQPELDS

SEQ ID NO: 2847 - protein, 1147 aa, Artificial Sequence
  SARS-CoV-2/Germany/BavPat3/2020__EPI_ISL_414521 spike protein (1-1147)(K986P_V987P_P1069F)
MFVFLVLLPLVSSQCVNLTTRTQLPPAYTNSFTRGVYYPDKVFRSSVLHSTQDLFLPFFSNVTWFHAIHVSGTNGTKRFDNPVLPFNDGVYFASTEKSNIIRGWIFGTTLDSKTQSLLIVNNATNVVIKVCEFQFCNDPFLGVYYHKNNKSWMESEFRVYSSANNCTFEYVSQPFLMDLEGKQGNFKNLREFVFKNIDGYFKIYSKHTPINLVRDLPQGFSALEPLVDLPIGINITRFQTLLALHRSYLTPGDSSSGWTAGAAAYYVGYLQPRTFLLKYNENGTITDAVDCALDPLSETKCTLKSFTVEKGIYQTSNFRVQPTESIVRFPNITNLCPFGEVFNATRFASVYAWNRKRISNCVADYSVLYNSASFSTFKCYGVSPTKLNDLCFTNVYADSFVIRGDEVRQIAPGQTGKIADYNYKLPDDFTGCVIAWNSNNLDSKVGGNYNYLYRLFRKSNLKPFERDISTEIYQAGSTPCNGVEGFNCYFPLQSYGFQPTNGVGYQPYRVVVLSFELLHAPATVCGPKKSTNLVKNKCVNFNFNGLTGTGVLTESNKKFLPFQQFGRDIADTTDAVRDPQTLEILDITPCSFGGVSVITPGTNTSNQVAVLYQDVNCTEVPVAIHADQLTPTWRVYSTGSNVFQTRAGCLIGAEHVNNSYECDIPIGAGICASYQTQTNSPRRARSVASQSIIAYTMSLGAENSVAYSNNSIAIPTNFTISVTTEILPVSMTKTSVDCTMYICGDSTECSNLLLQYGSFCTQLNRALTGIAVEQDKNTQQVFAQVKQIYKTPPIKDFGGFNFSQILPDPSKPSKRSFIEDLLFNKVTLADAGFIKQYGDCLGDIAARDLICAQKFNGLTVLPPLLTDEMIAQYTSALLAGTITSGWTFGAGAALQIPFAMQMAYRFNGIGVTQNVLYENQKLIANQFNSAIGKIQDSLSSTASALGKLQDVVNQNAQALNTLVKQLSSNFGAISSVLNDILSRLDPPEAEVQIDRLITGRLQSLQTYVTQQLIRAAEIRASANLAATKMSECVLGQSKRVDFCGKGYHLMSFPQSAPHGVVFLHVTYVFAQEKNFTTAPAICHDGKAHFPREGVFVSNGTHWFVTQRNFYEPQIITTDNTFVSGNCDVVIGIVNNTVYDPLQPELDS

SEQ ID NO: 2848 - protein, 1147 aa, Artificial Sequence
  SARS-CoV-2/France/HF1805/2020__EPI_ISL_414628 spike protein (1-1147)(K986P_V987P_P1069F)
MFVFLVLLPLVSSQCVNLTTRTQLPPAYTNSFTRGVYYPDKVFRSSVLHSTQDLFLPFFSNVTWFHAIHVSGTNGTKRFDNPVLPFNDGVYFASTEKSNIIRGWIFGTTLDSKTQSLLIVNNATNVVIKVCEFQFCNDPFLGVYYHKNNKSWMESEFRVYSSANNCTFEYVSQPFLMDLEGKQGNFKNLREFVFKNIDGYFKIYSKHTPINLVRDLPQGFSALEPLVDLPIGINITRFQTLLALHRSYLTPGDSSSGWTAGAAAYYVGYLQPRTFLLKYNENGTITDAVDCALDPLSETKCTLKSFTVEKGIYQTSNFRVQPTESIVRFPNITNLCPFGEVFNATRFASVYAWNRKRISNCVADYSVLYNSASFSTFKCYGVSPTKLNDLCFTNVYADSFVIRGDEVRQIAPGQTGKIADYNYKLPDDFTGCVIAWNSNNLDSKVGGNYNYLYRLFRKSNLKPFERDISTEIYQAGSTPCNGVEGFNCYFPLQSYGFQPTNGVGYQPYRVVVLSFELLHAPATVCGPKKSTNLVKNKCVNFNFNGLTGTGVLTESNKKFLPFQQFGRDIADTTDAVRDPQTLEILDITPCSFGGVSVITPGTNTSNQVAVLYQGVNCTEVPVAIHADQLTPTWRVYSTGSNVFQTRAGCLIGAEHVNNSYECDIPIGAGICASYQTQTNSPRRARSVASQSIIAYTMSLGAENSVAYSNNSIAIPTNFTISVTTEILPVSMTKTSVDCTMYICGDSTECSNLLLQYGSFCTQLNRALTGIAVEQDKNTQEVFAQVKQIYKTPPIKDFGGFNFSQILPDPSKPSKRSFIEDLLFNKVTLADAGFIKQYGDCLGDIAARDLICAQKFNGLTVLPPLLTDEMIAQYTSALLAGTITSGWTFGAGAALQIPFAMQMAYRFNGIGVTQNVLYENQKLIANQFNSAIGKIQDSLSSTASALGKLQDVVNQNAQALNTLVKQLSSNFGAISSVLNDILSRLDPPEAEVQIDRLITGRLQSLQTYVTQQLIRAAEIRASANLAATKMSECVLGQSKRVDFCGKGYHLMSFPQSAPHGVVFLHVTYVFAQEKNFTTAPAICHDGKAHFPREGVFVSNGTHWFVTQRNFYEPQIITTDNTFVSGNCDVVIGVVNNTVYDPLQPELDS

SEQ ID NO: 2849 - protein, 1147 aa, Artificial Sequence
  SARS-CoV-2/Netherlands/ZuidHolland_9/2020__EPI_ISL_414445 spike protein (1-1147)(K986P_V987P_P1069F)
MFVFLVLLPLVSSQCVNLTTRTQLPPAYTNSFTRGVYYPDKVFRSSVLHSTQDLFLPFFSNVTWFHAIHVSGTNGTKRFDNPVLPFNDGVYFASTEKSNIIRGWIFGTTLDSKTQSLLIVNNATNVVIKVCEFQFCNDPFLGVYYHKNNKSWMESEFRVYSSANNCTFEYVSQPFLMDLEGKQGNFKNLREFVFKNIDGYFKIYSKHTPINLVRDLPQGFSALEPLVDLPIGINITRFQTLLALHRSYLTPGDSSSGWTAGAAAYYVGYLQPRTFLLKYNENGTITDAVDCALDPLSETKCTLKSFTVEKGIYQTSNFRVQPTESIVRFPNITNLCPFGEVFNATRFASVYAWNRKRISNCVADYSVLYNSASFSTFKCYGVSPTKLNDLCFTNVYADSFVIRGDEVRQIAPGQTGKIADYNYKLPDDFTGCVIAWNSNNLDSKVGGNYNYLYRLFRKSNLKPFERDISTEIYQAGSTPCNGVEGFNCYFPLQSYGFQPTNGVGYQPYRVVVLSFELLHAPATVCGPKKSTNLVKNKCVNFNFNGLTGTGVLTESNKKFLPFQQFGRDIADTTDAVRDPQTLEILDITPCSFGGVSVITPGTNTSNQVAVLYQGVNCTEVPVAIHADQLTPTWRVYSTGSNVFQTRAGCLIGAEHVNNSYECDIPIGAGICASYQTQTNSPRRARSVASQSIIAYTMSLGAENSVAYSNNSIAIPTNFTISVTTEILPVSMTKTSVDCTMYICGDSTECSNLLLQYGSFCTQLNRALTGIAVEQDKNTQEVFAQVKQIYKTPPIKDFGGFNFSQILPDPSKPSKRSFIEDLLFNKVTLADAGFIKQYGDCLGDIAARDLICVQKFNGLTVLPPLLTDEMIAQYTSALLAGTITSGWTFGAGAALQIPFAMQMAYRFNGIGVTQNVLYENQKLIANQFNSAIGKIQDSLSSTASALGKLQDVVNQNAQALNTLVKQLSSNFGAISSVLNDILSRLDPPEAEVQIDRLITGRLQSLQTYVTQQLIRAAEIRASANLAATKMSECVLGQSKRVDFCGKGYHLMSFPQSAPHGVVFLHVTYVFAQEKNFTTAPAICHDGKAHFPREGVFVSNGTHWFVTQRNFYEPQIITTDNTFVSGNCDVVIGIVNNTVYDPLQPELDS

SEQ ID NO: 2850 - protein, 1147 aa, Artificial Sequence
  SARS-CoV-2/Finland/FIN03032020A/2020__EPI_ISL_413602 spike protein (1-1147)(K986P_V987P_P1069F)
MFVFLVLLPLVSSQCVNLTTRTQLPPAYTNSFTRGVYYPDKVFRSSVLHSTQDLFLPFFSNVTWFHAIHVSGTNGTKRFDNPVLPFNDGVYFASTEKSNIIRGWIFGTTLDSKTQSLLIVNNATNVVIKVCEFQFCNDPFLGVYYHKNNKSWMESEFRVYSSANNCTFEYVSQPFLMDLEGKQGNFKNLREFVFKNIDGYFKIYSKHTPINLVRDLPQGFSALEPLVDLPIGINITRFQTLLALHRSYLTPGDSSSGWTAGAAAYYVGYLQPRTFLLKYNENGTITDAVDCALDPLSETKCTLKSFTVEKGIYQTSNFRVQPTESIVRFPNITNLCPFGEVFNATRFASVYAWNRKRISNCVADYSVLYNSASFSTFKCYGVSPTKLNDLCFTNVYADSFVIRGDEVRQIAPGQTGKIADYNYKLPDDFTGCVISWNSNNLDSKVGGNYNYLYRLFRKSNLKPFERDISTEIYQAGSTPCNGVEGFNCYFPLQSYGFQPTNGVGYQPYRVVVLSFELLHAPATVCGPKKSTNLVKNKCVNFNFNGLTGTGVLTESNKKFLPFQQFGRDIADTTDAVRDPQTLEILDITPCSFGGVSVITPGTNTSNQVAVLYQGVNCTEVPVAIHADQLTPTWRVYSTGSNVFQTRAGCLIGAEHVNNSYECDIPIGAGICASYQTQTNSPRRARSVASQSIIAYTMSLGAENSVAYSNNSIAIPTNFTISVTTEILPVSMTKTSVDCTMYICGDSTECSNLLLQYGSFCTQLNRALTGIAVEQDKNTQEVFAQVKQIYKTPPIKDFGGFNFSQILPDPSKPSKRSFIEDLLFNKVTLADAGFIKQYGDCLGDIAARDLICAQKFNGLTVLPPLLTDEMIAQYTSALLAGTITSGWTFGAGAALQIPFAMQMAYRFNGIGVTQNVLYENQKLIANQFNSAIGKIQDSLSSTASALGKLQDVVNQNAQALNTLVKQLSSNFGAISSVLNDILSRLDPPEAEVQIDRLITGRLQSLQTYVTQQLIRAAEIRASANLAATKMSECVLGQSKRVDFCGKGYHLMSFPQSAPHGVVFLHVTYVFAQEKNFTTAPAICHDGKAHFPREGVFVSNGTHWFVTQRNFYEPQIITTDNTFVSGNCDVVIGIVNNTVYDPLQPELDS

SEQ ID NO: 2851 - protein, 1147 aa, Artificial Sequence
  SARS-CoV-2/France/GE1977/2020__EPI_ISL_414632 spike protein (1-1147)(K986P_V987P_P1069F)
MFVFLVLLPLVSSQCVNLTTRTQLPPAYTNSFTRGVYYPDKVFRSSVLHSTQDLFLPFFSNVTWFHAIHVSGTNGTKRFDNPVLPFNDGVYFASTEKSNIIRGWIFGTTLDSKTQSLLIVNNATNVVIKVCEFQFCNDPFLGVYYHKNNKSWMESEFRVYSSANNCTFEYVSQPFLMDLEGKQGNFKNLREFVFKNIDGYFKIYSKHTPINLVRDLPQGFSALEPLVDLPIGINITRFQTLLALHRSYLTPGDSSSGWTAGAAAYYVGYLQPRTFLLKYNENGTITDAVDCALDPLSETKCTLKSFTVEKGIYQTSNFRVQPTESIVRFPNITNLCPFGEVFNATRFASVYAWNRKRISNCVADYSVLYNSASFSTFKCYGVSPTKLNDLCFTNVYADSFVIRGDEVRQIAPGQTGKIADYNYKLPDDFTGCVIAWNSNNLDSKVGGNYNYLYRLFRKSNLKPFERDISTEIYQAGSTPCNGVEGFNCYFPLQSYGFQPTNGVGYQPYRVVVLSFELLHAPATVCGPKKSTNLVKNKCVNFNFNGLTGTGVLTESNKKFLPFQQFGRDIADTTDAVRDPQTLEILDITPCSFGGVSVITPGTNTSNQVAVLYQGVNCTEVPVAIHADQLTPTWRVYSTGSNVFQTRAGCLIGAEHVNNSYECDIPIGAGICASYQTQTNSPRRARSVASQSIIAYTMSLGAENSVAYSNNSIAIPTNFTISVTTEILPVSMTKTSVDCTMYICGDSTECSNLLLQYGSFCTQLNRALTGIAVEQDKNTQEVFAQVKQIYKTPPIKDFGGFNFSQILPDPSKPSKRSFIEDLLFNKVTLADAGFIKQYGDCLGDIAARDLICAQKFNGLTVLPPLLTDEMIAQYTSALLAGTITSGWTFGAGAALQIPFAMQMAYRFNGIGVTQNVLYENQKLIANQFNSAIGKIQDSLFSTASALGKLQDVVNQNAQALNTLVKQLSSNFGAISSVLNDILSRLDPPEAEVQIDRLITGRLQSLQTYVTQQLIRAAEIRASANLAATKMSECVLGQSKRVDFCGKGYHLMSFPQSAPHGVVFLHVTYVFAQEKNFTTAPAICHDGKAHFPREGVFVSNGTHWFVTQRNFYEPQIITTDNTFVSGNCDVVIGIVNNTVYDPLQPELDS

SEQ ID NO: 2852 - protein, 1147 aa, Artificial Sequence
  SARS-CoV-2/Finland/FIN-313/2020__EPI_ISL_414641 spike protein (1-1147)(K986P_V987P_P1069F)
MFVFLVLLPLVSSQCVNLTTRTQLPPAYTNSFTRGVYYPDKVFRSSVLHSTQDLFLPFFSNVTWFHAIHVSGTNGTKRFDNPVLPFNDGVYFASTEKSNIIRGWIFGTTLDSKTQSLLIVNNATNVVIKVCEFQFCNDPFLGVYYHKNNKSWMESEFRVYSSANNCTFEYVSQPFLMDLEGKQGNFKNLREFVFKNIDGYFKIYSKHTPINLVRDLPQGFSALEPLVDLPIGINITRFKTLLALHRSYLTPGDSSSGWTAGAAAYYVGYLQPRTFLLKYNENGTITDAVDCALDPLSETKCTLKSFTVEKGIYQTSNFRVQPTESIVRFPNITNLCPFGEVFNATRFASVYAWNRKRISNCVADYSVLYNSASFSTFKCYGVSPTKLNDLCFTNVYADSFVIRGDEVRQIAPGQTGKIADYNYKLPDDFTGCVIAWNSNNLDSKVGGNYNYLYRLFRKSNLKPFERDISTEIYQAGSTPCNGVEGFNCYFPLQSYGFQPTNGVGYQPYRVVVLSFELLHAPATVCGPKKSTNLVKNKCVNFNFNGLTGTGVLTESNKKFLPFQQFGRDIADTTDAVRDPQTLEILDITPCSFGGVSVITPGTNTSNQVAVLYQGVNCTEVPVAIHADQLTPTWRVYSTGSNVFQTRAGCLIGAEHVNNSYECDIPIGAGICASYQTQTNSPRRARSVASQSIIAYTMSLGAENSVAYSNNSIAIPTNFTISVTTEILPVSMTKTSVDCTMYICGDSTECSNLLLQYGSFCTQLNRALTGIAVEQDKNTQEVFAQVKQIYKTPPIKDFGGFNFSQILPDPSKPSKRSFIEDLLFNKVTLADAGFIKQYGDCLGDIAARDLICAQKFNGLTVLPPLLTDEMIAQYTSALLAGTITSGWTFGAGAALQIPFAMQMAYRFNGIGVTQNVLYENQKLIANQFNSAIGKIQDSLSSTASALGKLQDVVNQNAQALNTLVKQLSSNFGAISSVLNDILSRLDPPEAEVQIDRLITGRLQSLQTYVTQQLIRAAEIRASANLAATKMSECVLGQSKRVDFCGKGYHLMSFPQSAPHGVVFLHVTYVFAQEKNFTTAPAICHDGKAHFPREGVFVSNGTHWFVTQRNFYEPQIITTDNTFVSGNCDVVIGIVNNTVYDPLQPELDS

SEQ ID NO: 2853 - protein, 1147 aa, Artificial Sequence
  SARS-CoV-2/Netherlands/ZuidHolland_2/2020__EPI_ISL_414556 spike protein (1-1147)(K986P_V987P_P1069F)
MFVFLVLLPLVSSQCVNLTTRTQLPPAYTNSFTRGVYYPDKVFRSSVLHSTQDLFLPFFSNVTWFHAIHVSGTNGTKRFDNPVLPFNDGVYFASTEKSNIIRGWIFGTTLDSKTQSLLIVNNATNVVIKVCEFQFCNDPFLGVYYHKNNKSWMESEFRVYSSANNCTFEYVSQPFLMDLEGKQGNFKNLREFVFKNIDGYFKIYSKHTPINLVRDLPQGFSALEPLVDLPIGINITRFQTLLALHRSYLTPGDSSSGWTAGAAAYYVGYLQPRTFLLKYNENGTITDAVDCALDPLSETKCTLKSFTVEKGIYQTSNFRVQPTESIVRFPNITNLCPFGEVFNATRFASVYAWNRKRISNCVADYSVLYNSASFSTFKCYGVSPTKLNDLCFTNVYADSFVIRGDEVRQIAPGQTGKIADYNYKLPDDFTGCVIAWNSNNLDSKVGGNYNYLYRLFRKSNLKPFERDISTEIYQAGSTPCNGVEGFNCYFPLQSYGFQPTNGVGYQPYRVVVLSFELLHAPATVCGPKKSTNLVKNKCVNFNFNGLTGTGVLTESNKKFLPFQQFGRDIADTTDAVRDPQTLEILDITPCSFGGVSVITPGTNTSNQVAVLYQGVNCTEVPVAIHADQLTPTWRVYSTGSNVFQTRAGCLIGAEHVNNSYECDIPIGAGICASYQTQTNSPRRARSVASQSIIAYTMSLGAENSVAYSNNSIAIPTNFTISVTTEILPVSMTKTSVDCTMYICGDSTECSNLLLQYGSFCTQLNRALTGIALEQDKNTQEVFAQVKQIYKTPPIKDFGGFNFSQILPDPSKPSKRSFIEDLLFNKVTLADAGFIKQYGDCLGDIAARDLICAQKFNGLTVLPPLLTDEMIAQYTSALLAGTITSGWTFGAGAALQIPFAMQMAYRFNGIGVTQNVLYENQKLIANQFNSAIGKIQDSLSSTASALGKLQDVVNQNAQALNTLVKQLSSNFGAISSVLNDILSRLDPPEAEVQIDRLITGRLQSLQTYVTQQLIRAAEIRASANLAATKMSECVLGQSKRVDFCGKGYHLMSFPQSAPHGVVFLHVTYVFAQEKNFTTAPAICHDGKAHFPREGVFVSNGTHWFVTQRNFYEPQIITTDNTFVSGNCDVVIGIVNNTVYDPLQPELDS

SEQ ID NO: 2854 - protein, 1147 aa, Artificial Sequence
  SARS-CoV-2/USA/WA-UW31/2020__EPI_ISL_414618 spike protein (1-1147)(K986P_V987P_P1069F)
MFVFLVLLPLVSSQCVNLTTRTQLPPAYTNSFTRGVYYPDKVFRSSVLHSTQDLFLPFFSNVTWFHAIHVSGTNGTKRFDNPVLPFNDGVYFASTEKSNIIRGWIFGTTLDSKTQSLLIVNNATNVVIKVCEFQFCNDPFLGVYYHKNNKSWMESEFRVYSSANNCTFEYVSQPFLMDLEGKQGNFKNLREFVFKNIDGYFKIYSKHTPINLVRDLPQGFSALEPLVDLPIGINITRFQTLLALHRSYLTPGDSSSGWTAGAAAYYVGYLQPRTFLLKYNENGTITDAVDCALDPLSETKCTLKSFTVEKGIYQTSNFRVQPTESIVRFPNITNLCPFGEVFNATRFASVYAWNRKRISNCVADYSVLYNSASFSTFKCYGVSPTKLNDLCFTNVYADSFVIRGDEVRQIAPGQTGKIADYNYKLPDDFTGCVIAWNSNNLDSKVGGNYNYLYRLFRKSNLKPFERDISTEIYQAGSTPCNGAEGFNCYFPLQSYGFQPTNGVGYQPYRVVVLSFELLHAPATVCGPKKSTNLVKNKCVNFNFNGLTGTGVLTESNKKFLPFQQFGRDIADTTDAVRDPQTLEILDITPCSFGGVSVITPGTNTSNQVAVLYQDVNCTEVPVAIHADQLTPTWRVYSTGSNVFQTRAGCLIGAEHVNNSYECDIPIGAGICASYQTQTNSPRRARSVASQSIIAYTMSLGAENSVAYSNNSIAIPTNFTISVTTEILPVSMTKTSVDCTMYICGDSTECSNLLLQYGSFCTQLNRALTGIAVEQDKNTQEVFAQVKQIYKTPPIKDFGGFNFSQILPDPSKPSKRSFIEDLLFNKVTLADAGFIKQYGDCLGDIAARDLICAQKFNGLTVLPPLLTDEMIAQYTSALLAGTITSGWTFGAGAALQIPFAMQMAYRFNGIGVTQNVLYENQKLIANQFNSAIGKIQDSLSSTASALGKLQDVVNQNAQALNTLVKQLSSNFGAISSVLNDILSRLDPPEAEVQIDRLITGRLQSLQTYVTQQLIRAAEIRASANLAATKMSECVLGQSKRVDFCGKGYHLMSFPQSAPHGVVFLHVTYVFAQEKNFTTAPAICHDGKAHFPREGVFVSNGTHWFVTQRNFYEPQIITTDNTFVSGNCDVVIGIVNNTVYDPLQPELDS

SEQ ID NO: 2855 - protein, 1147 aa, Artificial Sequence
  SARS-CoV-2/South Korea/SNU01/2020__EPI_ISL_411929 spike protein (1-1147)(K986P_V987P_P1069F)
MFVFLVLLPLVSSQCVNLTTRTQLPPAYTNSFTRGVYYPDKVFRSSVLHSTQDLFLPFFSNVTWFHAIHVSGTNGTKRFDNPVLPFNDGVYFASTEKSNIIRGWIFGTTLDSKTQSLLIVNNATNVVIKVCEFQFCNDPFLGVYYHKNNKSWMESEFRVYSSANNCTFEYVSQPFLMDLEGKQGNFKNLREFVFKNIDGYFKIYSKHTPINLVRDLPQGFWALEPLVDLPIGINITRFQTLLALHRSYLTPGDSSSGWTAGAAAYYVGYLQPRTFLLKYNENGTITDAVDCALDPLSETKCTLKSFTVEKGIYQTSNFRVQPTESIVRFPNITNLCPFGEVFNATRFASVYAWNRKRISNCVADYSVLYNSASFSTFKCYGVSPTKLNDLCFTNVYADSFVIRGDEVRQIAPGQTGKIADYNYKLPDDFTGCVIAWNSNNLDSKVGGNYNYLYRLFRKSNLKPFERDISTEIYQAGSTPCNGVEGFNCYFPLQSYGFQPTNGVGYQPYRVVVLSFELLHAPATVCGPKKSTNLVKNKCVNFNFNGLTGTGVLTESNKKFLPFQQFGRDIADTTDAVRDPQTLEILDITPCSFGGVSVITPGTNTSNQVAVLYQDVNCTEVPVAIHADQLTPTWRVYSTGSNVFQTRAGCLIGAEHVNNSYECDIPIGAGICASYQTQTNSPRRARSVASQSIIAYTMSLGAENSVAYSNNSIAIPTNFTISVTTEILPVSMTKTSVDCTMYICGDSTECSNLLLQYGSFCTQLNRALTGIAVEQDKNTQEVFAQVKQIYKTPPIKDFGGFNFSQILPDPSKPSKRSFIEDLLFNKVTLADAGFIKQYGDCLGDIAARDLICAQKFNGLTVLPPLLTDEMIAQYTSALLAGTITSGWTFGAGAALQIPFAMQMAYRFNGIGVTQNVLYENQKLIANQFNSAIGKIQDSLSSTASALGKLQDVVNQNAQALNTLVKQLSSNFGAISSVLNDILSRLDPPEAEVQIDRLITGRLQSLQTYVTQQLIRAAEIRASANLAATKMSECVLGQSKRVDFCGKGYHLMSFPQSAPHGVVFLHVTYVFAQEKNFTTAPAICHDGKAHFPREGVFVSNGTHWFVTQRNFYEPQIITTDNTFVSGNCDVVIGIVNNTVYDPLQPELDS

SEQ ID NO: 2856 - protein, 1147 aa, Artificial Sequence
  SARS-CoV-2/China/WF0004/2020__EPI_ISL_413694 spike protein (1-1147)(K986P_V987P_P1069F)
MFVFLVLLPLVSSQCVNLTTRTQLPPAYTNSFTRGVYYPDKVFRSSVLHSTQDLFLPFFSNVTWFHAIHVSGTNGTKRFDNPVLPFNDGVYFASTEKSNIIRGWIFGTTLDSKTQSLLIVNNATNVVIKVCEFQFCNDPFLGVYYHKNNKSWTESEFRVYSSANNCTFEYVSQPFLMDLEGKQGNFKNLREFVFKNIDGYFKIYSKHTPINLVRDLPQGFSALEPLVDLPIGINITRFQTLLALHRSYLTPGDSSSGWTAGAAAYYVGYLQPRTFLLKYNENGTITDAVDCALDPLSETKCTLKSFTVEKGIYQTSNFRVQPTESIVRFPNITNLCPFGEVFNATRFASVYAWNRKRISNCVADYSVLYNSASFSTFKCYGVSPTKLNDLCFTNVYADSFVIRGDEVRQIAPGQTGKIADYNYKLPDDFTGCVIAWNSNNLDSKVGGNYNYLYRLFRKSNLKPFERDISTEIYQAGSTPCNGVEGFNCYFPLQSYGFQPTNGVGYQPYRVVVLSFELLHAPATVCGPKKSTNLVKNKCVNFNFNGLTGTGVLTESNKKFLPFQQFGRDIADTTDAVRDPQTLEILDITPCSFGGVSVITPGTNTSNQVAVLYQDVNCTEVPVAIHADQLTPTWRVYSTGSNVFQTRAGCLIGAEHVNNSYECDIPIGAGICASYQTQTNSPRRARSVASQSIIAYTMSLGAENSVAYSNNSIAIPTNFTISVTTEILPVSMTKTSVDCTMYICGDSTECSNLLLQYGSFCTQLNRALTGIAVEQDKNTQEVFAQVKQIYKTPPIKDFGGFNFSQILPDPSKPSKRSFIEDLLFNKVTLADAGFIKQYGDCLGDIAARDLICAQKFNGLTVLPPLLTDEMIAQYTSALLAGTITSGWTFGAGAALQIPFAMQMAYRFNGIGVTQNVLYENQKLIANQFNSAIGKIQDSLSSTASALGKLQDVVNQNAQALNTLVKQLSSNFGAISSVLNDILSRLDPPEAEVQIDRLITGRLQSLQTYVTQQLIRAAEIRASANLAATKMSECVLGQSKRFDFCGKGYHLMSFPQSAPHGVVFLHVTYVFAQEKNFTTAPAICHDGKAHFPREGVFVSNGTHWFVTQRNFYEPQIITTDNTFVSGNCDVVIGIVNNTVYDPLQPELDS

SEQ ID NO: 2857 - protein, 1147 aa, Artificial Sequence
  SARS-CoV-2/China/WF0028/2020__EPI_ISL_413791 spike protein (1-1147)(K986P_V987P_P1069F)
MFVFLVLLPLVSSQCVNLTTRTQLPPAYTNSFTRGVYYPDKVFRSSVLHSTQDLFLPFFSNVTWFHAIHVSGTNGTKRFDNPVLPFNDGVYFASTEKSNIIRGWIFGTTLDSKTQSLLIVNNATNVVIKVCEFQFCNDPFLGVYYHKNNKSWMESEFRVYSSANNCTFEYVSQPFLMDLEGKQGNFKNLREFVFKNIDGYFKIYSKHTPINLVRDLPQGFSALEPLVDLPIGINITRFQTLLALHRSYLTPGDSSSGWTAGAAAYYVGYLQPRTFLLKYNENGTITDAVDCALDPLSETKCTLKSFTVEKGIYQTSNFRVQPTESIVRFPNITNLCPFGEVFNATRFASVYAWNRKRISNCVADYSVLYNSASFSTFKCYGVSPTKLNDLCFTNVYADSFVIRGDEVRQIAPGQTGKIADYNYKLPDDFTGCVIAWNSNNLDSKVGGNYNYLYRLFRKSNLKPFERDISTEIYQAGSTPCNGVEGFNCYFPLQSYGFQPTNGVGYQPYRVVVLSFELLHAPATVCGPKKSTNLVKNKCVNFNFNGLTGTGVLTESNKKFLPFQQFGRDIADTTDAVRDPQTLEILDITPCSFGGVSVITPGTNTSNQVAVLYQDVNCTEVPVAIHADQLTPTWRVYSTGSNVFQTRAGCLIGAEHVNNSYECDIPIGAGICASYQTQTNSPRRARSVASQSIIAYTMSLGAENSVAYSNNSIAIPTNFTISVTTEILPVSMTKTSVDCTMYICGDSTECSNLLLQYGSFCTQLNRALTGIAVEQDKNTQEVFAQVKQIYKTPPIKDFGGFNFSQILPDPSKPSKRSFIEDLLFNKVTLADAGFIKQYGDCLGDIAARDLICAQKFNGLTVLPPLLTDEMIAQYTSALLAGTITSGWTFGAGAALQIPFAMQMAYRFNGIGVTQNVLYENQKLIANQFNSAIGKIQDSLSSTASALGKLQDVVNQNAQALNTLVKQLSSNFGAISSVLNDILSRLDPPEAEVQIDRLITGRLQSLQTYVTQQLIRAAEIRASANLAATKMSECVLGQSKRVDFCGKGYHLMSFPQSAPHGVVFLHVTYVFAQEKNFTTAPAICHDGKAHFPREGVFVSNGTHWFVTQRNFYEPQIITTDNTFVSGNCDVVIGIVNNTVYDPLQPELES

SEQ ID NO: 2858 - protein, 1147 aa, Artificial Sequence
  SARS-CoV-2/2019-nCoV/USA-CruiseA-18/2020__MT159716.1 spike protein (1-1147)(K986P_V987P_P1069F)
MFVFLVLLPLVSSQCVNLTTRTQLPPAYTNSFTRGVYYPDKVFRSSVLHSTQDLFLPFFSNVTWFHAIHVSGTNGTKRFDNPVLPFNDGVYFASTEKSNIIRGWIFGTTLDSKTQSLLIVNNATNVVIKVCEFQFCNDPFLGVYYHKNNKSWMESELRVYSSANNCTFEYVSQPFLMDLEGKQGNFKNLREFVFKNIDGYFKIYSKHTPINLVRDLPQGFSALEPLVDLPIGINITRFQTLLALHRSYLTPGDSSSGWTAGAAAYYVGYLQPRTFLLKYNENGTITDAVDCALDPLSETKCTLKSFTVEKGIYQTSNFRVQPTESIVRFPNITNLCPFGEVFNATRFASVYAWNRKRISNCVADYSVLYNSASFSTFKCYGVSPTKLNDLCFTNVYADSFVIRGDEVRQIAPGQTGKIADYNYKLPDDFTGCVIAWNSNNLDSKVGGNYNYLYRLFRKSNLKPFERDISTEIYQAGSTPCNGVEGFNCYFPLQSYGFQPTNGVGYQPYRVVVLSFELLHAPATVCGPKKSTNLVKNKCVNFNFNGLTGTGVLTESNKKFLPFQQFGRDIADTTDAVRDPQTLEILDITPCSFGGVSVITPGTNTSNQVAVLYQDVNCTEVPVAIHADQLTPTWRVYSTGSNVFQTRAGCLIGAEHVNNSYECDIPIGAGICASYQTQTNSPRRARSVASQSIIAYTMSLGAENSVAYSNNSIAIPTNFTISVTTEILPVSMTKTSVDCTMYICGDSTECSNLLLQYGSFCTQLNRALTGIAVEQDKNTQEVFAQVKQIYKTPPIKDFGGFNFSQILPDPSKPSKRSFIEDLLFNKVTLADAGFIKQYGDCLGDIAARDLICAQKFNGLTVLPPLLTDEMIAQYTSALLAGTITSGWTFGAGAALQIPFAMQMAYRFNGIGVTQNVLYENQKLIANQFNSAIGKIQDSLSSTASALGKLQDVVNQNAQALNTLVKQLSSNFGAISSVLNDILSRLDPPEAEVQIDRLITGRLQSLQTYVTQQLIRAAEIRASANLAATKMSECVLGQSKRVDFCGKGYHLMSFPQSAPHGVVFLHVTYVFAQEKNFTTAPAICHDGKAHFPREGVFVSNGTHWFVTQRNFYEPQIITTDNTFVSGNCDVVIGIVNNTVYDPLQPELDS

SEQ ID NO: 2859 - protein, 1147 aa, Artificial Sequence
  SARS-CoV-2/SARS-CoV-2/Yunnan-01/human/2020/CHN__MT049951.1 spike protein (1-1147)(K986P_V987P_P1069F)
MFVFLVLLPLVSSQCVNLTTRTQLPPANTNSFTRGVYYPDKVFRSSVLHSTQDLFLPFFSNVTWFHAIHVSGTNGTKRFDNPVLPFNDGVYFASTEKSNIIRGWIFGTTLDSKTQSLLIVNNATNVVIKVCEFQFCNDPFLGVYYHKNNKSWMESEFRVYSSANNCTFEYVSQPFLMDLEGKQGNFKNLREFVFKNIDGYFKIYSKHTPINLVRDLPQGFSALEPLVDLPIGINITRFQTLLALHRSYLTPGDSSSGWTAGAAAYYVGYLQPRTFLLKYNENGTITDAVDCALDPLSETKCTLKSFTVEKGIYQTSNFRVQPTESIVRFPNITNLCPFGEVFNATRFASVYAWNRKRISNCVADYSVLYNSASFSTFKCYGVSPTKLNDLCFTNVYADSFVIRGDEVRQIAPGQTGKIADYNYKLPDDFTGCVIAWNSNNLDSKVGGNYNYLYRLFRKSNLKPFERDISTEIYQAGSTPCNGVEGFNCYFPLQSYGFQPTNGVGYQPYRVVVLSFELLHAPATVCGPKKSTNLVKNKCVNFNFNGLTGTGVLTESNKKFLPFQQFGRDIADTTDAVRDPQTLEILDITPCSFGGVSVITPGTNTSNQVAVLYQDVNCTEVPVAIHADQLTPTWRVYSTGSNVFQTRAGCLIGAEHVNNSYECDIPIGAGICASYQTQTNSPRRARSVASQSIIAYTMSLGAENSVAYSNNSIAIPTNFTISVTTEILPVSMTKTSVDCTMYICGDSTECSNLLLQYGSFCTQLNRALTGIAVEQDKNTQEVFAQVKQIYKTPPIKDFGGFNFSQILPDPSKPSKRSFIEDLLFNKVTLADAGFIKQYGDCLGDIAARDLICAQKFNGLTVLPPLLTDEMIAQYTSALLAGTITSGWTFGAGAALQIPFAMQMAYRFNGIGVTQNVLYENQKLIANQFNSAIGKIQDSLSSTASALGKLQDVVNQNAQALNTLVKQLSSNFGAISSVLNDILSRLDPPEAEVQIDRLITGRLQSLQTYVTQQLIRAAEIRASANLAATKMSECVLGQSKRVDFCGKGYHLMSFPQSAPHGVVFLHVTYVFAQEKNFTTAPAICHDGKAHFPREGVFVSNGTHWFVTQRNFYEPQIITTDNTFVSGNCDVVIGIVNNTVYDPLQPELDS

SEQ ID NO: 2860 - protein, 1147 aa, Artificial Sequence
  SARS-CoV-2/USA/WA-UW292/2020__EPI_ISL_418077 spike protein (1-1147)(K986P_V987P_P1069F)
MFVFLVLLPLVSSQCVNLTTRTQLPPAYTNSFTRGVYYPDKVFRSSVLHSTQDLFLPFFSNVTWFHAIHVSGTNGTKRFDNPVLPFNDGVYFASTEKSNIIRGWIFGTTLDSKTQSLLIVNNATNVVIKVCEFQFCNDPFLGVYYHKNNKSWMESEFRVYSSANNCTFEYVSQPFLMDLEGKQGNFKNLREFVFKNIDGYFKIYSKHTPINLVRDLPQGFSALEPLVDLPIGINITRFQTLLALHRSYLTPGDSSSGWTAGAAAYYVGYLQPRTFLLKYNENGTITDAVDCALDPLSETKCTLKSFTVEKGIYQTSNFRVQPTESIVRFPNITNLCPFGEVFNATRFASVYAWNRKRISNCVADYSVLYNSASFSTFKCYGVSPTKLNDLCFTNVYADSFVIRGDEVRQIAPGQTGKIADYNYKLPDDFTGCVIAWNSNNLDSKVGGNYNYLYRLFRKSNLKPFERDISTEIYQASSTPCNGVEGFNCYFPLQSYGFQPTNGVGYQPYRVVVLSFELLHAPATVCGPKKSTNLVKNKCVNFNFNGLTGTGVLTESNKKFLPFQQFGRDIADTTDAVRDPQTLEILDITPCSFGGVSVITPGTNTSNQVAVLYQDVNCTEVPVAIHADQLTPTWRVYSTGSNVFQTRAGCLIGAEHVNNSYECDIPIGAGICASYQTQTNSPRRARSVASQSIIAYTMSLGAENSVAYSNNSIAIPTNFTISVTTEILPVSMTKTSVDCTMYICGDSTECSNLLLQYGSFCTQLNRALTGIAVEQDKNTQEVFAQVKQIYKTPPIKDFGGFNFSQILPDPSKPSKRSFIEDLLFNKVTLADAGFIKQYGDCLGDIAARDLICAQKFNGLTVLPPLLTDEMIAQYTSALLAGTITSGWTFGAGAALQIPFAMQMAYRFNGIGVTQNVLYENQKLIANQFNSAIGKIQDSLSSTASALGKLQDVVNQNAQALNTLVKQLSSNFGAISSVLNDILSRLDPPEAEVQIDRLITGRLQSLQTYVTQQLIRAAEIRASANLAATKMSECVLGQSKRVDFCGKGYHLMSFPQSAPHGVVFLHVTYVFAQEKNFTTAPAICHDGKAHFPREGVFVSNGTHWFVTQRNFYEPQIITTDNTFVSGNCDVVIGIVNNTVYDPLQPELDS

SEQ ID NO: 2861 - protein, 1147 aa, Artificial Sequence
  SARS-CoV-2/Iceland/192/2020__EPI_ISL_417819 spike protein (1-1147)(K986P_V987P_P1069F)
MFVFFVLLPLVSSQCVNLTTRTQLPPAYTNSFTRGVYYPDKVFRSSVLHSTQDLFLPFFSNVTWFHAIHVSGTNGTKRFDNPVLPFNDGVYFASTEKSNIIRGWIFGTTLDSKTQSLLIVNNATNVVIKVCEFQFCNDPFLGVYYHKNNKSWMESEFRVYSSANNCTFEYVSQPFLMDLEGKQGNFKNLREFVFKNIDGYFKIYSKHTPINLVRDLPQGFSALEPLVDLPIGINITRFQTLLALHRSYLTPGDSSSGWTAGAAAYYVGYLQPRTFLLKYNENGTITDAVDCALDPLSETKCTLKSFTVEKGIYQTSNFRVQPTESIVRFPNITNLCPFGEVFNATRFASVYAWNRKRISNCVADYSVLYNSASFSTFKCYGVSPTKLNDLCFTNVYADSFVIRGDEVRQIAPGQTGKIADYNYKLPDDFTGCVIAWNSNNLDSKVGGNYNYLYRLFRKSNLKPFERDISTEIYQAGSTPCNGVEGFNCYFPLQSYGFQPTNGVGYQPYRVVVLSFELLHAPATVCGPKKSTNLVKNKCVNFNFNGLTGTGVLTESNKKFLPFQQFGRDIADTTDAVRDPQTLEILDITPCSFGGVSVITPGTNTSNQVAVLYQGVNCTEVPVAIHADQLTPTWRVYSTGSNVFQTRAGCLIGAEHVNNSYECDIPIGAGICASYQTQTNSPRRARSVASQSIIAYTMSLGAENSVAYSNNSIAIPTNFTISVTTEILPVSMTKTSVDCTMYICGDSTECSNLLLQYGSFCTQLNRALTGIAVEQDKNTQEVFAQVKQIYKTPPIKDFGGFNFSQILPDPSKPSKRSFIEDLLFNKVTLADAGFIKQYGDCLGDIAARDLICAQKFNGLTVLPPLLTDEMIAQYTSALLAGTITSGWTFGAGAALQIPFAMQMAYRFNGIGVTQNVLYENQKLIANQFNSAIGKIQDSLSSTASALGKLQDVVNQNAQALNTLVKQLSSNFGAISSVLNDILSRLDPPEAEVQIDRLITGRLQSLQTYVTQQLIRAAEIRASANLAATKMSECVLGQSKRVDFCGKGYHLMSFPQSAPHGVVFLHVTYVFAQEKNFTTAPAICHDGKAHFPREGVFVSNGTHWFVTQRNFYEPQIITTDNTFVSGNCDVVIGIVNNTVYDPLQPELDS

SEQ ID NO: 2862 - protein, 1147 aa, Artificial Sequence
  SARS-CoV-2/Belgium/ULG-6939/2020__EPI_ISL_417020 spike protein (1-1147)(K986P_V987P_P1069F)
MFVFLVLLPLVSSQCVNLTTRTQLPPAYTNSFTRGVYYPDKVFRSSVLHSTQDLFLPFFSNVTWFHAIHVSGTNGTKRFDNPVLPFNDGVYFASTEKSNIIRGWIFGTTLDSKTQSLLIVNNATNVVIKVCEFQFCNDPFLGVYYHKNNKSWMESEFRVYSSANNCTFEYVSQPFLMDLEGKQGNFKNLREFVFKNIDGYFKIYSKHTPINLVRDLPQGFSALEPLVDLPIGINITRFQTLLALHRSYLTPGDSSSGWTAGAAAYYVGYLQPRTFLLKYNENGTITDAVDCALDPLSETKCTLKSFTVEKGIYQTSNFRVQPTESIVRFPNITNLCPFGEVFNATRFASVYAWNRKRISNCVADYSVLYNSASFSTFKCYGVSPTKLNDLCFTNVYADSFVIRGDEVRQIAPGQTGKIADYNYKLPDDFTGCVIAWNSNNLDSKVGGNYNYLYRLFRKSNLKPFERDISTEIYQAGSTPCNGVEGFNCYFPLQSYGFQPTNGVGYQPYRVVVLSFELLHAPATVCGPKKSTNLVKNKCVNFNFNGLTGTGVLTESNKKFLPFQQFGRDIADTTDAVRDPQTLEILDITPCSFGGVSVITPGTNTSNQVAVLYQGVNCTEVPVAIHADQLTPTWRVYSTGSNVFQTRAGCLIGAEHVNNSYECDIPIGAGICASYQTQTNSPRRARSVASQSIIAYTMSLGAENSVVYSNNSIAIPTNFTISVTTEILPVSMTKTSVDCTMYICGDSTECSNLLLQYGSFCTQLNRALTGIAVEQDKNTQEVFAQVKQIYKTPPIKDFGGFNFSQILPDPSKPSKRSFIEDLLFNKVTLADAGFIKQYGDCLGDIAARDLICAQKFNGLTVLPPLLTDEMIAQYTSALLAGTITSGWTFGAGAALQIPFAMQMAYRFNGIGVTQNVLYENQKLIANQFNSAIGKIQDSLSSTASALGKLQDVVNQNAQALNTLVKQLSSNFGAISSVLNDILSRLDPPEAEVQIDRLITGRLQSLQTYVTQQLIRAAEIRASANLAATKMSECVLGQSKRVDFCGKGYHLMSFPQSAPHGVVFLHVTYVFAQEKNFTTAPAICHDGKAHFPREGVFVSNGTHWFVTQRNFYEPQIITTDNTFVSGNCDVVIGIVNNTVYDPLQPELDS

SEQ ID NO: 2863 - protein, 1147 aa, Artificial Sequence
  SARS-CoV-2/France/HF2496/2020__EPI_ISL_418231 spike protein (1-1147)(K986P_V987P_P1069F)
MFVFLVLLPLVSSQCVNLTTRTQLPPAYTNSFTRGVYYPDKVFRSSVLHSTQDLFLPFFSNVTWFHAIHVSGTNGTKRFDNPVLPFNDGVYFASTEKSNIIRGWIFGTTLDSKTQSLLIVNNATNVVIKVCEFQFCNDPFLGVYYHKNNKSWMESEFRVYSSANNCTFEYVSQPFLMDLEGKQGNFKNLREFVFKNIDGYFKIYSKHTPINLVRDLPQGFSALEPLVDLPIGINITRFQTLLALHRSYLTPGDSSSGWTAGAAAYYVGYLQPRTFLLKYNENGTITDAVDCALDPLSETKCTLKSFTVEKGIYQTSNFRVQPTESIVRFPNITNLCPFGEVFNATRFASVYAWNRKRISNCVADYSVLYNSASFSTFKCYGVSPTKLNDLCFTNVYADSFVIRGDEVRQIAPGQTGKIADYNYKLPDDFTGCVIAWNSNNLDSKVGGNYNYLYRLFRKSNLKPFERDISTEIYQAGSTPCNGVEGFNCYFPLQSYGFQPTNGVGYQPYRVVVLSFELLHAPATVCGPKKSTNLVKNKCVNFNFNGLTGTGVLTESNKKFLPFQQFGRDIADTTDAVRDPQTLEILDITPCSFGGVSVITPGTNTSNQVAVLYQGVNCTEVPVAIHADQLTPTWRVYSTGSNVFQTRAGCLIGAEHVNNSYECDIPIGAGICASYQTQTNSPRRARSVASQSIIAYTMSLGAENSVAYSNNSIAIPTNFTISVTTEILPVSMTKTSVDCTMYICGDSTECSNLLLQYGSFCTQLNRALTGIAVEQDKNTQEVFAQVKQIYKTPPIKDFGGFNFSQILPDPSKPSKRSFIEDLLFNKVTLADAGFIKQYGDCLGDIVARDLICAQKFNGLTVLPPLLTDEMIAQYTSALLAGTITSGWTFGAGAALQIPFAMQMAYRFNGIGVTQNVLYENQKLIANQFNSAIGKIQDSLSSTASALGKLQDVVNQNAQALNTLVKQLSSNFGAISSVLNDILSRLDPPEAEVQIDRLITGRLQSLQTYVTQQLIRAAEIRASANLAATKMSECVLGQSKRVDFCGKGYHLMSFPQSAPHGVVFLHVTYVFAQEKNFTTAPAICHDGKAHFPREGVFVSNGTHWFVTQRNFYEPQIITTDNTFVSGNCDVVIGIVNNTVYDPLQPELDS

SEQ ID NO: 2864 - protein, 1147 aa, Artificial Sequence
  SARS-CoV-2/USA/WA-UW291/2020__EPI_ISL_418076 spike protein (1-1147)(K986P_V987P_P1069F)
MFVFLVLLPLVSSQCVNLTTRTQLPPAYTNSFTRGVYYPDKVFRSSVLHSTQDLFLPFFSNVTWFHAIHVSGTNGTKRFDNPVLPFNDGVYFASTEKSNIIRGWIFGTTLDSKTQSLLIVNNATNVVIKVCEFQFCNDPFLGVYYHKNNKSWMESEFRVYSSANNCTFEYVSQPFLMDLEGKQGNFKNLREFVFKNIDGYFKIYSKHTPINLVRDLPQGFSALEPLVDLPIGINITRFQTLLALHRSYLTPGDSSSGWTAGAAAYYVGYLQPRTFLLKYNENGTITDAVDCALDPLSETKCTLKSFTVEKGIYQTSNFRVQPTESIVRFPNITNLCPFGEVFNATRFASVYAWNRKRISNCVADYSVLYNSASFSTFKCYGVSPTKLNDLCFTNVYADSFVIRGDEVRQIAPGQTGKIADYNYKLPDDFTGCVIAWNSNNLDSKVGGNYNYLYRLFRKSNLKPFERDISTEIYQAGSTPCNGVEGFNCYFPLQSYGFQPTNGVGYQPYRVVVLSFELLHAPATVCGPKKSTNLVKNKCVNFNFNGLTGTGVLTESNKKFLPFQQFGRDIADTTDAVRDPQTLEILDITPCSFGGVSVITPGTNTSNQVAVLYQGVNCTEVPVAIHADQLTPTWRVYSTGSNVFQTRAGCLIGAEHVNNSYECDIPIGAGICASYQTQTNSPRRARSVASQSIIAYTMSLGAENSVAYSNNSIAIPTNFTISVTTEILPVSMTKTSVDCTMYICGDSTECSNLLLQYGSFCTQLNRALTGIAVEQDKNTQEVFAQVKQIYKTPPIKDFGGFNFSQILPDPSKPSKRSFIEDLLFNKVTLADAGFIKQYGDCLGDIAARDLICAQKFNGLTVLPPLLTDEMIAQYTSALLAGTITSGWTFGAGAALQIPFAMQMAYRFNGIGVTQNVLYENQKLIANQFNSAIGKIQYSLSSTASALGKLQDVVNQNAQALNTLVKQLSSNFGAISSVLNDILSRLDPPEAEVQIDRLITGRLQSLQTYVTQQLIRAAEIRASANLAATKMSECVLGQSKRVDFCGKGYHLMSFPQSAPHGVVFLHVTYVFAQEKNFTTAPAICHDGKAHFPREGVFVSNGTHWFVTQRNFYEPQIITTDNTFVSGNCDVVIGIVNNTVYDPLQPELDS

SEQ ID NO: 2865 - protein, 1147 aa, Artificial Sequence; identical to SEQ ID NO: 2828
  SARS-CoV-2/Portugal/PT0034/2020__EPI_ISL_418019 spike protein (1-1147)(K986P_V987P_P1069F)

SEQ ID NO: 2866 - protein, 1147 aa, Artificial Sequence; identical to SEQ ID NO: 2820
  SARS-CoV-2/Iceland/202/2020__EPI_ISL_417750 spike protein (1-1147)(K986P_V987P_P1069F)

SEQ ID NO: 2867 - protein, 1147 aa, Artificial Sequence
  SARS-CoV-2/USA/WA-UW261/2020__EPI_ISL_418046 spike protein (1-1147)(K986P_V987P_P1069F)
MFVFLVLLPLVSSQCVNLTTRTQLPPAYTNSFTRGVYYPDKVFRSSVLHSTQDLFLPFFSNVTWFHAIHVSGTNGTKRFDNPVLPFNDGVYFASTEKSNIIRGWIFGTTLDSKTQSLLIVNNATNVVIKVCEFQFCNDPFLGVYYHKNNKSWMESEFRVYSSANNCTFEYVSQPFLMDLEGKQGNFKNLREFVFKNIDGYFKIYSKHTPINLVRDLPQGFSALEPLVDLPIGINITRFQTLLALHRSYLTPGDSSSGWTAGAAAYYVGYLQPRTFLLKYNENGTITDAVDCALDPLSETKCTLKSFTVEKGIYQTSNFRVQPTESIVRFPNITNLCPFGEVFNATRFTSVYAWNRKRISNCVADYSVLYNSASFSTFKCYGVSPTKLNDLCFTNVYADSFVIRGDEVRQIAPGQTGKIADYNYKLPDDFTGCVIAWNSNNLDSKVGGNYNYLYRLFRKSNLKPFERDISTEIYQAGSTPCNGVEGFNCYFPLQSYGFQPTNGVGYQPYRVVVLSFELLHAPATVCGPKKSTNLVKNKCVNFNFNGLTGTGVLTESNKKFLPFQQFGRDIADTTDAVRDPQTLEILDITPCSFGGVSVITPGTNTSNQVAVLYQDVNCTEVPVAIHADQLTPTWRVYSTGSNVFQTRAGCLIGAEHVNNSYECDIPIGAGICASYQTQTNSPRRARSVASQSIIAYTMSLGAENSVAYSNNSIAIPTNFTISVTTEILPVSMTKTSVDCTMYICGDSTECSNLLLQYGSFCTQLNRALTGIAVEQDKNTQEVFAQVKQIYKTPPIKDFGGFNFSQILPDPSKPSKRSFIEDLLFNKVTLADAGFIKQYGDCLGDIAARDLICAQKFNGLTVLPPLLTDEMIAQYTSALLAGTITSGWTFGAGAALQIPFAMQMAYRFNGIGVTQNVLYENQKLIANQFNSAIGKIQDSLSSTASALGKLQDVVNQNAQALNTLVKQLSSNFGAISSVLNDILSRLDPPEAEVQIDRLITGRLQSLQTYVTQQLIRAAEIRASANLAATKMSECVLGQSKRVDFCGKGYHLMSFPQSAPHGVVFLHVTYVFAQEKNFTTAPAICHDGKAHFPREGVFVSNGTHWFVTQRNFYEPQIITTDNTFVSGNCDVVIGIVNNTVYDPLQPELDS

SEQ ID NO: 2868 - protein, 1147 aa, Artificial Sequence
  SARS-CoV-2/Portugal/PT0035/2020__EPI_ISL_418020 spike protein (1-1147)(K986P_V987P_P1069F)
MFVFLVLLPLVSSQCVNLTTRTQLPPAYTNSFTRGVYYPDKVFRSSVLHSTQDLFLPFFSNVTWFHAIHVSGTNGTKRFDNPVLPFNDGVYFASTEKSNIIRGWIFGTTLDSKTQSLLIVNNATNVVIKVCEFQFCNDPFLGVYYHKNNKSWMESEFRVYSSANNCTFEYVSQPFLMDLEGKQGNFKNLREFVFKNIDGYFKIYSKHTPINLVRDLPQGFSALEPLVDLPIGINITRFQTLLALHRSYLTPGDSSSGWTAGAAAYYVGYLQPRTFLLKYNENGTITDAVDCALDPLSETKCTLKSFTVEKGIYQTSNFRVQPTESIVRFPNITNLCPFGEVFNATRFASVYAWNRKRISNCVADYSVLYNSASFSTFKCYGVSPTKLNDLCFTNVYADSFVIRGDEVRQIAPGQTGKIADYNYKLPDDFTGCVIAWNSNNLDSKVGGNYNYLYRLFRKSNLKPFERDISTEIYQAGSTPCNGVEGFNCYFPLQSYGFQPTNGVGYQPYRVVVLSFELLHAPATVCGPKKSTNLVKNKCVNFNFNGLTGTGVLTESNKKFLPFQQFGRDIADTTDAVRDPQTLEILDITPCSFGGVSVITPGTNTSNQVAVLYQDVNCTEVPVAIHADQLTPTWRVYSTGSNVFQTRAGCLIGAEHVNNSYECDIPIGAGICASYQTQTNSPRRARSVASQSIIAYTMSLGAENSVAYSNNSIAIPTNFTISVTTEILPVSMTKTSVDCTMYICGDSTECSNLLLQYGSFCTQLNRALTGIAVEQDKNTQEVFAQVKQIYKTPPIKDFGGFNFSQILPDPSKPSKRSFIEDLLFNKVTLADAGFIKQYGDCLGDISARDLICAQKFNGLTVLPPLLTDEMIAQYTSALLAGTITSGWTFGAGAALQIPFAMQMAYRFNGIGVTQNVLYENQKLIANQFNSAIGKIQDSLSSTASALGKLQDVVNQNAQALNTLVKQLSSNFGAISSVLNDILSRLDPPEAEVQIDRLITGRLQSLQTYVTQQLIRAAEIRASANLAATKMSECVLGQSKRVDFCGKGYHLMSFPQSAPHGVVFLHVTYVFAQEKNFTTAPAICHDGKAHFPREGVFVSNGTHWFVTQRNFYEPQIITTDNTFVSGNCDVVIGIVNNTVYDPLQPELDS

SEQ ID NO: 2869 - protein, 1147 aa, Artificial Sequence
  SARS-CoV-2/USA/NY-NYUMC7/2020__EPI_ISL_418192 spike protein (1-1147)(K986P_V987P_P1069F)
MFVFLVLLPLVSSQCVNLTTRTQLPPAYTNSFTRGVYYPDKVFRSSVLHSTQDLFLPFFSNVTWFHAIHVSGTNGTKRFDNPVLPFNDGVYFASTEKSNIIRGWIFGTTLDSKTQSLLIVNNATNVVIKVCEFQFCNDPFLGVYHHKNNKSWMESEFRVYSSANNCTFEYVSQPFLMDLEGKQGNFKNLREFVFKNIDGYFKIYSKHTPINLVRDLPQGFSALEPLVDLPIGINITRFQTLLALHRSYLTPGDSSSGWTAGAAAYYVGYLQPRTFLLKYNENGTITDAVDCALDPLSETKCTLKSFTVEKGIYQTSNFRVQPTESIVRFPNITNLCPFGEVFNATRFASVYAWNRKRISNCVADYSVLYNSASFSTFKCYGVSPTKLNDLCFTNVYADSFVIRGDEVRQIAPGQTGKIADYNYKLPDDFTGCVIAWNSNNLDSKVGGNYNYLYRLFRKSNLKPFERDISTEIYQAGSTPCNGVEGFNCYFPLQSYGFQPTNGVGYQPYRVVVLSFELLHAPATVCGPKKSTNLVKNKCVNFNFNGLTGTGVLTESNKKFLPFQQFGRDIADTTDAVRDPQTLEILDITPCSFGGVSVITPGTNTSNQVAVLYQGVNCTEVPVAIHADQLTPTWRVYSTGSNVFQTRAGCLIGAEHVNNSYECDIPIGAGICASYQTQTNSPRRARSVASQSIIAYTMSLGAENSVAYSNNSIAIPTNFTISVTTEILPVSMTKTSVDCTMYICGDSTECSNLLLQYGSFCTQLNRALTGIAVEQDKNTQEVFAQVKQIYKTPPIKDFGGFNFSQILPDPSKPSKRSFIEDLLFNKVTLADAGFIKQYGDCLGDIAARDLICAQKFNGLTVLPPLLTDEMIAQYTSALLAGTITSGWTFGAGAALQIPFAMQMAYRFNGIGVTQNVLYENQKLIANQFNSAIGKIQDSLSSTASALGKLQDVVNQNAQALNTLVKQLSSNFGAISSVLNDILSRLDPPEAEVQIDRLITGRLQSLQTYVTQQLIRAAEIRASANLAATKMSECVLGQSKRVDFCGKGYHLMSFPQSAPHGVVFLHVTYVFAQEKNFTTAPAICHDGKAHFPREGVFVSNGTHWFVTQRNFYEPQIITTDNTFVSGNCDVVIGIVNNTVYDPLQPELDS

SEQ ID NO: 2870 - protein, 1147 aa, Artificial Sequence
  SARS-CoV-2/Iceland/189/2020__EPI_ISL_417709 spike protein (1-1147)(K986P_V987P_P1069F)
MFVFLVLLPLVSSQCVNLTTRTQLPPAYTNSFTRGVYYPDKVFRSSVLHSTQDLFLPFFSNVTWFHAIHVSGTNGTKRFDNPVLPFNDGVYFASTEKSNIIRGWIFGTTLDSKTQSLLIVNNATNVVIKVCEFQFCNDPFLGVYYHKNNKSWMESEFRVYSSANNCTFEYVSQPFLMDLEGKQGNFKNLREFVFKNIDGYFKIYSKHTPINLVRDLPQGFSALEPLVDLPIGINITRFQTLLALHRSYLTPGDSSSGWTAGAAAYYVGYLQPRTFLLKYNENGTITDAVDCALDPLSETKCTLKSFTVEKGIYQTSNFRVQPTESIVRFPNITNLCPFGEVFNATRFASVYAWNRKRISNCVADYSVLYNSASFSTFKCYGVSPTKLNDLCFTNVYADSFVIRGDEVRQIAPGQTGKIADYNYKLPDDFTGCVIAWNSNNLDSKVGGNYNYLYRLFRKSNLKPFERDISTEIYQAGSTPCNGVEGFNCYFPLQSYGFQPTNGVGYQPYRVVVLSFELLHAPATVCGPKKSTNLVKNKCVNFNFNGLTGTGVLTESNKKFLPFQQFGRDIADTTDAVRDPQTLEILDITPCSFGGVSVITPGTNTSNQVAVLYQGVNCTEVPVAIHADQLTPTWRVYSTGSNVFQTRAGCLIGAEHVNNSYECDIPIGAGICASYQTQTNSPRRARSVASQSIIAYTMSLGAENSVAYSNNSIAIPTNFTISVTTEILPVSMTKTSVDCTMYICGDSTECSNLLLQYGSFCTQLNRALTGIAVEQDKNTQEVFAQVKQIYKTPPIKDFGGFNFSQILPDPSKPSKRSFIEDLLFNKVTLADAGFTKQYGDCLGDIAARDLICAQKFNGLTVLPPLLTDEMIAQYTSALLAGTITSGWTFGAGAALQIPFAMQMAYRFNGIGVTQNVLYENQKLIANQFNSAIGKIQDSLSSTASALGKLQDVVNQNAQALNTLVKQLSSNFGAISSVLNDILSRLDPPEAEVQIDRLITGRLQSLQTYVTQQLIRAAEIRASANLAATKMSECVLGQSKRVDFCGKGYHLMSFPQSAPHGVVFLHVTYVFAQEKNFTTAPAICHDGKAHFPREGVFVSNGTHWFVTQRNFYEPQIITTDNTFVSGNCDVVIGIVNNTVYDPLQPELDS

SEQ ID NO: 2871 - protein, 1147 aa, Artificial Sequence
  SARS-CoV-2/Australia/NSW56/2020__EPI_ISL_417408 spike protein (1-1147)(K986P_V987P_P1069F)
MFVFLVLLPLVSSQCVNLTTRTQLPPAYTNSFTRGVYYPDKVFRSSVLHSTQDLFLPFFSNVTWFHAIHVSGTNGTKRFDNPVLPFNDGVYFASTEKSNIIRGWIFGTTLDSKTQSLLIVNNATNVVIKVCEFQFCNDPFLGVYYHKNNKSWMESEFRVYSSANNCTFEYVSQPFLMDLEGKQGNFKNLREFVFKNIDGYFKIYSKHTPINLVRDLPQGFSALEPLVDLPIGINITRFQTLLALHRSYLTPGDSSSGWTAGAAAYYVGYLQPRTFLLKYNENGTITDAVDCALDPLSETKCTLKSFTVEKGIYQTSNFRVQPTESIVRFPNITNLCPFGEVFNATRFASVYAWNRKRISNCVADYSVLYNSASFSTFKCYGVSPTKLNDLCFTNVYADSFVIRGDEVRQIAPGQTGKIADYNYKLPDDFTGCVIAWNSNNLDSKVGGNYNYLYRLFRKSNLKPFERDISTEIYQAGSTPCNGVEGFNCYFPLQSYGFQPTNGVGYQPYRVVVLSFELLHAPATVCGPKKSTNLVKNKCVNFNFNGLTGTGVLTESNKKFLPFQQFGRDIADTTDAVRDPQTLEILDITPCSFGGVSVITPGTNTSNQVAVLYQDVNCTEVPVAIHADQLTPTWRVYSTGSNVFQTRAGCLIGAEHVNNSYECDIPIGAGICASYQTQTNSPRRARSVASQSIIAYTMSLGAENSVAYSNNSIAIPTNFTISVTTEILPVSMTKTSVDCTMYICGDSTECSNLLLQYGSFCTQLNRALTGIAVEQDKNTQEVFAQVKQIYKTPPIKDFGGFNFSQILPDSSKPSKRSFIEDLLFNKVTLADAGFIKQYGDCLGDIAARDLICAQKFNGLTVLPPLLTDEMIAQYTSALLAGTITSGWTFGAGAALQIPFAMQMAYRFNGIGVTQNVLYENQKLIANQFNSAIGKIQDSLSSTASALGKLQDVVNQNAQALNTLVKQLSSNFGAISSVLNDILSRLDPPEAEVQIDRLITGRLQSLQTYVTQQLIRAAEIRASANLAATKMSECVLGQSKRVDFCGKGYHLMSFPQSAPHGVVFLHVTYVFAQEKNFTTAPAICHDGKAHFPREGVFVSNGTHWFVTQRNFYEPQIITTDNTFVSGNCDVVIGIVNNTVYDPLQPELDS

SEQ ID NO: 2872 - protein, 1147 aa, Artificial Sequence
  SARS-CoV-2/Iceland/280/2020__EPI_ISL_417608 spike protein (1-1147)(K986P_V987P_P1069F)
MFVFLVLLPLVSSQCVNLTTRTQLPPAYTNSFTRGVYYPDKVFRSSVLHSTQDLFLPFFSNVTWFHAIHVSGTNGTKRFDNPVLPFNDGVYFASTEKSNIIRGWIFGTTLDSKTQSLLIVNNATNVVIKVCEFQFCNDPFLGVYYHKNNKSWMESEFRVYSSANNCTFEYVSQPFLMDLEGKQGNFKNLREFVFKNIDGYFKIYSKHTPINLVRDLPQGFSALEPLVDLPIGINITRFQTLLALHRSYLTPGDSSSGWTAGAAAYYVGYLQPRTFLLKYNENGTITDAVDCALDPLSETKCTLKSFTVEKGIYQTSNFRVQPTESIVRFPNITNLCPFGEVFNATRFASVYAWNRKRISNCVADYSVLYNSASFSTFKCYGVSPTKLNDLCFTNVYADSFVIRGDEVRQIAPGQTGKIADYNYKLPDDFTGCVIAWNSNNLDSKVGGNYNYLYRLFRKSNLKPFERDISTEIYQAGSTPCNGVEGFNCYFPLQSYGFQPTNGVGYQPYRVVVLSFELLHAPATVCGPKKSTNLVKNKCVNFNFNGLTGTGVLTESNKKFLPFQQFGRDIADTTDAVRDPQTLEILDITPCSFGGVSVITPGTNTSNQVAVLYQGVNCTEVPVAIHADQLTPTWRVYSTGSNVFQTRAGCLIGAEHVNNSYECDIPIGAGICASYHTQTNSPRRARSVASQSIIAYTMSLGAENSVAYSNNSIAIPTNFTISVTTEILPVSMTKTSVDCTMYICGDSTECSNLLLQYGSFCTQLNRALTGIAVEQDKNTQEVFAQVKQIYKTPPIKDFGGFNFSQILPDPSKPSKRSFIEDLLFNKVTLADAGFIKQYGDCLGDIAARDLICAQKFNGLTVLPPLLTDEMIAQYTSALLAGTITSGWTFGAGAALQIPFAMQMAYRFNGIGVTQNVLYENQKLIANQFNSAIGKIQDSLSSTASALGKLQDVVNQNAQALNTLVKQLSSNFGAISSVLNDILSRLDPPEAEVQIDRLITGRLQSLQTYVTQQLIRAAEIRASANLAATKMSECVLGQSKRVDFCGKGYHLMSFPQSAPHGVVFLHVTYVFAQEKNFTTAPAICHDGKAHFPREGVFVSNGTHWFVTQRNFYEPQIITTDNTFVSGNCDVVIGIVNNTVYDPLQPELDS

SEQ ID NO: 2873 - protein, 1147 aa, Artificial Sequence; identical to SEQ ID NO: 2828
  SARS-CoV-2/Iceland/247/2020__EPI_ISL_417575 spike protein (1-1147)(K986P_V987P_P1069F)

SEQ ID NO: 2874 - protein, 1147 aa, Artificial Sequence
  SARS-CoV-2/Iceland/238/2020__EPI_ISL_417566 spike protein (1-1147)(K986P_V987P_P1069F)
MFVFLVLLPLVSSQCVNLTTRTQLPPAYTNSFTRGVYYPDKVFRSSVLHSTQDLFLPFFSNVTWFHAIHVSGTNGTKRFDNPVLPFNDGVYFASTEKSNIIRGWIFGTTLDSKTQSLLIVNNATNVVIKVCEFQFCNDPFLGVYYHKNNKSWMESEFRVYSSANNCTFEYVSQPFLMDLEGKQGNFKNLREFVFKNIDGYFKIYSKHTPINLVRDLPQGFSALEPLVDLPIGINITRFQTLLALHRSYLTPGDSSSGWTAGAAAYYVGYLQPRTFLLKYNENGTITDAVDCALDPLSETKCTLKSFTVEKGIYQTSNFRVQPTESIVRFPNITNLCPFGEVFNATRFASVYAWNRKRISNCVADYSVLYNSASFSTFKCYGVSPTKLNDLCFTNVYADSFVIRGDEVRQIAPGQTGKIADYNYKLPDDFTGCVIAWNSNNLDSKVGGNYNYLYRLFRKSNLKPFERDISTEIYQAGSTPCNGVEGFNCYFPLQSYGFQPTNGVGYQPYRVVVLSFELLHAPATVCGPKKSTNLVKNKCVNFNFNGLTGTGVLTESNKKFLPFQQFGRDIADTTDAVRDPQTLEILDITPCSFGGVSVITPGTNTSNQVAVLYQGVNCTEVPVAIHADQLTPTWRVYSTGSNVFQTRAGCLIGAEHVNNSYECDIPIGAGICASYQTQTNSPRRARSVASQSIIAYTMSLGAENSVAYSNNSIAIPTNFTISVTTEILPVSMTKTSVDCTMYICGDSTECSNLLLQYGSFCTQLNRALTGIAVEQDKNTQEVFAQVKQIYKTPPIKDFGGFNFSQILPDPSKPSKRSFIEDLLFNKVTLADVGFIKQYGDCLGDIAARDLICAQKFNGLTVLPPLLTDEMIAQYTSALLAGTITSGWTFGAGAALQIPFAMQMAYRFNGIGVTQNVLYENQKLIANQFNSAIGKIQDSLSSTASALGKLQDVVNQNAQALNTLVKQLSSNFGAISSVLNDILSRLDPPEAEVQIDRLITGRLQSLQTYVTQQLIRAAEIRASANLAATKMSECVLGQSKRVDFCGKGYHLMSFPQSAPHGVVFLHVTYVFAQEKNFTTAPAICHDGKAHFPREGVFVSNGTHWFVTQRNFYEPQIITTDNTFVSGNCDVVIGIVNNTVYDPLQPELDS

SEQ ID NO: 2875 - protein, 1147 aa, Artificial Sequence
  SARS-CoV-2/Greece/16/2020__EPI_ISL_418265 spike protein (1-1147)(K986P_V987P_P1069F)
MFVFLVLLPLVSSQCVNLTTRTQLPPAYTNSFTRGVYYPDKVFRSSVLHSTQDLFLPFFSNVTWFHAIHVSGTNGTKRFDNPVLPFNDGVYFASTEKSNIIRGWIFGTTLDSKTQSLLIVNNATNVVIKVCEFQFCNDPFLGVYYHKNNKSWMESEFRVYSSANNCTFEYVSQPFLMDLEGKQGNFKNLREFVFKNVDGYFKIYSKHTPINLVRDLPQGFSALEPLVDLPIGINITRFQTLLALHRSYLTPGDSSSGWTAGAAAYYVGYLQPRTFLLKYNENGTITDAVDCALDPLSETKCTLKSFTVEKGIYQTSNFRVQPTESIVRFPNITNLCPFGEVFNATRFASVYAWNRKRISNCVADYSVLYNSASFSTFKCYGVSPTKLNDLCFTNVYADSFVIRGDEVRQIAPGQTGKIADYNYKLPDDFTGCVIAWNSNNLDSKVGGNYNYLYRLFRKSNLKPFERDISTEIYQAGSTPCNGVEGFNCYFPLQSYGFQPTNGVGYQPYRVVVLSFELLHAPATVCGPKKSTNLVKNKCVNFNFNGLTGTGVLTESNKKFLPFQQFGRDIADTTDAVRDPQTLEILDITPCSFGGVSVITPGTNTSNQVAVLYQDVNCTEVPVAIHADQLTPTWRVYSTGSNVFQTRAGCLIGAEHVNNSYECDIPIGAGICASYQTQTNSPRRARSVASQSIIAYTMSLGAENSVAYSNNSIAIPTNFTISVTTEILPVSMTKTSVDCTMYICGDSTECSNLLLQYGSFCTQLNRALTGIAVEQDKNTQEVFAQVKQIYKTPPIKDFGGFNFSQILPDPSKPSKRSFIEDLLFNKVTLADAGFIKQYGDCLGDIAARDLICAQKFNGLTVLPPLLTDEMIAQYTSALLAGTITSGWTFGAGAALQIPFAMQMAYRFNGIGVTQNVLYENQKLIANQFNSAIGKIQDSLSSTASALGKLQDVVNQNAQALNTLVKQLSSNFGAISSVLNDILSRLDPPEAEVQIDRLITGRLQSLQTYVTQQLIRAAEIRASANLAATKMSECVLGQSKRVDFCGKGYHLMSFPQSAPHGVVFLHVTYVFAQEKNFTTAPAICHDGKAHFPREGVFVSNGTHWFVTQRNFYEPQIITTDNTFVSGNCDVVIGIVNNTVYDPLQPELDS

SEQ ID NO: 2876 - protein, 1147 aa, Artificial Sequence
  SARS-CoV-2/Iceland/319/2020__EPI_ISL_417648 spike protein (1-1147)(K986P_V987P_P1069F)
MFVFLVLLPLVSSQCVNLTTRTQLPPAYTNSFTRGVYYPDKVFRSSVLHSTQDLFLPFFSNVTWFHAIHVSGTNGTKRFDNPVLPFNDGVYFASTEKSNIIRGWIFGTTLDSKTQSLLIVNNATNVVIKVCEFQFCNDPFLGVYYHKNNKSWMESEFRVYSSANNCTFEYVSQPFLIDLEGKQGNFKNLREFVFKNIDGYFKIYSKHTPINLVRDLPQGFSALEPLVDLPIGINITRFQTLLALHRSYLTPGDSSSGWTAGAAAYYVGYLQPRTFLLKYNENGTITDAVDCALDPLSETKCTLKSFTVEKGIYQTSNFRVQPTESIVRFPNITNLCPFGEVFNATRFASVYAWNRKRISNCVADYSVLYNSASFSTFKCYGVSPTKLNDLCFTNVYADSFVIRGDEVRQIAPGQTGKIADYNYKLPDDFTGCVIAWNSNNLDSKVGGNYNYLYRLFRKSNLKPFERDISTEIYQAGSTPCNGVEGFNCYFPLQSYGFQPTNGVGYQPYRVVVLSFELLHAPATVCGPKKSTNLVKNKCVNFNFNGLTGTGVLTESNKKFLPFQQFGRDIADTTDAVRDPQTLEILDITPCSFGGVSVITPGTNTSNQVAVLYQGVNCTEVPVAIHADQLTPTWRVYSTGSNVFQTRAGCLIGAEHVNNSYECDIPIGAGICASYQTQTNSPRRARSVASQSIIAYTMSLGAENSVAYSNNSIAIPTNFTISVTTEILPVSMTKTSVDCTMYICGDSTECSNLLLQYGSFCTQLNRALTGIAVEQDKNTQEVFAQVKQIYKTPPIKDFGGFNFSQILPDPSKPSKRSFIEDLLFNKVTLADAGFIKQYGDCLGDIAARDLICAQKFNGLTVLPPLLTDEMIAQYTSALLAGTITSGWTFGAGAALQIPFAMQMAYRFNGIGVTQNVLYENQKLIANQFNSAIGKIQDSLSSTASALGKLQDVVNQNAQALNTLVKQLSSNFGAISSVLNDILSRLDPPEAEVQIDRLITGRLQSLQTYVTQQLIRAAEIRASANLAATKMSECVLGQSKRVDFCGKGYHLMSFPQSAPHGVVFLHVTYVFAQEKNFTTAPAICHDGKAHFPREGVFVSNGTHWFVTQRNFYEPQIITTDNTFVSGNCDVVIGIVNNTVYDPLQPELDS

SEQ ID NO: 2877 - protein, 1147 aa, Artificial Sequence
  SARS-CoV-2/Congo/94/2020__EPI_ISL_417947 spike protein (1-1147)(K986P_V987P_P1069F)
MFVFLVLLPLVSSQCVNLTTRTQLPPAYTNSFTRGVYYPDKVFRSSVLHSTQDLFLPFFSNVTWFHAIHVSGTNGTKRFDNPVLPFNDGVYFASTEKSNIIRGWIFGTTLDSKTQSLLIVNNATNVVIKVCEFQFCNDPFLGVYYHKNNKSWMESEFRVYSSANNCTFEYVSQPFLMDLEGKQGNFKNLREFVFKNIDGYFKIYSKHTPINLVRDLPQGFSALEPLVDLPIGINITRFQTLLALHRSYLTPGDSSSGWTAGAAAYYVGYLQPRTFLLKYNENGTITDAVDCALDPLSETKCTLKSFTVEKGIYQTSNFRVQPTESIVRFPNITNLCPFGEVFNATRFASVYAWNRKRISNCVADYSVLYNSASFSTFKCYGVSPTKLNDLCFTNVYADSFVIRGDEVRQIAPGQTGKIADYNYKLPDDFTGCVIAWNSNNLDSKVGGNYNYLYRLFRKSNLKPFERDISTEIYQAGSTPCNGVEGFNCYFPLQSYGFQPTNGVGYQPYRVVVLSFELLHAPATVCGPKKSTNLVKNKCVNFNFNGLTGTGVLTESNKKFLPFQQFGRDIADTTDAVRDPQTLEILDITPCSFGGVSVITPGTNTSNQVAVLYQGVNCTEVPVAIHADQLTPTWRVYSTGSNVFQTRAGCLIGAEHVNNSYECDIPIGAGICASYQTQTNSPRRARSVASQSIIAYTMSLGAENSVAYSNNSIAIPTNFTISVTTEILPVSMTKTSVDCTMYICGDSTECSNLLLQYGSFCTQLNRALTGIAVEQDKNTQEVFAQVKQIYKTPPIKDFGGFNFSQILPDPSKPSKRSFIEDILFNKVTLADAGFIKQYGDCLGDIAARDLICAQKFNGLTVLPPLLTDEMIAQYTSALLAGTITSGWTFGAGAALQIPFAMQMAYRFNGIGVTQNVLYENQKLIANQFNSAIGKIQDSLSSTASALGKLQDVVNQNAQALNTLVKQLSSNFGAISSVLNDILSRLDPPEAEVQIDRLITGRLQSLQTYVTQQLIRAAEIRASANLAATKMSECVLGQSKRVDFCGKGYHLMSFPQSAPHGVVFLHVTYVFAQEKNFTTAPAICHDGKAHFPREGVFVSNGTHWFVTQRNFYEPQIITTDNTFVSGNCDVVIGIVNNTVYDPLQPELDS

SEQ ID NO: 2878 - protein, 1147 aa, Artificial Sequence
  SARS-CoV-2/Congo/158/2020__EPI_ISL_417950 spike protein (1-1147)(K986P_V987P_P1069F)
MFVFLVLLPLVSSQCVNLTTRTQLPPAYTNSFTRGVYYPDKVFRSSVLHSTQDLFLPFFSNVTWFHAIHVSGTNGTKRFDNPVLPFNDGVYFASTEKSNIIRGWIFGTTLDSKTQSLLIVNNATNVVIKVCEFQFCNDPFLGVYYHKNNKSWMESEFRVYSSANNCTFEYVSQPFLMDLEGKQGNFKNLREFVFKNIDGYFKIYSKHTPINLVRDLPQGFSALEPLVDLPIGINITRFQTLLALHRSYLTPGDSSSGWTAGAAAYYVGYLQPRTFLLKYNENGTITDAVDCALDPLSETKCTLKSFTVEKGIYQTSNFRVQPTESIVRFPNITNLCPFGEVFNATRFASVYAWNRKRISNCVADYSVLYNSASFSTFKCYGVSPTKLNDLCFTNVYADSFVIRGDEVRQIAPGQTGKIADYNYKLPDDFTGCVIAWNSNNLDSKVGGNYNYLYRLFRKSNLKPFERDISTEIYQAGSTPCNGVEGFNCYFPLQSYGFQPTNGVGYQPYRVVVLSFELLHAPATVCGPKKSTNLVKNKCVNFNFNGLTGTGVLTESNKKFLPFQQFGRDIADTTDAVRDPQTLEILDITPCSFGGVSVITPGTNTSNQVAVLYQDVNCTEVPVAIHADQLTPTWRVYSTGSNVFQTRAGCLIGAEHVNNSYECDIPIGAGICASYQTQTNSPRRARSVASQSIIAYTMSLGAENSVAYSNNSIAIPTNFTISVTTEILPVSMTKTSVDCTMYICGDSTECSNLLLQYGSFCTQLNRALTGIAVEQDKNTQEVFAQVKQIYKTPPIKDFGGFNFSQILPDPSKPSKRSFIEDLLFNKVTLADAGFIKQYGDCLGDIAARDLICAQKFNGLTVLPPLLTDEMIAQYTSALLAGTITSGWTFGAGAALQIPFAMQMAYRFNGIGVTQNVLYENQKLIANQFNSAIGKIQDSLSSTASALGKLQDVVNQNAQALNTLVKQLSSNFGAISSVLNDILSRLDPPEAEVQIDRLITGRLQSLQTYVTQQLIRAAEIRASANLAATKMSECVLGQSKRVDFCGKGYHLMSFPQSAPHGVVFLHVTYVFAQEKNFTTAPAICHDGKAHFPREGVFVSNGTHWFVTQRNFYEPQIITTDNTFLSGNCDVVIGIVNNTVYDPLQPELDS

SEQ ID NO: 2879 - protein, 1147 aa, Artificial Sequence
  SARS-CoV-2/USA/UT-00034/2020__EPI_ISL_417977 spike protein (1-1147)(K986P_V987P_P1069F)
MFVFLVLLPLVSSQCVNLTTRTQLPPAYTNSFTRGVYYPDKVFRSSVLHSTQDLFLPFFSNVTWFHAIHVSGTNGTKRFDNPVLPFNDGVYFASTEKSNIIRGWIFGTTLDSKTQSLLIVNNATNVVIKVCEFQFCNDPFLGVYYYKNNKSWMESEFRVYSSANNCTFEYVSQPFLMDLEGKQGNFKNLREFVFKNIDGYFKIYSKHTPINLVRDLPQGFSALEPLVDLPIGINITRFQTLLALHRSYLTPGDSSSGWTAGAAAYYVGYLQPRTFLLKYNENGTITDAVDCALDPLSETKCTLKSFTVEKGIYQTSNFRVQPTESIVRFPNITNLCPFGEVFNATRFASVYAWNRKRISNCVADYSVLYNSASFSTFKCYGVSPTKLNDLCFTNVYADSFVIRGDEVRQIAPGQTGKIADYNYKLPDDFTGCVIAWNSNNLDSKVGGNYNYLYRLFRKSNLKPFERDISTEIYQAGSTPCNGVEGFNCYFPLQSYGFQPTNGVGYQPYRVVVLSFELLHAPATVCGPKKSTNLVKNKCVNFNFNGLTGTGVLTESNKKFLPFQQFGRDIADTTDAVRDPQTLEILDITPCSFGGVSVITPGTNTSNQVAVLYQGVNCTEVPVAIHADQLTPTWRVYSTGSNVFQTRAGCLIGAEHVNNSYECDIPIGAGICASYQTQTNSPRRARSVASQSIIAYTMSLGAENSVAYSNNSIAIPTNFTISVTTEILPVSMTKTSVDCTMYICGDSTECSNLLLQYGSFCTQLNRALTGIAVEQDKNTQEVFAQVKQIYKTPPIKDFGGFNFSQILPDPSKPSKRSFIEDLLFNKVTLADAGFIKQYGDCLGDIAARDLICAQKFNGLTVLPPLLTDEMIAQYTSALLAGTITSGWTFGAGAALQIPFAMQMAYRFNGIGVTQNVLYENQKLIANQFNSAIGKIQDSLSSTASALGKLQDVVNQNAQALNTLVKQLSSNFGAISSVLNDILSRLDPPEAEVQIDRLITGRLQSLQTYVTQQLIRAAEIRASANLAATKMSECVLGQSKRVDFCGKGYHLMSFPQSAPHGVVFLHVTYVFAQEKNFTTAPAICHDGKAHFPREGVFVSNGTHWFVTQRNFYEPQIITTDNTFVSGNCDVVIGIVNNTVYDPLQPELDS

SEQ ID NO: 2880 - protein, 1147 aa, Artificial Sequence
  SARS-CoV-2/USA/UT-00033/2020__EPI_ISL_417976 spike protein (1-1147)(K986P_V987P_P1069F)
MFVFLVLLPLVSSQCVNLTTRTQLPPAYTNSFTRGVYYPDKVFRSSVLHSTQDLFLPFFSNVTWFHAIHVSGTNGTKRFDNPVLPFNDGVYFASTEKSNIIRGWIFGTTLDSKTQSLLIVNNATNVVIKVCEFQFCNDPFLGVYYHKNNKSWMESEFRVYSSANNCTFEYVSQPFLMDLEGKQGNFKNLREFVFKNIDGYFKIYSKHTPINLVRDLPQGFSALEPLVDLPIGINITRFQTLLALHRSYLTPGDSSSGLTAGAAAYYVGYLQPRTFLLKYNENGTITDAVDCALDPLSETKCTLKSFTVEKGIYQTSNFRVQPTESIVRFPNITNLCPFGEVFNATRFASVYAWNRKRISNCVADYSVLYNSASFSTFKCYGVSPTKLNDLCFTNVYADSFVIRGDEVRQIAPGQTGKIADYNYKLPDDFTGCVIAWNSNNLDSKVGGNYNYLYRLFRKSNLKPFERDISTEIYQAGSTPCNGVEGFNCYFPLQSYGFQPTNGVGYQPYRVVVLSFELLHAPATVCGPKKSTNLVKNKCVNFNFNGLTGTGVLTESNKKFLPFQQFGRDIADTTDAVRDPQTLEILDITPCSFGGVSVITPGTNTSNQVAVLYQGVNCTEVPVAIHADQLTPTWRVYSTGSNVFQTRAGCLIGAEHVNNSYECDIPIGAGICASYQTQTNSPRRARSVASQSIIAYTMSLGAENSVAYSNNSIAIPTNFTISVTTEILPVSMTKTSVDCTMYICGDSTECSNLLLQYGSFCTQLNRALTGIAVEQDKNTQEVFAQVKQIYKTPPIKDFGGFNFSQILPDPSKPSKRSFIEDLLFNKVTLADAGFIKQYGDCLGDIAARDLICAQKFNGLTVLPPLLTDEMIAQYTSALLAGTITSGWTFGAGAALQIPFAMQMAYRFNGIGVTQNVLYENQKLIANQFNSAIGKIQDSLSSTASALGKLQDVVNQNAQALNTLVKQLSSNFGAISSVLNDILSRLDPPEAEVQIDRLITGRLQSLQTYVTQQLIRAAEIRASANLAATKMSECVLGQSKRVDFCGKGYHLMSFPQSAPHGVVFLHVTYVFAQEKNFTTAPAICHDGKAHFPREGVFVSNGTHWFVTQRNFYEPQIITTDNTFVSGNCDVVIGIVNNTVYDPLQPELDS

SEQ ID NO: 2881 - protein, 1147 aa, Artificial Sequence
  SARS-CoV-2/USA/WI-13/2020__EPI_ISL_417516 spike protein (1-1147)(K986P_V987P_P1069F)
MFVFLVLLPLVSSQCVNLTTRTQLPPAYTNSFTRGVYYPDKVFRSSVLHSTQDLFLPFFSNVTWFHAIHVSGTNGTKRFDNPVLPFNDGVYFASTEKSNIIRGWIFGTTLDSKTQSLLIVNNATNVVIKVCEFQFCNDPFLGVYYHKNNKSWMESEFRVYSSANNCTFEYVSQPFLMDLEGKQGNFKNLREFVFKNIDGYFKIYSKHTPINLVRDLPQGFSALEPLVDLPIGINITRFQTLLALHRSYLTPGDSSSGWTAGAAAYYVGYLQPRTFLLKYNENGTITDAVDCALDPLSETKCTLKSFTVEKGIYQTSNFRVLPTESIVRFPNITNLCPFGEVFNATRFASVYAWNRKRISNCVADYSVLYNSASFSTFKCYGVSPTKLNDLCFTNVYADSFVIRGDEVRQIAPGQTGKIADYNYKLPDDFTGCVIAWNSNNLDSKVGGNYNYLYRLFRKSNLKPFERDISTEIYQAGSTPCNGVEGFNCYFPLQSYGFQPTNGVGYQPYRVVVLSFELLHAPATVCGPKKSTNLVKNKCVNFNFNGLTGTGVLTESNKKFLPFQQFGRDIADTTDAVRDPQTLEILDITPCSFGGVSVITPGTNTSNQVAVLYQGVNCTEVPVAIHADQLTPTWRVYSTGSNVFQTRAGCLIGAEHVNNSYECDIPIGAGICASYQTQTNSPRRARSVASQSIIAYTMSLGAENSVAYSNNSIAIPTNFTISVTTEILPVSMTKTSVDCTMYICGDSTECSNLLLQYGSFCTQLNRALTGIAVEQDKNTQEVFAQVKQIYKTPPIKDFGGFNFSQILPDPSKPSKRSFIEDLLFNKVTLADAGFIKQYGDCLGDIAARDLICAQKFNGLTVLPPLLTDEMIAQYTSALLAGTITSGWTFGAGAALQIPFAMQMAYRFNGIGVTQNVLYENQKLIANQFNSAIGKIQDSLSSTASALGKLQDVVNQNAQALNTLVKQLSSNFGAISSVLNDILSRLDPPEAEVQIDRLITGRLQSLQTYVTQQLIRAAEIRASANLAATKMSECVLGQSKRVDFCGKGYHLMSFPQSAPHGVVFLHVTYVFAQEKNFTTAPAICHDGKAHFPREGVFVSNGTHWFVTQRNFYEPQIITTDNTFVSGNCDVVIGIVNNTVYDPLQPELDS

SEQ ID NO: 2882 - protein, 1146 aa, Artificial Sequence
  SARS-CoV-2/India/1-27/2020__EPI_ISL_413522 spike protein (1-1146)(K985P_V986P_P1068F)
MFVFLVLLPLVSSQCVNLTTRTQLPPAYTNSFTRGVYYPDKVFRSSVLHSTQDLFLPFFSNVTWFHAIHVSGTNGTKRFDNPVLPFNDGVYFASTEKSNIIRGWIFGTTLDSKTQSLLIVNNATNVVIKVCEFQFCNDPFLGVYHKNNKSWMESEFRVYSSANNCTFEYVSQPFLMDLEGKQGNFKNLREFVFKNIDGYFKIYSKHTPINLVRDLPQGFSALEPLVDLPIGINITRFQTLLALHRSYLTPGDSSSGWTAGAAAYYVGYLQPRTFLLKYNENGTITDAVDCALDPLSETKCTLKSFTVEKGIYQTSNFRVQPTESIVRFPNITNLCPFGEVFNATRFASVYAWNRKRISNCVADYSVLYNSASFSTFKCYGVSPTKLNDLCFTNVYADSFVIRGDEVIQIAPGQTGKIADYNYKLPDDFTGCVIAWNSNNLDSKVGGNYNYLYRLFRKSNLKPFERDISTEIYQAGSTPCNGVEGFNCYFPLQSYGFQPTNGVGYQPYRVVVLSFELLHAPATVCGPKKSTNLVKNKCVNFNFNGLTGTGVLTESNKKFLPFQQFGRDIADTTDAVRDPQTLEILDITPCSFGGVSVITPGTNTSNQVAVLYQDVNCTEVPVAIHADQLTPTWRVYSTGSNVFQTRAGCLIGAEHVNNSYECDIPIGAGICASYQTQTNSPRRARSVASQSIIAYTMSLGAENSVAYSNNSIAIPTNFTISVTTEILPVSMTKTSVDCTMYICGDSTECSNLLLQYGSFCTQLNRALTGIAVEQDKNTQEVFAQVKQIYKTPPIKDFGGFNFSQILPDPSKPSKRSFIEDLLFNKVTLADAGFIKQYGDCLGDIAARDLICAQKFNGLTVLPPLLTDEMIAQYTSALLAGTITSGWTFGAGAALQIPFAMQMAYRFNGIGVTQNVLYENQKLIANQFNSAIGKIQDSLSSTASALGKLQDVVNQNAQALNTLVKQLSSNFGAISSVLNDILSRLDPPEAEVQIDRLITGRLQSLQTYVTQQLIRAAEIRASANLAATKMSECVLGQSKRVDFCGKGYHLMSFPQSAPHGVVFLHVTYVFAQEKNFTTAPAICHDGKAHFPREGVFVSNGTHWFVTQRNFYEPQIITTDNTFVSGNCDVVIGIVNNTVYDPLQPELDS

SEQ ID NO: 2883 - protein, 1141 aa, Artificial Sequence
  SARS-CoV-2/pangolin/Guangxi/P4L/2017__EPI_ISL_410538 spike protein (1-1141)(K980P_V981P_P1063F)
MFVFLFVLPLVSSQCVNLTTRTGIPPGYTNSSTRGVYYPDKVFRSSILHLTQDLFLPFFSNVTWFNTINYQGGFKKFDNPVLPFNDGVYFASTEKSNIIRGWIFGTTLDARTQSLLIVNNATNVVIKVCEFQFCTDPFLGVYYHNNNKTWVENEFRVYSSANNCTFEYISQPFLMDLEGKQGNFKNLREFVFKNVDGYFKIYSKHTPIDLVRDLPRGFAALEPLVDLPIGINITRFQTLLALHRSYLTPGNLESGWTTGAAAYYVGYLQQRTFLLSYNQNGTITDAVDCSLDPLSETKCTLKSLTVEKGIYQTSNFRVQPTISIVRFPNITNLCPFGEVFNASKFASVYAWNRKRISNCVADYSVLYNSTSFSTFKCYGVSPTKLNDLCFTNVYADSFVVKGDEVRQIAPGQTGVIADYNYKLPDDFTGCVIAWNSVKQDALTGGNYGYLYRLFRKSKLKPFERDISTEIYQAGSTPCNGQVGLNCYYPLERYGFHPTTGVNYQPFRVVVLSFELLNGPATVCGPKLSTTLVKDKCVNFNFNGLTGTGVLTTSKKQFLPFQQFGRDISDTTDAVRDPQTLEILDITPCSFGGVSVITPGTNTSNQVAVLYQDVNCTEVPMAIHAEQLTPAWRVYSAGANVFQTRAGCLVGAEHVNNSYECDIPVGAGICASYHSMSSLRSVNQRSIIAYTMSLGAENSVAYSNNSIAIPTNFTISVTTEILPVSMTKTSVDCTMYICGDSIECSNLLLQYGSFCTQLNRALTGIAVEQDKNTQEVFAQVKQIYKTPPIKDFGGFNFSQILPDPSKPSKRSFIEDLLFNKVTLADAGFIKQYGDCLGDIAARDLICAQKFNGLTVLPPLLTDEMIAQYTSALLAGTITSGWTFGAGAALQIPFAMQMAYRFNGIGVTQNVLYENQKLIANQFNSAIGKIQDSLSSTASALGKLQDVVNQNAQALNTLVKQLSSNFGAISSVLNDILSRLDPPEAEVQIDRLITGRLQSLQTYVTQQLIRAAEIRASANLAATKMSECVLGQSKRVDFCGKGYHLMSFPQSAPHGVVFLHVTYVFAQEKNFTTAPAICHEGKAHFPREGVFVSNGTHWFITQRNFYEPQIITTDNTFVSGSCDVVIGIVNNTVYDPLQPELDS

SEQ ID NO: 2884 - protein, 1141 aa, Artificial Sequence
  SARS-CoV-2/pangolin/Guangxi/P5L/2017__EPI_ISL_410540 spike protein (1-1141)(K980P_V981P_P1063F)
MFVFLFVLPLVSSQCVNLTTRTGIPPGYTNSSTRGVYYPDKVFRSSILHLTQDLFLPFFSNVTWFNTINYQGGFKKFDNPVLPFNDGVYFASTEKSNIIRGWIFGTTLDARTQSLLIVNNATNVVIKVCEFQFCTDPFLGVYYHNNNKTWVENEFRVYSSANNCTFEYISQPFLMDLEGKQGNFKNLREFVFKNVDGYFKIYSKHTPIDLVRDLPRGFAALEPLVDLPIGINITRFQTLLALHRSYLTPGKLESGWTTGAAAYYVGYLQQRTFLLSYNQNGTITDAVDCSLDPLSETKCTLKSLTVEKGIYQTSNFRVQPTISIVRFPNITNLCPFGEVFNASKFASVYAWNRKRISNCVADYSVLYNSTSFSTFKCYGVSPTKLNDLCFTNVYADSFVVKGDEVRQIAPGQTGVIADYNYKLPDDFTGCVIAWNSVKQDALTGGNYGYLYRLFRKSKLKPFERDISTEIYQAGSTPCNGQVGLNCYYPLERYGFHPTTGVNYQPFRVVVLSFELLNGPATVCGPKLSTTLVKDKCVNFNFNGLTGTGVLTTSKKQFLPFQQFGRDISDTTDAVRDPQTLEILDITPCSFGGVSVITPGTNTSNQVAVLYQDVNCTEVPMAIHAEQLTPAWRVYSAGANVFQTRAGCLVGAEHVNNSYECDIPVGAGICASYHSMSSFRSVNQRSIIAYTMSLGAENSVAYSNNSIAIPTNFTISVTTEILPVSMTKTSVDCTMYICGDSIECSNLLLQYGSFCTQLNRALTGIAVEQDKNTQEVFAQVKQIYKTPPIKDFGGFNFSQILPDPSKPSKRSFIEDLLFNKVTLADAGFIKQYGDCLGDIAARDLICAQKFNGLTVLPPLLTDEMIAQYTSALLAGTITSGWTFGAGAALQIPFAMQMAYRFNGIGVTQNVLYENQKLIANQFNSAIGKIQDSLSSTASALGKLQDVVNQNAQALNTLVKQLSSNFGAISSVLNDILSRLDPPEAEVQIDRLITGRLQSLQTYVTQQLIRAAEIRASANLAATKMSECVLGQSKRVDFCGKGYHLMSFPQSAPHGVVFLHVTYVFAQEKNFTTAPAICHEGKAHFPREGVFVSNGTHWFITQRNFYEPQIITTDNTFVSGSCDVVIGIVNNTVYDPLQPELDS

SEQ ID NO: 2885 - protein, 1141 aa, Artificial Sequence
  SARS-CoV-2/pangolin/Guangxi/P5E/2017__EPI_ISL_410541 spike protein (1-1141)(K980P_V981P_P1063F)
MFVFLFVLPLVSSQCVNLTTRTGIPPGYTNSSTRGVYYPDKVFRSSILHLTQDLFLPFFSNVTWFNTITYQGGSKKFDNPVLPFNDGVYFASTEKSNIIRGWIFGTTLDARTQSLLIVNNATNVVIKVCEFQFCTDPFLGVYYHNNNKTWVENEFRVYSSANNCTFEYISQPFLMDLEGKQGNFKNLREFVFKNVDGYFKIYSKHTPIDLVRDLPRGFAALEPLVDLPIGINITRFQTLLALHRSYLTPGKLESGWTTGAAAYYVGYLQQRTFLLSYNQNGTITDAVDCSLDPLSETKCTLKSLTVEKGIYQTSNFRVQPTISIVRFPNITNLCPFGEVFNASKFASVYAWNRKRISNCVADYSVLYNSTSFSTFKCYGVSPTKLNDLCFTNVYADSFVVKGDEVRQIAPGQTGVIADYNYKLPDDFTGCVIAWNSVKQDALTGDNYGYLYRLFRKSKLKPFERDISTEIYQAGSTPCNGQVGLNCYYPLERYGFHPTTGVNYQPFRVVVLSFELLNGPATVCGPKLSTTLVKDKCVNFNFNGLTGTGVLTTSKKQFLPFQQFGRDISDTTDAVRDPQTLEILDITPCSFGGVSVITPGTNTSNQVAVLYQDVNCTEVPMAIHAEQLTPAWRVYSAGANVFQTRAGCLVGAEHVNNSYECDIPVGAGICASYHSMSSFRSVNQRSIIAYTMSLGAENSVAYSNNSIAIPTNFTISVTTEILPVSMTKTSVDCTMYICGDSIECSNLLLQYGSFCTQLNRALTGIAVEQDKNTQEVFAQVKQIYKTPPIKDFGGFNFSQILPDPSKPSKRSFIEDLLFNKVTLADAGFIKQYGDCLGDIAARDLICAQKFNGLTVLPPLLTDEMIAQYTSALLAGTITSGWTFGAGAALQIPFAMQMAYRFNGIGVTQNVLYENQKLIANQFNSAIGKIQDSLSSTASALGKLQDVVNQNAQALNTLVKQLSSNFGAISSVLNDILSRLDPPEAEVQIDRLITGRLQSLQTYVTQQLIRAAEIRASANLAATKMSECVLGQSKRVDFCGKGYHLMSFPQSAPHGVVFLHVTYVFAQEKNFTTAPAICHEGKAHFPREGVFVSNGTHWFITQRNFYEPQIITTDNTFVSGSCDVVIGIVNNTVYDPLQPELDS

SEQ ID NO: 2886 - protein, 1139 aa, Artificial Sequence
  SARS-CoV-2/pangolin/Guangxi/P1E/2017__EPI_ISL_410539 spike protein (1-1139)(K978P_V979P_P1061F)
MFVFLFVLPLVSSQCVNLTTRTGIQPGYTNSSTRGVYYPDKVFRSSILHLTQDLFLPFFSNVTWFNTINYQGGFKKFDNPVLPFNDGVYFASTEKSNIIRGWIFGTTLDARTQSLLIVNNATNVVIKVCEFQFCTDPFLGVYYHNNNKTWVENEFRVYSSANNCTFEYISQPFLMDLEGKQGNFKNLREFVFKNVDGYFKIYSKHTPIDLVRDLPRGFAALEPLVDLPIGINITRFQTLLALHRSYLTPGKLESGWTTGAAAYYVGYLQQRTFLLSYNQNGTITDAVDCSLDPLSETKCTLKSLTVEKGIYQTSNFRVQPTISIVRFPNITNLCPFGEVFNASKFASVYAWNRKRISNCVADYSVLYNSTSFSTFKCYGVSPTKLNDLCFTNVYADSFVVKGDEVRQIAPGQTGVIADYNYKLPDDFTGCVIAWNSVKQDALTGGNYLYRLFRKSKLKPFERDISTEIYQAGSTPCNGQVGLNCYYPLERYGFHPTTGVNYQPFRVVVLSFELLNGPATVCGPKLSTTLVKDKCVNFNFNGLTGTGVLTTSKKQFLPFQQFGRDISDTTDAVRDPQTLEILDITPCSFGGVSVITPGTNTSNQVAVLYQDVNCTEVPMAIHAEQLTPAWRVYSAGANVFQTRAGCLVGAEHVNNSYECDIPVGAGICASYHSMSSLRSVNQRSIIAYTMSLGAENSVAYSNNSIAIPTNFTISVTTEILPVSMTKTSVDCTMYICGDSIECSNLLLQYGSFCTQLNRALTGIAVEQDKNTQEVFAQVKQIYKTPPIKDFGGFNFSQILPDPSKPSKRSFIEDLLFNKVTLADAGFIKQYGDCLGDIAARDLICAQKFNGLTVLPPLLTDEMIAQYTSALLAGTITSGWTFGAGAALQIPFAMQMAYRFNGIGVTQNVLYENQKLIANQFNSAIGKIQDSLSSTASALGKLQDVVNQNAQALNTLVKQLSSNFGAISSVLNDILSRLDPPEAEVQIDRLITGRLQSLQTYVTQQLIRAAEIRASANLAATKMSECVLGQSKRVDFCGKGYHLMSFPQSAPHGVVFLHVTYVFAQEKNFTTAPAICHEGKAHFPREGVFVSNGTHWFITQRNFYEPQIITTDNTFVSGSCDVVIGIVNNTVYDPLQPELDS

SEQ ID NO: 2887 - protein, 1147 aa, Artificial Sequence
  SARS-CoV-2/Wuhan/WIV05/2019__EPI_ISL_402128 spike protein (1-1147)(K986P_V987P_ H1048Q_H1064N_ H1083N_H1101N)
MFVFLVLLPLVSSQCVNLTTRTQLPPAYTNSFTRGVYYPDKVFRSSVLHSTQDLFLPFFSNVTWFHAIHVSGTNGTKRFDNPVLPFNDGVYFASTEKSNIIRGWIFGTTLDSKTQSLLIVNNATNVVIKVCEFQFCNDPFLGVYYHKNNKSWMESEFRVYSSANNCTFEYVSQPFLMDLEGKQGNFKNLREFVFKNIDGYFKIYSKHTPINLVRDLPQGFSALEPLVDLPIGINITRFQTLLALHRSYLTPGDSSSGWTAGAAAYYVGYLQPRTFLLKYNENGTITDAVDCALDPLSETKCTLKSFTVEKGIYQTSNFRVQPTESIVRFPNITNLCPFGEVFNATRFASVYAWNRKRISNCVADYSVLYNSASFSTFKCYGVSPTKLNDLCFTNVYADSFVIRGDEVRQIAPGQTGKIADYNYKLPDDFTGCVIAWNSNNLDSKVGGNYNYLYRLFRKSNLKPFERDISTEIYQAGSTPCNGVEGFNCYFPLQSYGFQPTNGVGYQPYRVVVLSFELLHAPATVCGPKKSTNLVKNKCVNFNFNGLTGTGVLTESNKKFLPFQQFGRDIADTTDAVRDPQTLEILDITPCSFGGVSVITPGTNTSNQVAVLYQDVNCTEVPVAIHADQLTPTWRVYSTGSNVFQTRAGCLIGAEHVNNSYECDIPIGAGICASYQTQTNSPRRARSVASQSIIAYTMSLGAENSVAYSNNSIAIPTNFTISVTTEILPVSMTKTSVDCTMYICGDSTECSNLLLQYGSFCTQLNRALTGIAVEQDKNTQEVFAQVKQIYKTPPIKDFGGFNFSQILPDPSKPSKRSFIEDLLFNKVTLADAGFIKQYGDCLGDIAARDLICAQKFNGLTVLPPLLTDEMIAQYTSALLAGTITSGWTFGAGAALQIPFAMQMAYRFNGIGVTQNVLYENQKLIANQFNSAIGKIQDSLSSTASALGKLQDVVNQNAQALNTLVKQLSSNFGAISSVLNDILSRLDPPEAEVQIDRLITGRLQSLQTYVTQQLIRAAEIRASANLAATKMSECVLGQSKRVDFCGKGYQLMSFPQSAPHGVVFLNVTYVPAQEKNFTTAPAICNDGKAHFPREGVFVSNGTNWFVTQRNFYEPQIITTDNTFVSGNCDVVIGIVNNTVYDPLQPELDS

SEQ ID NO: 2888 - protein, 1143 aa, Artificial Sequence
  SARS-CoV-2/bat/Yunnan/RaTG13/2013__EPI_ISL_402131 spike protein (1-1143)(K982P_V983P_ H1044Q_H1060N_ H1079N_H1097N)
MFVFLVLLPLVSSQCVNLTTRTQLPPAYTNSSTRGVYYPDKVFRSSVLHLTQDLFLPFFSNVTWFHAIHVSGTNGIKRFDNPVLPFNDGVYFASTEKSNIIRGWIFGTTLDSKTQSLLIVNNATNVVIKVCEFQFCNDPFLGVYYHKNNKSWMESEFRVYSSANNCTFEYVSQPFLMDLEGKQGNFKNLREFVFKNIDGYFKIYSKHTPINLVRDLPPGFSALEPLVDLPIGINITRFQTLLALHRSYLTPGDSSSGWTAGAAAYYVGYLQPRTFLLKYNENGTITDAVDCALDPLSETKCTLKSFTVEKGIYQTSNFRVQPTDSIVRFPNITNLCPFGEVFNATTFASVYAWNRKRISNCVADYSVLYNSTSFSTFKCYGVSPTKLNDLCFTNVYADSFVITGDEVRQIAPGQTGKIADYNYKLPDDFTGCVIAWNSKHIDAKEGGNFNYLYRLFRKANLKPFERDISTEIYQAGSKPCNGQTGLNCYYPLYRYGFYPTDGVGHQPYRVVVLSFELLNAPATVCGPKKSTNLVKNKCVNFNFNGLTGTGVLTESNKKFLPFQQFGRDIADTTDAVRDPQTLEILDITPCSFGGVSVITPGTNASNQVAVLYQDVNCTEVPVAIHADQLTPTWRVYSTGSNVFQTRAGCLIGAEHVNNSYECDIPIGAGICASYQTQTNSRSVASQSIIAYTMSLGAENSVAYSNNSIAIPTNFTISVTTEILPVSMTKTSVDCTMYICGDSTECSNLLLQYGSFCTQLNRALTGIAVEQDKNTQEVFAQVKQIYKTPPIKDFGGFNFSQILPDPSKPSKRSFIEDLLFNKVTLADAGFIKQYGDCLGDIAARDLICAQKFNGLTVLPPLLTDEMIAQYTSALLAGTITSGWTFGAGAALQIPFAMQMAYRFNGIGVTQNVLYENQKLIANQFNSAIGKIQDSLSSTASALGKLQDVVNQNAQALNTLVKQLSSNFGAISSVLNDILSRLDPPEAEVQIDRLITGRLQSLQTYVTQQLIRAAEIRASANLAATKMSECVLGQSKRVDFCGKGYQLMSFPQSAPHGVVFLNVTYVPAQEKNFTTAPAICNDGKAHFPREGVFVSNGTNWFVTQRNFYEPQIITTDNTFVSGSCDVVIGIVNNTVYDPLQPELDS

SEQ ID NO: 2889 - protein, 1147 aa, Artificial Sequence
  SARS-CoV-2/Wuhan/HBCDC-HB-01/2019__EPI_ISL_402132 spike protein (1-1147)(K986P_V987P_ H1048Q_H1064N_ H1083N_H1101N)
MFVFLVLLPLVSSQCVNLTTRTQLPPAYTNSITRGVYYPDKVFRSSVLHSTQDLFLPFFSNVTWFHAIHVSGTNGTKRFDNPVLPFNDGVYFASTEKSNIIRGWIFGTTLDSKTQSLLIVNNATNVVIKVCEFQFCNDPFLGVYYHKNNKSWMESEFRVYSSANNCTFEYVSQPFLMDLEGKQGNFKNLREFVFKNIDGYFKIYSKHTPINLVRDLPQGFSALEPLVDLPIGINITRFQTLLALHRSYLTPGDSSSGWTAGAAAYYVGYLQPRTFLLKYNENGTITDAVDCALDPLSETKCTLKSFTVEKGIYQTSNFRVQPTESIVRFPNITNLCPFGEVFNATRFASVYAWNRKRISNCVADYSVLYNSASFSTFKCYGVSPTKLNDLCFTNVYADSFVIRGDEVRQIAPGQTGKIADYNYKLPDDFTGCVIAWNSNNLDSKVGGNYNYLYRLFRKSNLKPFERDISTEIYQAGSTPCNGVEGFNCYFPLQSYGFQPTNGVGYQPYRVVVLSFELLHAPATVCGPKKSTNLVKNKCVNFNFNGLTGTGVLTESNKKFLPFQQFGRDIADTTDAVRDPQTLEILDITPCSFGGVSVITPGTNTSNQVAVLYQDVNCTEVPVAIHADQLTPTWRVYSTGSNVFQTRAGCLIGAEHVNNSYECDIPIGAGICASYQTQTNSPRRARSVASQSIIAYTMSLGAENSVAYSNNSIAIPTNFTISVTTEILPVSMTKTSVDCTMYICGDSTECSNLLLQYGSFCTQLNRALTGIAVEQDKNTQEVFAQVKQIYKTPPIKDFGGFNFSQILPDPSKPSKRSFIEDLLFNKVTLADAGFIKQYGDCLGDIAARDLICAQKFNGLTVLPPLLTDEMIAQYTSALLAGTITSGWTFGAGAALQIPFAMQMAYRFNGIGVTQNVLYENQKLIANQFNSAIGKIQDSLSSTASALGKLQDVVNQNAQALNTLVKQLSSNFGAISSVLNDILSRLDPPEAEVQIDRLITGRLQSLQTYVTQQLIRAAEIRASANLAATKMSECVLGQSKRVDFCGKGYQLMSFPQSAPHGVVFLNVTYVPAQEKNFTTAPAICNDGKAHFPREGVFVSNGTNWFVTQRNFYEPQIITTDNTFVSGNCDVVIGIVNNTVYDPLQPELDS

SEQ ID NO: 2890 - protein, 1147 aa, Artificial Sequence
  SARS-CoV-2/Guangdong/20SF028/2020__EPI_ISL_403936 spike protein (1-1147)(K986P_V987P_ H1048Q_H1064N_ H1083N_H1101N)
MFVFLVLLPLVSSQCVNLTTRTQLPPAYTNSFTRGVYYPDKVFRSSVLYSTQDLFLPFFSNVTWFHAIHVSGTNGTKRFDNPVLPFNDGVYFASTEKSNIIRGWIFGTTLDSKTQSLLIVNNATNVVIKVCEFQFCNDPFLGVYYHKNNKSWMESEFRVYSSANNCTFEYVSQPFLMDLEGKQGNFKNLREFVFKNIDGYFKIYSKHTPINLVRDLPQGFSALEPLVDLPIGINITRFQTLLALHRSYLTPGDSSSGWTAGAAAYYVGYLQPRTFLLKYNENGTITDAVDCALDPLSETKCTLKSFTVEKGIYQTSNFRVQPTESIVRFPNITNLCPFGEVFNATRFASVYAWNRKRISNCVADYSVLYNSASFSTFKCYGVSPTKLNDLCFTNVYADSFVIRGDEVRQIAPGQTGKIADYNYKLPDDFTGCVIAWNSNNLDSKVGGNYNYLYRLFRKSNLKPFERDISTEIYQAGSTPCNGVEGFNCYFPLQSYGFQPTNGVGYQPYRVVVLSFELLHAPATVCGPKKSTNLVKNKCVNFNFNGLTGTGVLTESNKKFLPFQQFGRDIADTTDAVRDPQTLEILDITPCSFGGVSVITPGTNTSNQVAVLYQDVNCTEVPVAIHADQLTPTWRVYSTGSNVFQTRAGCLIGAEHVNNSYECDIPIGAGICASYQTQTNSPRRARSVASQSIIAYTMSLGAENSVAYSNNSIAIPTNFTISVTTEILPVSMTKTSVDCTMYICGDSTECSNLLLQYGSFCTQLNRALTGIAVEQDKNTQEVFAQVKQIYKTPPIKDFGGFNFSQILPDPSKPSKRSFIEDLLFNKVTLADAGFIKQYGDCLGDIAARDLICAQKFNGLTVLPPLLTDEMIAQYTSALLAGTITSGWTFGAGAALQIPFAMQMAYRFNGIGVTQNVLYENQKLIANQFNSAIGKIQDSLSSTASALGKLQDVVNQNAQALNTLVKQLSSNFGAISSVLNDILSRLDPPEAEVQIDRLITGRLQSLQTYVTQQLIRAAEIRASANLAATKMSECVLGQSKRVDFCGKGYQLMSFPQSAPHGVVFLNVTYVPAQEKNFTTAPAICNDGKAHFPREGVFVSNGTNWFVTQRNFYEPQIITTDNTFVSGNCDVVIGIVNNTVYDPLQPELDS

SEQ ID NO: 2891 - protein, 1147 aa, Artificial Sequence
  SARS-CoV-2/Shenzhen/SZTH-001/2020__EPI_ISL_406592 spike protein (1-1147)(K986P_V987P_ H1048Q_H1064N_ H1083N_H1101N)
MFVFLVLLPLVSSQCVNLTTRTQLPPAYTNSFTRGVYYPDKVFRSSVLHSTQDLFLPFFSNVTWFHAIHVSGTNGTKRFDNPVLPFNDGVYFASTEKSNIIRGWIFGTTLDSKTQSLLIVNNATNVVIKVCEFQFCNDPFLGVYYHKNNKSWMESEFRVYSSANNCTFEYVSQPFLMDLEGKQGNFKNLREFVFKNIDGYFKIYSKHTPINLVRDLPQGFSALEPLVDLPIGINITRFQTLLALHRSYLTPGDSSSGWTAGAAAYYVGYLQPRTFLLKYNENGTITDAVDCALDPLSETKCTLKSFTVEKGIYQTSNFRVQPTESIVRFPNITNLCPFGEVFNATRFASVYAWNRKRISNCVADYSVLYNSASFSTFKCYGVSPTKLNDLCFTNVYADSFVIRGDEVRQIAPGQTGKIADYNYKLPDDFTGCVIAWNSNNLDSKVGGNYNYLYRLFRKSNLKPFERDISTEIYQAGSTPCNGVEGFNCYFPLQSYGFQPTNGVGYQPYRVVVLSFELLHAPATVCGPKKSTNLVKNKCVNFNFNGLTGTGVLTESNKKFLPFQQFGRDIADTTDAVRDPQTLEILDITPCSFGGVSVITPGTNTSNQVAVLYQDVNCTEVPVAIHADQLTPTWRVYSTGSNVFQTRAGCLIGAEHVNNSYECDIPIGAGICASYQTQTNSPRRARSVASQSIIAYTMSLGAENSVAYSNNSIAIPTNFTISVTTEILPVSMTKTSVDCTMYICGDSTECSNLLLQYGSFCTQLNRALTGIAVEQDKNTQEVFAQVKQIYKTPPIKDFGGFNFSQILPDPSKPSKRSFIEDLLFNKVTLADAGFIKQYGDCLGDIAARDLICAQKFNGLTVLPPLLTDEMIAQYTSALLAGTITSGWTFGAGAALQIPFAMQMAYRFNGIGVTQNVLYENQKLIANQFNSAIGKIQDSLSSTASALGKLQDVVNQNAQALNTLVKQLSSNFGAISSVLNDILSRLDPPEAEVQIDRLITGRLQSLQTYVTQQLIRAAEIRASANLAATKMSECVLGQSKRVDFCGKGYQLMSFPQSAPHGVVFLNVTYVPAQEKNFTTAPAICNDGKAHFPREGVFVSNGTNWFVTQRNFYEPQIITTDNTFVSGNCDVLIGIVNNTVYDPLQPELDS

SEQ ID NO: 2892 - protein, 1147 aa, Artificial Sequence
  SARS-CoV-2/Shenzhen/SZTH-004/2020__EPI_ISL_406595 spike protein (1-1147)(K986P_V987P_ H1048Q_H1064N_ H1083N_H1101N)
MFVFLVLLPLVSSQCVNLTTRTQLPPAYTNSFTRGVYYPDKVFRSSVLHSTQDLFLPFFSNVTWFHAIHVSGTNGTKRFDNPVLPFNDGVYFASTEKSNIIRGWIFGTTLDSKTQSLLIVNNATNVVIKVCEFQFCNDPFLGVYYHKNNKSWMESEFRVYSSANNCTFEYVSQPFLMDLEGKQGNFKNLREFVFKNIDGYFKIYSKHTPINLVRDLPQGFSALEPLVDLPIGINITRFQTLLALHRSYLTPGDSSSGWTAGAAAYYVGYLQPRTFLLKYNENGTITDAVDCALDPLSETKCTLKSFTVEKGIYQTSNFRVQPTESIVRFPNITNLCPFGEVFNATRFASVYAWDRKRISNCVAYYSVLYNSASFSTFKCYGVSPTKLNDLCFTNVYADSFVIRGDEVRQIAPGQTGKIADYNYKLPDDFTGCVIAWNSNNLDSKVGGNYNYLYRLFRKSNLKPFERDISTEIYQAGSTPCNGVEGFNCYFPLQSYGFQPTNGVGYQPYRVVVLSFELLHAPATVCGPKKSTNLVKNKCVNFNFNGLTGTGVLTESNKKFLPFQQFGRDIADTTDAVRDPQTLEILDITPCSFGGVSVITPGTNTSNQVAVLYQDVNCTEVPVAIHADQLTPTWRVYSTGSNVFQTRAGCLIGAEHVNNSYECDIPIGAGICASYQTQTNSPRRARSVASQSIIAYTMSLGAENSVAYSNNSIAIPTNFTISVTTEILPVSMTKTSVDCTMYICGDSTECSNLLLQYGSFCTQLNRALTGIAVEQDKNTQEVFAQVKQIYKTPPIKDFGGFNFSQILPDPSKPSKRSFIEDLLFNKVTLADAGFIKQYGDCLGDIAARDLICAQKFNGLTVLPPLLTDEMIAQYTSALLAGTITSGWTFGAGAALQIPFAMQMAYRFNGIGVTQNVLYENQKLIANQFNSAIGKIQDSLSSTASALGKLQDVVNQNAQALNTLVKQLSSNFGAISSVLNDILSRLDPPEAEVQIDRLITGRLQSLQTYVTQQLIRAAEIRASANLAATKMSECVLGQSKRVDFCGKGYQLMSFPQSAPHGVVFLNVTYVPAQEKNFTTAPAICNDGKAHFPREGVFVSNGTNWFVTQRNFYEPQIITTDNTFVSGNCDVVIGIVNNTVYDPLQPELDS

SEQ ID NO: 2893 - protein, 1147 aa, Artificial Sequence
  SARS-CoV-2/France/IDF0372/2020__EPI_ISL_406596 spike protein (1-1147)(K986P_V987P_ H1048Q_H1064N_ H1083N_H1101N)
MFVFLVLLPLVSSQCVNLTTRTQLPPAYTNSFTRGVYYPDKVFRSSVLHSTQDLFLPFFSNVTWFHAIHVSGTNGTKRFDNPVLPFNDGVYFASTEKSNIIRGWIFGTTLDSKTQSLLIVNNATNVVIKVCEFQFCNDPFLGVYYHKNNKSWMESEFRVYSSANNCTFEYVSQPFLMDLEGKQGNFKNLREFVFKNIDGYFKIYSKHTPINLVRDLPQGFSALEPLVDLPIGINITRFQTLLALHRSYLTPGDSSSGWTAGAAAYYVGYLQPRTFLLKYNENGTITDAVDCALDPLSETKCTLKSFTVEKGIYQTSNFRVQPTESIVRFPNITNLCPFGEVFNATRFASVYAWNRKRISNCVADYSFLYNSASFSTFKCYGVSPTKLNDLCFTNVYADSFVIRGDEVRQIAPGQTGKIADYNYKLPDDFTGCVIAWNSNNLDSKVGGNYNYLYRLFRKSNLKPFERDISTEIYQAGSTPCNGVEGFNCYFPLQSYGFQPTNGVGYQPYRVVVLSFELLHAPATVCGPKKSTNLVKNKCVNFNFNGLTGTGVLTESNKKFLPFQQFGRDIADTTDAVRDPQTLEILDITPCSFGGVSVITPGTNTSNQVAVLYQDVNCTEVPVAIHADQLTPTWRVYSTGSNVFQTRAGCLIGAEHVNNSYECDIPIGAGICASYQTQTNSPRRARSVASQSIIAYTMSLGAENSVAYSNNSIAIPTNFTISVTTEILPVSMTKTSVDCTMYICGDSTECSNLLLQYGSFCTQLNRALTGIAVEQDKNTQEVFAQVKQIYKTPPIKDFGGFNFSQILPDPSKPSKRSFIEDLLFNKVTLADAGFIKQYGDCLGDIAARDLICAQKFNGLTVLPPLLTDEMIAQYTSALLAGTITSGWTFGAGAALQIPFAMQMAYRFNGIGVTQNVLYENQKLIANQFNSAIGKIQDSLSSTASALGKLQDVVNQNAQALNTLVKQLSSNFGAISSVLNDILSRLDPPEAEVQIDRLITGRLQSLQTYVTQQLIRAAEIRASANLAATKMSECVLGQSKRVDFCGKGYQLMSFPQSAPHGVVFLNVTYVPAQEKNFTTAPAICNDGKAHFPREGVFVSNGTNWFVTQRNFYEPQIITTDNTFVSGNCDVVIGIVNNTVYDPLQPELDS

SEQ ID NO: 2894 - protein, 1147 aa, Artificial Sequence
  SARS-CoV-2/Australia/VIC01/2020__EPI_ISL_406844 spike protein (1-1147)(K986P_V987P_ H1048Q_H1064N_ H1083N_H1101N)
MFVFLVLLPLVSSQCVNLTTRTQLPPAYTNSFTRGVYYPDKVFRSSVLHSTQDLFLPFFSNVTWFHAIHVSGTNGTKRFDNPVLPFNDGVYFASTEKSNIIRGWIFGTTLDSKTQSLLIVNNATNVVIKVCEFQFCNDPFLGVYYHKNNKSWMESEFRVYSSANNCTFEYVSQPFLMDLEGKQGNFKNLREFVFKNIDGYFKIYSKHTPINLVRDLPQGFSALEPLVDLPIGINITRFQTLLALHRRYLTPGDSSSGWTAGAAAYYVGYLQPRTFLLKYNENGTITDAVDCALDPLSETKCTLKSFTVEKGIYQTSNFRVQPTESIVRFPNITNLCPFGEVFNATRFASVYAWNRKRISNCVADYSVLYNSASFSTFKCYGVSPTKLNDLCFTNVYADSFVIRGDEVRQIAPGQTGKIADYNYKLPDDFTGCVIAWNSNNLDSKVGGNYNYLYRLFRKSNLKPFERDISTEIYQAGSTPCNGVEGFNCYFPLQSYGFQPTNGVGYQPYRVVVLSFELLHAPATVCGPKKSTNLVKNKCVNFNFNGLTGTGVLTESNKKFLPFQQFGRDIADTTDAVRDPQTLEILDITPCSFGGVSVITPGTNTSNQVAVLYQDVNCTEVPVAIHADQLTPTWRVYSTGSNVFQTRAGCLIGAEHVNNSYECDIPIGAGICASYQTQTNSPRRARSVASQSIIAYTMSLGAENSVAYSNNSIAIPTNFTISVTTEILPVSMTKTSVDCTMYICGDSTECSNLLLQYGSFCTQLNRALTGIAVEQDKNTQEVFAQVKQIYKTPPIKDFGGFNFSQILPDPSKPSKRSFIEDLLFNKVTLADAGFIKQYGDCLGDIAARDLICAQKFNGLTVLPPLLTDEMIAQYTSALLAGTITSGWTFGAGAALQIPFAMQMAYRFNGIGVTQNVLYENQKLIANQFNSAIGKIQDSLSSTASALGKLQDVVNQNAQALNTLVKQLSSNFGAISSVLNDILSRLDPPEAEVQIDRLITGRLQSLQTYVTQQLIRAAEIRASANLAATKMSECVLGQSKRVDFCGKGYQLMSFPQSAPHGVVFLNVTYVPAQEKNFTTAPAICNDGKAHFPREGVFVSNGTNWFVTQRNFYEPQIITTDNTFVSGNCDVVIGIVNNTVYDPLQPELDS

SEQ ID NO: 2895 - protein, 1147 aa, Artificial Sequence
  SARS-CoV-2/Germany/BavPat1/2020__EPI_ISL_406862 spike protein (1-1147)(K986P_V987P_ H1048Q_H1064N_ H1083N_H1101N)
MFVFLVLLPLVSSQCVNLTTRTQLPPAYTNSFTRGVYYPDKVFRSSVLHSTQDLFLPFFSNVTWFHAIHVSGTNGTKRFDNPVLPFNDGVYFASTEKSNIIRGWIFGTTLDSKTQSLLIVNNATNVVIKVCEFQFCNDPFLGVYYHKNNKSWMESEFRVYSSANNCTFEYVSQPFLMDLEGKQGNFKNLREFVFKNIDGYFKIYSKHTPINLVRDLPQGFSALEPLVDLPIGINITRFQTLLALHRSYLTPGDSSSGWTAGAAAYYVGYLQPRTFLLKYNENGTITDAVDCALDPLSETKCTLKSFTVEKGIYQTSNFRVQPTESIVRFPNITNLCPFGEVFNATRFASVYAWNRKRISNCVADYSVLYNSASFSTFKCYGVSPTKLNDLCFTNVYADSFVIRGDEVRQIAPGQTGKIADYNYKLPDDFTGCVIAWNSNNLDSKVGGNYNYLYRLFRKSNLKPFERDISTEIYQAGSTPCNGVEGFNCYFPLQSYGFQPTNGVGYQPYRVVVLSFELLHAPATVCGPKKSTNLVKNKCVNFNFNGLTGTGVLTESNKKFLPFQQFGRDIADTTDAVRDPQTLEILDITPCSFGGVSVITPGTNTSNQVAVLYQGVNCTEVPVAIHADQLTPTWRVYSTGSNVFQTRAGCLIGAEHVNNSYECDIPIGAGICASYQTQTNSPRRARSVASQSIIAYTMSLGAENSVAYSNNSIAIPTNFTISVTTEILPVSMTKTSVDCTMYICGDSTECSNLLLQYGSFCTQLNRALTGIAVEQDKNTQEVFAQVKQIYKTPPIKDFGGFNFSQILPDPSKPSKRSFIEDLLFNKVTLADAGFIKQYGDCLGDIAARDLICAQKFNGLTVLPPLLTDEMIAQYTSALLAGTITSGWTFGAGAALQIPFAMQMAYRFNGIGVTQNVLYENQKLIANQFNSAIGKIQDSLSSTASALGKLQDVVNQNAQALNTLVKQLSSNFGAISSVLNDILSRLDPPEAEVQIDRLITGRLQSLQTYVTQQLIRAAEIRASANLAATKMSECVLGQSKRVDFCGKGYQLMSFPQSAPHGVVFLNVTYVPAQEKNFTTAPAICNDGKAHFPREGVFVSNGTNWFVTQRNFYEPQIITTDNTFVSGNCDVVIGIVNNTVYDPLQPELDS

SEQ ID NO: 2896 - protein, 1147 aa, Artificial Sequence
  SARS-CoV-2/Wuhan/HBCDC-HB-02/2020__EPI_ISL_412978 spike protein (1-1147)(K986P_V987P_ H1048Q_H1064N_ H1083N_H1101N)
MFVFLVLLPLVSSQCVNLTTRTQLPPAYTNSFTRGVYYPDKVFRSSVLHSTQDLFLPFFSNVTWFHAIHVSGTNGTKRFDNPVLPFNDGVYFASTEKSNIIRGWIFGTTLDSKTQSLLIVNNATNVVIKVCEFQFCNDPFLGVYYHKNNKSWMESEFRVYSSANNCTFEYVSQPFLMDLEGKQGNFKNLREFVFKNIDGYFKIYSKHTPINLVRDLPQGFSALEPLVDLPIGINITRFQTLLALHRSYLTPGDSSSGWTAGAAAYYVGYLQPRTFLLKYNENGTITDAVDCALDPLSETKCTLKSFTVEKGIYQTSNFRVQPTESIVRFPNITNLCPFGEVFNATRFASVYAWNRKRISNCVADYSVLYNSASFSTFKCYGVSPTKLNDLCFTNVYADSFVIRGDEVRQIAPGQTGKIADYNYKLPDDFTGCVIAWNSNNLDSKVGGNYNYLYRLFRKSNLKPFERDISTEIYQAGSTPCNGVEGFNCYFPLQSYGFQPTNGVGYQPYRVVVLSFELLHAPATVCGPKKSTNLVKNKCVNFNFNGLTGTGVLTESNKKFLPFQQFGRDIADTTDAVRDPQTLEILDITPCSFGGVSVITPGTNTSNQVAVLYQDVNCTEVPVAIHADQLTPTWRVYSTGSNVFQTRAGCLIGAEHVNNSYECDIPIGAGICASYQTQTNSPRRARSVASQSIIAYTMSLGAENSVAYSNNSIAIPTNFTISVTTEILPVSMTKTSVDCTMYICGDSTECSNFLLQYGSFCTQLNRALTGIAVEQDKNTQEVFAQVKQIYKTPPIKDFGGFNFSQILPDPSKPSKRSFIEDLLFNKVTLADAGFIKQYGDCLGDIAARDLICAQKFNGLTVLPPLLTDEMIAQYTSALLAGTITSGWTFGAGAALQIPFAMQMAYRFNGIGVTQNVLYENQKLIANQFNSAIGKIQDSLSSTASALGKLQDVVNQNAQALNTLVKQLSSNFGAISSVLNDILSRLDPPEAEVQIDRLITGRLQSLQTYVTQQLIRAAEIRASANLAATKMSECVLGQSKRVDFCGKGYQLMSFPQSAPHGVVFLNVTYVPAQEKNFTTAPAICNDGKAHFPREGVFVSNGTNWFVTQRNFYEPQIITTDNTFVSGNCDVVIGIVNNTVYDPLQPELDS

SEQ ID NO: 2897 - protein, 1147 aa, Artificial Sequence
  SARS-CoV-2/Australia/QLD02/2020__EPI_ISL_407896 spike protein (1-1147)(K986P_V987P_ H1048Q_H1064N_ H1083N_H1101N)
MFVFLVLLPLVSSQCVNLTTRTQLPPAYTNSFTRGVYYPDKVFRSSVLHSTQDLFLPFFSNVTWFHAIHVSGTNGTKRFDNPVLPFNDGVYFASTEKSNIIRGWIFGTTLDSKTQSLLIVNNATNVVIKVCEFQFCNDPFLGVYYHKNNKSWMESEFRVYSSANNCTFEYVSQPFLMDLEGKQGNFKNLREFVFKNIDGYFKIYSKHTPINLVRDLPQGFSALEPLVDLPIGINITRFQTLLALHRSYLTPGDSSSGWTAGAAAYYVGYLQPRTFLLKYNENGTITDAVDCALDPLSETKCTLKSFTVEKGIYQTSNFRVQPTESIVRFPNITNLCPFGEVFNATRFASVYAWNRKRISNCVADYSVLYNSASFSTFKCYGVSPTKLNDLCFTNVYADSFVIRGDEVRQIAPGQTGKIADYNYKLPDDFTGCVIAWNSNNLDSKVGGNYNYLYRLFRKSNLKPFERDISTEIYQAGSTPCNGVEGFNCYFPLQSYGFQPTNGVGYQPYRVVVLSFELLHAPATVCGPKKSTNLVKNKCVNFNFNGLTGTGVLTESNKKFLPFQQFGRDIADTTDAVRDPQTLEILDITPCSFGGVSVITPGTNTSNQVAVLYQDVNCTEVPVAIHADQLTPTWRVYSTGSNVFQTRAGCLIGAEHVNNSYECDIPIGAGICASYQTQTNSPRRARSVASQSIIAYTMSLGAENSVAYSNNSIAIPTNFTISVTTEILPVSMTKTSVDCTMYICGDSTECSNLLLQYGSFCTQLNRALTGIAVEQDKNTQEVFAQVKQIYKTPPIKDFGGFNFSQILPDPSKPSKRSFIEDLLFNKVTLADAGFIKQYGDCLGDIAARDLICAQKFNGLTVLPPLLTDEMIAQYTSALLAGTITSGWTFGAGAALQIPFAMQMAYRFNGIGVTQNVLYENQKLIANQFNSAIGKIQDSLSSTASALGKLQDVVNQNAQALNTLVKQLSSNFGAISSVLNDILSRLDPPEAEVQIDRLITGRLQSLQTYVTQQLIRAAEIRASANLAATKMSECVLGQSKRVDFCGKGYQLMSFPQSAPHGVVFLNVTYVPAQEKNFTTAPAICNDGKAHFPREGVFVSNGTNWFVTQRNFYEPQIITTDNTFVSGNCDVVIGIVNNTVYDPLQLELDS

SEQ ID NO: 2898 - protein, 1147 aa, Artificial Sequence
  SARS-CoV-2/India/1-31/2020__EPI_ISL_413523 spike protein (1-1147)(K986P_V987P_ H1048Q_H1064N_ H1083N_H1101N)
MFVFLVLLPLVSSQCVNLTTRTQLPPAYTNSFTRGVYYPDKVFRSSVLHSTQDLFLPFFSNVTWFHAIHVSGTNGTKRFDNPVLPFNDGVYFASTEKSNIIRGWIFGTTLDSKTQSLLIVNNATNVVIKVCEFQFCNDPFLGVYYHKNNKSWMESEFRVYSSANNCTFEYVSQPFLMDLEGKQGNFKNLREFVFKNIDGYFKIYSKHTPINLVRDLPQGFSALEPLVDLPIGINITRFQTLLALHRSYLTPGDSSSGWTAGAAAYYVGYLQPRTFLLKYNENGTITDAVDCALDPLSETKCTLKSFTVEKGIYQTSNFRVQPTESIVRFPNITNLCPFGEVFNATRFASVYAWNRKRISNCVADYSVLYNSASFSTFKCYGVSPTKLNDLCFTNVYADSFVIRGDEVRQIAPGQTGKIADYNYKLPDDFTGCVIAWNSNNLDSKVGGNYNYLYRLFRKSNLKPFERDISTEIYQAGSTPCNGVEGFNCYFPLQSYGFQPTNGVGYQPYRVVVLSFELLHAPATVCGPKKSTNLVKNKCVNFNFNGLTGTGVLTESNKKFLPFQQFGRDIADTTDAVRDPQTLEILDITPCSFGGVSVITPGTNTSNQVAVLYQDVNCTEVPVAIHADQLTPTWRVYSTGSNVFQTRAGCLIGAEHVNNSYECDIPIGAGICASYQTQTNSPRRARSVASQSIIAYTMSLGAENSVAYSNNSIAIPTNFTISVTTEILPVSMTKTSVDCTMYICGDSTECSNLLLQYGSFCTQLNRALTGIAVEQDKNTQEVFAQVKQIYKTPPIKDFGGFNFSQILPDPSKPSKRSFIEDLLFNKVTLADAGFIKQYGDCLGDIAARDLICAQKFNGLTVLPPLLTDEMIAQYTSALLAGTITSGWTFGAGAALQIPFAMQMAYRFNGIGVTQNVLYENQKLIANQFNSVIGKIQDSLSSTASALGKLQDVVNQNAQALNTLVKQLSSNFGAISSVLNDILSRLDPPEAEVQIDRLITGRLQSLQTYVTQQLIRAAEIRASANLAATKMSECVLGQSKRVDFCGKGYQLMSFPQSAPHGVVFLNVTYVPAQEKNFTTAPAICNDGKAHFPREGVFVSNGTNWFVTQRNFYEPQIITTDNTFVSGNCDVVIGIVNNTVYDPLQPELDS

SEQ ID NO: 2899 - protein, 1147 aa, Artificial Sequence
  SARS-CoV-2/Guangdong/GD2020087-P0008/2020__EPI_ISL_413863 spike protein (1-1147)(K986P_V987P_ H1048Q_H1064N_ H1083N_H1101N)
MFVFLVLLPLVSSQCVNLTTRTQLPPAYTNSFTRGVYYPDKVFRSSVLHSTQDLFLPFFSNVTWFHAIHVSGTNGTKRFDNPVLPFNDGVYFASTEKSNIIRGWIFGTTLDSKTQSLLIVNNATNVVIKVCEFQFCNDPFLGVYYHKNNKSWMESEFRVYSSANNCTFEYVSQPFLMDLEGKQGNFKNLREFVFKNIDGYFKIYSKHTPINLVRDLPQGFSALEPLVDLPIGINITRFQTLLALHRSYLTPGDSSSGWTAGAAAYYVGYLQPRTFLLKYNENGTITDAVDCALDPLSETKCTLKSFTVEKGIYQTSNFRVQPTESIVRFPNITNLCPFGEVFNATRFASVYAWNRKRISNCVADYSVLYNSASFSTFKCYGVSPTKLNDLCFTNVYADSFVIRGDEVREIAPGQTGKIADYNYKLPDDFTGCVIAWNSNNLDSKVGGNYNYLYRLFRKSNLKPFERDISTEIYQAGSTPCNGVEGFNCYFPLQSYGFQPTNGVGYQPYRVVVLSFELLHAPATVCGPKKSTNLVKNKCVNFNFNGLTGTGVLTESNKKFLPFQQFGRDIADTTDAVRDPQTLEILDITPCSFGGVSVITPGTNTSNQVAVLYQDVNCTEVPVAIHADQLTPTWRVYSTGSNVFQTRAGCLIGAEHVNNSYECDIPIGAGICASYQTQTNSPRRARSVASQSIIAYTMSLGAENSVAYSNNSIAIPTNFTISVTTEILPVSMTKTSVDCTMYICGDSTECSNLLLQYGSFCTQLNRALTGIAVEQDKNTQEVFAQVKQIYKTPPIKDFGGFNFSQILPDPSKPSKRSFIEDLLFNKVTLADAGFIKQYGDCLGDIAARDLICAQKFNGLTVLPPLLTDEMIAQYTSALLAGTITSGWTFGAGAALQIPFAMQMAYRFNGIGVTQNVLYENQKLIANQFNSAIGKIQDSLSSTASALGKLQDVVNQNAQALNTLVKQLSSNFGAISSVLNDILSRLDPPEAEVQIDRLITGRLQSLQTYVTQQLIRAAEIRASANLAATKMSECVLGQSKRVDFCGKGYQLMSFPQSAPHGVVFLNVTYVPAQEKNFTTAPAICNDGKAHFPREGVFVSNGTNWFVTQRNFYEPQIITTDNTFVSGNCDVVIGIVNNTVYDPLQPELDS

SEQ ID NO: 2900 - protein, 1147 aa, Artificial Sequence
  SARS-CoV-2/Sweden/01/2020__EPI_ISL_411951 spike protein (1-1147)(K986P_V987P_ H1048Q_H1064N_ H1083N_H1101N)
MFVFLVLLPLVSSQCVNLTTRTQLPPAYTNSFTRGVYYPDKVFRSSVLHSTQDLFLPFFSNVTWFHAIHVSGTNGTKRFDNPVLPFNDGVYFASTEKSNIIRGWIFGTTLDSKTQSLLIVNNATNVVIKVCEFQFCNDPFLGVYYHKNNKSWMESEFRVYSSANNCTFEYVSQPFLMDLEGKQGNFKNLREFVFKNIDGYFKIYSKHTPINLVRDLPQGFSALEPLVDLPIGINITRFQTLLALHRSYLTPGDSSSGWTAGAAAYYVGYLQPRTFLLKYNENGTITDAVDCALDPLSETKCTLKSFTVEKGIYQTSNFRVQPTESIVRFPNITNLCPFGEVFNATRFASVYAWNRKRISNCVADYSVLYNSASFSTFKCYGVSPTKLNDLCFTNVYADSFVIRGDEVRQIAPGQTGKIADYNYKLPDDFTGCVIAWNSNNLDSKVGGNYNYLYRLFRKSNLKPFERDISTEIYQAGSTPCNGVEGFNCYFPLQSYGFQPTNGVGYQPYRVVVLSFELLHAPATVCGPKKSTNLVKNKCVNFNFNGLTGTGVLTESNKKFLPFQQFGRDIADTTDAVRDPQTLEILDITPCSFGGVSVITPGTNTSNQVAVLYQDVNCTEVPVAIHADQLTPTWRVYSTGSNVFQTRAGCLIGAEHVNNSYECDIPIGAGICASYQTQTNSPRRARSVASQSIIAYTMSLGAENSVAYSNNSIAIPTNFTISVTTEILPVSMTKTSVDCTMYICGDSTECSNLLLQYGSFCTQLNRALTGIAVEQDKNTQEVFAQVKQIYKTPPIKDCGGFNFSQILPDPSKPSKRSFIEDLLFNKVTLADAGFIKQYGDCLGDIAARDLICAQKFNGLTVLPPLLTDEMIAQYTSALLAGTITSGWTFGAGAALQIPFAMQMAYRFNGIGVTQNVLYENQKLIANQFNSAIGKIQDSLSSTASALGKLQDVVNQNAQALNTLVKQLSSNFGAISSVLNDILSRLDPPEAEVQIDRLITGRLQSLQTYVTQQLIRAAEIRASANLAATKMSECVLGQSKRVDFCGKGYQLMSFPQSAPHGVVFLNVTYVPAQEKNFTTAPAICNDGKAHFPREGVFVSNGTNWFVTQRNFYEPQIITTDNTFVSGNCDVVIGIVNNTVYDPLQPELDS

SEQ ID NO: 2901 - protein, 1147 aa, Artificial Sequence
  SARS-CoV-2/Tianmen/HBCDC-HB-07/2020__EPI_ISL_412983 spike protein (1-1147)(K986P_V987P_ H1048Q_H1064N_ H1083N_H1101N)
MFVFLVLLPLVSSQCVNLTTRTQLPPAYTNSFTRGVYYPDKVFRSSVLHSTQDLFLPFFSNVTWFHAIHVSGTNGTKRFDNPVLPFNDGVYFASTEKSNIIRGWIFGTTLDSKTQSLLIVNNATNVVIKVCEFQFCNDPFLGVYYHKNNKSWMESEFRVYSSANNCTFEYVSQPFLMDLEGKQGNFKNLREFVFKNIDGYFKIYSKHTPINLVRDLPQGFSALEPLVDLPIGINITRFQTLLALHRSYLTPGDSSSGWTAGAAAYYVGYLQPRTFLLKYNENGTITDAVDCALDPLSETKCTLKSFTVEKGIYQTSNFRVQPTESIVRFPNITNLCPFGEVFNATRFASVYAWNRKRISNCVADYSVLYNSASFSTFKCYGVSPTKLNDLCFTNVYADSFVIRGDEVRQIAPGQTGKIADYNYKLPDDFTGCVIAWNSNNLDSKVGGNYNYLYRLFRKSNLKPFERDISTEIYQAGSTPCNGVEGFNCYFPLQSYGFQPTNGVGYQPYRVVVLSFELLHAPATVCGPKKSTNLVKNKCVNFNFNGLTGTGVLTESNKKFLPFQQFGRDIADTTDAVRDPQTLEILDITPCSFGGVSVITPGTNTSNQVAVLYQDLNCTEVPVAIHADQLTPTWRVYSTGSNVFQTRAGCLIGAEHVNNSYECDIPIGAGICASYQTQTNSPRRARSVASQSIIAYTMSLGAENSVAYSNNSIAIPTNFTISVTTEILPVSMTKTSVDCTMYICGDSTECSNLLLQYGSFCTQLNRALTGIAVEQDKNTQEVFAQVKQIYKTPPIKDFGGFNFSQILPDPSKPSKRSFIEDLLFNKVTLADAGFIKQYGDCLGDIAARDLICAQKFNGLTVLPPLLTDEMIAQYTSALLAGTITSGWTFGAGAALQIPFAMQMAYRFNGIGVTQNVLYENQKLIANQFNSAIGKIQDSLSSTASALGKLQDVVNQNAQALNTLVKQLSSNFGAISSVLNDILSRLDPPEAEVQIDRLITGRLQSLQTYVTQQLIRAAEIRASANLAATKMSECVLGQSKRVDFCGKGYQLMSFPQSAPHGVVFLNVTYVPAQEKNFTTAPAICNDGKAHFPREGVFVSNGTNWFVTQRNFYEPQIITTDNTFVSGNCDVVIGIVNNTVYDPLQPELDS

SEQ ID NO: 2902 - protein, 1147 aa, Artificial Sequence
  SARS-CoV-2/Hong Kong/case42_VM20002493/2020__EPI_ISL_414527 spike protein (1-1147)(K986P_V987P_ H1048Q_H1064N_ H1083N_H1101N)
MFVFLVLLPLVSSQCVNLTTRTQLPPAYTNSFTRGVYYPDKVFRSSVLHSTQDLFLPFFSNVTWFHAIHVSGTNGTKRFDNPVLPFNDGVYFASTEKSNIIRGWIFGTTLDSKTQSLLIVNNATNVVIKVCEFQFCNDPFLGVYYHKNNKSWMESEFRVYSSANNCTFEYVSQPFLMDLEGKQGNFKNLREFVFKNIDGYFKIYSKHTPINLVRDLPQGFSALEPLVDLPIGINITRFQTLLALHRSYLTPGDSSSGWTAGAAAYYVGYLQPRTFLLKYNENGTITDAVDCALDPLSETKCTLKSFTVEKGIYQTSNFRVQPTESIVRFPNITNLCPFGEVFNATRFASVYAWNRKRISNCVADYSVLYNSASFSTFKCYGVSPTKLNDLCFTNVYADSFVIRGDEVRQIAPGQTGKIADYNYKLPDDFTGCVIAWNSNNLDSKVGGNYNYLYRLFRKSNLKPFERDISTEIYQAGSTPCNGVEGFNCYFPLQSYGFQPTNGVGYQPYRVVVLSFELLHAPATVCGPKKSTNLVKNKCVNFNFNGLTGTGVLTESNKKFLPFQQFGRDIADTTDAVRDPQTLEILDITPCSFGGVSVITPGTNTSNQVAVLYQDVNCTEVPVAIHADQLTPTWRVYSTGSNVFQTRAGCLIGAEHVNNSYECDIPIGAGICASYQTQTNSPRRARSVASQSIIAYTMSLGAENSVAYSNNSIAIPTNFAISVTTEILPVSMTKTSVDCTMYICGDSTECSNLLLQYGSFCTQLNRALTGIAVEQDKNTQEVFAQVKQIYKTPPIKDFGGFNFSQILPDPSKPSKRSFIEDLLFNKVTLADAGFIKQYGDCLGDIAARDLICAQKFNGLTVLPPLLTDEMIAQYTSALLAGTITSGWTFGAGAALQIPFAMQMAYRFNGIGVTQNVLYENQKLIANQFNSAIGKIQDSLSSTASALGKLQDVVNQNAQALNTLVKQLSSNFGAISSVLNDILSRLDPPEAEVQIDRLITGRLQSLQTYVTQQLIRAAEIRASANLAATKMSECVLGQSKRVDFCGKGYQLMSFPQSAPHGVVFLNVTYVPAQEKNFTTAPAICNDGKAHFPREGVFVSNGTNWFVTQRNFYEPQIITTDNTFVSGNCDVVIGIVNNTVYDPLQPELDS

SEQ ID NO: 2903 - protein, 1147 aa, Artificial Sequence
  SARS-CoV-2/USA/CruiseA-23/2020__EPI_ISL_414482 spike protein (1-1147)(K986P_V987P_ H1048Q_H1064N_ H1083N_H1101N)
MFVFLVLLPLVSSQCVNLTTRTQLPPAYTNSFTRGVYYPDKVFRSSVLHSTQDLFLPFFSNVTWFHAIHVSGTNGTKRFDNPVLPFNDGVYFASTEKSNIIRGWIFGTTLDSKTQSLLIVNNATNVVIKVCEFQFCNDPFLGVYYHKNNKSWMESEFRVYSSANNCTFEYVSQPFLMDLEVKQGNFKNLREFVFKNIDGYFKIYSKHTPINLVRDLPQGFSALEPLVDLPIGINITRFQTLLALHRSYLTPGDSSSGWTAGAAAYYVGYLQPRTFLLKYNENGTITDAVDCALDPLSETKCTLKSFTVEKGIYQTSNFRVQPTESIVRFPNITNLCPFGEVFNATRFASVYAWNRKRISNCVADYSVLYNSASFSTFKCYGVSPTKLNDLCFTNVYADSFVIRGDEVRQIAPGQTGKIADYNYKLPDDFTGCVIAWNSNNLDSKVGGNYNYLYRLFRKSNLKPFERDISTEIYQAGSTPCNGVEGFNCYFPLQSYGFQPTNGVGYQPYRVVVLSFELLHAPATVCGPKKSTNLVKNKCVNFNFNGLTGTGVLTESNKKFLPFQQFGRDIADTTDAVRDPQTLEILDITPCSFGGVSVITPGTNTSNQVAVLYQDVNCTEVPVAIHADQLTPTWRVYSTGSNVFQTRAGCLIGAEHVNNSYECDIPIGAGICASYQTQTNSPRRARSVASQSIIAYTMSLGAENSVAYSNNSIAIPTNFTISVTTEILPVSMTKTSVDCTMYICGDSTECSNLLLQYGSFCTQLNRALTGIAVEQDKNTQEVFAQVKQIYKTPPIKDFGGFNFSQILPDPSKPSKRSFIEDLLFNKVTLADAGFIKQYGDCLGDIAARDLICAQKFNGLTVLPPLLTDEMIAQYTSALLAGTITSGWTFGAGAALQIPFAMQMAYRFNGIGVTQNVLYENQKLIANQFNSAIGKIQDSLSSTASALGKLQDVVNQNAQALNTLVKQLSSNFGAISSVLNDILSRLDPPEAEVQIDRLITGRLQSLQTYVTQQLIRAAEIRASANLAATKMSECVLGQSKRVDFCGKGYQLMSFPQSAPHGVVFLNVTYVPAQEKNFTTAPAICNDGKAHFPREGVFVSNGTNWFVTQRNFYEPQIITTDNTFVSGNCDVVIGIVNNTVYDPLQPELDS

SEQ ID NO: 2904 - protein, 1147 aa, Artificial Sequence
  SARS-CoV-2/Hong Kong/case85_VM20002868/2020__EPI_ISL_414519 spike protein (1-1147)(K986P_V987P_ H1048Q_H1064N_ H1083N_H1101N)
MFVFLVLVPLVSSQCVNLTTRTQLPPAYTNSFTRGVYYPDKVFRSSVLHSTQDLFLPFFSNVTWFHAIHVSGTNGTKRFDNPVLPFNDGVYFASTEKSNIIRGWIFGTTLDSKTQSLLIVNNATNVVIKVCEFQFCNDPFLGVYYHKNNKSWMESEFRVYSSANNCTFEYVSQPFLMDLEGKQGNFKNLREFVFKNIDGYFKIYSKHTPINLVRDLPQGFSALEPLVDLPIGINITRFQTLLALHRSYLTPGDSSSGWTAGAAAYYVGYLQPRTFLLKYNENGTITDAVDCALDPLSETKCTLKSFTVEKGIYQTSNFRVQPTESIVRFPNITNLCPFGEVFNATRFASVYAWNRKRISNCVADYSVLYNSASFSTFKCYGVSPTKLNDLCFTNVYADSFVIRGDEVRQIAPGQTGKIADYNYKLPDDFTGCVIAWNSNNLDSKVGGNYNYLYRLFRKSNLKPFERDISTEIYQAGSTPCNGVEGFNCYFPLQSYGFQPTNGVGYQPYRVVVLSFELLHAPATVCGPKKSTNLVKNKCVNFNFNGLTGTGVLTESNKKFLPFQQFGRDIADTTDAVRDPQTLEILDITPCSFGGVSVITPGTNTSNQVAVLYQDVNCTEVPVAIHADQLTPTWRVYSTGSNVFQTRAGCLIGAEHVNNSYECDIPIGAGICASYQTQTNSPRRARSVASQSIIAYTMSLGAENSVAYSNNSIAIPTNFTISVTTEILPVSMTKTSVDCTMYICGDSTECSNLLLQYGSFCTQLNRALTGIAVEQDKNTQEVFAQVKQIYKTPPIKDFGGFNFSQILPDPSKPSKRSFIEDLLFNKVTLADAGFIKQYGDCLGDIAARDLICAQKFNGLTVLPPLLTDEMIAQYTSALLAGTITSGWTFGAGAALQIPFAMQMAYRFNGIGVTQNVLYENQKLIANQFNSAIGKIQDSLSSTASALGKLQDVVNQNAQALNTLVKQLSSNFGAISSVLNDILSRLDPPEAEVQIDRLITGRLQSLQTYVTQQLIRAAEIRASANLAATKMSECVLGQSKRVDFCGKGYQLMSFPQSAPHGVVFLNVTYVPAQEKNFTTAPAICNDGKAHFPREGVFVSNGTNWFVTQRNFYEPQIITTDNTFVSGNCDVVIGIVNNTVYDPLQPELDS

SEQ ID NO: 2905 - protein, 1147 aa, Artificial Sequence; identical to SEQ ID NO: 2895
  SARS-CoV-2/England/200990660/2020__EPI_ISL_414523 spike protein (1-1147)(K986P_V987P_ H1048Q_H1064N_ H1083N_H1101N)

SEQ ID NO: 2906 - protein, 1147 aa, Artificial Sequence
  SARS-CoV-2/Australia/NSW09/2020__EPI_ISL_413595 spike protein (1-1147)(K986P_V987P_ H1048Q_H1064N_ H1083N_H1101N)
MFVFLVLLPLVSSQCVNLTTRTQLPPAYTNSFTRGVYYPDKVFRSSVLHSTQDLFLPFFSNVTWFHAIHVSGTNGTKRFDNPVLPFNDGVYFASTEKSNIIRGWIFGTTLDSKTQSLLIVNNATNVVIKVCEFQFCNDPFLGVYYHKNNKSWMESEFRVYSSANNCTFEYVSQPFLMDLEGKQGNFKNLREFVFKNIDGYFKIYSKHTPINLVRDLPQGFSALEPLVDLPIGINITRFQTLLALHRSYLTPGDSSSGWTAGAAAYYVGYLQPRTFLLKYNENGTITDAVDCALDPLSETKCTLKSFTVEKGIYQTSNFRVQPTESIVRFPNITNLCPFGEVFNATRFASVYAWNRKRISNCVADYSVLYNSASFSTFKCYGVSPTKLNDLCFTNVYADSFVIRGDEVRQIAPGQTGKIADYNYKLPDDFTGCVIAWNSNNLDSKVGGNYNYLYRLFRKSNLKPFERDISTEIYQAGSTPCNGVEGFNCYFPLQSYGFQPTNGVGYQPYRVVVLSFELLHAPATVCGPKKSTNLVKNKCVNFNFNGLTGTGVLTESNKKFLPFQQFGRDIADTTDAVRDPQTLEILDITPCSFGGVSVITPGTNTSNQVAVLYQDVNCTEVPVAIHADQLTPTWRVYSTGSNVFQTRAGCLIGAEHVNNSYECDIPIGAGICASYQTQTNSPRRARSVASQSIIAYTMSLGAENSVAYSNNSIAIPTNFTISVTTEILPVSMTKTSVDCTMYICGDSTECSNLLLQYGSFCTQLNRALTGIAVEQDKNTQEVFAQVKQIYKTPPIKDFGGFNFSQILPDPSKPSKRSFIEDLLFNKVTLADAGFIKQYGDCLGDIAARDLICAQKFNGLTVLPPLLTDEMIAQYTSALLAGTITSGWTFGAGAALQIPFAMQMAYRFNGIGVTQNVLYENQKLIANQFNSAIGKIQDSLSFTASALGKLQDVVNQNAQALNTLVKQLSSNFGAISSVLNDILSRLDPPEAEVQIDRLITGRLQSLQTYVTQQLIRAAEIRASANLAATKMSECVLGQSKRVDFCGKGYQLMSFPQSAPHGVVFLNVTYVPAQEKNFTTAPAICNDGKAHFPREGVFVSNGTNWFVTQRNFYEPQIITTDNTFVSGNCDVVIGIVNNTVYDPLQPELDS

SEQ ID NO: 2907 - protein, 1147 aa, Artificial Sequence; identical to SEQ ID NO: 2887
  SARS-CoV-2/Australia/NSW10/2020__EPI_ISL_413596 spike protein (1-1147)(K986P_V987P_ H1048Q_H1064N_ H1083N_H1101N)

SEQ ID NO: 2908 - protein, 1147 aa, Artificial Sequence
  SARS-CoV-2/Switzerland/1000477797/2020__EPI_ISL_413023 spike protein (1-1147)(K986P_V987P_ H1048Q_H1064N_ H1083N_H1101N)
MFVFLVLLPLVSSQCVNLTTRTQLPPAYTNSFTRGVYYPDKVFRSSVLHSTQDLFLPFFSNVTWFHAIHVSGTNGTKRFDNPVLPFNDGVYFASTEKSNIIRGWIFGTTLDSKTQSLLIVNNATNVVIKVCEFQFCNDPFLGVYYHKNNKSWMESEFRVYSSANNCTFEYVSQPFLMDLEGKQGNFKNLREFVFKNIDGYFNIYSKHTPINLVRDLPQGFSALEPLVDLPIGINITRFQTLLALHRSYLTPGDSSSGWTAGAAAYYVGYLQPRTFLLKYNENGTITDAVDCALDPLSETKCTLKSFTVEKGIYQTSNFRVQPTESIVRFPNITNLCPFGEVFNATRFASVYAWNRKRISNCVADYSVLYNSASFSTFKCYGVSPTKLNDLCFTNVYADSFVIRGDEVRQIAPGQTGKIADYNYKLPDDFTGCVIAWNSNNLDSKVGGNYNYLYRLFRKSNLKPFERDISTEIYQAGSTPCNGVEGFNCYFPLQSYGFQPTNGVGYQPYRVVVLSFELLHAPATVCGPKKSTNLVKNKCVNFNFNGLTGTGVLTESNKKFLPFQQFGRDIADTTDAVRDPQTLEILDITPCSFGGVSVITPGTNTSNQVAVLYQGVNCTEVPVAIHADQLTPTWRVYSTGSNVFQTRAGCLIGAEHVNNSYECDIPIGAGICASYQTQTNSPRRARSVASQSIIAYTMSLGAENSVAYSNNSIAIPTNFTISVTTEILPVSMTKTSVDCTMYICGDSTECSNLLLQYGSFCTQLNRALTGIAVEQDKNTQEVFAQVKQIYKTPPIKDFGGFNFSQILPDPSKPSKRSFIEDLLFNKVTLADAGFIKQYGDCLGDIAARDLICAQKFNGLTVLPPLLTDEMIAQYTSALLAGTITSGWTFGAGAALQIPFAMQMAYRFNGIGVTQNVLYENQKLIANQFNSAIGKIQDSLSSTASALGKLQDVVNQNAQALNTLVKQLSSNFGAISSVLNDILSRLDPPEAEVQIDRLITGRLQSLQTYVTQQLIRAAEIRASANLAATKMSECVLGQSKRVDFCGKGYQLMSFPQSAPHGVVFLNVTYVPAQEKNFTTAPAICNDGKAHFPREGVFVSNGTNWFVTQRNFYEPQIITTDNTFVSGNCDVVIGIVNNTVYDPLQPELDS

SEQ ID NO: 2909 - protein, 1147 aa, Artificial Sequence
  SARS-CoV-2/Belgium/BA-02291/2020__EPI_ISL_415159 spike protein (1-1147)(K986P_V987P_ H1048Q_H1064N_ H1083N_H1101N)
MFVFLVLLPLVSSQCVNLTTRTQLPPAYTNSFTRGVYYPDKVFRSSVLHSTQDLFLPFFSNVTWFHAIHVSGTNGTKRFDNPVLPFNDGVYFASTEKSNIIRGWIFGTTLDSKTQSLLIVNNATNVVIKVCEFQFCNDPFLGVYYHKNNKSWMESEFRVYSSANNCTFEYVSQPFLMDLEGKQGNFKNLREFVFKNIDGYFKIYSKHTPINLVRDLPQGFSALEPLVDLPIGINITRFQTLLALHRSYLTPGDSSSGWTAGAAAYYVGYLQPRTFLLKYNENGTITDAVDCALDPLSETKCTLKSFTVEKGIYQTSNFRVQPTESIVRFPNITNLCPFGEVFNATRFASVYAWNRKRISNCVADYSVLYNSASFSTFKCYGVSPTKLNDLCFTNVYADSFVIRGDEVRQIAPGQTGKIADYNYKLPDDFTGCVIAWNSNNLDSKVGGNYNYLYRLFRRSNLKPFERDISTEIYQAGSTPCNGVEGFNCYFPLQSYGFQPTNGVGYQPYRVVVLSFELLPAPATVCGPKKSTNLVKNKCVNFNFNGLTGTGVLTESNKKFLPFQQFGRDIADTTDAVRDPQTLEILDITPCSFGGVSVITPGTNTSNQVAVLYQGVNCTEVPVAIHADQLTPTWRVYSTGSNVFQTRAGCLIGAEHVNNSYECDIPIGAGICASYQTQTNSPRRARSVASQSIIAYTMSLGAENSVAYSNNSIAIPTNFTISVTTEILPVSMTKTSVDCTMYICGDSTECSNLLLQYGSFCTQLNRALTGIAVEQDKNTQEVFAQVKQIYKTPPIKDFGGFNFSQILPDPSKPSKRSFIEDLLFNKVTLADAGFIKQYGDCLGDIAARDLICAQKFNGLTVLPPLLTDEMIAQYTSALLAGTITSGWTFGAGAALQIPFAMQMAYRFNGIGVTQNVLYENQKLIANQFNSAIGKIQDSLSSAAPALGKLQDVVNQNAQALNTLVKQLSSNFGAISSVLNDILSRLDPPEAEVQIDRLITGRLQSLQTYVTQQLIRAAEIRASANLAATKMSECVLGQSKRVDFCGKGYQLMSFPQSAPHGVVFLNVTYVPAQEKNFTTAPAICNDGKAHFPREGVFVSNGTNWFVTQRNFYEPQIITTDNTFVSGNCDVVIGIVNNTVYDPLQPELDS

SEQ ID NO: 2910 - protein, 1147 aa, Artificial Sequence
  SARS-CoV-2/USA/WA8-UW5/2020__EPI_ISL_413486 spike protein (1-1147)(K986P_V987P_ H1048Q_H1064N_ H1083N_H1101N)
MFVFLVLLPLVSSQCVNLTTRTQLPPAYTNSFTRGVYYPDKVFRSSVLHSTQDLFLPFFSNVTWFHAIHVSGTNGTKRFDNPVLPFNDGVYFASTEKSNIIRGWIFGTTLDSKTQSLLIVNNATNVVIKVCEFQFCNDPFLGVYYHKNNKSWMESEFRVYSSANNCTFEYVSQPFLMDLEGKQGNFKNLREFVFKNIDGYFKIYSKHTPINLVRDLPQGFSALEPLVDLPIGINITRFQTLLALHRSYLTPGDSSSGWTAGAAAYYVGYLQPRTFLLKYNENGTITDAVDCALDPLSETKCTLKSFTVEKGIYQTSNFRVQPTESIVRFPNITNLCPFGEVFNATRFASVYAWNRKRISNCVADYSVLYNSASFSTFKCYGVSPTKLNDLCFTNVYADSFVIRGDEVRQIAPGQTGKIADYNYKLPDDFTGCVIAWNSNNLDSKVGGNYNYLYRLFRKSNLKPFERDISTEIYQAGSTPCNGVEGFNCYFPLQSYGFQPTNGVGYQPYRVVVLSFELLHAPATVCGPKKSTNLVKNKCVNFNFNGLTGTGVLTESNKKFLPFQQFGRDIADTTDAVRDPQTLEILDITPCSFGGVSVITPGTNTSNQVAVLYQDVNCTEVPVAIHADQLTPTWRVYSTGSNVFQTRAGCLIGAEYVNNSYECDIPIGAGICASYQTQTNSPRRARSVASQSIIAYTMSLGAENSVAYSNNSIAIPTNFTISVTTEILPVSMTKTSVDCTMYICGDSTECSNLLLQYGSFCTQLNRALTGIAVEQDKNTQEVFAQVKQIYKTPPIKDFGGFNFSQILPDPSKPSKRSFIEDLLFNKVTLADAGFIKQYGDCLGDIAARDLICAQKFNGLTVLPPLLTDEMIAQYTSALLAGTITSGWTFGAGAALQIPFAMQMAYRFNGIGVTQNVLYENQKLIANQFNSAIGKIQDSLSSTASALGKLQDVVNQNAQALNTLVKQLSSNFGAISSVLNDILSRLDPPEAEVQIDRLITGRLQSLQTYVTQQLIRAAEIRASANLAATKMSECVLGQSKRVDFCGKGYQLMSFPQSAPHGVVFLNVTYVPAQEKNFTTAPAICNDGKAHFPREGVFVSNGTNWFVTQRNFYEPQIITTDNTFVSGNCDVVIGIVNNTVYDPLQPELDS

SEQ ID NO: 2911 - protein, 1147 aa, Artificial Sequence
  SARS-CoV-2/England/20102000506/2020__EPI_ISL_415147 spike protein (1-1147)(K986P_V987P_ H1048Q_H1064N_ H1083N_H1101N)
MFVFLVLLPLVSSQCVNLTTRTQLPPAYTNSFTRGVYYPDKVFRSSVLHSTQDLFLPFFSNVTWFHAIHVSGTNGTKRFDNPVLPFNDGVYFASTEKSNIIRGWIFGTTLDSKTQSLLIVNNATNVVIKVCEFQFCNDPFLGVYYHKNNKSWMESEFRVYSSANNCTFEYVSQPFLMDLEGKQGNFKNLREFVFKNIDGYFKIYSKHTPINLVRDLPQGFSALEPLVDLPIGINITRFQTLLALHRSYLTPGDSSSGWTAGAAAYYVGYLQPRTFLLKYNENGTITDAVDCALDPLSETKCTLKSFTVEKGIYQTSNFRVQPTESIVRFPNITNLCPFGEVFNATRFASVYAWNRKRISNCVADYSVLYNSASFSTFKCYGVSPTKLNDLCFTNVYADSFVIRGDEVRQIAPGQTGKIADYNYKLPDDFTGCVIAWNSNNLDSKVGGNYNYLYRLFRKSNLKPFERDISTEIYQAGSTPCNGVEGFNCYFPLQSYGFQPTNGVGYQPYRVVVLSFELLHAPATVCGPKKSTNLVKNKCVNFNFNGLTGTGVLTESNKKFLPFQQFGRDIADTTDAVRDPQTLEILDITPCSFGGVSVITPGTNTSNQVAVLYQGVNCTEVPVAIHADQLTPTWRVYSTGSNVFQTRAGCLIGAEHVNNSYECDIPIGAGICASYQTQTNSPRRARSVASQSIIAYTMSLGAENSVAYSNNSIAIPTNFTISVTTEILPVSMTKTSVDCTMYICGDSTECSNLLLQYGSFCTQLNRALTGIAVEQDKNTQEVFAQVKQIYKTPPIKDFGGFNFSQILPDPSKPSKRSFIEDLLFNKVTLADAGFIKQYGYCLGDIAARDLICAQKFNGLTVLPPLLTDEMIAQYTSALLAGTITSGWTFGAGAALQIPFAMQMAYRFNGIGVTQNVLYENQKLIANQFNSAIGKIQDSLSSTASALGKLQDVVNQNAQALNTLVKQLSSNFGAISSVLNDILSRLDPPEAEVQIDRLITGRLQSLQTYVTQQLIRAAEIRASANLAATKMSECVLGQSKRVDFCGKGYQLMSFPQSAPHGVVFLNVTYVPAQEKNFTTAPAICNDGKAHFPREGVFVSNGTNWFVTQRNFYEPQIITTDNTFVSGNCDVVIGIVNNTVYDPLQPELDS

SEQ ID NO: 2912 - protein, 1147 aa, Artificial Sequence
  SARS-CoV-2/Belgium/VAG-03013/2020__EPI_ISL_415155 spike protein (1-1147)(K986P_V987P_ H1048Q_H1064N_ H1083N_H1101N)
MFVFLVLLPLVSSQCVNLTTRTQLPPAYTNSFTRGVYYPDKVFRSSVLHSTQDLFLPFFSNVTWFHAIHVSGTNGTKRFDNPVLPFNDGVYFASTEKSNIIRGWIFGTTLDSKTQSLLIVNNATNVVIKVCEFQFCNDPFLGVYYHKNNKSWMESEFRVYSSANNCTFEYVSQPFLMDLEGKQGNFKNLREFVFKNIDGYFKIYSKHTPINLVRDLPQGFSALEPLVDLPIGINITRFQTLLALHRSYLTPGDSSSGWTAGAAAYYVGYLQPRTFLLKYNENGTITDAVDCALDPLSETKCTLKSFTVEKGIYQTSNFRVQPTESIVRFPNITNLCPFGEVFNATRFASVYAWNRKRISNCVADYSVLYNSASFSTFKCYGVSPTKLNDLCFTNVYADSFVIRGDEVRQIAPGQTGKIADYNYKLPDDFTGCVIAWNSNNLDSKVGGNYNYLYRLFRKSNLKPFERDISTEIYQAGSTPCNGVEGFNCYFPLQSYGFQPTNGVGYQPYRVVVLSFELLHAPATVCGPKKSTNLVKNKCVNFNFNGLTGTGVLTESNKKFLPFQQFGRDIADTTDAVRDPQTLEILDITPCSFGGVSVITPGTNTSNQVAVLYQGVNCTEVPVAIHADQLTPTWRVYSTGSNVFQTRAGCLIGAEHVNNSYECDIPIGAGICASYQTQTNSPRRARSVASQSIIAYTMSLGAENSVAYSNNSIAIPTNFTISVTTEILPVSMTKTSVDCTMYICGDSTECSNLLLQYGSFCTQLNRALTGIAVEQDKNTQEVFAQVKQIYKTPPIKDFGGFNFSQILPDPSKPSKRSFIEDLLFNKVTLADAGFIKQYGDCLGDIAARDLICAQKFNGLTVLPPLLTDEMIAQYTSALLAGTITSGWTFGAGAALQIPFAMQMAYRFNGIGVTQNVLYENQKLIANQFNSAIGKIQDSLSSTATALGKLQDVVNQNAQALNTLVKQLSSNFGAISSVLNDILSRLDPPEAEVQIDRLITGRLQSLQTYVTQQLIRAAEIRASANLAATKMSECVLGQSKRVDFCGKGYQLMSFPQSAPHGVVFLNVTYVPAQEKNFTTAPAICNDGKAHFPREGVFVSNGTNWFVTQRNFYEPQIITTDNTFVSGNCDVVIGIVNNTVYDPLQPELDS

SEQ ID NO: 2913 - protein, 1147 aa, Artificial Sequence
  SARS-CoV-2/Belgium/BC-03016/2020__EPI_ISL_415157 spike protein (1-1147)(K986P_V987P_ H1048Q_H1064N_ H1083N_H1101N)
MFVFLVLLPLVSSQCVNLTTRTQLPPAYTNSFTRGVYYPDKVFRSSVLHSTQDLFLPFFSNVTWFHAIHVSGTNGTKRFDNPVLPFNDGVYFASTEKSNIIRGWIFGTTLDSKTQSLLIVNNATNVVIKVCEFQFCNDPFLGVYYHKNNKSWMESEFRVYSSANNCTFEYVSQPFLMDLEGKQGNFKNLREFVFKNIDGYFKIYSKHTPINLVRDLPQGFSALEPLVDLPIGINITRFQTLLALHRSYLTPGDSSSGWTAGAAAYYVGYLQPRTFLLKYNENGTITDAVDCALDPLSETKCTLKSFTVEKGIYQTSNFRVQPTESIVRFPNITNLCPFGEVFNATRFASVYAWNRKRISNCVADYSVLYNSASFSTFKCYGVSPTKLNDLCFTNVYADSFVIRGDEVRQIAPGQTGKIADYNYKLPDDFTGCVIAWNSNNLDSKVGGNYNYLYRLFRKSNLKPFERDISTEIYQAGSTPCNGVEGFNCYFPLQSYGFQPTNGVGYQPYRVVVLSFELLHAPATVCGPKKSTNLVKNKCVNFNFNGLTGTGVLTESNKKFLPFQQFGRDIADTTDAVRDPQTLEILDITPCSFGGVSVITPGTNTSNQVAVLYQGVNCTEVPVAIHADQLTPTWRVYSTGSNVFQTRAGCLIGAEHVNNSYECDIPIGAGICASYQTQTNSPRRARSVASQSIIAYTMSLGAENSVAYSNNSIAIPTNFTISVTTEILPVSMTKTSVDCTMYICGDSTECSNLLLQYGSFCTQLNRALTGIAVEQDKNTQEVFAQVKQIYKTPPIKDFGGFNFSQILPDPSKPSKRSFIEDLLFNKVTLADAGFIKQYGDCLGDIAARDLICAQKFNGLTVLPPLLTDEMIAQYTSALLAGTITSGWTFGAGAALQIPFAMQMAYRFNGIGVTQNVLYENQKLIANQFNSAIGKIQDSLSSTAPALGKLQDVVNQNAQALNTLVKQLSSNFGAISSVLNDILSRLDPPEAEVQIDRLITGRLQSLQTYVTQQLIRAAEIRASANLAATKMSECVLGQSKRVDFCGKGYQLMSFPQSAPHGVVFLNVTYVPAQEKNFTTAPAICNDGKAHFPREGVFVSNGTNWFVTQRNFYEPQIITTDNTFVSGNCDVVIGIVNNTVYDPLQPELDS

SEQ ID NO: 2914 - protein, 1147 aa, Artificial Sequence
  SARS-CoV-2/Germany/BavPat3/2020__EPI_ISL_414521 spike protein (1-1147)(K986P_V987P_ H1048Q_H1064N_ H1083N_H1101N)
MFVFLVLLPLVSSQCVNLTTRTQLPPAYTNSFTRGVYYPDKVFRSSVLHSTQDLFLPFFSNVTWFHAIHVSGTNGTKRFDNPVLPFNDGVYFASTEKSNIIRGWIFGTTLDSKTQSLLIVNNATNVVIKVCEFQFCNDPFLGVYYHKNNKSWMESEFRVYSSANNCTFEYVSQPFLMDLEGKQGNFKNLREFVFKNIDGYFKIYSKHTPINLVRDLPQGFSALEPLVDLPIGINITRFQTLLALHRSYLTPGDSSSGWTAGAAAYYVGYLQPRTFLLKYNENGTITDAVDCALDPLSETKCTLKSFTVEKGIYQTSNFRVQPTESIVRFPNITNLCPFGEVFNATRFASVYAWNRKRISNCVADYSVLYNSASFSTFKCYGVSPTKLNDLCFTNVYADSFVIRGDEVRQIAPGQTGKIADYNYKLPDDFTGCVIAWNSNNLDSKVGGNYNYLYRLFRKSNLKPFERDISTEIYQAGSTPCNGVEGFNCYFPLQSYGFQPTNGVGYQPYRVVVLSFELLHAPATVCGPKKSTNLVKNKCVNFNFNGLTGTGVLTESNKKFLPFQQFGRDIADTTDAVRDPQTLEILDITPCSFGGVSVITPGTNTSNQVAVLYQDVNCTEVPVAIHADQLTPTWRVYSTGSNVFQTRAGCLIGAEHVNNSYECDIPIGAGICASYQTQTNSPRRARSVASQSIIAYTMSLGAENSVAYSNNSIAIPTNFTISVTTEILPVSMTKTSVDCTMYICGDSTECSNLLLQYGSFCTQLNRALTGIAVEQDKNTQQVFAQVKQIYKTPPIKDFGGFNFSQILPDPSKPSKRSFIEDLLFNKVTLADAGFIKQYGDCLGDIAARDLICAQKFNGLTVLPPLLTDEMIAQYTSALLAGTITSGWTFGAGAALQIPFAMQMAYRFNGIGVTQNVLYENQKLIANQFNSAIGKIQDSLSSTASALGKLQDVVNQNAQALNTLVKQLSSNFGAISSVLNDILSRLDPPEAEVQIDRLITGRLQSLQTYVTQQLIRAAEIRASANLAATKMSECVLGQSKRVDFCGKGYQLMSFPQSAPHGVVFLNVTYVPAQEKNFTTAPAICNDGKAHFPREGVFVSNGTNWFVTQRNFYEPQIITTDNTFVSGNCDVVIGIVNNTVYDPLQPELDS

SEQ ID NO: 2915 - protein, 1147 aa, Artificial Sequence
  SARS-CoV-2/France/HF1805/2020__EPI_ISL_414628 spike protein (1-1147)(K986P_V987P_ H1048Q_H1064N_ H1083N_H1101N)
MFVFLVLLPLVSSQCVNLTTRTQLPPAYTNSFTRGVYYPDKVFRSSVLHSTQDLFLPFFSNVTWFHAIHVSGTNGTKRFDNPVLPFNDGVYFASTEKSNIIRGWIFGTTLDSKTQSLLIVNNATNVVIKVCEFQFCNDPFLGVYYHKNNKSWMESEFRVYSSANNCTFEYVSQPFLMDLEGKQGNFKNLREFVFKNIDGYFKIYSKHTPINLVRDLPQGFSALEPLVDLPIGINITRFQTLLALHRSYLTPGDSSSGWTAGAAAYYVGYLQPRTFLLKYNENGTITDAVDCALDPLSETKCTLKSFTVEKGIYQTSNFRVQPTESIVRFPNITNLCPFGEVFNATRFASVYAWNRKRISNCVADYSVLYNSASFSTFKCYGVSPTKLNDLCFTNVYADSFVIRGDEVRQIAPGQTGKIADYNYKLPDDFTGCVIAWNSNNLDSKVGGNYNYLYRLFRKSNLKPFERDISTEIYQAGSTPCNGVEGFNCYFPLQSYGFQPTNGVGYQPYRVVVLSFELLHAPATVCGPKKSTNLVKNKCVNFNFNGLTGTGVLTESNKKFLPFQQFGRDIADTTDAVRDPQTLEILDITPCSFGGVSVITPGTNTSNQVAVLYQGVNCTEVPVAIHADQLTPTWRVYSTGSNVFQTRAGCLIGAEHVNNSYECDIPIGAGICASYQTQTNSPRRARSVASQSIIAYTMSLGAENSVAYSNNSIAIPTNFTISVTTEILPVSMTKTSVDCTMYICGDSTECSNLLLQYGSFCTQLNRALTGIAVEQDKNTQEVFAQVKQIYKTPPIKDFGGFNFSQILPDPSKPSKRSFIEDLLFNKVTLADAGFIKQYGDCLGDIAARDLICAQKFNGLTVLPPLLTDEMIAQYTSALLAGTITSGWTFGAGAALQIPFAMQMAYRFNGIGVTQNVLYENQKLIANQFNSAIGKIQDSLSSTASALGKLQDVVNQNAQALNTLVKQLSSNFGAISSVLNDILSRLDPPEAEVQIDRLITGRLQSLQTYVTQQLIRAAEIRASANLAATKMSECVLGQSKRVDFCGKGYQLMSFPQSAPHGVVFLNVTYVPAQEKNFTTAPAICNDGKAHFPREGVFVSNGTNWFVTQRNFYEPQIITTDNTFVSGNCDVVIGVVNNTVYDPLQPELDS

SEQ ID NO: 2916 - protein, 1147 aa, Artificial Sequence
  SARS-CoV-2/Netherlands/ZuidHolland_9/2020__EPI_ISL_414445 spike protein (1-1147)(K986P_V987P_ H1048Q_H1064N_ H1083N_H1101N)
MFVFLVLLPLVSSQCVNLTTRTQLPPAYTNSFTRGVYYPDKVFRSSVLHSTQDLFLPFFSNVTWFHAIHVSGTNGTKRFDNPVLPFNDGVYFASTEKSNIIRGWIFGTTLDSKTQSLLIVNNATNVVIKVCEFQFCNDPFLGVYYHKNNKSWMESEFRVYSSANNCTFEYVSQPFLMDLEGKQGNFKNLREFVFKNIDGYFKIYSKHTPINLVRDLPQGFSALEPLVDLPIGINITRFQTLLALHRSYLTPGDSSSGWTAGAAAYYVGYLQPRTFLLKYNENGTITDAVDCALDPLSETKCTLKSFTVEKGIYQTSNFRVQPTESIVRFPNITNLCPFGEVFNATRFASVYAWNRKRISNCVADYSVLYNSASFSTFKCYGVSPTKLNDLCFTNVYADSFVIRGDEVRQIAPGQTGKIADYNYKLPDDFTGCVIAWNSNNLDSKVGGNYNYLYRLFRKSNLKPFERDISTEIYQAGSTPCNGVEGFNCYFPLQSYGFQPTNGVGYQPYRVVVLSFELLHAPATVCGPKKSTNLVKNKCVNFNFNGLTGTGVLTESNKKFLPFQQFGRDIADTTDAVRDPQTLEILDITPCSFGGVSVITPGTNTSNQVAVLYQGVNCTEVPVAIHADQLTPTWRVYSTGSNVFQTRAGCLIGAEHVNNSYECDIPIGAGICASYQTQTNSPRRARSVASQSIIAYTMSLGAENSVAYSNNSIAIPTNFTISVTTEILPVSMTKTSVDCTMYICGDSTECSNLLLQYGSFCTQLNRALTGIAVEQDKNTQEVFAQVKQIYKTPPIKDFGGFNFSQILPDPSKPSKRSFIEDLLFNKVTLADAGFIKQYGDCLGDIAARDLICVQKFNGLTVLPPLLTDEMIAQYTSALLAGTITSGWTFGAGAALQIPFAMQMAYRFNGIGVTQNVLYENQKLIANQFNSAIGKIQDSLSSTASALGKLQDVVNQNAQALNTLVKQLSSNFGAISSVLNDILSRLDPPEAEVQIDRLITGRLQSLQTYVTQQLIRAAEIRASANLAATKMSECVLGQSKRVDFCGKGYQLMSFPQSAPHGVVFLNVTYVPAQEKNFTTAPAICNDGKAHFPREGVFVSNGTNWFVTQRNFYEPQIITTDNTFVSGNCDVVIGIVNNTVYDPLQPELDS

SEQ ID NO: 2917 - protein, 1147 aa, Artificial Sequence
  SARS-CoV-2/Finland/FIN03032020A/2020__EPI_ISL_413602 spike protein (1-1147)(K986P_V987P_ H1048Q_H1064N_ H1083N_H1101N)
MFVFLVLLPLVSSQCVNLTTRTQLPPAYTNSFTRGVYYPDKVFRSSVLHSTQDLFLPFFSNVTWFHAIHVSGTNGTKRFDNPVLPFNDGVYFASTEKSNIIRGWIFGTTLDSKTQSLLIVNNATNVVIKVCEFQFCNDPFLGVYYHKNNKSWMESEFRVYSSANNCTFEYVSQPFLMDLEGKQGNFKNLREFVFKNIDGYFKIYSKHTPINLVRDLPQGFSALEPLVDLPIGINITRFQTLLALHRSYLTPGDSSSGWTAGAAAYYVGYLQPRTFLLKYNENGTITDAVDCALDPLSETKCTLKSFTVEKGIYQTSNFRVQPTESIVRFPNITNLCPFGEVFNATRFASVYAWNRKRISNCVADYSVLYNSASFSTFKCYGVSPTKLNDLCFTNVYADSFVIRGDEVRQIAPGQTGKIADYNYKLPDDFTGCVISWNSNNLDSKVGGNYNYLYRLFRKSNLKPFERDISTEIYQAGSTPCNGVEGFNCYFPLQSYGFQPTNGVGYQPYRVVVLSFELLHAPATVCGPKKSTNLVKNKCVNFNFNGLTGTGVLTESNKKFLPFQQFGRDIADTTDAVRDPQTLEILDITPCSFGGVSVITPGTNTSNQVAVLYQGVNCTEVPVAIHADQLTPTWRVYSTGSNVFQTRAGCLIGAEHVNNSYECDIPIGAGICASYQTQTNSPRRARSVASQSIIAYTMSLGAENSVAYSNNSIAIPTNFTISVTTEILPVSMTKTSVDCTMYICGDSTECSNLLLQYGSFCTQLNRALTGIAVEQDKNTQEVFAQVKQIYKTPPIKDFGGFNFSQILPDPSKPSKRSFIEDLLFNKVTLADAGFIKQYGDCLGDIAARDLICAQKFNGLTVLPPLLTDEMIAQYTSALLAGTITSGWTFGAGAALQIPFAMQMAYRFNGIGVTQNVLYENQKLIANQFNSAIGKIQDSLSSTASALGKLQDVVNQNAQALNTLVKQLSSNFGAISSVLNDILSRLDPPEAEVQIDRLITGRLQSLQTYVTQQLIRAAEIRASANLAATKMSECVLGQSKRVDFCGKGYQLMSFPQSAPHGVVFLNVTYVPAQEKNFTTAPAICNDGKAHFPREGVFVSNGTNWFVTQRNFYEPQIITTDNTFVSGNCDVVIGIVNNTVYDPLQPELDS

SEQ ID NO: 2918 - protein, 1147 aa, Artificial Sequence
  SARS-CoV-2/France/GE1977/2020__EPI_ISL_414632 spike protein (1-1147)(K986P_V987P_ H1048Q_H1064N_ H1083N_H1101N)
MFVFLVLLPLVSSQCVNLTTRTQLPPAYTNSFTRGVYYPDKVFRSSVLHSTQDLFLPFFSNVTWFHAIHVSGTNGTKRFDNPVLPFNDGVYFASTEKSNIIRGWIFGTTLDSKTQSLLIVNNATNVVIKVCEFQFCNDPFLGVYYHKNNKSWMESEFRVYSSANNCTFEYVSQPFLMDLEGKQGNFKNLREFVFKNIDGYFKIYSKHTPINLVRDLPQGFSALEPLVDLPIGINITRFQTLLALHRSYLTPGDSSSGWTAGAAAYYVGYLQPRTFLLKYNENGTITDAVDCALDPLSETKCTLKSFTVEKGIYQTSNFRVQPTESIVRFPNITNLCPFGEVFNATRFASVYAWNRKRISNCVADYSVLYNSASFSTFKCYGVSPTKLNDLCFTNVYADSFVIRGDEVRQIAPGQTGKIADYNYKLPDDFTGCVIAWNSNNLDSKVGGNYNYLYRLFRKSNLKPFERDISTEIYQAGSTPCNGVEGFNCYFPLQSYGFQPTNGVGYQPYRVVVLSFELLHAPATVCGPKKSTNLVKNKCVNFNFNGLTGTGVLTESNKKFLPFQQFGRDIADTTDAVRDPQTLEILDITPCSFGGVSVITPGTNTSNQVAVLYQGVNCTEVPVAIHADQLTPTWRVYSTGSNVFQTRAGCLIGAEHVNNSYECDIPIGAGICASYQTQTNSPRRARSVASQSIIAYTMSLGAENSVAYSNNSIAIPTNFTISVTTEILPVSMTKTSVDCTMYICGDSTECSNLLLQYGSFCTQLNRALTGIAVEQDKNTQEVFAQVKQIYKTPPIKDFGGFNFSQILPDPSKPSKRSFIEDLLFNKVTLADAGFIKQYGDCLGDIAARDLICAQKFNGLTVLPPLLTDEMIAQYTSALLAGTITSGWTFGAGAALQIPFAMQMAYRFNGIGVTQNVLYENQKLIANQFNSAIGKIQDSLFSTASALGKLQDVVNQNAQALNTLVKQLSSNFGAISSVLNDILSRLDPPEAEVQIDRLITGRLQSLQTYVTQQLIRAAEIRASANLAATKMSECVLGQSKRVDFCGKGYQLMSFPQSAPHGVVFLNVTYVPAQEKNFTTAPAICNDGKAHFPREGVFVSNGTNWFVTQRNFYEPQIITTDNTFVSGNCDVVIGIVNNTVYDPLQPELDS

SEQ ID NO: 2919 - protein, 1147 aa, Artificial Sequence
  SARS-CoV-2/Finland/FIN-313/2020__EPI_ISL_414641 spike protein (1-1147)(K986P_V987P_ H1048Q_H1064N_ H1083N_H1101N)
MFVFLVLLPLVSSQCVNLTTRTQLPPAYTNSFTRGVYYPDKVFRSSVLHSTQDLFLPFFSNVTWFHAIHVSGTNGTKRFDNPVLPFNDGVYFASTEKSNIIRGWIFGTTLDSKTQSLLIVNNATNVVIKVCEFQFCNDPFLGVYYHKNNKSWMESEFRVYSSANNCTFEYVSQPFLMDLEGKQGNFKNLREFVFKNIDGYFKIYSKHTPINLVRDLPQGFSALEPLVDLPIGINITRFKTLLALHRSYLTPGDSSSGWTAGAAAYYVGYLQPRTFLLKYNENGTITDAVDCALDPLSETKCTLKSFTVEKGIYQTSNFRVQPTESIVRFPNITNLCPFGEVFNATRFASVYAWNRKRISNCVADYSVLYNSASFSTFKCYGVSPTKLNDLCFTNVYADSFVIRGDEVRQIAPGQTGKIADYNYKLPDDFTGCVIAWNSNNLDSKVGGNYNYLYRLFRKSNLKPFERDISTEIYQAGSTPCNGVEGFNCYFPLQSYGFQPTNGVGYQPYRVVVLSFELLHAPATVCGPKKSTNLVKNKCVNFNFNGLTGTGVLTESNKKFLPFQQFGRDIADTTDAVRDPQTLEILDITPCSFGGVSVITPGTNTSNQVAVLYQGVNCTEVPVAIHADQLTPTWRVYSTGSNVFQTRAGCLIGAEHVNNSYECDIPIGAGICASYQTQTNSPRRARSVASQSIIAYTMSLGAENSVAYSNNSIAIPTNFTISVTTEILPVSMTKTSVDCTMYICGDSTECSNLLLQYGSFCTQLNRALTGIAVEQDKNTQEVFAQVKQIYKTPPIKDFGGFNFSQILPDPSKPSKRSFIEDLLFNKVTLADAGFIKQYGDCLGDIAARDLICAQKFNGLTVLPPLLTDEMIAQYTSALLAGTITSGWTFGAGAALQIPFAMQMAYRFNGIGVTQNVLYENQKLIANQFNSAIGKIQDSLSSTASALGKLQDVVNQNAQALNTLVKQLSSNFGAISSVLNDILSRLDPPEAEVQIDRLITGRLQSLQTYVTQQLIRAAEIRASANLAATKMSECVLGQSKRVDFCGKGYQLMSFPQSAPHGVVFLNVTYVPAQEKNFTTAPAICNDGKAHFPREGVFVSNGTNWFVTQRNFYEPQIITTDNTFVSGNCDVVIGIVNNTVYDPLQPELDS

SEQ ID NO: 2920 - protein, 1147 aa, Artificial Sequence
  SARS-CoV-2/Netherlands/ZuidHolland_2/2020__EPI_ISL_414556 spike protein (1-1147)(K986P_V987P_ H1048Q_H1064N_ H1083N_H1101N)
MFVFLVLLPLVSSQCVNLTTRTQLPPAYTNSFTRGVYYPDKVFRSSVLHSTQDLFLPFFSNVTWFHAIHVSGTNGTKRFDNPVLPFNDGVYFASTEKSNIIRGWIFGTTLDSKTQSLLIVNNATNVVIKVCEFQFCNDPFLGVYYHKNNKSWMESEFRVYSSANNCTFEYVSQPFLMDLEGKQGNFKNLREFVFKNIDGYFKIYSKHTPINLVRDLPQGFSALEPLVDLPIGINITRFQTLLALHRSYLTPGDSSSGWTAGAAAYYVGYLQPRTFLLKYNENGTITDAVDCALDPLSETKCTLKSFTVEKGIYQTSNFRVQPTESIVRFPNITNLCPFGEVFNATRFASVYAWNRKRISNCVADYSVLYNSASFSTFKCYGVSPTKLNDLCFTNVYADSFVIRGDEVRQIAPGQTGKIADYNYKLPDDFTGCVIAWNSNNLDSKVGGNYNYLYRLFRKSNLKPFERDISTEIYQAGSTPCNGVEGFNCYFPLQSYGFQPTNGVGYQPYRVVVLSFELLHAPATVCGPKKSTNLVKNKCVNFNFNGLTGTGVLTESNKKFLPFQQFGRDIADTTDAVRDPQTLEILDITPCSFGGVSVITPGTNTSNQVAVLYQGVNCTEVPVAIHADQLTPTWRVYSTGSNVFQTRAGCLIGAEHVNNSYECDIPIGAGICASYQTQTNSPRRARSVASQSIIAYTMSLGAENSVAYSNNSIAIPTNFTISVTTEILPVSMTKTSVDCTMYICGDSTECSNLLLQYGSFCTQLNRALTGIALEQDKNTQEVFAQVKQIYKTPPIKDFGGFNFSQILPDPSKPSKRSFIEDLLFNKVTLADAGFIKQYGDCLGDIAARDLICAQKFNGLTVLPPLLTDEMIAQYTSALLAGTITSGWTFGAGAALQIPFAMQMAYRFNGIGVTQNVLYENQKLIANQFNSAIGKIQDSLSSTASALGKLQDVVNQNAQALNTLVKQLSSNFGAISSVLNDILSRLDPPEAEVQIDRLITGRLQSLQTYVTQQLIRAAEIRASANLAATKMSECVLGQSKRVDFCGKGYQLMSFPQSAPHGVVFLNVTYVPAQEKNFTTAPAICNDGKAHFPREGVFVSNGTNWFVTQRNFYEPQIITTDNTFVSGNCDVVIGIVNNTVYDPLQPELDS

SEQ ID NO: 2921 - protein, 1147 aa, Artificial Sequence
  SARS-CoV-2/USA/WA-UW31/2020__EPI_ISL_414618 spike protein (1-1147)(K986P_V987P_ H1048Q_H1064N_ H1083N_H1101N)
MFVFLVLLPLVSSQCVNLTTRTQLPPAYTNSFTRGVYYPDKVFRSSVLHSTQDLFLPFFSNVTWFHAIHVSGTNGTKRFDNPVLPFNDGVYFASTEKSNIIRGWIFGTTLDSKTQSLLIVNNATNVVIKVCEFQFCNDPFLGVYYHKNNKSWMESEFRVYSSANNCTFEYVSQPFLMDLEGKQGNFKNLREFVFKNIDGYFKIYSKHTPINLVRDLPQGFSALEPLVDLPIGINITRFQTLLALHRSYLTPGDSSSGWTAGAAAYYVGYLQPRTFLLKYNENGTITDAVDCALDPLSETKCTLKSFTVEKGIYQTSNFRVQPTESIVRFPNITNLCPFGEVFNATRFASVYAWNRKRISNCVADYSVLYNSASFSTFKCYGVSPTKLNDLCFTNVYADSFVIRGDEVRQIAPGQTGKIADYNYKLPDDFTGCVIAWNSNNLDSKVGGNYNYLYRLFRKSNLKPFERDISTEIYQAGSTPCNGAEGFNCYFPLQSYGFQPTNGVGYQPYRVVVLSFELLHAPATVCGPKKSTNLVKNKCVNFNFNGLTGTGVLTESNKKFLPFQQFGRDIADTTDAVRDPQTLEILDITPCSFGGVSVITPGTNTSNQVAVLYQDVNCTEVPVAIHADQLTPTWRVYSTGSNVFQTRAGCLIGAEHVNNSYECDIPIGAGICASYQTQTNSPRRARSVASQSIIAYTMSLGAENSVAYSNNSIAIPTNFTISVTTEILPVSMTKTSVDCTMYICGDSTECSNLLLQYGSFCTQLNRALTGIAVEQDKNTQEVFAQVKQIYKTPPIKDFGGFNFSQILPDPSKPSKRSFIEDLLFNKVTLADAGFIKQYGDCLGDIAARDLICAQKFNGLTVLPPLLTDEMIAQYTSALLAGTITSGWTFGAGAALQIPFAMQMAYRFNGIGVTQNVLYENQKLIANQFNSAIGKIQDSLSSTASALGKLQDVVNQNAQALNTLVKQLSSNFGAISSVLNDILSRLDPPEAEVQIDRLITGRLQSLQTYVTQQLIRAAEIRASANLAATKMSECVLGQSKRVDFCGKGYQLMSFPQSAPHGVVFLNVTYVPAQEKNFTTAPAICNDGKAHFPREGVFVSNGTNWFVTQRNFYEPQIITTDNTFVSGNCDVVIGIVNNTVYDPLQPELDS

SEQ ID NO: 2922 - protein, 1147 aa, Artificial Sequence
  SARS-CoV-2/South Korea/SNU01/2020__EPI_ISL_411929 spike protein (1-1147)(K986P_V987P_ H1048Q_H1064N_ H1083N_H1101N)
MFVFLVLLPLVSSQCVNLTTRTQLPPAYTNSFTRGVYYPDKVFRSSVLHSTQDLFLPFFSNVTWFHAIHVSGTNGTKRFDNPVLPFNDGVYFASTEKSNIIRGWIFGTTLDSKTQSLLIVNNATNVVIKVCEFQFCNDPFLGVYYHKNNKSWMESEFRVYSSANNCTFEYVSQPFLMDLEGKQGNFKNLREFVFKNIDGYFKIYSKHTPINLVRDLPQGFWALEPLVDLPIGINITRFQTLLALHRSYLTPGDSSSGWTAGAAAYYVGYLQPRTFLLKYNENGTITDAVDCALDPLSETKCTLKSFTVEKGIYQTSNFRVQPTESIVRFPNITNLCPFGEVFNATRFASVYAWNRKRISNCVADYSVLYNSASFSTFKCYGVSPTKLNDLCFTNVYADSFVIRGDEVRQIAPGQTGKIADYNYKLPDDFTGCVIAWNSNNLDSKVGGNYNYLYRLFRKSNLKPFERDISTEIYQAGSTPCNGVEGFNCYFPLQSYGFQPTNGVGYQPYRVVVLSFELLHAPATVCGPKKSTNLVKNKCVNFNFNGLTGTGVLTESNKKFLPFQQFGRDIADTTDAVRDPQTLEILDITPCSFGGVSVITPGTNTSNQVAVLYQDVNCTEVPVAIHADQLTPTWRVYSTGSNVFQTRAGCLIGAEHVNNSYECDIPIGAGICASYQTQTNSPRRARSVASQSIIAYTMSLGAENSVAYSNNSIAIPTNFTISVTTEILPVSMTKTSVDCTMYICGDSTECSNLLLQYGSFCTQLNRALTGIAVEQDKNTQEVFAQVKQIYKTPPIKDFGGFNFSQILPDPSKPSKRSFIEDLLFNKVTLADAGFIKQYGDCLGDIAARDLICAQKFNGLTVLPPLLTDEMIAQYTSALLAGTITSGWTFGAGAALQIPFAMQMAYRFNGIGVTQNVLYENQKLIANQFNSAIGKIQDSLSSTASALGKLQDVVNQNAQALNTLVKQLSSNFGAISSVLNDILSRLDPPEAEVQIDRLITGRLQSLQTYVTQQLIRAAEIRASANLAATKMSECVLGQSKRVDFCGKGYQLMSFPQSAPHGVVFLNVTYVPAQEKNFTTAPAICNDGKAHFPREGVFVSNGTNWFVTQRNFYEPQIITTDNTFVSGNCDVVIGIVNNTVYDPLQPELDS

SEQ ID NO: 2923 - protein, 1147 aa, Artificial Sequence
  SARS-CoV-2/China/WF0004/2020__EPI_ISL_413694 spike protein (1-1147)(K986P_V987P_ H1048Q_H1064N_ H1083N_H1101N)
MFVFLVLLPLVSSQCVNLTTRTQLPPAYTNSFTRGVYYPDKVFRSSVLHSTQDLFLPFFSNVTWFHAIHVSGTNGTKRFDNPVLPFNDGVYFASTEKSNIIRGWIFGTTLDSKTQSLLIVNNATNVVIKVCEFQFCNDPFLGVYYHKNNKSWTESEFRVYSSANNCTFEYVSQPFLMDLEGKQGNFKNLREFVFKNIDGYFKIYSKHTPINLVRDLPQGFSALEPLVDLPIGINITRFQTLLALHRSYLTPGDSSSGWTAGAAAYYVGYLQPRTFLLKYNENGTITDAVDCALDPLSETKCTLKSFTVEKGIYQTSNFRVQPTESIVRFPNITNLCPFGEVFNATRFASVYAWNRKRISNCVADYSVLYNSASFSTFKCYGVSPTKLNDLCFTNVYADSFVIRGDEVRQIAPGQTGKIADYNYKLPDDFTGCVIAWNSNNLDSKVGGNYNYLYRLFRKSNLKPFERDISTEIYQAGSTPCNGVEGFNCYFPLQSYGFQPTNGVGYQPYRVVVLSFELLHAPATVCGPKKSTNLVKNKCVNFNFNGLTGTGVLTESNKKFLPFQQFGRDIADTTDAVRDPQTLEILDITPCSFGGVSVITPGTNTSNQVAVLYQDVNCTEVPVAIHADQLTPTWRVYSTGSNVFQTRAGCLIGAEHVNNSYECDIPIGAGICASYQTQTNSPRRARSVASQSIIAYTMSLGAENSVAYSNNSIAIPTNFTISVTTEILPVSMTKTSVDCTMYICGDSTECSNLLLQYGSFCTQLNRALTGIAVEQDKNTQEVFAQVKQIYKTPPIKDFGGFNFSQILPDPSKPSKRSFIEDLLFNKVTLADAGFIKQYGDCLGDIAARDLICAQKFNGLTVLPPLLTDEMIAQYTSALLAGTITSGWTFGAGAALQIPFAMQMAYRFNGIGVTQNVLYENQKLIANQFNSAIGKIQDSLSSTASALGKLQDVVNQNAQALNTLVKQLSSNFGAISSVLNDILSRLDPPEAEVQIDRLITGRLQSLQTYVTQQLIRAAEIRASANLAATKMSECVLGQSKRFDFCGKGYQLMSFPQSAPHGVVFLNVTYVPAQEKNFTTAPAICNDGKAHFPREGVFVSNGTNWFVTQRNFYEPQIITTDNTFVSGNCDVVIGIVNNTVYDPLQPELDS

SEQ ID NO: 2924 - protein, 1147 aa, Artificial Sequence
  SARS-CoV-2/China/WF0028/2020__EPI_ISL_413791 spike protein (1-1147)(K986P_V987P_ H1048Q_H1064N_ H1083N_H1101N)
MFVFLVLLPLVSSQCVNLTTRTQLPPAYTNSFTRGVYYPDKVFRSSVLHSTQDLFLPFFSNVTWFHAIHVSGTNGTKRFDNPVLPFNDGVYFASTEKSNIIRGWIFGTTLDSKTQSLLIVNNATNVVIKVCEFQFCNDPFLGVYYHKNNKSWMESEFRVYSSANNCTFEYVSQPFLMDLEGKQGNFKNLREFVFKNIDGYFKIYSKHTPINLVRDLPQGFSALEPLVDLPIGINITRFQTLLALHRSYLTPGDSSSGWTAGAAAYYVGYLQPRTFLLKYNENGTITDAVDCALDPLSETKCTLKSFTVEKGIYQTSNFRVQPTESIVRFPNITNLCPFGEVFNATRFASVYAWNRKRISNCVADYSVLYNSASFSTFKCYGVSPTKLNDLCFTNVYADSFVIRGDEVRQIAPGQTGKIADYNYKLPDDFTGCVIAWNSNNLDSKVGGNYNYLYRLFRKSNLKPFERDISTEIYQAGSTPCNGVEGFNCYFPLQSYGFQPTNGVGYQPYRVVVLSFELLHAPATVCGPKKSTNLVKNKCVNFNFNGLTGTGVLTESNKKFLPFQQFGRDIADTTDAVRDPQTLEILDITPCSFGGVSVITPGTNTSNQVAVLYQDVNCTEVPVAIHADQLTPTWRVYSTGSNVFQTRAGCLIGAEHVNNSYECDIPIGAGICASYQTQTNSPRRARSVASQSIIAYTMSLGAENSVAYSNNSIAIPTNFTISVTTEILPVSMTKTSVDCTMYICGDSTECSNLLLQYGSFCTQLNRALTGIAVEQDKNTQEVFAQVKQIYKTPPIKDFGGFNFSQILPDPSKPSKRSFIEDLLFNKVTLADAGFIKQYGDCLGDIAARDLICAQKFNGLTVLPPLLTDEMIAQYTSALLAGTITSGWTFGAGAALQIPFAMQMAYRFNGIGVTQNVLYENQKLIANQFNSAIGKIQDSLSSTASALGKLQDVVNQNAQALNTLVKQLSSNFGAISSVLNDILSRLDPPEAEVQIDRLITGRLQSLQTYVTQQLIRAAEIRASANLAATKMSECVLGQSKRVDFCGKGYQLMSFPQSAPHGVVFLNVTYVPAQEKNFTTAPAICNDGKAHFPREGVFVSNGTNWFVTQRNFYEPQIITTDNTFVSGNCDVVIGIVNNTVYDPLQPELES

SEQ ID NO: 2925 - protein, 1147 aa, Artificial Sequence
  SARS-CoV-2/2019-nCoV/USA-CruiseA-18/2020__MT159716.1 spike protein (1-1147)(K986P_V987P_ H1048Q_H1064N_ H1083N_H1101N)
MFVFLVLLPLVSSQCVNLTTRTQLPPAYTNSFTRGVYYPDKVFRSSVLHSTQDLFLPFFSNVTWFHAIHVSGTNGTKRFDNPVLPFNDGVYFASTEKSNIIRGWIFGTTLDSKTQSLLIVNNATNVVIKVCEFQFCNDPFLGVYYHKNNKSWMESELRVYSSANNCTFEYVSQPFLMDLEGKQGNFKNLREFVFKNIDGYFKIYSKHTPINLVRDLPQGFSALEPLVDLPIGINITRFQTLLALHRSYLTPGDSSSGWTAGAAAYYVGYLQPRTFLLKYNENGTITDAVDCALDPLSETKCTLKSFTVEKGIYQTSNFRVQPTESIVRFPNITNLCPFGEVFNATRFASVYAWNRKRISNCVADYSVLYNSASFSTFKCYGVSPTKLNDLCFTNVYADSFVIRGDEVRQIAPGQTGKIADYNYKLPDDFTGCVIAWNSNNLDSKVGGNYNYLYRLFRKSNLKPFERDISTEIYQAGSTPCNGVEGFNCYFPLQSYGFQPTNGVGYQPYRVVVLSFELLHAPATVCGPKKSTNLVKNKCVNFNFNGLTGTGVLTESNKKFLPFQQFGRDIADTTDAVRDPQTLEILDITPCSFGGVSVITPGTNTSNQVAVLYQDVNCTEVPVAIHADQLTPTWRVYSTGSNVFQTRAGCLIGAEHVNNSYECDIPIGAGICASYQTQTNSPRRARSVASQSIIAYTMSLGAENSVAYSNNSIAIPTNFTISVTTEILPVSMTKTSVDCTMYICGDSTECSNLLLQYGSFCTQLNRALTGIAVEQDKNTQEVFAQVKQIYKTPPIKDFGGFNFSQILPDPSKPSKRSFIEDLLFNKVTLADAGFIKQYGDCLGDIAARDLICAQKFNGLTVLPPLLTDEMIAQYTSALLAGTITSGWTFGAGAALQIPFAMQMAYRFNGIGVTQNVLYENQKLIANQFNSAIGKIQDSLSSTASALGKLQDVVNQNAQALNTLVKQLSSNFGAISSVLNDILSRLDPPEAEVQIDRLITGRLQSLQTYVTQQLIRAAEIRASANLAATKMSECVLGQSKRVDFCGKGYQLMSFPQSAPHGVVFLNVTYVPAQEKNFTTAPAICNDGKAHFPREGVFVSNGTNWFVTQRNFYEPQIITTDNTFVSGNCDVVIGIVNNTVYDPLQPELDS

SEQ ID NO: 2926 - protein, 1147 aa, Artificial Sequence
  SARS-CoV-2/SARS-CoV-2/Yunnan-01/human/2020/CHN__MT049951.1 spike protein (1-1147)(K986P_V987P_ H1048Q_H1064N_ H1083N_H1101N)
MFVFLVLLPLVSSQCVNLTTRTQLPPANTNSFTRGVYYPDKVFRSSVLHSTQDLFLPFFSNVTWFHAIHVSGTNGTKRFDNPVLPFNDGVYFASTEKSNIIRGWIFGTTLDSKTQSLLIVNNATNVVIKVCEFQFCNDPFLGVYYHKNNKSWMESEFRVYSSANNCTFEYVSQPFLMDLEGKQGNFKNLREFVFKNIDGYFKIYSKHTPINLVRDLPQGFSALEPLVDLPIGINITRFQTLLALHRSYLTPGDSSSGWTAGAAAYYVGYLQPRTFLLKYNENGTITDAVDCALDPLSETKCTLKSFTVEKGIYQTSNFRVQPTESIVRFPNITNLCPFGEVFNATRFASVYAWNRKRISNCVADYSVLYNSASFSTFKCYGVSPTKLNDLCFTNVYADSFVIRGDEVRQIAPGQTGKIADYNYKLPDDFTGCVIAWNSNNLDSKVGGNYNYLYRLFRKSNLKPFERDISTEIYQAGSTPCNGVEGFNCYFPLQSYGFQPTNGVGYQPYRVVVLSFELLHAPATVCGPKKSTNLVKNKCVNFNFNGLTGTGVLTESNKKFLPFQQFGRDIADTTDAVRDPQTLEILDITPCSFGGVSVITPGTNTSNQVAVLYQDVNCTEVPVAIHADQLTPTWRVYSTGSNVFQTRAGCLIGAEHVNNSYECDIPIGAGICASYQTQTNSPRRARSVASQSIIAYTMSLGAENSVAYSNNSIAIPTNFTISVTTEILPVSMTKTSVDCTMYICGDSTECSNLLLQYGSFCTQLNRALTGIAVEQDKNTQEVFAQVKQIYKTPPIKDFGGFNFSQILPDPSKPSKRSFIEDLLFNKVTLADAGFIKQYGDCLGDIAARDLICAQKFNGLTVLPPLLTDEMIAQYTSALLAGTITSGWTFGAGAALQIPFAMQMAYRFNGIGVTQNVLYENQKLIANQFNSAIGKIQDSLSSTASALGKLQDVVNQNAQALNTLVKQLSSNFGAISSVLNDILSRLDPPEAEVQIDRLITGRLQSLQTYVTQQLIRAAEIRASANLAATKMSECVLGQSKRVDFCGKGYQLMSFPQSAPHGVVFLNVTYVPAQEKNFTTAPAICNDGKAHFPREGVFVSNGTNWFVTQRNFYEPQIITTDNTFVSGNCDVVIGIVNNTVYDPLQPELDS

SEQ ID NO: 2927 - protein, 1147 aa, Artificial Sequence
  SARS-CoV-2/USA/WA-UW292/2020__EPI_ISL_418077 spike protein (1-1147)(K986P_V987P_ H1048Q_H1064N_ H1083N_H1101N)
MFVFLVLLPLVSSQCVNLTTRTQLPPAYTNSFTRGVYYPDKVFRSSVLHSTQDLFLPFFSNVTWFHAIHVSGTNGTKRFDNPVLPFNDGVYFASTEKSNIIRGWIFGTTLDSKTQSLLIVNNATNVVIKVCEFQFCNDPFLGVYYHKNNKSWMESEFRVYSSANNCTFEYVSQPFLMDLEGKQGNFKNLREFVFKNIDGYFKIYSKHTPINLVRDLPQGFSALEPLVDLPIGINITRFQTLLALHRSYLTPGDSSSGWTAGAAAYYVGYLQPRTFLLKYNENGTITDAVDCALDPLSETKCTLKSFTVEKGIYQTSNFRVQPTESIVRFPNITNLCPFGEVFNATRFASVYAWNRKRISNCVADYSVLYNSASFSTFKCYGVSPTKLNDLCFTNVYADSFVIRGDEVRQIAPGQTGKIADYNYKLPDDFTGCVIAWNSNNLDSKVGGNYNYLYRLFRKSNLKPFERDISTEIYQASSTPCNGVEGFNCYFPLQSYGFQPTNGVGYQPYRVVVLSFELLHAPATVCGPKKSTNLVKNKCVNFNFNGLTGTGVLTESNKKFLPFQQFGRDIADTTDAVRDPQTLEILDITPCSFGGVSVITPGTNTSNQVAVLYQDVNCTEVPVAIHADQLTPTWRVYSTGSNVFQTRAGCLIGAEHVNNSYECDIPIGAGICASYQTQTNSPRRARSVASQSIIAYTMSLGAENSVAYSNNSIAIPTNFTISVTTEILPVSMTKTSVDCTMYICGDSTECSNLLLQYGSFCTQLNRALTGIAVEQDKNTQEVFAQVKQIYKTPPIKDFGGFNFSQILPDPSKPSKRSFIEDLLFNKVTLADAGFIKQYGDCLGDIAARDLICAQKFNGLTVLPPLLTDEMIAQYTSALLAGTITSGWTFGAGAALQIPFAMQMAYRFNGIGVTQNVLYENQKLIANQFNSAIGKIQDSLSSTASALGKLQDVVNQNAQALNTLVKQLSSNFGAISSVLNDILSRLDPPEAEVQIDRLITGRLQSLQTYVTQQLIRAAEIRASANLAATKMSECVLGQSKRVDFCGKGYQLMSFPQSAPHGVVFLNVTYVPAQEKNFTTAPAICNDGKAHFPREGVFVSNGTNWFVTQRNFYEPQIITTDNTFVSGNCDVVIGIVNNTVYDPLQPELDS

SEQ ID NO: 2928 - protein, 1147 aa, Artificial Sequence
  SARS-CoV-2/Iceland/192/2020__EPI_ISL_417819 spike protein (1-1147)(K986P_V987P_ H1048Q_H1064N_ H1083N_H1101N)
MFVFFVLLPLVSSQCVNLTTRTQLPPAYTNSFTRGVYYPDKVFRSSVLHSTQDLFLPFFSNVTWFHAIHVSGTNGTKRFDNPVLPFNDGVYFASTEKSNIIRGWIFGTTLDSKTQSLLIVNNATNVVIKVCEFQFCNDPFLGVYYHKNNKSWMESEFRVYSSANNCTFEYVSQPFLMDLEGKQGNFKNLREFVFKNIDGYFKIYSKHTPINLVRDLPQGFSALEPLVDLPIGINITRFQTLLALHRSYLTPGDSSSGWTAGAAAYYVGYLQPRTFLLKYNENGTITDAVDCALDPLSETKCTLKSFTVEKGIYQTSNFRVQPTESIVRFPNITNLCPFGEVFNATRFASVYAWNRKRISNCVADYSVLYNSASFSTFKCYGVSPTKLNDLCFTNVYADSFVIRGDEVRQIAPGQTGKIADYNYKLPDDFTGCVIAWNSNNLDSKVGGNYNYLYRLFRKSNLKPFERDISTEIYQAGSTPCNGVEGFNCYFPLQSYGFQPTNGVGYQPYRVVVLSFELLHAPATVCGPKKSTNLVKNKCVNFNFNGLTGTGVLTESNKKFLPFQQFGRDIADTTDAVRDPQTLEILDITPCSFGGVSVITPGTNTSNQVAVLYQGVNCTEVPVAIHADQLTPTWRVYSTGSNVFQTRAGCLIGAEHVNNSYECDIPIGAGICASYQTQTNSPRRARSVASQSIIAYTMSLGAENSVAYSNNSIAIPTNFTISVTTEILPVSMTKTSVDCTMYICGDSTECSNLLLQYGSFCTQLNRALTGIAVEQDKNTQEVFAQVKQIYKTPPIKDFGGFNFSQILPDPSKPSKRSFIEDLLFNKVTLADAGFIKQYGDCLGDIAARDLICAQKFNGLTVLPPLLTDEMIAQYTSALLAGTITSGWTFGAGAALQIPFAMQMAYRFNGIGVTQNVLYENQKLIANQFNSAIGKIQDSLSSTASALGKLQDVVNQNAQALNTLVKQLSSNFGAISSVLNDILSRLDPPEAEVQIDRLITGRLQSLQTYVTQQLIRAAEIRASANLAATKMSECVLGQSKRVDFCGKGYQLMSFPQSAPHGVVFLNVTYVPAQEKNFTTAPAICNDGKAHFPREGVFVSNGTNWFVTQRNFYEPQIITTDNTFVSGNCDVVIGIVNNTVYDPLQPELDS

SEQ ID NO: 2929 - protein, 1147 aa, Artificial Sequence
  SARS-CoV-2/Belgium/ULG-6939/2020__EPI_ISL_417020 spike protein (1-1147)(K986P_V987P_ H1048Q_H1064N_ H1083N_H1101N)
MFVFLVLLPLVSSQCVNLTTRTQLPPAYTNSFTRGVYYPDKVFRSSVLHSTQDLFLPFFSNVTWFHAIHVSGTNGTKRFDNPVLPFNDGVYFASTEKSNIIRGWIFGTTLDSKTQSLLIVNNATNVVIKVCEFQFCNDPFLGVYYHKNNKSWMESEFRVYSSANNCTFEYVSQPFLMDLEGKQGNFKNLREFVFKNIDGYFKIYSKHTPINLVRDLPQGFSALEPLVDLPIGINITRFQTLLALHRSYLTPGDSSSGWTAGAAAYYVGYLQPRTFLLKYNENGTITDAVDCALDPLSETKCTLKSFTVEKGIYQTSNFRVQPTESIVRFPNITNLCPFGEVFNATRFASVYAWNRKRISNCVADYSVLYNSASFSTFKCYGVSPTKLNDLCFTNVYADSFVIRGDEVRQIAPGQTGKIADYNYKLPDDFTGCVIAWNSNNLDSKVGGNYNYLYRLFRKSNLKPFERDISTEIYQAGSTPCNGVEGFNCYFPLQSYGFQPTNGVGYQPYRVVVLSFELLHAPATVCGPKKSTNLVKNKCVNFNFNGLTGTGVLTESNKKFLPFQQFGRDIADTTDAVRDPQTLEILDITPCSFGGVSVITPGTNTSNQVAVLYQGVNCTEVPVAIHADQLTPTWRVYSTGSNVFQTRAGCLIGAEHVNNSYECDIPIGAGICASYQTQTNSPRRARSVASQSIIAYTMSLGAENSVVYSNNSIAIPTNFTISVTTEILPVSMTKTSVDCTMYICGDSTECSNLLLQYGSFCTQLNRALTGIAVEQDKNTQEVFAQVKQIYKTPPIKDFGGFNFSQILPDPSKPSKRSFIEDLLFNKVTLADAGFIKQYGDCLGDIAARDLICAQKFNGLTVLPPLLTDEMIAQYTSALLAGTITSGWTFGAGAALQIPFAMQMAYRFNGIGVTQNVLYENQKLIANQFNSAIGKIQDSLSSTASALGKLQDVVNQNAQALNTLVKQLSSNFGAISSVLNDILSRLDPPEAEVQIDRLITGRLQSLQTYVTQQLIRAAEIRASANLAATKMSECVLGQSKRVDFCGKGYQLMSFPQSAPHGVVFLNVTYVPAQEKNFTTAPAICNDGKAHFPREGVFVSNGTNWFVTQRNFYEPQIITTDNTFVSGNCDVVIGIVNNTVYDPLQPELDS

SEQ ID NO: 2930 - protein, 1147 aa, Artificial Sequence
  SARS-CoV-2/France/HF2496/2020__EPI_ISL_418231 spike protein (1-1147)(K986P_V987P_ H1048Q_H1064N_ H1083N_H1101N)
MFVFLVLLPLVSSQCVNLTTRTQLPPAYTNSFTRGVYYPDKVFRSSVLHSTQDLFLPFFSNVTWFHAIHVSGTNGTKRFDNPVLPFNDGVYFASTEKSNIIRGWIFGTTLDSKTQSLLIVNNATNVVIKVCEFQFCNDPFLGVYYHKNNKSWMESEFRVYSSANNCTFEYVSQPFLMDLEGKQGNFKNLREFVFKNIDGYFKIYSKHTPINLVRDLPQGFSALEPLVDLPIGINITRFQTLLALHRSYLTPGDSSSGWTAGAAAYYVGYLQPRTFLLKYNENGTITDAVDCALDPLSETKCTLKSFTVEKGIYQTSNFRVQPTESIVRFPNITNLCPFGEVFNATRFASVYAWNRKRISNCVADYSVLYNSASFSTFKCYGVSPTKLNDLCFTNVYADSFVIRGDEVRQIAPGQTGKIADYNYKLPDDFTGCVIAWNSNNLDSKVGGNYNYLYRLFRKSNLKPFERDISTEIYQAGSTPCNGVEGFNCYFPLQSYGFQPTNGVGYQPYRVVVLSFELLHAPATVCGPKKSTNLVKNKCVNFNFNGLTGTGVLTESNKKFLPFQQFGRDIADTTDAVRDPQTLEILDITPCSFGGVSVITPGTNTSNQVAVLYQGVNCTEVPVAIHADQLTPTWRVYSTGSNVFQTRAGCLIGAEHVNNSYECDIPIGAGICASYQTQTNSPRRARSVASQSIIAYTMSLGAENSVAYSNNSIAIPTNFTISVTTEILPVSMTKTSVDCTMYICGDSTECSNLLLQYGSFCTQLNRALTGIAVEQDKNTQEVFAQVKQIYKTPPIKDFGGFNFSQILPDPSKPSKRSFIEDLLFNKVTLADAGFIKQYGDCLGDIVARDLICAQKFNGLTVLPPLLTDEMIAQYTSALLAGTITSGWTFGAGAALQIPFAMQMAYRFNGIGVTQNVLYENQKLIANQFNSAIGKIQDSLSSTASALGKLQDVVNQNAQALNTLVKQLSSNFGAISSVLNDILSRLDPPEAEVQIDRLITGRLQSLQTYVTQQLIRAAEIRASANLAATKMSECVLGQSKRVDFCGKGYQLMSFPQSAPHGVVFLNVTYVPAQEKNFTTAPAICNDGKAHFPREGVFVSNGTNWFVTQRNFYEPQIITTDNTFVSGNCDVVIGIVNNTVYDPLQPELDS

SEQ ID NO: 2931 - protein, 1147 aa, Artificial Sequence
  SARS-CoV-2/USA/WA-UW291/2020__EPI_ISL_418076 spike protein (1-1147)(K986P_V987P_ H1048Q_H1064N_ H1083N_H1101N)
MFVFLVLLPLVSSQCVNLTTRTQLPPAYTNSFTRGVYYPDKVFRSSVLHSTQDLFLPFFSNVTWFHAIHVSGTNGTKRFDNPVLPFNDGVYFASTEKSNIIRGWIFGTTLDSKTQSLLIVNNATNVVIKVCEFQFCNDPFLGVYYHKNNKSWMESEFRVYSSANNCTFEYVSQPFLMDLEGKQGNFKNLREFVFKNIDGYFKIYSKHTPINLVRDLPQGFSALEPLVDLPIGINITRFQTLLALHRSYLTPGDSSSGWTAGAAAYYVGYLQPRTFLLKYNENGTITDAVDCALDPLSETKCTLKSFTVEKGIYQTSNFRVQPTESIVRFPNITNLCPFGEVFNATRFASVYAWNRKRISNCVADYSVLYNSASFSTFKCYGVSPTKLNDLCFTNVYADSFVIRGDEVRQIAPGQTGKIADYNYKLPDDFTGCVIAWNSNNLDSKVGGNYNYLYRLFRKSNLKPFERDISTEIYQAGSTPCNGVEGFNCYFPLQSYGFQPTNGVGYQPYRVVVLSFELLHAPATVCGPKKSTNLVKNKCVNFNFNGLTGTGVLTESNKKFLPFQQFGRDIADTTDAVRDPQTLEILDITPCSFGGVSVITPGTNTSNQVAVLYQGVNCTEVPVAIHADQLTPTWRVYSTGSNVFQTRAGCLIGAEHVNNSYECDIPIGAGICASYQTQTNSPRRARSVASQSIIAYTMSLGAENSVAYSNNSIAIPTNFTISVTTEILPVSMTKTSVDCTMYICGDSTECSNLLLQYGSFCTQLNRALTGIAVEQDKNTQEVFAQVKQIYKTPPIKDFGGFNFSQILPDPSKPSKRSFIEDLLFNKVTLADAGFIKQYGDCLGDIAARDLICAQKFNGLTVLPPLLTDEMIAQYTSALLAGTITSGWTFGAGAALQIPFAMQMAYRFNGIGVTQNVLYENQKLIANQFNSAIGKIQYSLSSTASALGKLQDVVNQNAQALNTLVKQLSSNFGAISSVLNDILSRLDPPEAEVQIDRLITGRLQSLQTYVTQQLIRAAEIRASANLAATKMSECVLGQSKRVDFCGKGYQLMSFPQSAPHGVVFLNVTYVPAQEKNFTTAPAICNDGKAHFPREGVFVSNGTNWFVTQRNFYEPQIITTDNTFVSGNCDVVIGIVNNTVYDPLQPELDS

SEQ ID NO: 2932 - protein, 1147 aa, Artificial Sequence; identical to SEQ ID NO: 2895
  SARS-CoV-2/Portugal/PT0034/2020__EPI_ISL_418019 spike protein (1-1147)(K986P_V987P_ H1048Q_H1064N_ H1083N_H1101N)

SEQ ID NO: 2933 - protein, 1147 aa, Artificial Sequence; identical to SEQ ID NO: 2887
  SARS-CoV-2/Iceland/202/2020__EPI_ISL_417750 spike protein (1-1147)(K986P_V987P_ H1048Q_H1064N_ H1083N_H1101N)

SEQ ID NO: 2934 - protein, 1147 aa, Artificial Sequence
  SARS-CoV-2/USA/WA-UW261/2020__EPI_ISL_418046 spike protein (1-1147)(K986P_V987P_ H1048Q_H1064N_ H1083N_H1101N)
MFVFLVLLPLVSSQCVNLTTRTQLPPAYTNSFTRGVYYPDKVFRSSVLHSTQDLFLPFFSNVTWFHAIHVSGTNGTKRFDNPVLPFNDGVYFASTEKSNIIRGWIFGTTLDSKTQSLLIVNNATNVVIKVCEFQFCNDPFLGVYYHKNNKSWMESEFRVYSSANNCTFEYVSQPFLMDLEGKQGNFKNLREFVFKNIDGYFKIYSKHTPINLVRDLPQGFSALEPLVDLPIGINITRFQTLLALHRSYLTPGDSSSGWTAGAAAYYVGYLQPRTFLLKYNENGTITDAVDCALDPLSETKCTLKSFTVEKGIYQTSNFRVQPTESIVRFPNITNLCPFGEVFNATRFTSVYAWNRKRISNCVADYSVLYNSASFSTFKCYGVSPTKLNDLCFTNVYADSFVIRGDEVRQIAPGQTGKIADYNYKLPDDFTGCVIAWNSNNLDSKVGGNYNYLYRLFRKSNLKPFERDISTEIYQAGSTPCNGVEGFNCYFPLQSYGFQPTNGVGYQPYRVVVLSFELLHAPATVCGPKKSTNLVKNKCVNFNFNGLTGTGVLTESNKKFLPFQQFGRDIADTTDAVRDPQTLEILDITPCSFGGVSVITPGTNTSNQVAVLYQDVNCTEVPVAIHADQLTPTWRVYSTGSNVFQTRAGCLIGAEHVNNSYECDIPIGAGICASYQTQTNSPRRARSVASQSIIAYTMSLGAENSVAYSNNSIAIPTNFTISVTTEILPVSMTKTSVDCTMYICGDSTECSNLLLQYGSFCTQLNRALTGIAVEQDKNTQEVFAQVKQIYKTPPIKDFGGFNFSQILPDPSKPSKRSFIEDLLFNKVTLADAGFIKQYGDCLGDIAARDLICAQKFNGLTVLPPLLTDEMIAQYTSALLAGTITSGWTFGAGAALQIPFAMQMAYRFNGIGVTQNVLYENQKLIANQFNSAIGKIQDSLSSTASALGKLQDVVNQNAQALNTLVKQLSSNFGAISSVLNDILSRLDPPEAEVQIDRLITGRLQSLQTYVTQQLIRAAEIRASANLAATKMSECVLGQSKRVDFCGKGYQLMSFPQSAPHGVVFLNVTYVPAQEKNFTTAPAICNDGKAHFPREGVFVSNGTNWFVTQRNFYEPQIITTDNTFVSGNCDVVIGIVNNTVYDPLQPELDS

SEQ ID NO: 2935 - protein, 1147 aa, Artificial Sequence
  SARS-CoV-2/Portugal/PT0035/2020__EPI_ISL_418020 spike protein (1-1147)(K986P_V987P_ H1048Q_H1064N_ H1083N_H1101N)
MFVFLVLLPLVSSQCVNLTTRTQLPPAYTNSFTRGVYYPDKVFRSSVLHSTQDLFLPFFSNVTWFHAIHVSGTNGTKRFDNPVLPFNDGVYFASTEKSNIIRGWIFGTTLDSKTQSLLIVNNATNVVIKVCEFQFCNDPFLGVYYHKNNKSWMESEFRVYSSANNCTFEYVSQPFLMDLEGKQGNFKNLREFVFKNIDGYFKIYSKHTPINLVRDLPQGFSALEPLVDLPIGINITRFQTLLALHRSYLTPGDSSSGWTAGAAAYYVGYLQPRTFLLKYNENGTITDAVDCALDPLSETKCTLKSFTVEKGIYQTSNFRVQPTESIVRFPNITNLCPFGEVFNATRFASVYAWNRKRISNCVADYSVLYNSASFSTFKCYGVSPTKLNDLCFTNVYADSFVIRGDEVRQIAPGQTGKIADYNYKLPDDFTGCVIAWNSNNLDSKVGGNYNYLYRLFRKSNLKPFERDISTEIYQAGSTPCNGVEGFNCYFPLQSYGFQPTNGVGYQPYRVVVLSFELLHAPATVCGPKKSTNLVKNKCVNFNFNGLTGTGVLTESNKKFLPFQQFGRDIADTTDAVRDPQTLEILDITPCSFGGVSVITPGTNTSNQVAVLYQDVNCTEVPVAIHADQLTPTWRVYSTGSNVFQTRAGCLIGAEHVNNSYECDIPIGAGICASYQTQTNSPRRARSVASQSIIAYTMSLGAENSVAYSNNSIAIPTNFTISVTTEILPVSMTKTSVDCTMYICGDSTECSNLLLQYGSFCTQLNRALTGIAVEQDKNTQEVFAQVKQIYKTPPIKDFGGFNFSQILPDPSKPSKRSFIEDLLFNKVTLADAGFIKQYGDCLGDISARDLICAQKFNGLTVLPPLLTDEMIAQYTSALLAGTITSGWTFGAGAALQIPFAMQMAYRFNGIGVTQNVLYENQKLIANQFNSAIGKIQDSLSSTASALGKLQDVVNQNAQALNTLVKQLSSNFGAISSVLNDILSRLDPPEAEVQIDRLITGRLQSLQTYVTQQLIRAAEIRASANLAATKMSECVLGQSKRVDFCGKGYQLMSFPQSAPHGVVFLNVTYVPAQEKNFTTAPAICNDGKAHFPREGVFVSNGTNWFVTQRNFYEPQIITTDNTFVSGNCDVVIGIVNNTVYDPLQPELDS

SEQ ID NO: 2936 - protein, 1147 aa, Artificial Sequence
  SARS-CoV-2/USA/NY-NYUMC7/2020__EPI_ISL_418192 spike protein (1-1147)(K986P_V987P_ H1048Q_H1064N_ H1083N_H1101N)
MFVFLVLLPLVSSQCVNLTTRTQLPPAYTNSFTRGVYYPDKVFRSSVLHSTQDLFLPFFSNVTWFHAIHVSGTNGTKRFDNPVLPFNDGVYFASTEKSNIIRGWIFGTTLDSKTQSLLIVNNATNVVIKVCEFQFCNDPFLGVYHHKNNKSWMESEFRVYSSANNCTFEYVSQPFLMDLEGKQGNFKNLREFVFKNIDGYFKIYSKHTPINLVRDLPQGFSALEPLVDLPIGINITRFQTLLALHRSYLTPGDSSSGWTAGAAAYYVGYLQPRTFLLKYNENGTITDAVDCALDPLSETKCTLKSFTVEKGIYQTSNFRVQPTESIVRFPNITNLCPFGEVFNATRFASVYAWNRKRISNCVADYSVLYNSASFSTFKCYGVSPTKLNDLCFTNVYADSFVIRGDEVRQIAPGQTGKIADYNYKLPDDFTGCVIAWNSNNLDSKVGGNYNYLYRLFRKSNLKPFERDISTEIYQAGSTPCNGVEGFNCYFPLQSYGFQPTNGVGYQPYRVVVLSFELLHAPATVCGPKKSTNLVKNKCVNFNFNGLTGTGVLTESNKKFLPFQQFGRDIADTTDAVRDPQTLEILDITPCSFGGVSVITPGTNTSNQVAVLYQGVNCTEVPVAIHADQLTPTWRVYSTGSNVFQTRAGCLIGAEHVNNSYECDIPIGAGICASYQTQTNSPRRARSVASQSIIAYTMSLGAENSVAYSNNSIAIPTNFTISVTTEILPVSMTKTSVDCTMYICGDSTECSNLLLQYGSFCTQLNRALTGIAVEQDKNTQEVFAQVKQIYKTPPIKDFGGFNFSQILPDPSKPSKRSFIEDLLFNKVTLADAGFIKQYGDCLGDIAARDLICAQKFNGLTVLPPLLTDEMIAQYTSALLAGTITSGWTFGAGAALQIPFAMQMAYRFNGIGVTQNVLYENQKLIANQFNSAIGKIQDSLSSTASALGKLQDVVNQNAQALNTLVKQLSSNFGAISSVLNDILSRLDPPEAEVQIDRLITGRLQSLQTYVTQQLIRAAEIRASANLAATKMSECVLGQSKRVDFCGKGYQLMSFPQSAPHGVVFLNVTYVPAQEKNFTTAPAICNDGKAHFPREGVFVSNGTNWFVTQRNFYEPQIITTDNTFVSGNCDVVIGIVNNTVYDPLQPELDS

SEQ ID NO: 2937 - protein, 1147 aa, Artificial Sequence
  SARS-CoV-2/Iceland/189/2020__EPI_ISL_417709 spike protein (1-1147)(K986P_V987P_ H1048Q_H1064N_ H1083N_H1101N)
MFVFLVLLPLVSSQCVNLTTRTQLPPAYTNSFTRGVYYPDKVFRSSVLHSTQDLFLPFFSNVTWFHAIHVSGTNGTKRFDNPVLPFNDGVYFASTEKSNIIRGWIFGTTLDSKTQSLLIVNNATNVVIKVCEFQFCNDPFLGVYYHKNNKSWMESEFRVYSSANNCTFEYVSQPFLMDLEGKQGNFKNLREFVFKNIDGYFKIYSKHTPINLVRDLPQGFSALEPLVDLPIGINITRFQTLLALHRSYLTPGDSSSGWTAGAAAYYVGYLQPRTFLLKYNENGTITDAVDCALDPLSETKCTLKSFTVEKGIYQTSNFRVQPTESIVRFPNITNLCPFGEVFNATRFASVYAWNRKRISNCVADYSVLYNSASFSTFKCYGVSPTKLNDLCFTNVYADSFVIRGDEVRQIAPGQTGKIADYNYKLPDDFTGCVIAWNSNNLDSKVGGNYNYLYRLFRKSNLKPFERDISTEIYQAGSTPCNGVEGFNCYFPLQSYGFQPTNGVGYQPYRVVVLSFELLHAPATVCGPKKSTNLVKNKCVNFNFNGLTGTGVLTESNKKFLPFQQFGRDIADTTDAVRDPQTLEILDITPCSFGGVSVITPGTNTSNQVAVLYQGVNCTEVPVAIHADQLTPTWRVYSTGSNVFQTRAGCLIGAEHVNNSYECDIPIGAGICASYQTQTNSPRRARSVASQSIIAYTMSLGAENSVAYSNNSIAIPTNFTISVTTEILPVSMTKTSVDCTMYICGDSTECSNLLLQYGSFCTQLNRALTGIAVEQDKNTQEVFAQVKQIYKTPPIKDFGGFNFSQILPDPSKPSKRSFIEDLLFNKVTLADAGFTKQYGDCLGDIAARDLICAQKFNGLTVLPPLLTDEMIAQYTSALLAGTITSGWTFGAGAALQIPFAMQMAYRFNGIGVTQNVLYENQKLIANQFNSAIGKIQDSLSSTASALGKLQDVVNQNAQALNTLVKQLSSNFGAISSVLNDILSRLDPPEAEVQIDRLITGRLQSLQTYVTQQLIRAAEIRASANLAATKMSECVLGQSKRVDFCGKGYQLMSFPQSAPHGVVFLNVTYVPAQEKNFTTAPAICNDGKAHFPREGVFVSNGTNWFVTQRNFYEPQIITTDNTFVSGNCDVVIGIVNNTVYDPLQPELDS

SEQ ID NO: 2938 - protein, 1147 aa, Artificial Sequence
  SARS-CoV-2/Australia/NSW56/2020__EPI_ISL_417408 spike protein (1-1147)(K986P_V987P_ H1048Q_H1064N_ H1083N_H1101N)
MFVFLVLLPLVSSQCVNLTTRTQLPPAYTNSFTRGVYYPDKVFRSSVLHSTQDLFLPFFSNVTWFHAIHVSGTNGTKRFDNPVLPFNDGVYFASTEKSNIIRGWIFGTTLDSKTQSLLIVNNATNVVIKVCEFQFCNDPFLGVYYHKNNKSWMESEFRVYSSANNCTFEYVSQPFLMDLEGKQGNFKNLREFVFKNIDGYFKIYSKHTPINLVRDLPQGFSALEPLVDLPIGINITRFQTLLALHRSYLTPGDSSSGWTAGAAAYYVGYLQPRTFLLKYNENGTITDAVDCALDPLSETKCTLKSFTVEKGIYQTSNFRVQPTESIVRFPNITNLCPFGEVFNATRFASVYAWNRKRISNCVADYSVLYNSASFSTFKCYGVSPTKLNDLCFTNVYADSFVIRGDEVRQIAPGQTGKIADYNYKLPDDFTGCVIAWNSNNLDSKVGGNYNYLYRLFRKSNLKPFERDISTEIYQAGSTPCNGVEGFNCYFPLQSYGFQPTNGVGYQPYRVVVLSFELLHAPATVCGPKKSTNLVKNKCVNFNFNGLTGTGVLTESNKKFLPFQQFGRDIADTTDAVRDPQTLEILDITPCSFGGVSVITPGTNTSNQVAVLYQDVNCTEVPVAIHADQLTPTWRVYSTGSNVFQTRAGCLIGAEHVNNSYECDIPIGAGICASYQTQTNSPRRARSVASQSIIAYTMSLGAENSVAYSNNSIAIPTNFTISVTTEILPVSMTKTSVDCTMYICGDSTECSNLLLQYGSFCTQLNRALTGIAVEQDKNTQEVFAQVKQIYKTPPIKDFGGFNFSQILPDSSKPSKRSFIEDLLFNKVTLADAGFIKQYGDCLGDIAARDLICAQKFNGLTVLPPLLTDEMIAQYTSALLAGTITSGWTFGAGAALQIPFAMQMAYRFNGIGVTQNVLYENQKLIANQFNSAIGKIQDSLSSTASALGKLQDVVNQNAQALNTLVKQLSSNFGAISSVLNDILSRLDPPEAEVQIDRLITGRLQSLQTYVTQQLIRAAEIRASANLAATKMSECVLGQSKRVDFCGKGYQLMSFPQSAPHGVVFLNVTYVPAQEKNFTTAPAICNDGKAHFPREGVFVSNGTNWFVTQRNFYEPQIITTDNTFVSGNCDVVIGIVNNTVYDPLQPELDS

SEQ ID NO: 2939 - protein, 1147 aa, Artificial Sequence
  SARS-CoV-2/Iceland/280/2020__EPI_ISL_417608 spike protein (1-1147)(K986P_V987P_ H1048Q_H1064N_ H1083N_H1101N)
MFVFLVLLPLVSSQCVNLTTRTQLPPAYTNSFTRGVYYPDKVFRSSVLHSTQDLFLPFFSNVTWFHAIHVSGTNGTKRFDNPVLPFNDGVYFASTEKSNIIRGWIFGTTLDSKTQSLLIVNNATNVVIKVCEFQFCNDPFLGVYYHKNNKSWMESEFRVYSSANNCTFEYVSQPFLMDLEGKQGNFKNLREFVFKNIDGYFKIYSKHTPINLVRDLPQGFSALEPLVDLPIGINITRFQTLLALHRSYLTPGDSSSGWTAGAAAYYVGYLQPRTFLLKYNENGTITDAVDCALDPLSETKCTLKSFTVEKGIYQTSNFRVQPTESIVRFPNITNLCPFGEVFNATRFASVYAWNRKRISNCVADYSVLYNSASFSTFKCYGVSPTKLNDLCFTNVYADSFVIRGDEVRQIAPGQTGKIADYNYKLPDDFTGCVIAWNSNNLDSKVGGNYNYLYRLFRKSNLKPFERDISTEIYQAGSTPCNGVEGFNCYFPLQSYGFQPTNGVGYQPYRVVVLSFELLHAPATVCGPKKSTNLVKNKCVNFNFNGLTGTGVLTESNKKFLPFQQFGRDIADTTDAVRDPQTLEILDITPCSFGGVSVITPGTNTSNQVAVLYQGVNCTEVPVAIHADQLTPTWRVYSTGSNVFQTRAGCLIGAEHVNNSYECDIPIGAGICASYHTQTNSPRRARSVASQSIIAYTMSLGAENSVAYSNNSIAIPTNFTISVTTEILPVSMTKTSVDCTMYICGDSTECSNLLLQYGSFCTQLNRALTGIAVEQDKNTQEVFAQVKQIYKTPPIKDFGGFNFSQILPDPSKPSKRSFIEDLLFNKVTLADAGFIKQYGDCLGDIAARDLICAQKFNGLTVLPPLLTDEMIAQYTSALLAGTITSGWTFGAGAALQIPFAMQMAYRFNGIGVTQNVLYENQKLIANQFNSAIGKIQDSLSSTASALGKLQDVVNQNAQALNTLVKQLSSNFGAISSVLNDILSRLDPPEAEVQIDRLITGRLQSLQTYVTQQLIRAAEIRASANLAATKMSECVLGQSKRVDFCGKGYQLMSFPQSAPHGVVFLNVTYVPAQEKNFTTAPAICNDGKAHFPREGVFVSNGTNWFVTQRNFYEPQIITTDNTFVSGNCDVVIGIVNNTVYDPLQPELDS

SEQ ID NO: 2940 - protein, 1147 aa, Artificial Sequence; identical to SEQ ID NO: 2895
  SARS-CoV-2/Iceland/247/2020__EPI_ISL_417575 spike protein (1-1147)(K986P_V987P_ H1048Q_H1064N_ H1083N_H1101N)

SEQ ID NO: 2941 - protein, 1147 aa, Artificial Sequence
  SARS-CoV-2/Iceland/238/2020__EPI_ISL_417566 spike protein (1-1147)(K986P_V987P_ H1048Q_H1064N_ H1083N_H1101N)
MFVFLVLLPLVSSQCVNLTTRTQLPPAYTNSFTRGVYYPDKVFRSSVLHSTQDLFLPFFSNVTWFHAIHVSGTNGTKRFDNPVLPFNDGVYFASTEKSNIIRGWIFGTTLDSKTQSLLIVNNATNVVIKVCEFQFCNDPFLGVYYHKNNKSWMESEFRVYSSANNCTFEYVSQPFLMDLEGKQGNFKNLREFVFKNIDGYFKIYSKHTPINLVRDLPQGFSALEPLVDLPIGINITRFQTLLALHRSYLTPGDSSSGWTAGAAAYYVGYLQPRTFLLKYNENGTITDAVDCALDPLSETKCTLKSFTVEKGIYQTSNFRVQPTESIVRFPNITNLCPFGEVFNATRFASVYAWNRKRISNCVADYSVLYNSASFSTFKCYGVSPTKLNDLCFTNVYADSFVIRGDEVRQIAPGQTGKIADYNYKLPDDFTGCVIAWNSNNLDSKVGGNYNYLYRLFRKSNLKPFERDISTEIYQAGSTPCNGVEGFNCYFPLQSYGFQPTNGVGYQPYRVVVLSFELLHAPATVCGPKKSTNLVKNKCVNFNFNGLTGTGVLTESNKKFLPFQQFGRDIADTTDAVRDPQTLEILDITPCSFGGVSVITPGTNTSNQVAVLYQGVNCTEVPVAIHADQLTPTWRVYSTGSNVFQTRAGCLIGAEHVNNSYECDIPIGAGICASYQTQTNSPRRARSVASQSIIAYTMSLGAENSVAYSNNSIAIPTNFTISVTTEILPVSMTKTSVDCTMYICGDSTECSNLLLQYGSFCTQLNRALTGIAVEQDKNTQEVFAQVKQIYKTPPIKDFGGFNFSQILPDPSKPSKRSFIEDLLFNKVTLADVGFIKQYGDCLGDIAARDLICAQKFNGLTVLPPLLTDEMIAQYTSALLAGTITSGWTFGAGAALQIPFAMQMAYRFNGIGVTQNVLYENQKLIANQFNSAIGKIQDSLSSTASALGKLQDVVNQNAQALNTLVKQLSSNFGAISSVLNDILSRLDPPEAEVQIDRLITGRLQSLQTYVTQQLIRAAEIRASANLAATKMSECVLGQSKRVDFCGKGYQLMSFPQSAPHGVVFLNVTYVPAQEKNFTTAPAICNDGKAHFPREGVFVSNGTNWFVTQRNFYEPQIITTDNTFVSGNCDVVIGIVNNTVYDPLQPELDS

SEQ ID NO: 2942 - protein, 1147 aa, Artificial Sequence
  SARS-CoV-2/Greece/16/2020__EPI_ISL_418265 spike protein (1-1147)(K986P_V987P_ H1048Q_H1064N_ H1083N_H1101N)
MFVFLVLLPLVSSQCVNLTTRTQLPPAYTNSFTRGVYYPDKVFRSSVLHSTQDLFLPFFSNVTWFHAIHVSGTNGTKRFDNPVLPFNDGVYFASTEKSNIIRGWIFGTTLDSKTQSLLIVNNATNVVIKVCEFQFCNDPFLGVYYHKNNKSWMESEFRVYSSANNCTFEYVSQPFLMDLEGKQGNFKNLREFVFKNVDGYFKIYSKHTPINLVRDLPQGFSALEPLVDLPIGINITRFQTLLALHRSYLTPGDSSSGWTAGAAAYYVGYLQPRTFLLKYNENGTITDAVDCALDPLSETKCTLKSFTVEKGIYQTSNFRVQPTESIVRFPNITNLCPFGEVFNATRFASVYAWNRKRISNCVADYSVLYNSASFSTFKCYGVSPTKLNDLCFTNVYADSFVIRGDEVRQIAPGQTGKIADYNYKLPDDFTGCVIAWNSNNLDSKVGGNYNYLYRLFRKSNLKPFERDISTEIYQAGSTPCNGVEGFNCYFPLQSYGFQPTNGVGYQPYRVVVLSFELLHAPATVCGPKKSTNLVKNKCVNFNFNGLTGTGVLTESNKKFLPFQQFGRDIADTTDAVRDPQTLEILDITPCSFGGVSVITPGTNTSNQVAVLYQDVNCTEVPVAIHADQLTPTWRVYSTGSNVFQTRAGCLIGAEHVNNSYECDIPIGAGICASYQTQTNSPRRARSVASQSIIAYTMSLGAENSVAYSNNSIAIPTNFTISVTTEILPVSMTKTSVDCTMYICGDSTECSNLLLQYGSFCTQLNRALTGIAVEQDKNTQEVFAQVKQIYKTPPIKDFGGFNFSQILPDPSKPSKRSFIEDLLFNKVTLADAGFIKQYGDCLGDIAARDLICAQKFNGLTVLPPLLTDEMIAQYTSALLAGTITSGWTFGAGAALQIPFAMQMAYRFNGIGVTQNVLYENQKLIANQFNSAIGKIQDSLSSTASALGKLQDVVNQNAQALNTLVKQLSSNFGAISSVLNDILSRLDPPEAEVQIDRLITGRLQSLQTYVTQQLIRAAEIRASANLAATKMSECVLGQSKRVDFCGKGYQLMSFPQSAPHGVVFLNVTYVPAQEKNFTTAPAICNDGKAHFPREGVFVSNGTNWFVTQRNFYEPQIITTDNTFVSGNCDVVIGIVNNTVYDPLQPELDS

SEQ ID NO: 2943 - protein, 1147 aa, Artificial Sequence
  SARS-CoV-2/Iceland/319/2020__EPI_ISL_417648 spike protein (1-1147)(K986P_V987P_ H1048Q_H1064N_ H1083N_H1101N)
MFVFLVLLPLVSSQCVNLTTRTQLPPAYTNSFTRGVYYPDKVFRSSVLHSTQDLFLPFFSNVTWFHAIHVSGTNGTKRFDNPVLPFNDGVYFASTEKSNIIRGWIFGTTLDSKTQSLLIVNNATNVVIKVCEFQFCNDPFLGVYYHKNNKSWMESEFRVYSSANNCTFEYVSQPFLIDLEGKQGNFKNLREFVFKNIDGYFKIYSKHTPINLVRDLPQGFSALEPLVDLPIGINITRFQTLLALHRSYLTPGDSSSGWTAGAAAYYVGYLQPRTFLLKYNENGTITDAVDCALDPLSETKCTLKSFTVEKGIYQTSNFRVQPTESIVRFPNITNLCPFGEVFNATRFASVYAWNRKRISNCVADYSVLYNSASFSTFKCYGVSPTKLNDLCFTNVYADSFVIRGDEVRQIAPGQTGKIADYNYKLPDDFTGCVIAWNSNNLDSKVGGNYNYLYRLFRKSNLKPFERDISTEIYQAGSTPCNGVEGFNCYFPLQSYGFQPTNGVGYQPYRVVVLSFELLHAPATVCGPKKSTNLVKNKCVNFNFNGLTGTGVLTESNKKFLPFQQFGRDIADTTDAVRDPQTLEILDITPCSFGGVSVITPGTNTSNQVAVLYQGVNCTEVPVAIHADQLTPTWRVYSTGSNVFQTRAGCLIGAEHVNNSYECDIPIGAGICASYQTQTNSPRRARSVASQSIIAYTMSLGAENSVAYSNNSIAIPTNFTISVTTEILPVSMTKTSVDCTMYICGDSTECSNLLLQYGSFCTQLNRALTGIAVEQDKNTQEVFAQVKQIYKTPPIKDFGGFNFSQILPDPSKPSKRSFIEDLLFNKVTLADAGFIKQYGDCLGDIAARDLICAQKFNGLTVLPPLLTDEMIAQYTSALLAGTITSGWTFGAGAALQIPFAMQMAYRFNGIGVTQNVLYENQKLIANQFNSAIGKIQDSLSSTASALGKLQDVVNQNAQALNTLVKQLSSNFGAISSVLNDILSRLDPPEAEVQIDRLITGRLQSLQTYVTQQLIRAAEIRASANLAATKMSECVLGQSKRVDFCGKGYQLMSFPQSAPHGVVFLNVTYVPAQEKNFTTAPAICNDGKAHFPREGVFVSNGTNWFVTQRNFYEPQIITTDNTFVSGNCDVVIGIVNNTVYDPLQPELDS

SEQ ID NO: 2944 - protein, 1147 aa, Artificial Sequence
  SARS-CoV-2/Congo/94/2020__EPI_ISL_417947 spike protein (1-1147)(K986P_V987P_ H1048Q_H1064N_ H1083N_H1101N)
MFVFLVLLPLVSSQCVNLTTRTQLPPAYTNSFTRGVYYPDKVFRSSVLHSTQDLFLPFFSNVTWFHAIHVSGTNGTKRFDNPVLPFNDGVYFASTEKSNIIRGWIFGTTLDSKTQSLLIVNNATNVVIKVCEFQFCNDPFLGVYYHKNNKSWMESEFRVYSSANNCTFEYVSQPFLMDLEGKQGNFKNLREFVFKNIDGYFKIYSKHTPINLVRDLPQGFSALEPLVDLPIGINITRFQTLLALHRSYLTPGDSSSGWTAGAAAYYVGYLQPRTFLLKYNENGTITDAVDCALDPLSETKCTLKSFTVEKGIYQTSNFRVQPTESIVRFPNITNLCPFGEVFNATRFASVYAWNRKRISNCVADYSVLYNSASFSTFKCYGVSPTKLNDLCFTNVYADSFVIRGDEVRQIAPGQTGKIADYNYKLPDDFTGCVIAWNSNNLDSKVGGNYNYLYRLFRKSNLKPFERDISTEIYQAGSTPCNGVEGFNCYFPLQSYGFQPTNGVGYQPYRVVVLSFELLHAPATVCGPKKSTNLVKNKCVNFNFNGLTGTGVLTESNKKFLPFQQFGRDIADTTDAVRDPQTLEILDITPCSFGGVSVITPGTNTSNQVAVLYQGVNCTEVPVAIHADQLTPTWRVYSTGSNVFQTRAGCLIGAEHVNNSYECDIPIGAGICASYQTQTNSPRRARSVASQSIIAYTMSLGAENSVAYSNNSIAIPTNFTISVTTEILPVSMTKTSVDCTMYICGDSTECSNLLLQYGSFCTQLNRALTGIAVEQDKNTQEVFAQVKQIYKTPPIKDFGGFNFSQILPDPSKPSKRSFIEDILFNKVTLADAGFIKQYGDCLGDIAARDLICAQKFNGLTVLPPLLTDEMIAQYTSALLAGTITSGWTFGAGAALQIPFAMQMAYRFNGIGVTQNVLYENQKLIANQFNSAIGKIQDSLSSTASALGKLQDVVNQNAQALNTLVKQLSSNFGAISSVLNDILSRLDPPEAEVQIDRLITGRLQSLQTYVTQQLIRAAEIRASANLAATKMSECVLGQSKRVDFCGKGYQLMSFPQSAPHGVVFLNVTYVPAQEKNFTTAPAICNDGKAHFPREGVFVSNGTNWFVTQRNFYEPQIITTDNTFVSGNCDVVIGIVNNTVYDPLQPELDS

SEQ ID NO: 2945 - protein, 1147 aa, Artificial Sequence
  SARS-CoV-2/Congo/158/2020__EPI_ISL_417950 spike protein (1-1147)(K986P_V987P_ H1048Q_H1064N_ H1083N_H1101N)
MFVFLVLLPLVSSQCVNLTTRTQLPPAYTNSFTRGVYYPDKVFRSSVLHSTQDLFLPFFSNVTWFHAIHVSGTNGTKRFDNPVLPFNDGVYFASTEKSNIIRGWIFGTTLDSKTQSLLIVNNATNVVIKVCEFQFCNDPFLGVYYHKNNKSWMESEFRVYSSANNCTFEYVSQPFLMDLEGKQGNFKNLREFVFKNIDGYFKIYSKHTPINLVRDLPQGFSALEPLVDLPIGINITRFQTLLALHRSYLTPGDSSSGWTAGAAAYYVGYLQPRTFLLKYNENGTITDAVDCALDPLSETKCTLKSFTVEKGIYQTSNFRVQPTESIVRFPNITNLCPFGEVFNATRFASVYAWNRKRISNCVADYSVLYNSASFSTFKCYGVSPTKLNDLCFTNVYADSFVIRGDEVRQIAPGQTGKIADYNYKLPDDFTGCVIAWNSNNLDSKVGGNYNYLYRLFRKSNLKPFERDISTEIYQAGSTPCNGVEGFNCYFPLQSYGFQPTNGVGYQPYRVVVLSFELLHAPATVCGPKKSTNLVKNKCVNFNFNGLTGTGVLTESNKKFLPFQQFGRDIADTTDAVRDPQTLEILDITPCSFGGVSVITPGTNTSNQVAVLYQDVNCTEVPVAIHADQLTPTWRVYSTGSNVFQTRAGCLIGAEHVNNSYECDIPIGAGICASYQTQTNSPRRARSVASQSIIAYTMSLGAENSVAYSNNSIAIPTNFTISVTTEILPVSMTKTSVDCTMYICGDSTECSNLLLQYGSFCTQLNRALTGIAVEQDKNTQEVFAQVKQIYKTPPIKDFGGFNFSQILPDPSKPSKRSFIEDLLFNKVTLADAGFIKQYGDCLGDIAARDLICAQKFNGLTVLPPLLTDEMIAQYTSALLAGTITSGWTFGAGAALQIPFAMQMAYRFNGIGVTQNVLYENQKLIANQFNSAIGKIQDSLSSTASALGKLQDVVNQNAQALNTLVKQLSSNFGAISSVLNDILSRLDPPEAEVQIDRLITGRLQSLQTYVTQQLIRAAEIRASANLAATKMSECVLGQSKRVDFCGKGYQLMSFPQSAPHGVVFLNVTYVPAQEKNFTTAPAICNDGKAHFPREGVFVSNGTNWFVTQRNFYEPQIITTDNTFLSGNCDVVIGIVNNTVYDPLQPELDS

SEQ ID NO: 2946 - protein, 1147 aa, Artificial Sequence
  SARS-CoV-2/USA/UT-00034/2020__EPI_ISL_417977 spike protein (1-1147)(K986P_V987P_ H1048Q_H1064N_ H1083N_H1101N)
MFVFLVLLPLVSSQCVNLTTRTQLPPAYTNSFTRGVYYPDKVFRSSVLHSTQDLFLPFFSNVTWFHAIHVSGTNGTKRFDNPVLPFNDGVYFASTEKSNIIRGWIFGTTLDSKTQSLLIVNNATNVVIKVCEFQFCNDPFLGVYYYKNNKSWMESEFRVYSSANNCTFEYVSQPFLMDLEGKQGNFKNLREFVFKNIDGYFKIYSKHTPINLVRDLPQGFSALEPLVDLPIGINITRFQTLLALHRSYLTPGDSSSGWTAGAAAYYVGYLQPRTFLLKYNENGTITDAVDCALDPLSETKCTLKSFTVEKGIYQTSNFRVQPTESIVRFPNITNLCPFGEVFNATRFASVYAWNRKRISNCVADYSVLYNSASFSTFKCYGVSPTKLNDLCFTNVYADSFVIRGDEVRQIAPGQTGKIADYNYKLPDDFTGCVIAWNSNNLDSKVGGNYNYLYRLFRKSNLKPFERDISTEIYQAGSTPCNGVEGFNCYFPLQSYGFQPTNGVGYQPYRVVVLSFELLHAPATVCGPKKSTNLVKNKCVNFNFNGLTGTGVLTESNKKFLPFQQFGRDIADTTDAVRDPQTLEILDITPCSFGGVSVITPGTNTSNQVAVLYQGVNCTEVPVAIHADQLTPTWRVYSTGSNVFQTRAGCLIGAEHVNNSYECDIPIGAGICASYQTQTNSPRRARSVASQSIIAYTMSLGAENSVAYSNNSIAIPTNFTISVTTEILPVSMTKTSVDCTMYICGDSTECSNLLLQYGSFCTQLNRALTGIAVEQDKNTQEVFAQVKQIYKTPPIKDFGGFNFSQILPDPSKPSKRSFIEDLLFNKVTLADAGFIKQYGDCLGDIAARDLICAQKFNGLTVLPPLLTDEMIAQYTSALLAGTITSGWTFGAGAALQIPFAMQMAYRFNGIGVTQNVLYENQKLIANQFNSAIGKIQDSLSSTASALGKLQDVVNQNAQALNTLVKQLSSNFGAISSVLNDILSRLDPPEAEVQIDRLITGRLQSLQTYVTQQLIRAAEIRASANLAATKMSECVLGQSKRVDFCGKGYQLMSFPQSAPHGVVFLNVTYVPAQEKNFTTAPAICNDGKAHFPREGVFVSNGTNWFVTQRNFYEPQIITTDNTFVSGNCDVVIGIVNNTVYDPLQPELDS

SEQ ID NO: 2947 - protein, 1147 aa, Artificial Sequence
  SARS-CoV-2/USA/UT-00033/2020__EPI_ISL_417976 spike protein (1-1147)(K986P_V987P_ H1048Q_H1064N_ H1083N_H1101N)
MFVFLVLLPLVSSQCVNLTTRTQLPPAYTNSFTRGVYYPDKVFRSSVLHSTQDLFLPFFSNVTWFHAIHVSGTNGTKRFDNPVLPFNDGVYFASTEKSNIIRGWIFGTTLDSKTQSLLIVNNATNVVIKVCEFQFCNDPFLGVYYHKNNKSWMESEFRVYSSANNCTFEYVSQPFLMDLEGKQGNFKNLREFVFKNIDGYFKIYSKHTPINLVRDLPQGFSALEPLVDLPIGINITRFQTLLALHRSYLTPGDSSSGLTAGAAAYYVGYLQPRTFLLKYNENGTITDAVDCALDPLSETKCTLKSFTVEKGIYQTSNFRVQPTESIVRFPNITNLCPFGEVFNATRFASVYAWNRKRISNCVADYSVLYNSASFSTFKCYGVSPTKLNDLCFTNVYADSFVIRGDEVRQIAPGQTGKIADYNYKLPDDFTGCVIAWNSNNLDSKVGGNYNYLYRLFRKSNLKPFERDISTEIYQAGSTPCNGVEGFNCYFPLQSYGFQPTNGVGYQPYRVVVLSFELLHAPATVCGPKKSTNLVKNKCVNFNFNGLTGTGVLTESNKKFLPFQQFGRDIADTTDAVRDPQTLEILDITPCSFGGVSVITPGTNTSNQVAVLYQGVNCTEVPVAIHADQLTPTWRVYSTGSNVFQTRAGCLIGAEHVNNSYECDIPIGAGICASYQTQTNSPRRARSVASQSIIAYTMSLGAENSVAYSNNSIAIPTNFTISVTTEILPVSMTKTSVDCTMYICGDSTECSNLLLQYGSFCTQLNRALTGIAVEQDKNTQEVFAQVKQIYKTPPIKDFGGFNFSQILPDPSKPSKRSFIEDLLFNKVTLADAGFIKQYGDCLGDIAARDLICAQKFNGLTVLPPLLTDEMIAQYTSALLAGTITSGWTFGAGAALQIPFAMQMAYRFNGIGVTQNVLYENQKLIANQFNSAIGKIQDSLSSTASALGKLQDVVNQNAQALNTLVKQLSSNFGAISSVLNDILSRLDPPEAEVQIDRLITGRLQSLQTYVTQQLIRAAEIRASANLAATKMSECVLGQSKRVDFCGKGYQLMSFPQSAPHGVVFLNVTYVPAQEKNFTTAPAICNDGKAHFPREGVFVSNGTNWFVTQRNFYEPQIITTDNTFVSGNCDVVIGIVNNTVYDPLQPELDS

SEQ ID NO: 2948 - protein, 1147 aa, Artificial Sequence
  SARS-CoV-2/USA/WI-13/2020__EPI_ISL_417516 spike protein (1-1147)(K986P_V987P_ H1048Q_H1064N_ H1083N_H1101N)
MFVFLVLLPLVSSQCVNLTTRTQLPPAYTNSFTRGVYYPDKVFRSSVLHSTQDLFLPFFSNVTWFHAIHVSGTNGTKRFDNPVLPFNDGVYFASTEKSNIIRGWIFGTTLDSKTQSLLIVNNATNVVIKVCEFQFCNDPFLGVYYHKNNKSWMESEFRVYSSANNCTFEYVSQPFLMDLEGKQGNFKNLREFVFKNIDGYFKIYSKHTPINLVRDLPQGFSALEPLVDLPIGINITRFQTLLALHRSYLTPGDSSSGWTAGAAAYYVGYLQPRTFLLKYNENGTITDAVDCALDPLSETKCTLKSFTVEKGIYQTSNFRVLPTESIVRFPNITNLCPFGEVFNATRFASVYAWNRKRISNCVADYSVLYNSASFSTFKCYGVSPTKLNDLCFTNVYADSFVIRGDEVRQIAPGQTGKIADYNYKLPDDFTGCVIAWNSNNLDSKVGGNYNYLYRLFRKSNLKPFERDISTEIYQAGSTPCNGVEGFNCYFPLQSYGFQPTNGVGYQPYRVVVLSFELLHAPATVCGPKKSTNLVKNKCVNFNFNGLTGTGVLTESNKKFLPFQQFGRDIADTTDAVRDPQTLEILDITPCSFGGVSVITPGTNTSNQVAVLYQGVNCTEVPVAIHADQLTPTWRVYSTGSNVFQTRAGCLIGAEHVNNSYECDIPIGAGICASYQTQTNSPRRARSVASQSIIAYTMSLGAENSVAYSNNSIAIPTNFTISVTTEILPVSMTKTSVDCTMYICGDSTECSNLLLQYGSFCTQLNRALTGIAVEQDKNTQEVFAQVKQIYKTPPIKDFGGFNFSQILPDPSKPSKRSFIEDLLFNKVTLADAGFIKQYGDCLGDIAARDLICAQKFNGLTVLPPLLTDEMIAQYTSALLAGTITSGWTFGAGAALQIPFAMQMAYRFNGIGVTQNVLYENQKLIANQFNSAIGKIQDSLSSTASALGKLQDVVNQNAQALNTLVKQLSSNFGAISSVLNDILSRLDPPEAEVQIDRLITGRLQSLQTYVTQQLIRAAEIRASANLAATKMSECVLGQSKRVDFCGKGYQLMSFPQSAPHGVVFLNVTYVPAQEKNFTTAPAICNDGKAHFPREGVFVSNGTNWFVTQRNFYEPQIITTDNTFVSGNCDVVIGIVNNTVYDPLQPELDS

SEQ ID NO: 2949 - protein, 1146 aa, Artificial Sequence
  SARS-CoV-2/India/1-27/2020__EPI_ISL_413522 spike protein (1-1146)(K985P_V986P_ H1047Q_H1063N_ H1082N_H1100N)
MFVFLVLLPLVSSQCVNLTTRTQLPPAYTNSFTRGVYYPDKVFRSSVLHSTQDLFLPFFSNVTWFHAIHVSGTNGTKRFDNPVLPFNDGVYFASTEKSNIIRGWIFGTTLDSKTQSLLIVNNATNVVIKVCEFQFCNDPFLGVYHKNNKSWMESEFRVYSSANNCTFEYVSQPFLMDLEGKQGNFKNLREFVFKNIDGYFKIYSKHTPINLVRDLPQGFSALEPLVDLPIGINITRFQTLLALHRSYLTPGDSSSGWTAGAAAYYVGYLQPRTFLLKYNENGTITDAVDCALDPLSETKCTLKSFTVEKGIYQTSNFRVQPTESIVRFPNITNLCPFGEVFNATRFASVYAWNRKRISNCVADYSVLYNSASFSTFKCYGVSPTKLNDLCFTNVYADSFVIRGDEVIQIAPGQTGKIADYNYKLPDDFTGCVIAWNSNNLDSKVGGNYNYLYRLFRKSNLKPFERDISTEIYQAGSTPCNGVEGFNCYFPLQSYGFQPTNGVGYQPYRVVVLSFELLHAPATVCGPKKSTNLVKNKCVNFNFNGLTGTGVLTESNKKFLPFQQFGRDIADTTDAVRDPQTLEILDITPCSFGGVSVITPGTNTSNQVAVLYQDVNCTEVPVAIHADQLTPTWRVYSTGSNVFQTRAGCLIGAEHVNNSYECDIPIGAGICASYQTQTNSPRRARSVASQSIIAYTMSLGAENSVAYSNNSIAIPTNFTISVTTEILPVSMTKTSVDCTMYICGDSTECSNLLLQYGSFCTQLNRALTGIAVEQDKNTQEVFAQVKQIYKTPPIKDFGGFNFSQILPDPSKPSKRSFIEDLLFNKVTLADAGFIKQYGDCLGDIAARDLICAQKFNGLTVLPPLLTDEMIAQYTSALLAGTITSGWTFGAGAALQIPFAMQMAYRFNGIGVTQNVLYENQKLIANQFNSAIGKIQDSLSSTASALGKLQDVVNQNAQALNTLVKQLSSNFGAISSVLNDILSRLDPPEAEVQIDRLITGRLQSLQTYVTQQLIRAAEIRASANLAATKMSECVLGQSKRVDFCGKGYQLMSFPQSAPHGVVFLNVTYVPAQEKNFTTAPAICNDGKAHFPREGVFVSNGTNWFVTQRNFYEPQIITTDNTFVSGNCDVVIGIVNNTVYDPLQPELDS

SEQ ID NO: 2950 - protein, 1141 aa, Artificial Sequence
  SARS-CoV-2/pangolin/Guangxi/P4L/2017__EPI_ISL_410538 spike protein (1-1141)(K980P_V981P_ H1042Q_H1058N_ H1077N_H1095N)
MFVFLFVLPLVSSQCVNLTTRTGIPPGYTNSSTRGVYYPDKVFRSSILHLTQDLFLPFFSNVTWFNTINYQGGFKKFDNPVLPFNDGVYFASTEKSNIIRGWIFGTTLDARTQSLLIVNNATNVVIKVCEFQFCTDPFLGVYYHNNNKTWVENEFRVYSSANNCTFEYISQPFLMDLEGKQGNFKNLREFVFKNVDGYFKIYSKHTPIDLVRDLPRGFAALEPLVDLPIGINITRFQTLLALHRSYLTPGNLESGWTTGAAAYYVGYLQQRTFLLSYNQNGTITDAVDCSLDPLSETKCTLKSLTVEKGIYQTSNFRVQPTISIVRFPNITNLCPFGEVFNASKFASVYAWNRKRISNCVADYSVLYNSTSFSTFKCYGVSPTKLNDLCFTNVYADSFVVKGDEVRQIAPGQTGVIADYNYKLPDDFTGCVIAWNSVKQDALTGGNYGYLYRLFRKSKLKPFERDISTEIYQAGSTPCNGQVGLNCYYPLERYGFHPTTGVNYQPFRVVVLSFELLNGPATVCGPKLSTTLVKDKCVNFNFNGLTGTGVLTTSKKQFLPFQQFGRDISDTTDAVRDPQTLEILDITPCSFGGVSVITPGTNTSNQVAVLYQDVNCTEVPMAIHAEQLTPAWRVYSAGANVFQTRAGCLVGAEHVNNSYECDIPVGAGICASYHSMSSLRSVNQRSIIAYTMSLGAENSVAYSNNSIAIPTNFTISVTTEILPVSMTKTSVDCTMYICGDSIECSNLLLQYGSFCTQLNRALTGIAVEQDKNTQEVFAQVKQIYKTPPIKDFGGFNFSQILPDPSKPSKRSFIEDLLFNKVTLADAGFIKQYGDCLGDIAARDLICAQKFNGLTVLPPLLTDEMIAQYTSALLAGTITSGWTFGAGAALQIPFAMQMAYRFNGIGVTQNVLYENQKLIANQFNSAIGKIQDSLSSTASALGKLQDVVNQNAQALNTLVKQLSSNFGAISSVLNDILSRLDPPEAEVQIDRLITGRLQSLQTYVTQQLIRAAEIRASANLAATKMSECVLGQSKRVDFCGKGYQLMSFPQSAPHGVVFLNVTYVPAQEKNFTTAPAICNEGKAHFPREGVFVSNGTNWFITQRNFYEPQIITTDNTFVSGSCDVVIGIVNNTVYDPLQPELDS

SEQ ID NO: 2951 - protein, 1141 aa, Artificial Sequence
  SARS-CoV-2/pangolin/Guangxi/P5L/2017__EPI_ISL_410540 spike protein (1-1141)(K980P_V981P_ H1042Q_H1058N_ H1077N_H1095N)
MFVFLFVLPLVSSQCVNLTTRTGIPPGYTNSSTRGVYYPDKVFRSSILHLTQDLFLPFFSNVTWFNTINYQGGFKKFDNPVLPFNDGVYFASTEKSNIIRGWIFGTTLDARTQSLLIVNNATNVVIKVCEFQFCTDPFLGVYYHNNNKTWVENEFRVYSSANNCTFEYISQPFLMDLEGKQGNFKNLREFVFKNVDGYFKIYSKHTPIDLVRDLPRGFAALEPLVDLPIGINITRFQTLLALHRSYLTPGKLESGWTTGAAAYYVGYLQQRTFLLSYNQNGTITDAVDCSLDPLSETKCTLKSLTVEKGIYQTSNFRVQPTISIVRFPNITNLCPFGEVFNASKFASVYAWNRKRISNCVADYSVLYNSTSFSTFKCYGVSPTKLNDLCFTNVYADSFVVKGDEVRQIAPGQTGVIADYNYKLPDDFTGCVIAWNSVKQDALTGGNYGYLYRLFRKSKLKPFERDISTEIYQAGSTPCNGQVGLNCYYPLERYGFHPTTGVNYQPFRVVVLSFELLNGPATVCGPKLSTTLVKDKCVNFNFNGLTGTGVLTTSKKQFLPFQQFGRDISDTTDAVRDPQTLEILDITPCSFGGVSVITPGTNTSNQVAVLYQDVNCTEVPMAIHAEQLTPAWRVYSAGANVFQTRAGCLVGAEHVNNSYECDIPVGAGICASYHSMSSFRSVNQRSIIAYTMSLGAENSVAYSNNSIAIPTNFTISVTTEILPVSMTKTSVDCTMYICGDSIECSNLLLQYGSFCTQLNRALTGIAVEQDKNTQEVFAQVKQIYKTPPIKDFGGFNFSQILPDPSKPSKRSFIEDLLFNKVTLADAGFIKQYGDCLGDIAARDLICAQKFNGLTVLPPLLTDEMIAQYTSALLAGTITSGWTFGAGAALQIPFAMQMAYRFNGIGVTQNVLYENQKLIANQFNSAIGKIQDSLSSTASALGKLQDVVNQNAQALNTLVKQLSSNFGAISSVLNDILSRLDPPEAEVQIDRLITGRLQSLQTYVTQQLIRAAEIRASANLAATKMSECVLGQSKRVDFCGKGYQLMSFPQSAPHGVVFLNVTYVPAQEKNFTTAPAICNEGKAHFPREGVFVSNGTNWFITQRNFYEPQIITTDNTFVSGSCDVVIGIVNNTVYDPLQPELDS

SEQ ID NO: 2952 - protein, 1141 aa, Artificial Sequence
  SARS-CoV-2/pangolin/Guangxi/P5E/2017__EPI_ISL_410541 spike protein (1-1141)(K980P_V981P_ H1042Q_H1058N_ H1077N_H1095N)
MFVFLFVLPLVSSQCVNLTTRTGIPPGYTNSSTRGVYYPDKVFRSSILHLTQDLFLPFFSNVTWFNTITYQGGSKKFDNPVLPFNDGVYFASTEKSNIIRGWIFGTTLDARTQSLLIVNNATNVVIKVCEFQFCTDPFLGVYYHNNNKTWVENEFRVYSSANNCTFEYISQPFLMDLEGKQGNFKNLREFVFKNVDGYFKIYSKHTPIDLVRDLPRGFAALEPLVDLPIGINITRFQTLLALHRSYLTPGKLESGWTTGAAAYYVGYLQQRTFLLSYNQNGTITDAVDCSLDPLSETKCTLKSLTVEKGIYQTSNFRVQPTISIVRFPNITNLCPFGEVFNASKFASVYAWNRKRISNCVADYSVLYNSTSFSTFKCYGVSPTKLNDLCFTNVYADSFVVKGDEVRQIAPGQTGVIADYNYKLPDDFTGCVIAWNSVKQDALTGDNYGYLYRLFRKSKLKPFERDISTEIYQAGSTPCNGQVGLNCYYPLERYGFHPTTGVNYQPFRVVVLSFELLNGPATVCGPKLSTTLVKDKCVNFNFNGLTGTGVLTTSKKQFLPFQQFGRDISDTTDAVRDPQTLEILDITPCSFGGVSVITPGTNTSNQVAVLYQDVNCTEVPMAIHAEQLTPAWRVYSAGANVFQTRAGCLVGAEHVNNSYECDIPVGAGICASYHSMSSFRSVNQRSIIAYTMSLGAENSVAYSNNSIAIPTNFTISVTTEILPVSMTKTSVDCTMYICGDSIECSNLLLQYGSFCTQLNRALTGIAVEQDKNTQEVFAQVKQIYKTPPIKDFGGFNFSQILPDPSKPSKRSFIEDLLFNKVTLADAGFIKQYGDCLGDIAARDLICAQKFNGLTVLPPLLTDEMIAQYTSALLAGTITSGWTFGAGAALQIPFAMQMAYRFNGIGVTQNVLYENQKLIANQFNSAIGKIQDSLSSTASALGKLQDVVNQNAQALNTLVKQLSSNFGAISSVLNDILSRLDPPEAEVQIDRLITGRLQSLQTYVTQQLIRAAEIRASANLAATKMSECVLGQSKRVDFCGKGYQLMSFPQSAPHGVVFLNVTYVPAQEKNFTTAPAICNEGKAHFPREGVFVSNGTNWFITQRNFYEPQIITTDNTFVSGSCDVVIGIVNNTVYDPLQPELDS

SEQ ID NO: 2953 - protein, 1139 aa, Artificial Sequence
  SARS-CoV-2/pangolin/Guangxi/P1E/2017__EPI_ISL_410539 spike protein (1-1139)(K978P_V979P_ H1040Q_H1056N_ H1075N_H1093N)
MFVFLFVLPLVSSQCVNLTTRTGIQPGYTNSSTRGVYYPDKVFRSSILHLTQDLFLPFFSNVTWFNTINYQGGFKKFDNPVLPFNDGVYFASTEKSNIIRGWIFGTTLDARTQSLLIVNNATNVVIKVCEFQFCTDPFLGVYYHNNNKTWVENEFRVYSSANNCTFEYISQPFLMDLEGKQGNFKNLREFVFKNVDGYFKIYSKHTPIDLVRDLPRGFAALEPLVDLPIGINITRFQTLLALHRSYLTPGKLESGWTTGAAAYYVGYLQQRTFLLSYNQNGTITDAVDCSLDPLSETKCTLKSLTVEKGIYQTSNFRVQPTISIVRFPNITNLCPFGEVFNASKFASVYAWNRKRISNCVADYSVLYNSTSFSTFKCYGVSPTKLNDLCFTNVYADSFVVKGDEVRQIAPGQTGVIADYNYKLPDDFTGCVIAWNSVKQDALTGGNYLYRLFRKSKLKPFERDISTEIYQAGSTPCNGQVGLNCYYPLERYGFHPTTGVNYQPFRVVVLSFELLNGPATVCGPKLSTTLVKDKCVNFNFNGLTGTGVLTTSKKQFLPFQQFGRDISDTTDAVRDPQTLEILDITPCSFGGVSVITPGTNTSNQVAVLYQDVNCTEVPMAIHAEQLTPAWRVYSAGANVFQTRAGCLVGAEHVNNSYECDIPVGAGICASYHSMSSLRSVNQRSIIAYTMSLGAENSVAYSNNSIAIPTNFTISVTTEILPVSMTKTSVDCTMYICGDSIECSNLLLQYGSFCTQLNRALTGIAVEQDKNTQEVFAQVKQIYKTPPIKDFGGFNFSQILPDPSKPSKRSFIEDLLFNKVTLADAGFIKQYGDCLGDIAARDLICAQKFNGLTVLPPLLTDEMIAQYTSALLAGTITSGWTFGAGAALQIPFAMQMAYRFNGIGVTQNVLYENQKLIANQFNSAIGKIQDSLSSTASALGKLQDVVNQNAQALNTLVKQLSSNFGAISSVLNDILSRLDPPEAEVQIDRLITGRLQSLQTYVTQQLIRAAEIRASANLAATKMSECVLGQSKRVDFCGKGYQLMSFPQSAPHGVVFLNVTYVPAQEKNFTTAPAICNEGKAHFPREGVFVSNGTNWFITQRNFYEPQIITTDNTFVSGSCDVVIGIVNNTVYDPLQPELDS

SEQ ID NO: 2954 - protein, 1147 aa, Artificial Sequence
  SARS-CoV-2/Wuhan/WIV05/2019__EPI_ISL_402128 spike protein (1-1147)(I712C_T1077C)
MFVFLVLLPLVSSQCVNLTTRTQLPPAYTNSFTRGVYYPDKVFRSSVLHSTQDLFLPFFSNVTWFHAIHVSGTNGTKRFDNPVLPFNDGVYFASTEKSNIIRGWIFGTTLDSKTQSLLIVNNATNVVIKVCEFQFCNDPFLGVYYHKNNKSWMESEFRVYSSANNCTFEYVSQPFLMDLEGKQGNFKNLREFVFKNIDGYFKIYSKHTPINLVRDLPQGFSALEPLVDLPIGINITRFQTLLALHRSYLTPGDSSSGWTAGAAAYYVGYLQPRTFLLKYNENGTITDAVDCALDPLSETKCTLKSFTVEKGIYQTSNFRVQPTESIVRFPNITNLCPFGEVFNATRFASVYAWNRKRISNCVADYSVLYNSASFSTFKCYGVSPTKLNDLCFTNVYADSFVIRGDEVRQIAPGQTGKIADYNYKLPDDFTGCVIAWNSNNLDSKVGGNYNYLYRLFRKSNLKPFERDISTEIYQAGSTPCNGVEGFNCYFPLQSYGFQPTNGVGYQPYRVVVLSFELLHAPATVCGPKKSTNLVKNKCVNFNFNGLTGTGVLTESNKKFLPFQQFGRDIADTTDAVRDPQTLEILDITPCSFGGVSVITPGTNTSNQVAVLYQDVNCTEVPVAIHADQLTPTWRVYSTGSNVFQTRAGCLIGAEHVNNSYECDIPIGAGICASYQTQTNSPRRARSVASQSIIAYTMSLGAENSVAYSNNSCAIPTNFTISVTTEILPVSMTKTSVDCTMYICGDSTECSNLLLQYGSFCTQLNRALTGIAVEQDKNTQEVFAQVKQIYKTPPIKDFGGFNFSQILPDPSKPSKRSFIEDLLFNKVTLADAGFIKQYGDCLGDIAARDLICAQKFNGLTVLPPLLTDEMIAQYTSALLAGTITSGWTFGAGAALQIPFAMQMAYRFNGIGVTQNVLYENQKLIANQFNSAIGKIQDSLSSTASALGKLQDVVNQNAQALNTLVKQLSSNFGAISSVLNDILSRLDKVEAEVQIDRLITGRLQSLQTYVTQQLIRAAEIRASANLAATKMSECVLGQSKRVDFCGKGYHLMSFPQSAPHGVVFLHVTYVPAQEKNFTCAPAICHDGKAHFPREGVFVSNGTHWFVTQRNFYEPQIITTDNTFVSGNCDVVIGIVNNTVYDPLQPELDS

SEQ ID NO: 2955 - protein, 1143 aa, Artificial Sequence
  SARS-CoV-2/bat/Yunnan/RaTG13/2013__EPI_ISL_402131 spike protein (1-1143)(I708C_T1073C)
MFVFLVLLPLVSSQCVNLTTRTQLPPAYTNSSTRGVYYPDKVFRSSVLHLTQDLFLPFFSNVTWFHAIHVSGTNGIKRFDNPVLPFNDGVYFASTEKSNIIRGWIFGTTLDSKTQSLLIVNNATNVVIKVCEFQFCNDPFLGVYYHKNNKSWMESEFRVYSSANNCTFEYVSQPFLMDLEGKQGNFKNLREFVFKNIDGYFKIYSKHTPINLVRDLPPGFSALEPLVDLPIGINITRFQTLLALHRSYLTPGDSSSGWTAGAAAYYVGYLQPRTFLLKYNENGTITDAVDCALDPLSETKCTLKSFTVEKGIYQTSNFRVQPTDSIVRFPNITNLCPFGEVFNATTFASVYAWNRKRISNCVADYSVLYNSTSFSTFKCYGVSPTKLNDLCFTNVYADSFVITGDEVRQIAPGQTGKIADYNYKLPDDFTGCVIAWNSKHIDAKEGGNFNYLYRLFRKANLKPFERDISTEIYQAGSKPCNGQTGLNCYYPLYRYGFYPTDGVGHQPYRVVVLSFELLNAPATVCGPKKSTNLVKNKCVNFNFNGLTGTGVLTESNKKFLPFQQFGRDIADTTDAVRDPQTLEILDITPCSFGGVSVITPGTNASNQVAVLYQDVNCTEVPVAIHADQLTPTWRVYSTGSNVFQTRAGCLIGAEHVNNSYECDIPIGAGICASYQTQTNSRSVASQSIIAYTMSLGAENSVAYSNNSCAIPTNFTISVTTEILPVSMTKTSVDCTMYICGDSTECSNLLLQYGSFCTQLNRALTGIAVEQDKNTQEVFAQVKQIYKTPPIKDFGGFNFSQILPDPSKPSKRSFIEDLLFNKVTLADAGFIKQYGDCLGDIAARDLICAQKFNGLTVLPPLLTDEMIAQYTSALLAGTITSGWTFGAGAALQIPFAMQMAYRFNGIGVTQNVLYENQKLIANQFNSAIGKIQDSLSSTASALGKLQDVVNQNAQALNTLVKQLSSNFGAISSVLNDILSRLDKVEAEVQIDRLITGRLQSLQTYVTQQLIRAAEIRASANLAATKMSECVLGQSKRVDFCGKGYHLMSFPQSAPHGVVFLHVTYVPAQEKNFTCAPAICHDGKAHFPREGVFVSNGTHWFVTQRNFYEPQIITTDNTFVSGSCDVVIGIVNNTVYDPLQPELDS

SEQ ID NO: 2956 - protein, 1147 aa, Artificial Sequence
  SARS-CoV-2/Wuhan/HBCDC-HB-01/2019__EPI_ISL_402132 spike protein (1-1147)(I712C_T1077C)
MFVFLVLLPLVSSQCVNLTTRTQLPPAYTNSITRGVYYPDKVFRSSVLHSTQDLFLPFFSNVTWFHAIHVSGTNGTKRFDNPVLPFNDGVYFASTEKSNIIRGWIFGTTLDSKTQSLLIVNNATNVVIKVCEFQFCNDPFLGVYYHKNNKSWMESEFRVYSSANNCTFEYVSQPFLMDLEGKQGNFKNLREFVFKNIDGYFKIYSKHTPINLVRDLPQGFSALEPLVDLPIGINITRFQTLLALHRSYLTPGDSSSGWTAGAAAYYVGYLQPRTFLLKYNENGTITDAVDCALDPLSETKCTLKSFTVEKGIYQTSNFRVQPTESIVRFPNITNLCPFGEVFNATRFASVYAWNRKRISNCVADYSVLYNSASFSTFKCYGVSPTKLNDLCFTNVYADSFVIRGDEVRQIAPGQTGKIADYNYKLPDDFTGCVIAWNSNNLDSKVGGNYNYLYRLFRKSNLKPFERDISTEIYQAGSTPCNGVEGFNCYFPLQSYGFQPTNGVGYQPYRVVVLSFELLHAPATVCGPKKSTNLVKNKCVNFNFNGLTGTGVLTESNKKFLPFQQFGRDIADTTDAVRDPQTLEILDITPCSFGGVSVITPGTNTSNQVAVLYQDVNCTEVPVAIHADQLTPTWRVYSTGSNVFQTRAGCLIGAEHVNNSYECDIPIGAGICASYQTQTNSPRRARSVASQSIIAYTMSLGAENSVAYSNNSCAIPTNFTISVTTEILPVSMTKTSVDCTMYICGDSTECSNLLLQYGSFCTQLNRALTGIAVEQDKNTQEVFAQVKQIYKTPPIKDFGGFNFSQILPDPSKPSKRSFIEDLLFNKVTLADAGFIKQYGDCLGDIAARDLICAQKFNGLTVLPPLLTDEMIAQYTSALLAGTITSGWTFGAGAALQIPFAMQMAYRFNGIGVTQNVLYENQKLIANQFNSAIGKIQDSLSSTASALGKLQDVVNQNAQALNTLVKQLSSNFGAISSVLNDILSRLDKVEAEVQIDRLITGRLQSLQTYVTQQLIRAAEIRASANLAATKMSECVLGQSKRVDFCGKGYHLMSFPQSAPHGVVFLHVTYVPAQEKNFTCAPAICHDGKAHFPREGVFVSNGTHWFVTQRNFYEPQIITTDNTFVSGNCDVVIGIVNNTVYDPLQPELDS

SEQ ID NO: 2957 - protein, 1147 aa, Artificial Sequence
  SARS-CoV-2/Guangdong/20SF028/2020__EPI_ISL_403936 spike protein (1-1147)(I712C_T1077C)
MFVFLVLLPLVSSQCVNLTTRTQLPPAYTNSFTRGVYYPDKVFRSSVLYSTQDLFLPFFSNVTWFHAIHVSGTNGTKRFDNPVLPFNDGVYFASTEKSNIIRGWIFGTTLDSKTQSLLIVNNATNVVIKVCEFQFCNDPFLGVYYHKNNKSWMESEFRVYSSANNCTFEYVSQPFLMDLEGKQGNFKNLREFVFKNIDGYFKIYSKHTPINLVRDLPQGFSALEPLVDLPIGINITRFQTLLALHRSYLTPGDSSSGWTAGAAAYYVGYLQPRTFLLKYNENGTITDAVDCALDPLSETKCTLKSFTVEKGIYQTSNFRVQPTESIVRFPNITNLCPFGEVFNATRFASVYAWNRKRISNCVADYSVLYNSASFSTFKCYGVSPTKLNDLCFTNVYADSFVIRGDEVRQIAPGQTGKIADYNYKLPDDFTGCVIAWNSNNLDSKVGGNYNYLYRLFRKSNLKPFERDISTEIYQAGSTPCNGVEGFNCYFPLQSYGFQPTNGVGYQPYRVVVLSFELLHAPATVCGPKKSTNLVKNKCVNFNFNGLTGTGVLTESNKKFLPFQQFGRDIADTTDAVRDPQTLEILDITPCSFGGVSVITPGTNTSNQVAVLYQDVNCTEVPVAIHADQLTPTWRVYSTGSNVFQTRAGCLIGAEHVNNSYECDIPIGAGICASYQTQTNSPRRARSVASQSIIAYTMSLGAENSVAYSNNSCAIPTNFTISVTTEILPVSMTKTSVDCTMYICGDSTECSNLLLQYGSFCTQLNRALTGIAVEQDKNTQEVFAQVKQIYKTPPIKDFGGFNFSQILPDPSKPSKRSFIEDLLFNKVTLADAGFIKQYGDCLGDIAARDLICAQKFNGLTVLPPLLTDEMIAQYTSALLAGTITSGWTFGAGAALQIPFAMQMAYRFNGIGVTQNVLYENQKLIANQFNSAIGKIQDSLSSTASALGKLQDVVNQNAQALNTLVKQLSSNFGAISSVLNDILSRLDKVEAEVQIDRLITGRLQSLQTYVTQQLIRAAEIRASANLAATKMSECVLGQSKRVDFCGKGYHLMSFPQSAPHGVVFLHVTYVPAQEKNFTCAPAICHDGKAHFPREGVFVSNGTHWFVTQRNFYEPQIITTDNTFVSGNCDVVIGIVNNTVYDPLQPELDS

SEQ ID NO: 2958 - protein, 1147 aa, Artificial Sequence
  SARS-CoV-2/Shenzhen/SZTH-001/2020__EPI_ISL_406592 spike protein (1-1147)(I712C_T1077C)
MFVFLVLLPLVSSQCVNLTTRTQLPPAYTNSFTRGVYYPDKVFRSSVLHSTQDLFLPFFSNVTWFHAIHVSGTNGTKRFDNPVLPFNDGVYFASTEKSNIIRGWIFGTTLDSKTQSLLIVNNATNVVIKVCEFQFCNDPFLGVYYHKNNKSWMESEFRVYSSANNCTFEYVSQPFLMDLEGKQGNFKNLREFVFKNIDGYFKIYSKHTPINLVRDLPQGFSALEPLVDLPIGINITRFQTLLALHRSYLTPGDSSSGWTAGAAAYYVGYLQPRTFLLKYNENGTITDAVDCALDPLSETKCTLKSFTVEKGIYQTSNFRVQPTESIVRFPNITNLCPFGEVFNATRFASVYAWNRKRISNCVADYSVLYNSASFSTFKCYGVSPTKLNDLCFTNVYADSFVIRGDEVRQIAPGQTGKIADYNYKLPDDFTGCVIAWNSNNLDSKVGGNYNYLYRLFRKSNLKPFERDISTEIYQAGSTPCNGVEGFNCYFPLQSYGFQPTNGVGYQPYRVVVLSFELLHAPATVCGPKKSTNLVKNKCVNFNFNGLTGTGVLTESNKKFLPFQQFGRDIADTTDAVRDPQTLEILDITPCSFGGVSVITPGTNTSNQVAVLYQDVNCTEVPVAIHADQLTPTWRVYSTGSNVFQTRAGCLIGAEHVNNSYECDIPIGAGICASYQTQTNSPRRARSVASQSIIAYTMSLGAENSVAYSNNSCAIPTNFTISVTTEILPVSMTKTSVDCTMYICGDSTECSNLLLQYGSFCTQLNRALTGIAVEQDKNTQEVFAQVKQIYKTPPIKDFGGFNFSQILPDPSKPSKRSFIEDLLFNKVTLADAGFIKQYGDCLGDIAARDLICAQKFNGLTVLPPLLTDEMIAQYTSALLAGTITSGWTFGAGAALQIPFAMQMAYRFNGIGVTQNVLYENQKLIANQFNSAIGKIQDSLSSTASALGKLQDVVNQNAQALNTLVKQLSSNFGAISSVLNDILSRLDKVEAEVQIDRLITGRLQSLQTYVTQQLIRAAEIRASANLAATKMSECVLGQSKRVDFCGKGYHLMSFPQSAPHGVVFLHVTYVPAQEKNFTCAPAICHDGKAHFPREGVFVSNGTHWFVTQRNFYEPQIITTDNTFVSGNCDVLIGIVNNTVYDPLQPELDS

SEQ ID NO: 2959 - protein, 1147 aa, Artificial Sequence
  SARS-CoV-2/Shenzhen/SZTH-004/2020__EPI_ISL_406595 spike protein (1-1147)(I712C_T1077C)
MFVFLVLLPLVSSQCVNLTTRTQLPPAYTNSFTRGVYYPDKVFRSSVLHSTQDLFLPFFSNVTWFHAIHVSGTNGTKRFDNPVLPFNDGVYFASTEKSNIIRGWIFGTTLDSKTQSLLIVNNATNVVIKVCEFQFCNDPFLGVYYHKNNKSWMESEFRVYSSANNCTFEYVSQPFLMDLEGKQGNFKNLREFVFKNIDGYFKIYSKHTPINLVRDLPQGFSALEPLVDLPIGINITRFQTLLALHRSYLTPGDSSSGWTAGAAAYYVGYLQPRTFLLKYNENGTITDAVDCALDPLSETKCTLKSFTVEKGIYQTSNFRVQPTESIVRFPNITNLCPFGEVFNATRFASVYAWDRKRISNCVAYYSVLYNSASFSTFKCYGVSPTKLNDLCFTNVYADSFVIRGDEVRQIAPGQTGKIADYNYKLPDDFTGCVIAWNSNNLDSKVGGNYNYLYRLFRKSNLKPFERDISTEIYQAGSTPCNGVEGFNCYFPLQSYGFQPTNGVGYQPYRVVVLSFELLHAPATVCGPKKSTNLVKNKCVNFNFNGLTGTGVLTESNKKFLPFQQFGRDIADTTDAVRDPQTLEILDITPCSFGGVSVITPGTNTSNQVAVLYQDVNCTEVPVAIHADQLTPTWRVYSTGSNVFQTRAGCLIGAEHVNNSYECDIPIGAGICASYQTQTNSPRRARSVASQSIIAYTMSLGAENSVAYSNNSCAIPTNFTISVTTEILPVSMTKTSVDCTMYICGDSTECSNLLLQYGSFCTQLNRALTGIAVEQDKNTQEVFAQVKQIYKTPPIKDFGGFNFSQILPDPSKPSKRSFIEDLLFNKVTLADAGFIKQYGDCLGDIAARDLICAQKFNGLTVLPPLLTDEMIAQYTSALLAGTITSGWTFGAGAALQIPFAMQMAYRFNGIGVTQNVLYENQKLIANQFNSAIGKIQDSLSSTASALGKLQDVVNQNAQALNTLVKQLSSNFGAISSVLNDILSRLDKVEAEVQIDRLITGRLQSLQTYVTQQLIRAAEIRASANLAATKMSECVLGQSKRVDFCGKGYHLMSFPQSAPHGVVFLHVTYVPAQEKNFTCAPAICHDGKAHFPREGVFVSNGTHWFVTQRNFYEPQIITTDNTFVSGNCDVVIGIVNNTVYDPLQPELDS

SEQ ID NO: 2960 - protein, 1147 aa, Artificial Sequence
  SARS-CoV-2/France/IDF0372/2020__EPI_ISL_406596 spike protein (1-1147)(I712C_T1077C)
MFVFLVLLPLVSSQCVNLTTRTQLPPAYTNSFTRGVYYPDKVFRSSVLHSTQDLFLPFFSNVTWFHAIHVSGTNGTKRFDNPVLPFNDGVYFASTEKSNIIRGWIFGTTLDSKTQSLLIVNNATNVVIKVCEFQFCNDPFLGVYYHKNNKSWMESEFRVYSSANNCTFEYVSQPFLMDLEGKQGNFKNLREFVFKNIDGYFKIYSKHTPINLVRDLPQGFSALEPLVDLPIGINITRFQTLLALHRSYLTPGDSSSGWTAGAAAYYVGYLQPRTFLLKYNENGTITDAVDCALDPLSETKCTLKSFTVEKGIYQTSNFRVQPTESIVRFPNITNLCPFGEVFNATRFASVYAWNRKRISNCVADYSFLYNSASFSTFKCYGVSPTKLNDLCFTNVYADSFVIRGDEVRQIAPGQTGKIADYNYKLPDDFTGCVIAWNSNNLDSKVGGNYNYLYRLFRKSNLKPFERDISTEIYQAGSTPCNGVEGFNCYFPLQSYGFQPTNGVGYQPYRVVVLSFELLHAPATVCGPKKSTNLVKNKCVNFNFNGLTGTGVLTESNKKFLPFQQFGRDIADTTDAVRDPQTLEILDITPCSFGGVSVITPGTNTSNQVAVLYQDVNCTEVPVAIHADQLTPTWRVYSTGSNVFQTRAGCLIGAEHVNNSYECDIPIGAGICASYQTQTNSPRRARSVASQSIIAYTMSLGAENSVAYSNNSCAIPTNFTISVTTEILPVSMTKTSVDCTMYICGDSTECSNLLLQYGSFCTQLNRALTGIAVEQDKNTQEVFAQVKQIYKTPPIKDFGGFNFSQILPDPSKPSKRSFIEDLLFNKVTLADAGFIKQYGDCLGDIAARDLICAQKFNGLTVLPPLLTDEMIAQYTSALLAGTITSGWTFGAGAALQIPFAMQMAYRFNGIGVTQNVLYENQKLIANQFNSAIGKIQDSLSSTASALGKLQDVVNQNAQALNTLVKQLSSNFGAISSVLNDILSRLDKVEAEVQIDRLITGRLQSLQTYVTQQLIRAAEIRASANLAATKMSECVLGQSKRVDFCGKGYHLMSFPQSAPHGVVFLHVTYVPAQEKNFTCAPAICHDGKAHFPREGVFVSNGTHWFVTQRNFYEPQIITTDNTFVSGNCDVVIGIVNNTVYDPLQPELDS

SEQ ID NO: 2961 - protein, 1147 aa, Artificial Sequence
  SARS-CoV-2/Australia/VIC01/2020__EPI_ISL_406844 spike protein (1-1147)(I712C_T1077C)
MFVFLVLLPLVSSQCVNLTTRTQLPPAYTNSFTRGVYYPDKVFRSSVLHSTQDLFLPFFSNVTWFHAIHVSGTNGTKRFDNPVLPFNDGVYFASTEKSNIIRGWIFGTTLDSKTQSLLIVNNATNVVIKVCEFQFCNDPFLGVYYHKNNKSWMESEFRVYSSANNCTFEYVSQPFLMDLEGKQGNFKNLREFVFKNIDGYFKIYSKHTPINLVRDLPQGFSALEPLVDLPIGINITRFQTLLALHRRYLTPGDSSSGWTAGAAAYYVGYLQPRTFLLKYNENGTITDAVDCALDPLSETKCTLKSFTVEKGIYQTSNFRVQPTESIVRFPNITNLCPFGEVFNATRFASVYAWNRKRISNCVADYSVLYNSASFSTFKCYGVSPTKLNDLCFTNVYADSFVIRGDEVRQIAPGQTGKIADYNYKLPDDFTGCVIAWNSNNLDSKVGGNYNYLYRLFRKSNLKPFERDISTEIYQAGSTPCNGVEGFNCYFPLQSYGFQPTNGVGYQPYRVVVLSFELLHAPATVCGPKKSTNLVKNKCVNFNFNGLTGTGVLTESNKKFLPFQQFGRDIADTTDAVRDPQTLEILDITPCSFGGVSVITPGTNTSNQVAVLYQDVNCTEVPVAIHADQLTPTWRVYSTGSNVFQTRAGCLIGAEHVNNSYECDIPIGAGICASYQTQTNSPRRARSVASQSIIAYTMSLGAENSVAYSNNSCAIPTNFTISVTTEILPVSMTKTSVDCTMYICGDSTECSNLLLQYGSFCTQLNRALTGIAVEQDKNTQEVFAQVKQIYKTPPIKDFGGFNFSQILPDPSKPSKRSFIEDLLFNKVTLADAGFIKQYGDCLGDIAARDLICAQKFNGLTVLPPLLTDEMIAQYTSALLAGTITSGWTFGAGAALQIPFAMQMAYRFNGIGVTQNVLYENQKLIANQFNSAIGKIQDSLSSTASALGKLQDVVNQNAQALNTLVKQLSSNFGAISSVLNDILSRLDKVEAEVQIDRLITGRLQSLQTYVTQQLIRAAEIRASANLAATKMSECVLGQSKRVDFCGKGYHLMSFPQSAPHGVVFLHVTYVPAQEKNFTCAPAICHDGKAHFPREGVFVSNGTHWFVTQRNFYEPQIITTDNTFVSGNCDVVIGIVNNTVYDPLQPELDS

SEQ ID NO: 2962 - protein, 1147 aa, Artificial Sequence
  SARS-CoV-2/Germany/BavPat1/2020__EPI_ISL_406862 spike protein (1-1147)(I712C_T1077C)
MFVFLVLLPLVSSQCVNLTTRTQLPPAYTNSFTRGVYYPDKVFRSSVLHSTQDLFLPFFSNVTWFHAIHVSGTNGTKRFDNPVLPFNDGVYFASTEKSNIIRGWIFGTTLDSKTQSLLIVNNATNVVIKVCEFQFCNDPFLGVYYHKNNKSWMESEFRVYSSANNCTFEYVSQPFLMDLEGKQGNFKNLREFVFKNIDGYFKIYSKHTPINLVRDLPQGFSALEPLVDLPIGINITRFQTLLALHRSYLTPGDSSSGWTAGAAAYYVGYLQPRTFLLKYNENGTITDAVDCALDPLSETKCTLKSFTVEKGIYQTSNFRVQPTESIVRFPNITNLCPFGEVFNATRFASVYAWNRKRISNCVADYSVLYNSASFSTFKCYGVSPTKLNDLCFTNVYADSFVIRGDEVRQIAPGQTGKIADYNYKLPDDFTGCVIAWNSNNLDSKVGGNYNYLYRLFRKSNLKPFERDISTEIYQAGSTPCNGVEGFNCYFPLQSYGFQPTNGVGYQPYRVVVLSFELLHAPATVCGPKKSTNLVKNKCVNFNFNGLTGTGVLTESNKKFLPFQQFGRDIADTTDAVRDPQTLEILDITPCSFGGVSVITPGTNTSNQVAVLYQGVNCTEVPVAIHADQLTPTWRVYSTGSNVFQTRAGCLIGAEHVNNSYECDIPIGAGICASYQTQTNSPRRARSVASQSIIAYTMSLGAENSVAYSNNSCAIPTNFTISVTTEILPVSMTKTSVDCTMYICGDSTECSNLLLQYGSFCTQLNRALTGIAVEQDKNTQEVFAQVKQIYKTPPIKDFGGFNFSQILPDPSKPSKRSFIEDLLFNKVTLADAGFIKQYGDCLGDIAARDLICAQKFNGLTVLPPLLTDEMIAQYTSALLAGTITSGWTFGAGAALQIPFAMQMAYRFNGIGVTQNVLYENQKLIANQFNSAIGKIQDSLSSTASALGKLQDVVNQNAQALNTLVKQLSSNFGAISSVLNDILSRLDKVEAEVQIDRLITGRLQSLQTYVTQQLIRAAEIRASANLAATKMSECVLGQSKRVDFCGKGYHLMSFPQSAPHGVVFLHVTYVPAQEKNFTCAPAICHDGKAHFPREGVFVSNGTHWFVTQRNFYEPQIITTDNTFVSGNCDVVIGIVNNTVYDPLQPELDS

SEQ ID NO: 2963 - protein, 1147 aa, Artificial Sequence
  SARS-CoV-2/Wuhan/HBCDC-HB-02/2020__EPI_ISL_412978 spike protein (1-1147)(I712C_T1077C)
MFVFLVLLPLVSSQCVNLTTRTQLPPAYTNSFTRGVYYPDKVFRSSVLHSTQDLFLPFFSNVTWFHAIHVSGTNGTKRFDNPVLPFNDGVYFASTEKSNIIRGWIFGTTLDSKTQSLLIVNNATNVVIKVCEFQFCNDPFLGVYYHKNNKSWMESEFRVYSSANNCTFEYVSQPFLMDLEGKQGNFKNLREFVFKNIDGYFKIYSKHTPINLVRDLPQGFSALEPLVDLPIGINITRFQTLLALHRSYLTPGDSSSGWTAGAAAYYVGYLQPRTFLLKYNENGTITDAVDCALDPLSETKCTLKSFTVEKGIYQTSNFRVQPTESIVRFPNITNLCPFGEVFNATRFASVYAWNRKRISNCVADYSVLYNSASFSTFKCYGVSPTKLNDLCFTNVYADSFVIRGDEVRQIAPGQTGKIADYNYKLPDDFTGCVIAWNSNNLDSKVGGNYNYLYRLFRKSNLKPFERDISTEIYQAGSTPCNGVEGFNCYFPLQSYGFQPTNGVGYQPYRVVVLSFELLHAPATVCGPKKSTNLVKNKCVNFNFNGLTGTGVLTESNKKFLPFQQFGRDIADTTDAVRDPQTLEILDITPCSFGGVSVITPGTNTSNQVAVLYQDVNCTEVPVAIHADQLTPTWRVYSTGSNVFQTRAGCLIGAEHVNNSYECDIPIGAGICASYQTQTNSPRRARSVASQSIIAYTMSLGAENSVAYSNNSCAIPTNFTISVTTEILPVSMTKTSVDCTMYICGDSTECSNFLLQYGSFCTQLNRALTGIAVEQDKNTQEVFAQVKQIYKTPPIKDFGGFNFSQILPDPSKPSKRSFIEDLLFNKVTLADAGFIKQYGDCLGDIAARDLICAQKFNGLTVLPPLLTDEMIAQYTSALLAGTITSGWTFGAGAALQIPFAMQMAYRFNGIGVTQNVLYENQKLIANQFNSAIGKIQDSLSSTASALGKLQDVVNQNAQALNTLVKQLSSNFGAISSVLNDILSRLDKVEAEVQIDRLITGRLQSLQTYVTQQLIRAAEIRASANLAATKMSECVLGQSKRVDFCGKGYHLMSFPQSAPHGVVFLHVTYVPAQEKNFTCAPAICHDGKAHFPREGVFVSNGTHWFVTQRNFYEPQIITTDNTFVSGNCDVVIGIVNNTVYDPLQPELDS

SEQ ID NO: 2964 - protein, 1147 aa, Artificial Sequence
  SARS-CoV-2/Australia/QLD02/2020__EPI_ISL_407896 spike protein (1-1147)(I712C_T1077C)
MFVFLVLLPLVSSQCVNLTTRTQLPPAYTNSFTRGVYYPDKVFRSSVLHSTQDLFLPFFSNVTWFHAIHVSGTNGTKRFDNPVLPFNDGVYFASTEKSNIIRGWIFGTTLDSKTQSLLIVNNATNVVIKVCEFQFCNDPFLGVYYHKNNKSWMESEFRVYSSANNCTFEYVSQPFLMDLEGKQGNFKNLREFVFKNIDGYFKIYSKHTPINLVRDLPQGFSALEPLVDLPIGINITRFQTLLALHRSYLTPGDSSSGWTAGAAAYYVGYLQPRTFLLKYNENGTITDAVDCALDPLSETKCTLKSFTVEKGIYQTSNFRVQPTESIVRFPNITNLCPFGEVFNATRFASVYAWNRKRISNCVADYSVLYNSASFSTFKCYGVSPTKLNDLCFTNVYADSFVIRGDEVRQIAPGQTGKIADYNYKLPDDFTGCVIAWNSNNLDSKVGGNYNYLYRLFRKSNLKPFERDISTEIYQAGSTPCNGVEGFNCYFPLQSYGFQPTNGVGYQPYRVVVLSFELLHAPATVCGPKKSTNLVKNKCVNFNFNGLTGTGVLTESNKKFLPFQQFGRDIADTTDAVRDPQTLEILDITPCSFGGVSVITPGTNTSNQVAVLYQDVNCTEVPVAIHADQLTPTWRVYSTGSNVFQTRAGCLIGAEHVNNSYECDIPIGAGICASYQTQTNSPRRARSVASQSIIAYTMSLGAENSVAYSNNSCAIPTNFTISVTTEILPVSMTKTSVDCTMYICGDSTECSNLLLQYGSFCTQLNRALTGIAVEQDKNTQEVFAQVKQIYKTPPIKDFGGFNFSQILPDPSKPSKRSFIEDLLFNKVTLADAGFIKQYGDCLGDIAARDLICAQKFNGLTVLPPLLTDEMIAQYTSALLAGTITSGWTFGAGAALQIPFAMQMAYRFNGIGVTQNVLYENQKLIANQFNSAIGKIQDSLSSTASALGKLQDVVNQNAQALNTLVKQLSSNFGAISSVLNDILSRLDKVEAEVQIDRLITGRLQSLQTYVTQQLIRAAEIRASANLAATKMSECVLGQSKRVDFCGKGYHLMSFPQSAPHGVVFLHVTYVPAQEKNFTCAPAICHDGKAHFPREGVFVSNGTHWFVTQRNFYEPQIITTDNTFVSGNCDVVIGIVNNTVYDPLQLELDS

SEQ ID NO: 2965 - protein, 1147 aa, Artificial Sequence
  SARS-CoV-2/India/1-31/2020__EPI_ISL_413523 spike protein (1-1147)(I712C_T1077C)
MFVFLVLLPLVSSQCVNLTTRTQLPPAYTNSFTRGVYYPDKVFRSSVLHSTQDLFLPFFSNVTWFHAIHVSGTNGTKRFDNPVLPFNDGVYFASTEKSNIIRGWIFGTTLDSKTQSLLIVNNATNVVIKVCEFQFCNDPFLGVYYHKNNKSWMESEFRVYSSANNCTFEYVSQPFLMDLEGKQGNFKNLREFVFKNIDGYFKIYSKHTPINLVRDLPQGFSALEPLVDLPIGINITRFQTLLALHRSYLTPGDSSSGWTAGAAAYYVGYLQPRTFLLKYNENGTITDAVDCALDPLSETKCTLKSFTVEKGIYQTSNFRVQPTESIVRFPNITNLCPFGEVFNATRFASVYAWNRKRISNCVADYSVLYNSASFSTFKCYGVSPTKLNDLCFTNVYADSFVIRGDEVRQIAPGQTGKIADYNYKLPDDFTGCVIAWNSNNLDSKVGGNYNYLYRLFRKSNLKPFERDISTEIYQAGSTPCNGVEGFNCYFPLQSYGFQPTNGVGYQPYRVVVLSFELLHAPATVCGPKKSTNLVKNKCVNFNFNGLTGTGVLTESNKKFLPFQQFGRDIADTTDAVRDPQTLEILDITPCSFGGVSVITPGTNTSNQVAVLYQDVNCTEVPVAIHADQLTPTWRVYSTGSNVFQTRAGCLIGAEHVNNSYECDIPIGAGICASYQTQTNSPRRARSVASQSIIAYTMSLGAENSVAYSNNSCAIPTNFTISVTTEILPVSMTKTSVDCTMYICGDSTECSNLLLQYGSFCTQLNRALTGIAVEQDKNTQEVFAQVKQIYKTPPIKDFGGFNFSQILPDPSKPSKRSFIEDLLFNKVTLADAGFIKQYGDCLGDIAARDLICAQKFNGLTVLPPLLTDEMIAQYTSALLAGTITSGWTFGAGAALQIPFAMQMAYRFNGIGVTQNVLYENQKLIANQFNSVIGKIQDSLSSTASALGKLQDVVNQNAQALNTLVKQLSSNFGAISSVLNDILSRLDKVEAEVQIDRLITGRLQSLQTYVTQQLIRAAEIRASANLAATKMSECVLGQSKRVDFCGKGYHLMSFPQSAPHGVVFLHVTYVPAQEKNFTCAPAICHDGKAHFPREGVFVSNGTHWFVTQRNFYEPQIITTDNTFVSGNCDVVIGIVNNTVYDPLQPELDS

SEQ ID NO: 2966 - protein, 1147 aa, Artificial Sequence
  SARS-CoV-2/Guangdong/GD2020087-P0008/2020__EPI_ISL_413863 spike protein (1-1147)(I712C_T1077C)
MFVFLVLLPLVSSQCVNLTTRTQLPPAYTNSFTRGVYYPDKVFRSSVLHSTQDLFLPFFSNVTWFHAIHVSGTNGTKRFDNPVLPFNDGVYFASTEKSNIIRGWIFGTTLDSKTQSLLIVNNATNVVIKVCEFQFCNDPFLGVYYHKNNKSWMESEFRVYSSANNCTFEYVSQPFLMDLEGKQGNFKNLREFVFKNIDGYFKIYSKHTPINLVRDLPQGFSALEPLVDLPIGINITRFQTLLALHRSYLTPGDSSSGWTAGAAAYYVGYLQPRTFLLKYNENGTITDAVDCALDPLSETKCTLKSFTVEKGIYQTSNFRVQPTESIVRFPNITNLCPFGEVFNATRFASVYAWNRKRISNCVADYSVLYNSASFSTFKCYGVSPTKLNDLCFTNVYADSFVIRGDEVREIAPGQTGKIADYNYKLPDDFTGCVIAWNSNNLDSKVGGNYNYLYRLFRKSNLKPFERDISTEIYQAGSTPCNGVEGFNCYFPLQSYGFQPTNGVGYQPYRVVVLSFELLHAPATVCGPKKSTNLVKNKCVNFNFNGLTGTGVLTESNKKFLPFQQFGRDIADTTDAVRDPQTLEILDITPCSFGGVSVITPGTNTSNQVAVLYQDVNCTEVPVAIHADQLTPTWRVYSTGSNVFQTRAGCLIGAEHVNNSYECDIPIGAGICASYQTQTNSPRRARSVASQSIIAYTMSLGAENSVAYSNNSCAIPTNFTISVTTEILPVSMTKTSVDCTMYICGDSTECSNLLLQYGSFCTQLNRALTGIAVEQDKNTQEVFAQVKQIYKTPPIKDFGGFNFSQILPDPSKPSKRSFIEDLLFNKVTLADAGFIKQYGDCLGDIAARDLICAQKFNGLTVLPPLLTDEMIAQYTSALLAGTITSGWTFGAGAALQIPFAMQMAYRFNGIGVTQNVLYENQKLIANQFNSAIGKIQDSLSSTASALGKLQDVVNQNAQALNTLVKQLSSNFGAISSVLNDILSRLDKVEAEVQIDRLITGRLQSLQTYVTQQLIRAAEIRASANLAATKMSECVLGQSKRVDFCGKGYHLMSFPQSAPHGVVFLHVTYVPAQEKNFTCAPAICHDGKAHFPREGVFVSNGTHWFVTQRNFYEPQIITTDNTFVSGNCDVVIGIVNNTVYDPLQPELDS

SEQ ID NO: 2967 - protein, 1147 aa, Artificial Sequence
  SARS-CoV-2/Sweden/01/2020__EPI_ISL_411951 spike protein (1-1147)(I712C_T1077C)
MFVFLVLLPLVSSQCVNLTTRTQLPPAYTNSFTRGVYYPDKVFRSSVLHSTQDLFLPFFSNVTWFHAIHVSGTNGTKRFDNPVLPFNDGVYFASTEKSNIIRGWIFGTTLDSKTQSLLIVNNATNVVIKVCEFQFCNDPFLGVYYHKNNKSWMESEFRVYSSANNCTFEYVSQPFLMDLEGKQGNFKNLREFVFKNIDGYFKIYSKHTPINLVRDLPQGFSALEPLVDLPIGINITRFQTLLALHRSYLTPGDSSSGWTAGAAAYYVGYLQPRTFLLKYNENGTITDAVDCALDPLSETKCTLKSFTVEKGIYQTSNFRVQPTESIVRFPNITNLCPFGEVFNATRFASVYAWNRKRISNCVADYSVLYNSASFSTFKCYGVSPTKLNDLCFTNVYADSFVIRGDEVRQIAPGQTGKIADYNYKLPDDFTGCVIAWNSNNLDSKVGGNYNYLYRLFRKSNLKPFERDISTEIYQAGSTPCNGVEGFNCYFPLQSYGFQPTNGVGYQPYRVVVLSFELLHAPATVCGPKKSTNLVKNKCVNFNFNGLTGTGVLTESNKKFLPFQQFGRDIADTTDAVRDPQTLEILDITPCSFGGVSVITPGTNTSNQVAVLYQDVNCTEVPVAIHADQLTPTWRVYSTGSNVFQTRAGCLIGAEHVNNSYECDIPIGAGICASYQTQTNSPRRARSVASQSIIAYTMSLGAENSVAYSNNSCAIPTNFTISVTTEILPVSMTKTSVDCTMYICGDSTECSNLLLQYGSFCTQLNRALTGIAVEQDKNTQEVFAQVKQIYKTPPIKDCGGFNFSQILPDPSKPSKRSFIEDLLFNKVTLADAGFIKQYGDCLGDIAARDLICAQKFNGLTVLPPLLTDEMIAQYTSALLAGTITSGWTFGAGAALQIPFAMQMAYRFNGIGVTQNVLYENQKLIANQFNSAIGKIQDSLSSTASALGKLQDVVNQNAQALNTLVKQLSSNFGAISSVLNDILSRLDKVEAEVQIDRLITGRLQSLQTYVTQQLIRAAEIRASANLAATKMSECVLGQSKRVDFCGKGYHLMSFPQSAPHGVVFLHVTYVPAQEKNFTCAPAICHDGKAHFPREGVFVSNGTHWFVTQRNFYEPQIITTDNTFVSGNCDVVIGIVNNTVYDPLQPELDS

SEQ ID NO: 2968 - protein, 1147 aa, Artificial Sequence
  SARS-CoV-2/Tianmen/HBCDC-HB-07/2020__EPI_ISL_412983 spike protein (1-1147)(I712C_T1077C)
MFVFLVLLPLVSSQCVNLTTRTQLPPAYTNSFTRGVYYPDKVFRSSVLHSTQDLFLPFFSNVTWFHAIHVSGTNGTKRFDNPVLPFNDGVYFASTEKSNIIRGWIFGTTLDSKTQSLLIVNNATNVVIKVCEFQFCNDPFLGVYYHKNNKSWMESEFRVYSSANNCTFEYVSQPFLMDLEGKQGNFKNLREFVFKNIDGYFKIYSKHTPINLVRDLPQGFSALEPLVDLPIGINITRFQTLLALHRSYLTPGDSSSGWTAGAAAYYVGYLQPRTFLLKYNENGTITDAVDCALDPLSETKCTLKSFTVEKGIYQTSNFRVQPTESIVRFPNITNLCPFGEVFNATRFASVYAWNRKRISNCVADYSVLYNSASFSTFKCYGVSPTKLNDLCFTNVYADSFVIRGDEVRQIAPGQTGKIADYNYKLPDDFTGCVIAWNSNNLDSKVGGNYNYLYRLFRKSNLKPFERDISTEIYQAGSTPCNGVEGFNCYFPLQSYGFQPTNGVGYQPYRVVVLSFELLHAPATVCGPKKSTNLVKNKCVNFNFNGLTGTGVLTESNKKFLPFQQFGRDIADTTDAVRDPQTLEILDITPCSFGGVSVITPGTNTSNQVAVLYQDLNCTEVPVAIHADQLTPTWRVYSTGSNVFQTRAGCLIGAEHVNNSYECDIPIGAGICASYQTQTNSPRRARSVASQSIIAYTMSLGAENSVAYSNNSCAIPTNFTISVTTEILPVSMTKTSVDCTMYICGDSTECSNLLLQYGSFCTQLNRALTGIAVEQDKNTQEVFAQVKQIYKTPPIKDFGGFNFSQILPDPSKPSKRSFIEDLLFNKVTLADAGFIKQYGDCLGDIAARDLICAQKFNGLTVLPPLLTDEMIAQYTSALLAGTITSGWTFGAGAALQIPFAMQMAYRFNGIGVTQNVLYENQKLIANQFNSAIGKIQDSLSSTASALGKLQDVVNQNAQALNTLVKQLSSNFGAISSVLNDILSRLDKVEAEVQIDRLITGRLQSLQTYVTQQLIRAAEIRASANLAATKMSECVLGQSKRVDFCGKGYHLMSFPQSAPHGVVFLHVTYVPAQEKNFTCAPAICHDGKAHFPREGVFVSNGTHWFVTQRNFYEPQIITTDNTFVSGNCDVVIGIVNNTVYDPLQPELDS

SEQ ID NO: 2969 - protein, 1147 aa, Artificial Sequence
  SARS-CoV-2/Hong Kong/case42_VM20002493/2020__EPI_ISL_414527 spike protein (1-1147)(I712C_T1077C)
MFVFLVLLPLVSSQCVNLTTRTQLPPAYTNSFTRGVYYPDKVFRSSVLHSTQDLFLPFFSNVTWFHAIHVSGTNGTKRFDNPVLPFNDGVYFASTEKSNIIRGWIFGTTLDSKTQSLLIVNNATNVVIKVCEFQFCNDPFLGVYYHKNNKSWMESEFRVYSSANNCTFEYVSQPFLMDLEGKQGNFKNLREFVFKNIDGYFKIYSKHTPINLVRDLPQGFSALEPLVDLPIGINITRFQTLLALHRSYLTPGDSSSGWTAGAAAYYVGYLQPRTFLLKYNENGTITDAVDCALDPLSETKCTLKSFTVEKGIYQTSNFRVQPTESIVRFPNITNLCPFGEVFNATRFASVYAWNRKRISNCVADYSVLYNSASFSTFKCYGVSPTKLNDLCFTNVYADSFVIRGDEVRQIAPGQTGKIADYNYKLPDDFTGCVIAWNSNNLDSKVGGNYNYLYRLFRKSNLKPFERDISTEIYQAGSTPCNGVEGFNCYFPLQSYGFQPTNGVGYQPYRVVVLSFELLHAPATVCGPKKSTNLVKNKCVNFNFNGLTGTGVLTESNKKFLPFQQFGRDIADTTDAVRDPQTLEILDITPCSFGGVSVITPGTNTSNQVAVLYQDVNCTEVPVAIHADQLTPTWRVYSTGSNVFQTRAGCLIGAEHVNNSYECDIPIGAGICASYQTQTNSPRRARSVASQSIIAYTMSLGAENSVAYSNNSCAIPTNFAISVTTEILPVSMTKTSVDCTMYICGDSTECSNLLLQYGSFCTQLNRALTGIAVEQDKNTQEVFAQVKQIYKTPPIKDFGGFNFSQILPDPSKPSKRSFIEDLLFNKVTLADAGFIKQYGDCLGDIAARDLICAQKFNGLTVLPPLLTDEMIAQYTSALLAGTITSGWTFGAGAALQIPFAMQMAYRFNGIGVTQNVLYENQKLIANQFNSAIGKIQDSLSSTASALGKLQDVVNQNAQALNTLVKQLSSNFGAISSVLNDILSRLDKVEAEVQIDRLITGRLQSLQTYVTQQLIRAAEIRASANLAATKMSECVLGQSKRVDFCGKGYHLMSFPQSAPHGVVFLHVTYVPAQEKNFTCAPAICHDGKAHFPREGVFVSNGTHWFVTQRNFYEPQIITTDNTFVSGNCDVVIGIVNNTVYDPLQPELDS

SEQ ID NO: 2970 - protein, 1147 aa, Artificial Sequence
  SARS-CoV-2/USA/CruiseA-23/2020__EPI_ISL_414482 spike protein (1-1147)(I712C_T1077C)
MFVFLVLLPLVSSQCVNLTTRTQLPPAYTNSFTRGVYYPDKVFRSSVLHSTQDLFLPFFSNVTWFHAIHVSGTNGTKRFDNPVLPFNDGVYFASTEKSNIIRGWIFGTTLDSKTQSLLIVNNATNVVIKVCEFQFCNDPFLGVYYHKNNKSWMESEFRVYSSANNCTFEYVSQPFLMDLEVKQGNFKNLREFVFKNIDGYFKIYSKHTPINLVRDLPQGFSALEPLVDLPIGINITRFQTLLALHRSYLTPGDSSSGWTAGAAAYYVGYLQPRTFLLKYNENGTITDAVDCALDPLSETKCTLKSFTVEKGIYQTSNFRVQPTESIVRFPNITNLCPFGEVFNATRFASVYAWNRKRISNCVADYSVLYNSASFSTFKCYGVSPTKLNDLCFTNVYADSFVIRGDEVRQIAPGQTGKIADYNYKLPDDFTGCVIAWNSNNLDSKVGGNYNYLYRLFRKSNLKPFERDISTEIYQAGSTPCNGVEGFNCYFPLQSYGFQPTNGVGYQPYRVVVLSFELLHAPATVCGPKKSTNLVKNKCVNFNFNGLTGTGVLTESNKKFLPFQQFGRDIADTTDAVRDPQTLEILDITPCSFGGVSVITPGTNTSNQVAVLYQDVNCTEVPVAIHADQLTPTWRVYSTGSNVFQTRAGCLIGAEHVNNSYECDIPIGAGICASYQTQTNSPRRARSVASQSIIAYTMSLGAENSVAYSNNSCAIPTNFTISVTTEILPVSMTKTSVDCTMYICGDSTECSNLLLQYGSFCTQLNRALTGIAVEQDKNTQEVFAQVKQIYKTPPIKDFGGFNFSQILPDPSKPSKRSFIEDLLFNKVTLADAGFIKQYGDCLGDIAARDLICAQKFNGLTVLPPLLTDEMIAQYTSALLAGTITSGWTFGAGAALQIPFAMQMAYRFNGIGVTQNVLYENQKLIANQFNSAIGKIQDSLSSTASALGKLQDVVNQNAQALNTLVKQLSSNFGAISSVLNDILSRLDKVEAEVQIDRLITGRLQSLQTYVTQQLIRAAEIRASANLAATKMSECVLGQSKRVDFCGKGYHLMSFPQSAPHGVVFLHVTYVPAQEKNFTCAPAICHDGKAHFPREGVFVSNGTHWFVTQRNFYEPQIITTDNTFVSGNCDVVIGIVNNTVYDPLQPELDS

SEQ ID NO: 2971 - protein, 1147 aa, Artificial Sequence
  SARS-CoV-2/Hong Kong/case85_VM20002868/2020__EPI_ISL_414519 spike protein (1-1147)(I712C_T1077C)
MFVFLVLVPLVSSQCVNLTTRTQLPPAYTNSFTRGVYYPDKVFRSSVLHSTQDLFLPFFSNVTWFHAIHVSGTNGTKRFDNPVLPFNDGVYFASTEKSNIIRGWIFGTTLDSKTQSLLIVNNATNVVIKVCEFQFCNDPFLGVYYHKNNKSWMESEFRVYSSANNCTFEYVSQPFLMDLEGKQGNFKNLREFVFKNIDGYFKIYSKHTPINLVRDLPQGFSALEPLVDLPIGINITRFQTLLALHRSYLTPGDSSSGWTAGAAAYYVGYLQPRTFLLKYNENGTITDAVDCALDPLSETKCTLKSFTVEKGIYQTSNFRVQPTESIVRFPNITNLCPFGEVFNATRFASVYAWNRKRISNCVADYSVLYNSASFSTFKCYGVSPTKLNDLCFTNVYADSFVIRGDEVRQIAPGQTGKIADYNYKLPDDFTGCVIAWNSNNLDSKVGGNYNYLYRLFRKSNLKPFERDISTEIYQAGSTPCNGVEGFNCYFPLQSYGFQPTNGVGYQPYRVVVLSFELLHAPATVCGPKKSTNLVKNKCVNFNFNGLTGTGVLTESNKKFLPFQQFGRDIADTTDAVRDPQTLEILDITPCSFGGVSVITPGTNTSNQVAVLYQDVNCTEVPVAIHADQLTPTWRVYSTGSNVFQTRAGCLIGAEHVNNSYECDIPIGAGICASYQTQTNSPRRARSVASQSIIAYTMSLGAENSVAYSNNSCAIPTNFTISVTTEILPVSMTKTSVDCTMYICGDSTECSNLLLQYGSFCTQLNRALTGIAVEQDKNTQEVFAQVKQIYKTPPIKDFGGFNFSQILPDPSKPSKRSFIEDLLFNKVTLADAGFIKQYGDCLGDIAARDLICAQKFNGLTVLPPLLTDEMIAQYTSALLAGTITSGWTFGAGAALQIPFAMQMAYRFNGIGVTQNVLYENQKLIANQFNSAIGKIQDSLSSTASALGKLQDVVNQNAQALNTLVKQLSSNFGAISSVLNDILSRLDKVEAEVQIDRLITGRLQSLQTYVTQQLIRAAEIRASANLAATKMSECVLGQSKRVDFCGKGYHLMSFPQSAPHGVVFLHVTYVPAQEKNFTCAPAICHDGKAHFPREGVFVSNGTHWFVTQRNFYEPQIITTDNTFVSGNCDVVIGIVNNTVYDPLQPELDS

SEQ ID NO: 2972 - protein, 1147 aa, Artificial Sequence; identical to SEQ ID NO: 2962
  SARS-CoV-2/England/200990660/2020__EPI_ISL_414523 spike protein (1-1147)(I712C_T1077C)

SEQ ID NO: 2973 - protein, 1147 aa, Artificial Sequence
  SARS-CoV-2/Australia/NSW09/2020__EPI_ISL_413595 spike protein (1-1147)(I712C_T1077C)
MFVFLVLLPLVSSQCVNLTTRTQLPPAYTNSFTRGVYYPDKVFRSSVLHSTQDLFLPFFSNVTWFHAIHVSGTNGTKRFDNPVLPFNDGVYFASTEKSNIIRGWIFGTTLDSKTQSLLIVNNATNVVIKVCEFQFCNDPFLGVYYHKNNKSWMESEFRVYSSANNCTFEYVSQPFLMDLEGKQGNFKNLREFVFKNIDGYFKIYSKHTPINLVRDLPQGFSALEPLVDLPIGINITRFQTLLALHRSYLTPGDSSSGWTAGAAAYYVGYLQPRTFLLKYNENGTITDAVDCALDPLSETKCTLKSFTVEKGIYQTSNFRVQPTESIVRFPNITNLCPFGEVFNATRFASVYAWNRKRISNCVADYSVLYNSASFSTFKCYGVSPTKLNDLCFTNVYADSFVIRGDEVRQIAPGQTGKIADYNYKLPDDFTGCVIAWNSNNLDSKVGGNYNYLYRLFRKSNLKPFERDISTEIYQAGSTPCNGVEGFNCYFPLQSYGFQPTNGVGYQPYRVVVLSFELLHAPATVCGPKKSTNLVKNKCVNFNFNGLTGTGVLTESNKKFLPFQQFGRDIADTTDAVRDPQTLEILDITPCSFGGVSVITPGTNTSNQVAVLYQDVNCTEVPVAIHADQLTPTWRVYSTGSNVFQTRAGCLIGAEHVNNSYECDIPIGAGICASYQTQTNSPRRARSVASQSIIAYTMSLGAENSVAYSNNSCAIPTNFTISVTTEILPVSMTKTSVDCTMYICGDSTECSNLLLQYGSFCTQLNRALTGIAVEQDKNTQEVFAQVKQIYKTPPIKDFGGFNFSQILPDPSKPSKRSFIEDLLFNKVTLADAGFIKQYGDCLGDIAARDLICAQKFNGLTVLPPLLTDEMIAQYTSALLAGTITSGWTFGAGAALQIPFAMQMAYRFNGIGVTQNVLYENQKLIANQFNSAIGKIQDSLSFTASALGKLQDVVNQNAQALNTLVKQLSSNFGAISSVLNDILSRLDKVEAEVQIDRLITGRLQSLQTYVTQQLIRAAEIRASANLAATKMSECVLGQSKRVDFCGKGYHLMSFPQSAPHGVVFLHVTYVPAQEKNFTCAPAICHDGKAHFPREGVFVSNGTHWFVTQRNFYEPQIITTDNTFVSGNCDVVIGIVNNTVYDPLQPELDS

SEQ ID NO: 2974 - protein, 1147 aa, Artificial Sequence; identical to SEQ ID NO: 2954
  SARS-CoV-2/Australia/NSW10/2020__EPI_ISL_413596 spike protein (1-1147)(I712C_T1077C)

SEQ ID NO: 2975 - protein, 1147 aa, Artificial Sequence
  SARS-CoV-2/Switzerland/1000477797/2020__EPI_ISL_413023 spike protein (1-1147)(I712C_T1077C)
MFVFLVLLPLVSSQCVNLTTRTQLPPAYTNSFTRGVYYPDKVFRSSVLHSTQDLFLPFFSNVTWFHAIHVSGTNGTKRFDNPVLPFNDGVYFASTEKSNIIRGWIFGTTLDSKTQSLLIVNNATNVVIKVCEFQFCNDPFLGVYYHKNNKSWMESEFRVYSSANNCTFEYVSQPFLMDLEGKQGNFKNLREFVFKNIDGYFNIYSKHTPINLVRDLPQGFSALEPLVDLPIGINITRFQTLLALHRSYLTPGDSSSGWTAGAAAYYVGYLQPRTFLLKYNENGTITDAVDCALDPLSETKCTLKSFTVEKGIYQTSNFRVQPTESIVRFPNITNLCPFGEVFNATRFASVYAWNRKRISNCVADYSVLYNSASFSTFKCYGVSPTKLNDLCFTNVYADSFVIRGDEVRQIAPGQTGKIADYNYKLPDDFTGCVIAWNSNNLDSKVGGNYNYLYRLFRKSNLKPFERDISTEIYQAGSTPCNGVEGFNCYFPLQSYGFQPTNGVGYQPYRVVVLSFELLHAPATVCGPKKSTNLVKNKCVNFNFNGLTGTGVLTESNKKFLPFQQFGRDIADTTDAVRDPQTLEILDITPCSFGGVSVITPGTNTSNQVAVLYQGVNCTEVPVAIHADQLTPTWRVYSTGSNVFQTRAGCLIGAEHVNNSYECDIPIGAGICASYQTQTNSPRRARSVASQSIIAYTMSLGAENSVAYSNNSCAIPTNFTISVTTEILPVSMTKTSVDCTMYICGDSTECSNLLLQYGSFCTQLNRALTGIAVEQDKNTQEVFAQVKQIYKTPPIKDFGGFNFSQILPDPSKPSKRSFIEDLLFNKVTLADAGFIKQYGDCLGDIAARDLICAQKFNGLTVLPPLLTDEMIAQYTSALLAGTITSGWTFGAGAALQIPFAMQMAYRFNGIGVTQNVLYENQKLIANQFNSAIGKIQDSLSSTASALGKLQDVVNQNAQALNTLVKQLSSNFGAISSVLNDILSRLDKVEAEVQIDRLITGRLQSLQTYVTQQLIRAAEIRASANLAATKMSECVLGQSKRVDFCGKGYHLMSFPQSAPHGVVFLHVTYVPAQEKNFTCAPAICHDGKAHFPREGVFVSNGTHWFVTQRNFYEPQIITTDNTFVSGNCDVVIGIVNNTVYDPLQPELDS

SEQ ID NO: 2976 - protein, 1147 aa, Artificial Sequence
  SARS-CoV-2/Belgium/BA-02291/2020__EPI_ISL_415159 spike protein (1-1147)(I712C_T1077C)
MFVFLVLLPLVSSQCVNLTTRTQLPPAYTNSFTRGVYYPDKVFRSSVLHSTQDLFLPFFSNVTWFHAIHVSGTNGTKRFDNPVLPFNDGVYFASTEKSNIIRGWIFGTTLDSKTQSLLIVNNATNVVIKVCEFQFCNDPFLGVYYHKNNKSWMESEFRVYSSANNCTFEYVSQPFLMDLEGKQGNFKNLREFVFKNIDGYFKIYSKHTPINLVRDLPQGFSALEPLVDLPIGINITRFQTLLALHRSYLTPGDSSSGWTAGAAAYYVGYLQPRTFLLKYNENGTITDAVDCALDPLSETKCTLKSFTVEKGIYQTSNFRVQPTESIVRFPNITNLCPFGEVFNATRFASVYAWNRKRISNCVADYSVLYNSASFSTFKCYGVSPTKLNDLCFTNVYADSFVIRGDEVRQIAPGQTGKIADYNYKLPDDFTGCVIAWNSNNLDSKVGGNYNYLYRLFRRSNLKPFERDISTEIYQAGSTPCNGVEGFNCYFPLQSYGFQPTNGVGYQPYRVVVLSFELLPAPATVCGPKKSTNLVKNKCVNFNFNGLTGTGVLTESNKKFLPFQQFGRDIADTTDAVRDPQTLEILDITPCSFGGVSVITPGTNTSNQVAVLYQGVNCTEVPVAIHADQLTPTWRVYSTGSNVFQTRAGCLIGAEHVNNSYECDIPIGAGICASYQTQTNSPRRARSVASQSIIAYTMSLGAENSVAYSNNSCAIPTNFTISVTTEILPVSMTKTSVDCTMYICGDSTECSNLLLQYGSFCTQLNRALTGIAVEQDKNTQEVFAQVKQIYKTPPIKDFGGFNFSQILPDPSKPSKRSFIEDLLFNKVTLADAGFIKQYGDCLGDIAARDLICAQKFNGLTVLPPLLTDEMIAQYTSALLAGTITSGWTFGAGAALQIPFAMQMAYRFNGIGVTQNVLYENQKLIANQFNSAIGKIQDSLSSAAPALGKLQDVVNQNAQALNTLVKQLSSNFGAISSVLNDILSRLDKVEAEVQIDRLITGRLQSLQTYVTQQLIRAAEIRASANLAATKMSECVLGQSKRVDFCGKGYHLMSFPQSAPHGVVFLHVTYVPAQEKNFTCAPAICHDGKAHFPREGVFVSNGTHWFVTQRNFYEPQIITTDNTFVSGNCDVVIGIVNNTVYDPLQPELDS

SEQ ID NO: 2977 - protein, 1147 aa, Artificial Sequence
  SARS-CoV-2/USA/WA8-UW5/2020__EPI_ISL_413486 spike protein (1-1147)(I712C_T1077C)
MFVFLVLLPLVSSQCVNLTTRTQLPPAYTNSFTRGVYYPDKVFRSSVLHSTQDLFLPFFSNVTWFHAIHVSGTNGTKRFDNPVLPFNDGVYFASTEKSNIIRGWIFGTTLDSKTQSLLIVNNATNVVIKVCEFQFCNDPFLGVYYHKNNKSWMESEFRVYSSANNCTFEYVSQPFLMDLEGKQGNFKNLREFVFKNIDGYFKIYSKHTPINLVRDLPQGFSALEPLVDLPIGINITRFQTLLALHRSYLTPGDSSSGWTAGAAAYYVGYLQPRTFLLKYNENGTITDAVDCALDPLSETKCTLKSFTVEKGIYQTSNFRVQPTESIVRFPNITNLCPFGEVFNATRFASVYAWNRKRISNCVADYSVLYNSASFSTFKCYGVSPTKLNDLCFTNVYADSFVIRGDEVRQIAPGQTGKIADYNYKLPDDFTGCVIAWNSNNLDSKVGGNYNYLYRLFRKSNLKPFERDISTEIYQAGSTPCNGVEGFNCYFPLQSYGFQPTNGVGYQPYRVVVLSFELLHAPATVCGPKKSTNLVKNKCVNFNFNGLTGTGVLTESNKKFLPFQQFGRDIADTTDAVRDPQTLEILDITPCSFGGVSVITPGTNTSNQVAVLYQDVNCTEVPVAIHADQLTPTWRVYSTGSNVFQTRAGCLIGAEYVNNSYECDIPIGAGICASYQTQTNSPRRARSVASQSIIAYTMSLGAENSVAYSNNSCAIPTNFTISVTTEILPVSMTKTSVDCTMYICGDSTECSNLLLQYGSFCTQLNRALTGIAVEQDKNTQEVFAQVKQIYKTPPIKDFGGFNFSQILPDPSKPSKRSFIEDLLFNKVTLADAGFIKQYGDCLGDIAARDLICAQKFNGLTVLPPLLTDEMIAQYTSALLAGTITSGWTFGAGAALQIPFAMQMAYRFNGIGVTQNVLYENQKLIANQFNSAIGKIQDSLSSTASALGKLQDVVNQNAQALNTLVKQLSSNFGAISSVLNDILSRLDKVEAEVQIDRLITGRLQSLQTYVTQQLIRAAEIRASANLAATKMSECVLGQSKRVDFCGKGYHLMSFPQSAPHGVVFLHVTYVPAQEKNFTCAPAICHDGKAHFPREGVFVSNGTHWFVTQRNFYEPQIITTDNTFVSGNCDVVIGIVNNTVYDPLQPELDS

SEQ ID NO: 2978 - protein, 1147 aa, Artificial Sequence
  SARS-CoV-2/England/20102000506/2020__EPI_ISL_415147 spike protein (1-1147)(I712C_T1077C)
MFVFLVLLPLVSSQCVNLTTRTQLPPAYTNSFTRGVYYPDKVFRSSVLHSTQDLFLPFFSNVTWFHAIHVSGTNGTKRFDNPVLPFNDGVYFASTEKSNIIRGWIFGTTLDSKTQSLLIVNNATNVVIKVCEFQFCNDPFLGVYYHKNNKSWMESEFRVYSSANNCTFEYVSQPFLMDLEGKQGNFKNLREFVFKNIDGYFKIYSKHTPINLVRDLPQGFSALEPLVDLPIGINITRFQTLLALHRSYLTPGDSSSGWTAGAAAYYVGYLQPRTFLLKYNENGTITDAVDCALDPLSETKCTLKSFTVEKGIYQTSNFRVQPTESIVRFPNITNLCPFGEVFNATRFASVYAWNRKRISNCVADYSVLYNSASFSTFKCYGVSPTKLNDLCFTNVYADSFVIRGDEVRQIAPGQTGKIADYNYKLPDDFTGCVIAWNSNNLDSKVGGNYNYLYRLFRKSNLKPFERDISTEIYQAGSTPCNGVEGFNCYFPLQSYGFQPTNGVGYQPYRVVVLSFELLHAPATVCGPKKSTNLVKNKCVNFNFNGLTGTGVLTESNKKFLPFQQFGRDIADTTDAVRDPQTLEILDITPCSFGGVSVITPGTNTSNQVAVLYQGVNCTEVPVAIHADQLTPTWRVYSTGSNVFQTRAGCLIGAEHVNNSYECDIPIGAGICASYQTQTNSPRRARSVASQSIIAYTMSLGAENSVAYSNNSCAIPTNFTISVTTEILPVSMTKTSVDCTMYICGDSTECSNLLLQYGSFCTQLNRALTGIAVEQDKNTQEVFAQVKQIYKTPPIKDFGGFNFSQILPDPSKPSKRSFIEDLLFNKVTLADAGFIKQYGYCLGDIAARDLICAQKFNGLTVLPPLLTDEMIAQYTSALLAGTITSGWTFGAGAALQIPFAMQMAYRFNGIGVTQNVLYENQKLIANQFNSAIGKIQDSLSSTASALGKLQDVVNQNAQALNTLVKQLSSNFGAISSVLNDILSRLDKVEAEVQIDRLITGRLQSLQTYVTQQLIRAAEIRASANLAATKMSECVLGQSKRVDFCGKGYHLMSFPQSAPHGVVFLHVTYVPAQEKNFTCAPAICHDGKAHFPREGVFVSNGTHWFVTQRNFYEPQIITTDNTFVSGNCDVVIGIVNNTVYDPLQPELDS

SEQ ID NO: 2979 - protein, 1147 aa, Artificial Sequence
  SARS-CoV-2/Belgium/VAG-03013/2020__EPI_ISL_415155 spike protein (1-1147)(I712C_T1077C)
MFVFLVLLPLVSSQCVNLTTRTQLPPAYTNSFTRGVYYPDKVFRSSVLHSTQDLFLPFFSNVTWFHAIHVSGTNGTKRFDNPVLPFNDGVYFASTEKSNIIRGWIFGTTLDSKTQSLLIVNNATNVVIKVCEFQFCNDPFLGVYYHKNNKSWMESEFRVYSSANNCTFEYVSQPFLMDLEGKQGNFKNLREFVFKNIDGYFKIYSKHTPINLVRDLPQGFSALEPLVDLPIGINITRFQTLLALHRSYLTPGDSSSGWTAGAAAYYVGYLQPRTFLLKYNENGTITDAVDCALDPLSETKCTLKSFTVEKGIYQTSNFRVQPTESIVRFPNITNLCPFGEVFNATRFASVYAWNRKRISNCVADYSVLYNSASFSTFKCYGVSPTKLNDLCFTNVYADSFVIRGDEVRQIAPGQTGKIADYNYKLPDDFTGCVIAWNSNNLDSKVGGNYNYLYRLFRKSNLKPFERDISTEIYQAGSTPCNGVEGFNCYFPLQSYGFQPTNGVGYQPYRVVVLSFELLHAPATVCGPKKSTNLVKNKCVNFNFNGLTGTGVLTESNKKFLPFQQFGRDIADTTDAVRDPQTLEILDITPCSFGGVSVITPGTNTSNQVAVLYQGVNCTEVPVAIHADQLTPTWRVYSTGSNVFQTRAGCLIGAEHVNNSYECDIPIGAGICASYQTQTNSPRRARSVASQSIIAYTMSLGAENSVAYSNNSCAIPTNFTISVTTEILPVSMTKTSVDCTMYICGDSTECSNLLLQYGSFCTQLNRALTGIAVEQDKNTQEVFAQVKQIYKTPPIKDFGGFNFSQILPDPSKPSKRSFIEDLLFNKVTLADAGFIKQYGDCLGDIAARDLICAQKFNGLTVLPPLLTDEMIAQYTSALLAGTITSGWTFGAGAALQIPFAMQMAYRFNGIGVTQNVLYENQKLIANQFNSAIGKIQDSLSSTATALGKLQDVVNQNAQALNTLVKQLSSNFGAISSVLNDILSRLDKVEAEVQIDRLITGRLQSLQTYVTQQLIRAAEIRASANLAATKMSECVLGQSKRVDFCGKGYHLMSFPQSAPHGVVFLHVTYVPAQEKNFTCAPAICHDGKAHFPREGVFVSNGTHWFVTQRNFYEPQIITTDNTFVSGNCDVVIGIVNNTVYDPLQPELDS

SEQ ID NO: 2980 - protein, 1147 aa, Artificial Sequence
  SARS-CoV-2/Belgium/BC-03016/2020__EPI_ISL_415157 spike protein (1-1147)(I712C_T1077C)
MFVFLVLLPLVSSQCVNLTTRTQLPPAYTNSFTRGVYYPDKVFRSSVLHSTQDLFLPFFSNVTWFHAIHVSGTNGTKRFDNPVLPFNDGVYFASTEKSNIIRGWIFGTTLDSKTQSLLIVNNATNVVIKVCEFQFCNDPFLGVYYHKNNKSWMESEFRVYSSANNCTFEYVSQPFLMDLEGKQGNFKNLREFVFKNIDGYFKIYSKHTPINLVRDLPQGFSALEPLVDLPIGINITRFQTLLALHRSYLTPGDSSSGWTAGAAAYYVGYLQPRTFLLKYNENGTITDAVDCALDPLSETKCTLKSFTVEKGIYQTSNFRVQPTESIVRFPNITNLCPFGEVFNATRFASVYAWNRKRISNCVADYSVLYNSASFSTFKCYGVSPTKLNDLCFTNVYADSFVIRGDEVRQIAPGQTGKIADYNYKLPDDFTGCVIAWNSNNLDSKVGGNYNYLYRLFRKSNLKPFERDISTEIYQAGSTPCNGVEGFNCYFPLQSYGFQPTNGVGYQPYRVVVLSFELLHAPATVCGPKKSTNLVKNKCVNFNFNGLTGTGVLTESNKKFLPFQQFGRDIADTTDAVRDPQTLEILDITPCSFGGVSVITPGTNTSNQVAVLYQGVNCTEVPVAIHADQLTPTWRVYSTGSNVFQTRAGCLIGAEHVNNSYECDIPIGAGICASYQTQTNSPRRARSVASQSIIAYTMSLGAENSVAYSNNSCAIPTNFTISVTTEILPVSMTKTSVDCTMYICGDSTECSNLLLQYGSFCTQLNRALTGIAVEQDKNTQEVFAQVKQIYKTPPIKDFGGFNFSQILPDPSKPSKRSFIEDLLFNKVTLADAGFIKQYGDCLGDIAARDLICAQKFNGLTVLPPLLTDEMIAQYTSALLAGTITSGWTFGAGAALQIPFAMQMAYRFNGIGVTQNVLYENQKLIANQFNSAIGKIQDSLSSTAPALGKLQDVVNQNAQALNTLVKQLSSNFGAISSVLNDILSRLDKVEAEVQIDRLITGRLQSLQTYVTQQLIRAAEIRASANLAATKMSECVLGQSKRVDFCGKGYHLMSFPQSAPHGVVFLHVTYVPAQEKNFTCAPAICHDGKAHFPREGVFVSNGTHWFVTQRNFYEPQIITTDNTFVSGNCDVVIGIVNNTVYDPLQPELDS

SEQ ID NO: 2981 - protein, 1147 aa, Artificial Sequence
  SARS-CoV-2/Germany/BavPat3/2020__EPI_ISL_414521 spike protein (1-1147)(I712C_T1077C)
MFVFLVLLPLVSSQCVNLTTRTQLPPAYTNSFTRGVYYPDKVFRSSVLHSTQDLFLPFFSNVTWFHAIHVSGTNGTKRFDNPVLPFNDGVYFASTEKSNIIRGWIFGTTLDSKTQSLLIVNNATNVVIKVCEFQFCNDPFLGVYYHKNNKSWMESEFRVYSSANNCTFEYVSQPFLMDLEGKQGNFKNLREFVFKNIDGYFKIYSKHTPINLVRDLPQGFSALEPLVDLPIGINITRFQTLLALHRSYLTPGDSSSGWTAGAAAYYVGYLQPRTFLLKYNENGTITDAVDCALDPLSETKCTLKSFTVEKGIYQTSNFRVQPTESIVRFPNITNLCPFGEVFNATRFASVYAWNRKRISNCVADYSVLYNSASFSTFKCYGVSPTKLNDLCFTNVYADSFVIRGDEVRQIAPGQTGKIADYNYKLPDDFTGCVIAWNSNNLDSKVGGNYNYLYRLFRKSNLKPFERDISTEIYQAGSTPCNGVEGFNCYFPLQSYGFQPTNGVGYQPYRVVVLSFELLHAPATVCGPKKSTNLVKNKCVNFNFNGLTGTGVLTESNKKFLPFQQFGRDIADTTDAVRDPQTLEILDITPCSFGGVSVITPGTNTSNQVAVLYQDVNCTEVPVAIHADQLTPTWRVYSTGSNVFQTRAGCLIGAEHVNNSYECDIPIGAGICASYQTQTNSPRRARSVASQSIIAYTMSLGAENSVAYSNNSCAIPTNFTISVTTEILPVSMTKTSVDCTMYICGDSTECSNLLLQYGSFCTQLNRALTGIAVEQDKNTQQVFAQVKQIYKTPPIKDFGGFNFSQILPDPSKPSKRSFIEDLLFNKVTLADAGFIKQYGDCLGDIAARDLICAQKFNGLTVLPPLLTDEMIAQYTSALLAGTITSGWTFGAGAALQIPFAMQMAYRFNGIGVTQNVLYENQKLIANQFNSAIGKIQDSLSSTASALGKLQDVVNQNAQALNTLVKQLSSNFGAISSVLNDILSRLDKVEAEVQIDRLITGRLQSLQTYVTQQLIRAAEIRASANLAATKMSECVLGQSKRVDFCGKGYHLMSFPQSAPHGVVFLHVTYVPAQEKNFTCAPAICHDGKAHFPREGVFVSNGTHWFVTQRNFYEPQIITTDNTFVSGNCDVVIGIVNNTVYDPLQPELDS

SEQ ID NO: 2982 - protein, 1147 aa, Artificial Sequence
  SARS-CoV-2/France/HF1805/2020__EPI_ISL_414628 spike protein (1-1147)(I712C_T1077C)
MFVFLVLLPLVSSQCVNLTTRTQLPPAYTNSFTRGVYYPDKVFRSSVLHSTQDLFLPFFSNVTWFHAIHVSGTNGTKRFDNPVLPFNDGVYFASTEKSNIIRGWIFGTTLDSKTQSLLIVNNATNVVIKVCEFQFCNDPFLGVYYHKNNKSWMESEFRVYSSANNCTFEYVSQPFLMDLEGKQGNFKNLREFVFKNIDGYFKIYSKHTPINLVRDLPQGFSALEPLVDLPIGINITRFQTLLALHRSYLTPGDSSSGWTAGAAAYYVGYLQPRTFLLKYNENGTITDAVDCALDPLSETKCTLKSFTVEKGIYQTSNFRVQPTESIVRFPNITNLCPFGEVFNATRFASVYAWNRKRISNCVADYSVLYNSASFSTFKCYGVSPTKLNDLCFTNVYADSFVIRGDEVRQIAPGQTGKIADYNYKLPDDFTGCVIAWNSNNLDSKVGGNYNYLYRLFRKSNLKPFERDISTEIYQAGSTPCNGVEGFNCYFPLQSYGFQPTNGVGYQPYRVVVLSFELLHAPATVCGPKKSTNLVKNKCVNFNFNGLTGTGVLTESNKKFLPFQQFGRDIADTTDAVRDPQTLEILDITPCSFGGVSVITPGTNTSNQVAVLYQGVNCTEVPVAIHADQLTPTWRVYSTGSNVFQTRAGCLIGAEHVNNSYECDIPIGAGICASYQTQTNSPRRARSVASQSIIAYTMSLGAENSVAYSNNSCAIPTNFTISVTTEILPVSMTKTSVDCTMYICGDSTECSNLLLQYGSFCTQLNRALTGIAVEQDKNTQEVFAQVKQIYKTPPIKDFGGFNFSQILPDPSKPSKRSFIEDLLFNKVTLADAGFIKQYGDCLGDIAARDLICAQKFNGLTVLPPLLTDEMIAQYTSALLAGTITSGWTFGAGAALQIPFAMQMAYRFNGIGVTQNVLYENQKLIANQFNSAIGKIQDSLSSTASALGKLQDVVNQNAQALNTLVKQLSSNFGAISSVLNDILSRLDKVEAEVQIDRLITGRLQSLQTYVTQQLIRAAEIRASANLAATKMSECVLGQSKRVDFCGKGYHLMSFPQSAPHGVVFLHVTYVPAQEKNFTCAPAICHDGKAHFPREGVFVSNGTHWFVTQRNFYEPQIITTDNTFVSGNCDVVIGVVNNTVYDPLQPELDS

SEQ ID NO: 2983 - protein, 1147 aa, Artificial Sequence
  SARS-CoV-2/Netherlands/ZuidHolland_9/2020__EPI_ISL_414445 spike protein (1-1147)(I712C_T1077C)
MFVFLVLLPLVSSQCVNLTTRTQLPPAYTNSFTRGVYYPDKVFRSSVLHSTQDLFLPFFSNVTWFHAIHVSGTNGTKRFDNPVLPFNDGVYFASTEKSNIIRGWIFGTTLDSKTQSLLIVNNATNVVIKVCEFQFCNDPFLGVYYHKNNKSWMESEFRVYSSANNCTFEYVSQPFLMDLEGKQGNFKNLREFVFKNIDGYFKIYSKHTPINLVRDLPQGFSALEPLVDLPIGINITRFQTLLALHRSYLTPGDSSSGWTAGAAAYYVGYLQPRTFLLKYNENGTITDAVDCALDPLSETKCTLKSFTVEKGIYQTSNFRVQPTESIVRFPNITNLCPFGEVFNATRFASVYAWNRKRISNCVADYSVLYNSASFSTFKCYGVSPTKLNDLCFTNVYADSFVIRGDEVRQIAPGQTGKIADYNYKLPDDFTGCVIAWNSNNLDSKVGGNYNYLYRLFRKSNLKPFERDISTEIYQAGSTPCNGVEGFNCYFPLQSYGFQPTNGVGYQPYRVVVLSFELLHAPATVCGPKKSTNLVKNKCVNFNFNGLTGTGVLTESNKKFLPFQQFGRDIADTTDAVRDPQTLEILDITPCSFGGVSVITPGTNTSNQVAVLYQGVNCTEVPVAIHADQLTPTWRVYSTGSNVFQTRAGCLIGAEHVNNSYECDIPIGAGICASYQTQTNSPRRARSVASQSIIAYTMSLGAENSVAYSNNSCAIPTNFTISVTTEILPVSMTKTSVDCTMYICGDSTECSNLLLQYGSFCTQLNRALTGIAVEQDKNTQEVFAQVKQIYKTPPIKDFGGFNFSQILPDPSKPSKRSFIEDLLFNKVTLADAGFIKQYGDCLGDIAARDLICVQKFNGLTVLPPLLTDEMIAQYTSALLAGTITSGWTFGAGAALQIPFAMQMAYRFNGIGVTQNVLYENQKLIANQFNSAIGKIQDSLSSTASALGKLQDVVNQNAQALNTLVKQLSSNFGAISSVLNDILSRLDKVEAEVQIDRLITGRLQSLQTYVTQQLIRAAEIRASANLAATKMSECVLGQSKRVDFCGKGYHLMSFPQSAPHGVVFLHVTYVPAQEKNFTCAPAICHDGKAHFPREGVFVSNGTHWFVTQRNFYEPQIITTDNTFVSGNCDVVIGIVNNTVYDPLQPELDS

SEQ ID NO: 2984 - protein, 1147 aa, Artificial Sequence
  SARS-CoV-2/Finland/FIN03032020A/2020__EPI_ISL_413602 spike protein (1-1147)(I712C_T1077C)
MFVFLVLLPLVSSQCVNLTTRTQLPPAYTNSFTRGVYYPDKVFRSSVLHSTQDLFLPFFSNVTWFHAIHVSGTNGTKRFDNPVLPFNDGVYFASTEKSNIIRGWIFGTTLDSKTQSLLIVNNATNVVIKVCEFQFCNDPFLGVYYHKNNKSWMESEFRVYSSANNCTFEYVSQPFLMDLEGKQGNFKNLREFVFKNIDGYFKIYSKHTPINLVRDLPQGFSALEPLVDLPIGINITRFQTLLALHRSYLTPGDSSSGWTAGAAAYYVGYLQPRTFLLKYNENGTITDAVDCALDPLSETKCTLKSFTVEKGIYQTSNFRVQPTESIVRFPNITNLCPFGEVFNATRFASVYAWNRKRISNCVADYSVLYNSASFSTFKCYGVSPTKLNDLCFTNVYADSFVIRGDEVRQIAPGQTGKIADYNYKLPDDFTGCVISWNSNNLDSKVGGNYNYLYRLFRKSNLKPFERDISTEIYQAGSTPCNGVEGFNCYFPLQSYGFQPTNGVGYQPYRVVVLSFELLHAPATVCGPKKSTNLVKNKCVNFNFNGLTGTGVLTESNKKFLPFQQFGRDIADTTDAVRDPQTLEILDITPCSFGGVSVITPGTNTSNQVAVLYQGVNCTEVPVAIHADQLTPTWRVYSTGSNVFQTRAGCLIGAEHVNNSYECDIPIGAGICASYQTQTNSPRRARSVASQSIIAYTMSLGAENSVAYSNNSCAIPTNFTISVTTEILPVSMTKTSVDCTMYICGDSTECSNLLLQYGSFCTQLNRALTGIAVEQDKNTQEVFAQVKQIYKTPPIKDFGGFNFSQILPDPSKPSKRSFIEDLLFNKVTLADAGFIKQYGDCLGDIAARDLICAQKFNGLTVLPPLLTDEMIAQYTSALLAGTITSGWTFGAGAALQIPFAMQMAYRFNGIGVTQNVLYENQKLIANQFNSAIGKIQDSLSSTASALGKLQDVVNQNAQALNTLVKQLSSNFGAISSVLNDILSRLDKVEAEVQIDRLITGRLQSLQTYVTQQLIRAAEIRASANLAATKMSECVLGQSKRVDFCGKGYHLMSFPQSAPHGVVFLHVTYVPAQEKNFTCAPAICHDGKAHFPREGVFVSNGTHWFVTQRNFYEPQIITTDNTFVSGNCDVVIGIVNNTVYDPLQPELDS

SEQ ID NO: 2985 - protein, 1147 aa, Artificial Sequence
  SARS-CoV-2/France/GE1977/2020__EPI_ISL_414632 spike protein (1-1147)(I712C_T1077C)
MFVFLVLLPLVSSQCVNLTTRTQLPPAYTNSFTRGVYYPDKVFRSSVLHSTQDLFLPFFSNVTWFHAIHVSGTNGTKRFDNPVLPFNDGVYFASTEKSNIIRGWIFGTTLDSKTQSLLIVNNATNVVIKVCEFQFCNDPFLGVYYHKNNKSWMESEFRVYSSANNCTFEYVSQPFLMDLEGKQGNFKNLREFVFKNIDGYFKIYSKHTPINLVRDLPQGFSALEPLVDLPIGINITRFQTLLALHRSYLTPGDSSSGWTAGAAAYYVGYLQPRTFLLKYNENGTITDAVDCALDPLSETKCTLKSFTVEKGIYQTSNFRVQPTESIVRFPNITNLCPFGEVFNATRFASVYAWNRKRISNCVADYSVLYNSASFSTFKCYGVSPTKLNDLCFTNVYADSFVIRGDEVRQIAPGQTGKIADYNYKLPDDFTGCVIAWNSNNLDSKVGGNYNYLYRLFRKSNLKPFERDISTEIYQAGSTPCNGVEGFNCYFPLQSYGFQPTNGVGYQPYRVVVLSFELLHAPATVCGPKKSTNLVKNKCVNFNFNGLTGTGVLTESNKKFLPFQQFGRDIADTTDAVRDPQTLEILDITPCSFGGVSVITPGTNTSNQVAVLYQGVNCTEVPVAIHADQLTPTWRVYSTGSNVFQTRAGCLIGAEHVNNSYECDIPIGAGICASYQTQTNSPRRARSVASQSIIAYTMSLGAENSVAYSNNSCAIPTNFTISVTTEILPVSMTKTSVDCTMYICGDSTECSNLLLQYGSFCTQLNRALTGIAVEQDKNTQEVFAQVKQIYKTPPIKDFGGFNFSQILPDPSKPSKRSFIEDLLFNKVTLADAGFIKQYGDCLGDIAARDLICAQKFNGLTVLPPLLTDEMIAQYTSALLAGTITSGWTFGAGAALQIPFAMQMAYRFNGIGVTQNVLYENQKLIANQFNSAIGKIQDSLFSTASALGKLQDVVNQNAQALNTLVKQLSSNFGAISSVLNDILSRLDKVEAEVQIDRLITGRLQSLQTYVTQQLIRAAEIRASANLAATKMSECVLGQSKRVDFCGKGYHLMSFPQSAPHGVVFLHVTYVPAQEKNFTCAPAICHDGKAHFPREGVFVSNGTHWFVTQRNFYEPQIITTDNTFVSGNCDVVIGIVNNTVYDPLQPELDS

SEQ ID NO: 2986 - protein, 1147 aa, Artificial Sequence
  SARS-CoV-2/Finland/FIN-313/2020__EPI_ISL_414641 spike protein (1-1147)(I712C_T1077C)
MFVFLVLLPLVSSQCVNLTTRTQLPPAYTNSFTRGVYYPDKVFRSSVLHSTQDLFLPFFSNVTWFHAIHVSGTNGTKRFDNPVLPFNDGVYFASTEKSNIIRGWIFGTTLDSKTQSLLIVNNATNVVIKVCEFQFCNDPFLGVYYHKNNKSWMESEFRVYSSANNCTFEYVSQPFLMDLEGKQGNFKNLREFVFKNIDGYFKIYSKHTPINLVRDLPQGFSALEPLVDLPIGINITRFKTLLALHRSYLTPGDSSSGWTAGAAAYYVGYLQPRTFLLKYNENGTITDAVDCALDPLSETKCTLKSFTVEKGIYQTSNFRVQPTESIVRFPNITNLCPFGEVFNATRFASVYAWNRKRISNCVADYSVLYNSASFSTFKCYGVSPTKLNDLCFTNVYADSFVIRGDEVRQIAPGQTGKIADYNYKLPDDFTGCVIAWNSNNLDSKVGGNYNYLYRLFRKSNLKPFERDISTEIYQAGSTPCNGVEGFNCYFPLQSYGFQPTNGVGYQPYRVVVLSFELLHAPATVCGPKKSTNLVKNKCVNFNFNGLTGTGVLTESNKKFLPFQQFGRDIADTTDAVRDPQTLEILDITPCSFGGVSVITPGTNTSNQVAVLYQGVNCTEVPVAIHADQLTPTWRVYSTGSNVFQTRAGCLIGAEHVNNSYECDIPIGAGICASYQTQTNSPRRARSVASQSIIAYTMSLGAENSVAYSNNSCAIPTNFTISVTTEILPVSMTKTSVDCTMYICGDSTECSNLLLQYGSFCTQLNRALTGIAVEQDKNTQEVFAQVKQIYKTPPIKDFGGFNFSQILPDPSKPSKRSFIEDLLFNKVTLADAGFIKQYGDCLGDIAARDLICAQKFNGLTVLPPLLTDEMIAQYTSALLAGTITSGWTFGAGAALQIPFAMQMAYRFNGIGVTQNVLYENQKLIANQFNSAIGKIQDSLSSTASALGKLQDVVNQNAQALNTLVKQLSSNFGAISSVLNDILSRLDKVEAEVQIDRLITGRLQSLQTYVTQQLIRAAEIRASANLAATKMSECVLGQSKRVDFCGKGYHLMSFPQSAPHGVVFLHVTYVPAQEKNFTCAPAICHDGKAHFPREGVFVSNGTHWFVTQRNFYEPQIITTDNTFVSGNCDVVIGIVNNTVYDPLQPELDS

SEQ ID NO: 2987 - protein, 1147 aa, Artificial Sequence
  SARS-CoV-2/Netherlands/ZuidHolland_2/2020__EPI_ISL_414556 spike protein (1-1147)(I712C_T1077C)
MFVFLVLLPLVSSQCVNLTTRTQLPPAYTNSFTRGVYYPDKVFRSSVLHSTQDLFLPFFSNVTWFHAIHVSGTNGTKRFDNPVLPFNDGVYFASTEKSNIIRGWIFGTTLDSKTQSLLIVNNATNVVIKVCEFQFCNDPFLGVYYHKNNKSWMESEFRVYSSANNCTFEYVSQPFLMDLEGKQGNFKNLREFVFKNIDGYFKIYSKHTPINLVRDLPQGFSALEPLVDLPIGINITRFQTLLALHRSYLTPGDSSSGWTAGAAAYYVGYLQPRTFLLKYNENGTITDAVDCALDPLSETKCTLKSFTVEKGIYQTSNFRVQPTESIVRFPNITNLCPFGEVFNATRFASVYAWNRKRISNCVADYSVLYNSASFSTFKCYGVSPTKLNDLCFTNVYADSFVIRGDEVRQIAPGQTGKIADYNYKLPDDFTGCVIAWNSNNLDSKVGGNYNYLYRLFRKSNLKPFERDISTEIYQAGSTPCNGVEGFNCYFPLQSYGFQPTNGVGYQPYRVVVLSFELLHAPATVCGPKKSTNLVKNKCVNFNFNGLTGTGVLTESNKKFLPFQQFGRDIADTTDAVRDPQTLEILDITPCSFGGVSVITPGTNTSNQVAVLYQGVNCTEVPVAIHADQLTPTWRVYSTGSNVFQTRAGCLIGAEHVNNSYECDIPIGAGICASYQTQTNSPRRARSVASQSIIAYTMSLGAENSVAYSNNSCAIPTNFTISVTTEILPVSMTKTSVDCTMYICGDSTECSNLLLQYGSFCTQLNRALTGIALEQDKNTQEVFAQVKQIYKTPPIKDFGGFNFSQILPDPSKPSKRSFIEDLLFNKVTLADAGFIKQYGDCLGDIAARDLICAQKFNGLTVLPPLLTDEMIAQYTSALLAGTITSGWTFGAGAALQIPFAMQMAYRFNGIGVTQNVLYENQKLIANQFNSAIGKIQDSLSSTASALGKLQDVVNQNAQALNTLVKQLSSNFGAISSVLNDILSRLDKVEAEVQIDRLITGRLQSLQTYVTQQLIRAAEIRASANLAATKMSECVLGQSKRVDFCGKGYHLMSFPQSAPHGVVFLHVTYVPAQEKNFTCAPAICHDGKAHFPREGVFVSNGTHWFVTQRNFYEPQIITTDNTFVSGNCDVVIGIVNNTVYDPLQPELDS

SEQ ID NO: 2988 - protein, 1147 aa, Artificial Sequence
  SARS-CoV-2/USA/WA-UW31/2020__EPI_ISL_414618 spike protein (1-1147)(I712C_T1077C)
MFVFLVLLPLVSSQCVNLTTRTQLPPAYTNSFTRGVYYPDKVFRSSVLHSTQDLFLPFFSNVTWFHAIHVSGTNGTKRFDNPVLPFNDGVYFASTEKSNIIRGWIFGTTLDSKTQSLLIVNNATNVVIKVCEFQFCNDPFLGVYYHKNNKSWMESEFRVYSSANNCTFEYVSQPFLMDLEGKQGNFKNLREFVFKNIDGYFKIYSKHTPINLVRDLPQGFSALEPLVDLPIGINITRFQTLLALHRSYLTPGDSSSGWTAGAAAYYVGYLQPRTFLLKYNENGTITDAVDCALDPLSETKCTLKSFTVEKGIYQTSNFRVQPTESIVRFPNITNLCPFGEVFNATRFASVYAWNRKRISNCVADYSVLYNSASFSTFKCYGVSPTKLNDLCFTNVYADSFVIRGDEVRQIAPGQTGKIADYNYKLPDDFTGCVIAWNSNNLDSKVGGNYNYLYRLFRKSNLKPFERDISTEIYQAGSTPCNGAEGFNCYFPLQSYGFQPTNGVGYQPYRVVVLSFELLHAPATVCGPKKSTNLVKNKCVNFNFNGLTGTGVLTESNKKFLPFQQFGRDIADTTDAVRDPQTLEILDITPCSFGGVSVITPGTNTSNQVAVLYQDVNCTEVPVAIHADQLTPTWRVYSTGSNVFQTRAGCLIGAEHVNNSYECDIPIGAGICASYQTQTNSPRRARSVASQSIIAYTMSLGAENSVAYSNNSCAIPTNFTISVTTEILPVSMTKTSVDCTMYICGDSTECSNLLLQYGSFCTQLNRALTGIAVEQDKNTQEVFAQVKQIYKTPPIKDFGGFNFSQILPDPSKPSKRSFIEDLLFNKVTLADAGFIKQYGDCLGDIAARDLICAQKFNGLTVLPPLLTDEMIAQYTSALLAGTITSGWTFGAGAALQIPFAMQMAYRFNGIGVTQNVLYENQKLIANQFNSAIGKIQDSLSSTASALGKLQDVVNQNAQALNTLVKQLSSNFGAISSVLNDILSRLDKVEAEVQIDRLITGRLQSLQTYVTQQLIRAAEIRASANLAATKMSECVLGQSKRVDFCGKGYHLMSFPQSAPHGVVFLHVTYVPAQEKNFTCAPAICHDGKAHFPREGVFVSNGTHWFVTQRNFYEPQIITTDNTFVSGNCDVVIGIVNNTVYDPLQPELDS

SEQ ID NO: 2989 - protein, 1147 aa, Artificial Sequence
  SARS-CoV-2/South Korea/SNU01/2020__EPI_ISL_411929 spike protein (1-1147)(I712C_T1077C)
MFVFLVLLPLVSSQCVNLTTRTQLPPAYTNSFTRGVYYPDKVFRSSVLHSTQDLFLPFFSNVTWFHAIHVSGTNGTKRFDNPVLPFNDGVYFASTEKSNIIRGWIFGTTLDSKTQSLLIVNNATNVVIKVCEFQFCNDPFLGVYYHKNNKSWMESEFRVYSSANNCTFEYVSQPFLMDLEGKQGNFKNLREFVFKNIDGYFKIYSKHTPINLVRDLPQGFWALEPLVDLPIGINITRFQTLLALHRSYLTPGDSSSGWTAGAAAYYVGYLQPRTFLLKYNENGTITDAVDCALDPLSETKCTLKSFTVEKGIYQTSNFRVQPTESIVRFPNITNLCPFGEVFNATRFASVYAWNRKRISNCVADYSVLYNSASFSTFKCYGVSPTKLNDLCFTNVYADSFVIRGDEVRQIAPGQTGKIADYNYKLPDDFTGCVIAWNSNNLDSKVGGNYNYLYRLFRKSNLKPFERDISTEIYQAGSTPCNGVEGFNCYFPLQSYGFQPTNGVGYQPYRVVVLSFELLHAPATVCGPKKSTNLVKNKCVNFNFNGLTGTGVLTESNKKFLPFQQFGRDIADTTDAVRDPQTLEILDITPCSFGGVSVITPGTNTSNQVAVLYQDVNCTEVPVAIHADQLTPTWRVYSTGSNVFQTRAGCLIGAEHVNNSYECDIPIGAGICASYQTQTNSPRRARSVASQSIIAYTMSLGAENSVAYSNNSCAIPTNFTISVTTEILPVSMTKTSVDCTMYICGDSTECSNLLLQYGSFCTQLNRALTGIAVEQDKNTQEVFAQVKQIYKTPPIKDFGGFNFSQILPDPSKPSKRSFIEDLLFNKVTLADAGFIKQYGDCLGDIAARDLICAQKFNGLTVLPPLLTDEMIAQYTSALLAGTITSGWTFGAGAALQIPFAMQMAYRFNGIGVTQNVLYENQKLIANQFNSAIGKIQDSLSSTASALGKLQDVVNQNAQALNTLVKQLSSNFGAISSVLNDILSRLDKVEAEVQIDRLITGRLQSLQTYVTQQLIRAAEIRASANLAATKMSECVLGQSKRVDFCGKGYHLMSFPQSAPHGVVFLHVTYVPAQEKNFTCAPAICHDGKAHFPREGVFVSNGTHWFVTQRNFYEPQIITTDNTFVSGNCDVVIGIVNNTVYDPLQPELDS

SEQ ID NO: 2990 - protein, 1147 aa, Artificial Sequence
  SARS-CoV-2/China/WF0004/2020__EPI_ISL_413694 spike protein (1-1147)(I712C_T1077C)
MFVFLVLLPLVSSQCVNLTTRTQLPPAYTNSFTRGVYYPDKVFRSSVLHSTQDLFLPFFSNVTWFHAIHVSGTNGTKRFDNPVLPFNDGVYFASTEKSNIIRGWIFGTTLDSKTQSLLIVNNATNVVIKVCEFQFCNDPFLGVYYHKNNKSWTESEFRVYSSANNCTFEYVSQPFLMDLEGKQGNFKNLREFVFKNIDGYFKIYSKHTPINLVRDLPQGFSALEPLVDLPIGINITRFQTLLALHRSYLTPGDSSSGWTAGAAAYYVGYLQPRTFLLKYNENGTITDAVDCALDPLSETKCTLKSFTVEKGIYQTSNFRVQPTESIVRFPNITNLCPFGEVFNATRFASVYAWNRKRISNCVADYSVLYNSASFSTFKCYGVSPTKLNDLCFTNVYADSFVIRGDEVRQIAPGQTGKIADYNYKLPDDFTGCVIAWNSNNLDSKVGGNYNYLYRLFRKSNLKPFERDISTEIYQAGSTPCNGVEGFNCYFPLQSYGFQPTNGVGYQPYRVVVLSFELLHAPATVCGPKKSTNLVKNKCVNFNFNGLTGTGVLTESNKKFLPFQQFGRDIADTTDAVRDPQTLEILDITPCSFGGVSVITPGTNTSNQVAVLYQDVNCTEVPVAIHADQLTPTWRVYSTGSNVFQTRAGCLIGAEHVNNSYECDIPIGAGICASYQTQTNSPRRARSVASQSIIAYTMSLGAENSVAYSNNSCAIPTNFTISVTTEILPVSMTKTSVDCTMYICGDSTECSNLLLQYGSFCTQLNRALTGIAVEQDKNTQEVFAQVKQIYKTPPIKDFGGFNFSQILPDPSKPSKRSFIEDLLFNKVTLADAGFIKQYGDCLGDIAARDLICAQKFNGLTVLPPLLTDEMIAQYTSALLAGTITSGWTFGAGAALQIPFAMQMAYRFNGIGVTQNVLYENQKLIANQFNSAIGKIQDSLSSTASALGKLQDVVNQNAQALNTLVKQLSSNFGAISSVLNDILSRLDKVEAEVQIDRLITGRLQSLQTYVTQQLIRAAEIRASANLAATKMSECVLGQSKRFDFCGKGYHLMSFPQSAPHGVVFLHVTYVPAQEKNFTCAPAICHDGKAHFPREGVFVSNGTHWFVTQRNFYEPQIITTDNTFVSGNCDVVIGIVNNTVYDPLQPELDS

SEQ ID NO: 2991 - protein, 1147 aa, Artificial Sequence
  SARS-CoV-2/China/WF0028/2020__EPI_ISL_413791 spike protein (1-1147)(I712C_T1077C)
MFVFLVLLPLVSSQCVNLTTRTQLPPAYTNSFTRGVYYPDKVFRSSVLHSTQDLFLPFFSNVTWFHAIHVSGTNGTKRFDNPVLPFNDGVYFASTEKSNIIRGWIFGTTLDSKTQSLLIVNNATNVVIKVCEFQFCNDPFLGVYYHKNNKSWMESEFRVYSSANNCTFEYVSQPFLMDLEGKQGNFKNLREFVFKNIDGYFKIYSKHTPINLVRDLPQGFSALEPLVDLPIGINITRFQTLLALHRSYLTPGDSSSGWTAGAAAYYVGYLQPRTFLLKYNENGTITDAVDCALDPLSETKCTLKSFTVEKGIYQTSNFRVQPTESIVRFPNITNLCPFGEVFNATRFASVYAWNRKRISNCVADYSVLYNSASFSTFKCYGVSPTKLNDLCFTNVYADSFVIRGDEVRQIAPGQTGKIADYNYKLPDDFTGCVIAWNSNNLDSKVGGNYNYLYRLFRKSNLKPFERDISTEIYQAGSTPCNGVEGFNCYFPLQSYGFQPTNGVGYQPYRVVVLSFELLHAPATVCGPKKSTNLVKNKCVNFNFNGLTGTGVLTESNKKFLPFQQFGRDIADTTDAVRDPQTLEILDITPCSFGGVSVITPGTNTSNQVAVLYQDVNCTEVPVAIHADQLTPTWRVYSTGSNVFQTRAGCLIGAEHVNNSYECDIPIGAGICASYQTQTNSPRRARSVASQSIIAYTMSLGAENSVAYSNNSCAIPTNFTISVTTEILPVSMTKTSVDCTMYICGDSTECSNLLLQYGSFCTQLNRALTGIAVEQDKNTQEVFAQVKQIYKTPPIKDFGGFNFSQILPDPSKPSKRSFIEDLLFNKVTLADAGFIKQYGDCLGDIAARDLICAQKFNGLTVLPPLLTDEMIAQYTSALLAGTITSGWTFGAGAALQIPFAMQMAYRFNGIGVTQNVLYENQKLIANQFNSAIGKIQDSLSSTASALGKLQDVVNQNAQALNTLVKQLSSNFGAISSVLNDILSRLDKVEAEVQIDRLITGRLQSLQTYVTQQLIRAAEIRASANLAATKMSECVLGQSKRVDFCGKGYHLMSFPQSAPHGVVFLHVTYVPAQEKNFTCAPAICHDGKAHFPREGVFVSNGTHWFVTQRNFYEPQIITTDNTFVSGNCDVVIGIVNNTVYDPLQPELES

SEQ ID NO: 2992 - protein, 1147 aa, Artificial Sequence
  SARS-CoV-2/2019-nCoV/USA-CruiseA-18/2020__MT159716.1 spike protein (1-1147)(I712C_T1077C)
MFVFLVLLPLVSSQCVNLTTRTQLPPAYTNSFTRGVYYPDKVFRSSVLHSTQDLFLPFFSNVTWFHAIHVSGTNGTKRFDNPVLPFNDGVYFASTEKSNIIRGWIFGTTLDSKTQSLLIVNNATNVVIKVCEFQFCNDPFLGVYYHKNNKSWMESELRVYSSANNCTFEYVSQPFLMDLEGKQGNFKNLREFVFKNIDGYFKIYSKHTPINLVRDLPQGFSALEPLVDLPIGINITRFQTLLALHRSYLTPGDSSSGWTAGAAAYYVGYLQPRTFLLKYNENGTITDAVDCALDPLSETKCTLKSFTVEKGIYQTSNFRVQPTESIVRFPNITNLCPFGEVFNATRFASVYAWNRKRISNCVADYSVLYNSASFSTFKCYGVSPTKLNDLCFTNVYADSFVIRGDEVRQIAPGQTGKIADYNYKLPDDFTGCVIAWNSNNLDSKVGGNYNYLYRLFRKSNLKPFERDISTEIYQAGSTPCNGVEGFNCYFPLQSYGFQPTNGVGYQPYRVVVLSFELLHAPATVCGPKKSTNLVKNKCVNFNFNGLTGTGVLTESNKKFLPFQQFGRDIADTTDAVRDPQTLEILDITPCSFGGVSVITPGTNTSNQVAVLYQDVNCTEVPVAIHADQLTPTWRVYSTGSNVFQTRAGCLIGAEHVNNSYECDIPIGAGICASYQTQTNSPRRARSVASQSIIAYTMSLGAENSVAYSNNSCAIPTNFTISVTTEILPVSMTKTSVDCTMYICGDSTECSNLLLQYGSFCTQLNRALTGIAVEQDKNTQEVFAQVKQIYKTPPIKDFGGFNFSQILPDPSKPSKRSFIEDLLFNKVTLADAGFIKQYGDCLGDIAARDLICAQKFNGLTVLPPLLTDEMIAQYTSALLAGTITSGWTFGAGAALQIPFAMQMAYRFNGIGVTQNVLYENQKLIANQFNSAIGKIQDSLSSTASALGKLQDVVNQNAQALNTLVKQLSSNFGAISSVLNDILSRLDKVEAEVQIDRLITGRLQSLQTYVTQQLIRAAEIRASANLAATKMSECVLGQSKRVDFCGKGYHLMSFPQSAPHGVVFLHVTYVPAQEKNFTCAPAICHDGKAHFPREGVFVSNGTHWFVTQRNFYEPQIITTDNTFVSGNCDVVIGIVNNTVYDPLQPELDS

SEQ ID NO: 2993 - protein, 1147 aa, Artificial Sequence
  SARS-CoV-2/SARS-CoV-2/Yunnan-01/human/2020/CHN__MT049951.1 spike protein (1-1147)(I712C_T1077C)
MFVFLVLLPLVSSQCVNLTTRTQLPPANTNSFTRGVYYPDKVFRSSVLHSTQDLFLPFFSNVTWFHAIHVSGTNGTKRFDNPVLPFNDGVYFASTEKSNIIRGWIFGTTLDSKTQSLLIVNNATNVVIKVCEFQFCNDPFLGVYYHKNNKSWMESEFRVYSSANNCTFEYVSQPFLMDLEGKQGNFKNLREFVFKNIDGYFKIYSKHTPINLVRDLPQGFSALEPLVDLPIGINITRFQTLLALHRSYLTPGDSSSGWTAGAAAYYVGYLQPRTFLLKYNENGTITDAVDCALDPLSETKCTLKSFTVEKGIYQTSNFRVQPTESIVRFPNITNLCPFGEVFNATRFASVYAWNRKRISNCVADYSVLYNSASFSTFKCYGVSPTKLNDLCFTNVYADSFVIRGDEVRQIAPGQTGKIADYNYKLPDDFTGCVIAWNSNNLDSKVGGNYNYLYRLFRKSNLKPFERDISTEIYQAGSTPCNGVEGFNCYFPLQSYGFQPTNGVGYQPYRVVVLSFELLHAPATVCGPKKSTNLVKNKCVNFNFNGLTGTGVLTESNKKFLPFQQFGRDIADTTDAVRDPQTLEILDITPCSFGGVSVITPGTNTSNQVAVLYQDVNCTEVPVAIHADQLTPTWRVYSTGSNVFQTRAGCLIGAEHVNNSYECDIPIGAGICASYQTQTNSPRRARSVASQSIIAYTMSLGAENSVAYSNNSCAIPTNFTISVTTEILPVSMTKTSVDCTMYICGDSTECSNLLLQYGSFCTQLNRALTGIAVEQDKNTQEVFAQVKQIYKTPPIKDFGGFNFSQILPDPSKPSKRSFIEDLLFNKVTLADAGFIKQYGDCLGDIAARDLICAQKFNGLTVLPPLLTDEMIAQYTSALLAGTITSGWTFGAGAALQIPFAMQMAYRFNGIGVTQNVLYENQKLIANQFNSAIGKIQDSLSSTASALGKLQDVVNQNAQALNTLVKQLSSNFGAISSVLNDILSRLDKVEAEVQIDRLITGRLQSLQTYVTQQLIRAAEIRASANLAATKMSECVLGQSKRVDFCGKGYHLMSFPQSAPHGVVFLHVTYVPAQEKNFTCAPAICHDGKAHFPREGVFVSNGTHWFVTQRNFYEPQIITTDNTFVSGNCDVVIGIVNNTVYDPLQPELDS

SEQ ID NO: 2994 - protein, 1147 aa, Artificial Sequence
  SARS-CoV-2/USA/WA-UW292/2020__EPI_ISL_418077 spike protein (1-1147)(I712C_T1077C)
MFVFLVLLPLVSSQCVNLTTRTQLPPAYTNSFTRGVYYPDKVFRSSVLHSTQDLFLPFFSNVTWFHAIHVSGTNGTKRFDNPVLPFNDGVYFASTEKSNIIRGWIFGTTLDSKTQSLLIVNNATNVVIKVCEFQFCNDPFLGVYYHKNNKSWMESEFRVYSSANNCTFEYVSQPFLMDLEGKQGNFKNLREFVFKNIDGYFKIYSKHTPINLVRDLPQGFSALEPLVDLPIGINITRFQTLLALHRSYLTPGDSSSGWTAGAAAYYVGYLQPRTFLLKYNENGTITDAVDCALDPLSETKCTLKSFTVEKGIYQTSNFRVQPTESIVRFPNITNLCPFGEVFNATRFASVYAWNRKRISNCVADYSVLYNSASFSTFKCYGVSPTKLNDLCFTNVYADSFVIRGDEVRQIAPGQTGKIADYNYKLPDDFTGCVIAWNSNNLDSKVGGNYNYLYRLFRKSNLKPFERDISTEIYQASSTPCNGVEGFNCYFPLQSYGFQPTNGVGYQPYRVVVLSFELLHAPATVCGPKKSTNLVKNKCVNFNFNGLTGTGVLTESNKKFLPFQQFGRDIADTTDAVRDPQTLEILDITPCSFGGVSVITPGTNTSNQVAVLYQDVNCTEVPVAIHADQLTPTWRVYSTGSNVFQTRAGCLIGAEHVNNSYECDIPIGAGICASYQTQTNSPRRARSVASQSIIAYTMSLGAENSVAYSNNSCAIPTNFTISVTTEILPVSMTKTSVDCTMYICGDSTECSNLLLQYGSFCTQLNRALTGIAVEQDKNTQEVFAQVKQIYKTPPIKDFGGFNFSQILPDPSKPSKRSFIEDLLFNKVTLADAGFIKQYGDCLGDIAARDLICAQKFNGLTVLPPLLTDEMIAQYTSALLAGTITSGWTFGAGAALQIPFAMQMAYRFNGIGVTQNVLYENQKLIANQFNSAIGKIQDSLSSTASALGKLQDVVNQNAQALNTLVKQLSSNFGAISSVLNDILSRLDKVEAEVQIDRLITGRLQSLQTYVTQQLIRAAEIRASANLAATKMSECVLGQSKRVDFCGKGYHLMSFPQSAPHGVVFLHVTYVPAQEKNFTCAPAICHDGKAHFPREGVFVSNGTHWFVTQRNFYEPQIITTDNTFVSGNCDVVIGIVNNTVYDPLQPELDS

SEQ ID NO: 2995 - protein, 1147 aa, Artificial Sequence
  SARS-CoV-2/Iceland/192/2020__EPI_ISL_417819 spike protein (1-1147)(I712C_T1077C)
MFVFFVLLPLVSSQCVNLTTRTQLPPAYTNSFTRGVYYPDKVFRSSVLHSTQDLFLPFFSNVTWFHAIHVSGTNGTKRFDNPVLPFNDGVYFASTEKSNIIRGWIFGTTLDSKTQSLLIVNNATNVVIKVCEFQFCNDPFLGVYYHKNNKSWMESEFRVYSSANNCTFEYVSQPFLMDLEGKQGNFKNLREFVFKNIDGYFKIYSKHTPINLVRDLPQGFSALEPLVDLPIGINITRFQTLLALHRSYLTPGDSSSGWTAGAAAYYVGYLQPRTFLLKYNENGTITDAVDCALDPLSETKCTLKSFTVEKGIYQTSNFRVQPTESIVRFPNITNLCPFGEVFNATRFASVYAWNRKRISNCVADYSVLYNSASFSTFKCYGVSPTKLNDLCFTNVYADSFVIRGDEVRQIAPGQTGKIADYNYKLPDDFTGCVIAWNSNNLDSKVGGNYNYLYRLFRKSNLKPFERDISTEIYQAGSTPCNGVEGFNCYFPLQSYGFQPTNGVGYQPYRVVVLSFELLHAPATVCGPKKSTNLVKNKCVNFNFNGLTGTGVLTESNKKFLPFQQFGRDIADTTDAVRDPQTLEILDITPCSFGGVSVITPGTNTSNQVAVLYQGVNCTEVPVAIHADQLTPTWRVYSTGSNVFQTRAGCLIGAEHVNNSYECDIPIGAGICASYQTQTNSPRRARSVASQSIIAYTMSLGAENSVAYSNNSCAIPTNFTISVTTEILPVSMTKTSVDCTMYICGDSTECSNLLLQYGSFCTQLNRALTGIAVEQDKNTQEVFAQVKQIYKTPPIKDFGGFNFSQILPDPSKPSKRSFIEDLLFNKVTLADAGFIKQYGDCLGDIAARDLICAQKFNGLTVLPPLLTDEMIAQYTSALLAGTITSGWTFGAGAALQIPFAMQMAYRFNGIGVTQNVLYENQKLIANQFNSAIGKIQDSLSSTASALGKLQDVVNQNAQALNTLVKQLSSNFGAISSVLNDILSRLDKVEAEVQIDRLITGRLQSLQTYVTQQLIRAAEIRASANLAATKMSECVLGQSKRVDFCGKGYHLMSFPQSAPHGVVFLHVTYVPAQEKNFTCAPAICHDGKAHFPREGVFVSNGTHWFVTQRNFYEPQIITTDNTFVSGNCDVVIGIVNNTVYDPLQPELDS

SEQ ID NO: 2996 - protein, 1147 aa, Artificial Sequence
  SARS-CoV-2/Belgium/ULG-6939/2020__EPI_ISL_417020 spike protein (1-1147)(I712C_T1077C)
MFVFLVLLPLVSSQCVNLTTRTQLPPAYTNSFTRGVYYPDKVFRSSVLHSTQDLFLPFFSNVTWFHAIHVSGTNGTKRFDNPVLPFNDGVYFASTEKSNIIRGWIFGTTLDSKTQSLLIVNNATNVVIKVCEFQFCNDPFLGVYYHKNNKSWMESEFRVYSSANNCTFEYVSQPFLMDLEGKQGNFKNLREFVFKNIDGYFKIYSKHTPINLVRDLPQGFSALEPLVDLPIGINITRFQTLLALHRSYLTPGDSSSGWTAGAAAYYVGYLQPRTFLLKYNENGTITDAVDCALDPLSETKCTLKSFTVEKGIYQTSNFRVQPTESIVRFPNITNLCPFGEVFNATRFASVYAWNRKRISNCVADYSVLYNSASFSTFKCYGVSPTKLNDLCFTNVYADSFVIRGDEVRQIAPGQTGKIADYNYKLPDDFTGCVIAWNSNNLDSKVGGNYNYLYRLFRKSNLKPFERDISTEIYQAGSTPCNGVEGFNCYFPLQSYGFQPTNGVGYQPYRVVVLSFELLHAPATVCGPKKSTNLVKNKCVNFNFNGLTGTGVLTESNKKFLPFQQFGRDIADTTDAVRDPQTLEILDITPCSFGGVSVITPGTNTSNQVAVLYQGVNCTEVPVAIHADQLTPTWRVYSTGSNVFQTRAGCLIGAEHVNNSYECDIPIGAGICASYQTQTNSPRRARSVASQSIIAYTMSLGAENSVVYSNNSCAIPTNFTISVTTEILPVSMTKTSVDCTMYICGDSTECSNLLLQYGSFCTQLNRALTGIAVEQDKNTQEVFAQVKQIYKTPPIKDFGGFNFSQILPDPSKPSKRSFIEDLLFNKVTLADAGFIKQYGDCLGDIAARDLICAQKFNGLTVLPPLLTDEMIAQYTSALLAGTITSGWTFGAGAALQIPFAMQMAYRFNGIGVTQNVLYENQKLIANQFNSAIGKIQDSLSSTASALGKLQDVVNQNAQALNTLVKQLSSNFGAISSVLNDILSRLDKVEAEVQIDRLITGRLQSLQTYVTQQLIRAAEIRASANLAATKMSECVLGQSKRVDFCGKGYHLMSFPQSAPHGVVFLHVTYVPAQEKNFTCAPAICHDGKAHFPREGVFVSNGTHWFVTQRNFYEPQIITTDNTFVSGNCDVVIGIVNNTVYDPLQPELDS

SEQ ID NO: 2997 - protein, 1147 aa, Artificial Sequence
  SARS-CoV-2/France/HF2496/2020__EPI_ISL_418231 spike protein (1-1147)(I712C_T1077C)
MFVFLVLLPLVSSQCVNLTTRTQLPPAYTNSFTRGVYYPDKVFRSSVLHSTQDLFLPFFSNVTWFHAIHVSGTNGTKRFDNPVLPFNDGVYFASTEKSNIIRGWIFGTTLDSKTQSLLIVNNATNVVIKVCEFQFCNDPFLGVYYHKNNKSWMESEFRVYSSANNCTFEYVSQPFLMDLEGKQGNFKNLREFVFKNIDGYFKIYSKHTPINLVRDLPQGFSALEPLVDLPIGINITRFQTLLALHRSYLTPGDSSSGWTAGAAAYYVGYLQPRTFLLKYNENGTITDAVDCALDPLSETKCTLKSFTVEKGIYQTSNFRVQPTESIVRFPNITNLCPFGEVFNATRFASVYAWNRKRISNCVADYSVLYNSASFSTFKCYGVSPTKLNDLCFTNVYADSFVIRGDEVRQIAPGQTGKIADYNYKLPDDFTGCVIAWNSNNLDSKVGGNYNYLYRLFRKSNLKPFERDISTEIYQAGSTPCNGVEGFNCYFPLQSYGFQPTNGVGYQPYRVVVLSFELLHAPATVCGPKKSTNLVKNKCVNFNFNGLTGTGVLTESNKKFLPFQQFGRDIADTTDAVRDPQTLEILDITPCSFGGVSVITPGTNTSNQVAVLYQGVNCTEVPVAIHADQLTPTWRVYSTGSNVFQTRAGCLIGAEHVNNSYECDIPIGAGICASYQTQTNSPRRARSVASQSIIAYTMSLGAENSVAYSNNSCAIPTNFTISVTTEILPVSMTKTSVDCTMYICGDSTECSNLLLQYGSFCTQLNRALTGIAVEQDKNTQEVFAQVKQIYKTPPIKDFGGFNFSQILPDPSKPSKRSFIEDLLFNKVTLADAGFIKQYGDCLGDIVARDLICAQKFNGLTVLPPLLTDEMIAQYTSALLAGTITSGWTFGAGAALQIPFAMQMAYRFNGIGVTQNVLYENQKLIANQFNSAIGKIQDSLSSTASALGKLQDVVNQNAQALNTLVKQLSSNFGAISSVLNDILSRLDKVEAEVQIDRLITGRLQSLQTYVTQQLIRAAEIRASANLAATKMSECVLGQSKRVDFCGKGYHLMSFPQSAPHGVVFLHVTYVPAQEKNFTCAPAICHDGKAHFPREGVFVSNGTHWFVTQRNFYEPQIITTDNTFVSGNCDVVIGIVNNTVYDPLQPELDS

SEQ ID NO: 2998 - protein, 1147 aa, Artificial Sequence
  SARS-CoV-2/USA/WA-UW291/2020__EPI_ISL_418076 spike protein (1-1147)(I712C_T1077C)
MFVFLVLLPLVSSQCVNLTTRTQLPPAYTNSFTRGVYYPDKVFRSSVLHSTQDLFLPFFSNVTWFHAIHVSGTNGTKRFDNPVLPFNDGVYFASTEKSNIIRGWIFGTTLDSKTQSLLIVNNATNVVIKVCEFQFCNDPFLGVYYHKNNKSWMESEFRVYSSANNCTFEYVSQPFLMDLEGKQGNFKNLREFVFKNIDGYFKIYSKHTPINLVRDLPQGFSALEPLVDLPIGINITRFQTLLALHRSYLTPGDSSSGWTAGAAAYYVGYLQPRTFLLKYNENGTITDAVDCALDPLSETKCTLKSFTVEKGIYQTSNFRVQPTESIVRFPNITNLCPFGEVFNATRFASVYAWNRKRISNCVADYSVLYNSASFSTFKCYGVSPTKLNDLCFTNVYADSFVIRGDEVRQIAPGQTGKIADYNYKLPDDFTGCVIAWNSNNLDSKVGGNYNYLYRLFRKSNLKPFERDISTEIYQAGSTPCNGVEGFNCYFPLQSYGFQPTNGVGYQPYRVVVLSFELLHAPATVCGPKKSTNLVKNKCVNFNFNGLTGTGVLTESNKKFLPFQQFGRDIADTTDAVRDPQTLEILDITPCSFGGVSVITPGTNTSNQVAVLYQGVNCTEVPVAIHADQLTPTWRVYSTGSNVFQTRAGCLIGAEHVNNSYECDIPIGAGICASYQTQTNSPRRARSVASQSIIAYTMSLGAENSVAYSNNSCAIPTNFTISVTTEILPVSMTKTSVDCTMYICGDSTECSNLLLQYGSFCTQLNRALTGIAVEQDKNTQEVFAQVKQIYKTPPIKDFGGFNFSQILPDPSKPSKRSFIEDLLFNKVTLADAGFIKQYGDCLGDIAARDLICAQKFNGLTVLPPLLTDEMIAQYTSALLAGTITSGWTFGAGAALQIPFAMQMAYRFNGIGVTQNVLYENQKLIANQFNSAIGKIQYSLSSTASALGKLQDVVNQNAQALNTLVKQLSSNFGAISSVLNDILSRLDKVEAEVQIDRLITGRLQSLQTYVTQQLIRAAEIRASANLAATKMSECVLGQSKRVDFCGKGYHLMSFPQSAPHGVVFLHVTYVPAQEKNFTCAPAICHDGKAHFPREGVFVSNGTHWFVTQRNFYEPQIITTDNTFVSGNCDVVIGIVNNTVYDPLQPELDS

SEQ ID NO: 2999 - protein, 1147 aa, Artificial Sequence; identical to SEQ ID NO: 2962
  SARS-CoV-2/Portugal/PT0034/2020__EPI_ISL_418019 spike protein (1-1147)(I712C_T1077C)

SEQ ID NO: 3000 - protein, 1147 aa, Artificial Sequence; identical to SEQ ID NO: 2954
  SARS-CoV-2/Iceland/202/2020__EPI_ISL_417750 spike protein (1-1147)(I712C_T1077C)

SEQ ID NO: 3001 - protein, 1147 aa, Artificial Sequence
  SARS-CoV-2/USA/WA-UW261/2020__EPI_ISL_418046 spike protein (1-1147)(I712C_T1077C)
MFVFLVLLPLVSSQCVNLTTRTQLPPAYTNSFTRGVYYPDKVFRSSVLHSTQDLFLPFFSNVTWFHAIHVSGTNGTKRFDNPVLPFNDGVYFASTEKSNIIRGWIFGTTLDSKTQSLLIVNNATNVVIKVCEFQFCNDPFLGVYYHKNNKSWMESEFRVYSSANNCTFEYVSQPFLMDLEGKQGNFKNLREFVFKNIDGYFKIYSKHTPINLVRDLPQGFSALEPLVDLPIGINITRFQTLLALHRSYLTPGDSSSGWTAGAAAYYVGYLQPRTFLLKYNENGTITDAVDCALDPLSETKCTLKSFTVEKGIYQTSNFRVQPTESIVRFPNITNLCPFGEVFNATRFTSVYAWNRKRISNCVADYSVLYNSASFSTFKCYGVSPTKLNDLCFTNVYADSFVIRGDEVRQIAPGQTGKIADYNYKLPDDFTGCVIAWNSNNLDSKVGGNYNYLYRLFRKSNLKPFERDISTEIYQAGSTPCNGVEGFNCYFPLQSYGFQPTNGVGYQPYRVVVLSFELLHAPATVCGPKKSTNLVKNKCVNFNFNGLTGTGVLTESNKKFLPFQQFGRDIADTTDAVRDPQTLEILDITPCSFGGVSVITPGTNTSNQVAVLYQDVNCTEVPVAIHADQLTPTWRVYSTGSNVFQTRAGCLIGAEHVNNSYECDIPIGAGICASYQTQTNSPRRARSVASQSIIAYTMSLGAENSVAYSNNSCAIPTNFTISVTTEILPVSMTKTSVDCTMYICGDSTECSNLLLQYGSFCTQLNRALTGIAVEQDKNTQEVFAQVKQIYKTPPIKDFGGFNFSQILPDPSKPSKRSFIEDLLFNKVTLADAGFIKQYGDCLGDIAARDLICAQKFNGLTVLPPLLTDEMIAQYTSALLAGTITSGWTFGAGAALQIPFAMQMAYRFNGIGVTQNVLYENQKLIANQFNSAIGKIQDSLSSTASALGKLQDVVNQNAQALNTLVKQLSSNFGAISSVLNDILSRLDKVEAEVQIDRLITGRLQSLQTYVTQQLIRAAEIRASANLAATKMSECVLGQSKRVDFCGKGYHLMSFPQSAPHGVVFLHVTYVPAQEKNFTCAPAICHDGKAHFPREGVFVSNGTHWFVTQRNFYEPQIITTDNTFVSGNCDVVIGIVNNTVYDPLQPELDS

SEQ ID NO: 3002 - protein, 1147 aa, Artificial Sequence
  SARS-CoV-2/Portugal/PT0035/2020__EPI_ISL_418020 spike protein (1-1147)(I712C_T1077C)
MFVFLVLLPLVSSQCVNLTTRTQLPPAYTNSFTRGVYYPDKVFRSSVLHSTQDLFLPFFSNVTWFHAIHVSGTNGTKRFDNPVLPFNDGVYFASTEKSNIIRGWIFGTTLDSKTQSLLIVNNATNVVIKVCEFQFCNDPFLGVYYHKNNKSWMESEFRVYSSANNCTFEYVSQPFLMDLEGKQGNFKNLREFVFKNIDGYFKIYSKHTPINLVRDLPQGFSALEPLVDLPIGINITRFQTLLALHRSYLTPGDSSSGWTAGAAAYYVGYLQPRTFLLKYNENGTITDAVDCALDPLSETKCTLKSFTVEKGIYQTSNFRVQPTESIVRFPNITNLCPFGEVFNATRFASVYAWNRKRISNCVADYSVLYNSASFSTFKCYGVSPTKLNDLCFTNVYADSFVIRGDEVRQIAPGQTGKIADYNYKLPDDFTGCVIAWNSNNLDSKVGGNYNYLYRLFRKSNLKPFERDISTEIYQAGSTPCNGVEGFNCYFPLQSYGFQPTNGVGYQPYRVVVLSFELLHAPATVCGPKKSTNLVKNKCVNFNFNGLTGTGVLTESNKKFLPFQQFGRDIADTTDAVRDPQTLEILDITPCSFGGVSVITPGTNTSNQVAVLYQDVNCTEVPVAIHADQLTPTWRVYSTGSNVFQTRAGCLIGAEHVNNSYECDIPIGAGICASYQTQTNSPRRARSVASQSIIAYTMSLGAENSVAYSNNSCAIPTNFTISVTTEILPVSMTKTSVDCTMYICGDSTECSNLLLQYGSFCTQLNRALTGIAVEQDKNTQEVFAQVKQIYKTPPIKDFGGFNFSQILPDPSKPSKRSFIEDLLFNKVTLADAGFIKQYGDCLGDISARDLICAQKFNGLTVLPPLLTDEMIAQYTSALLAGTITSGWTFGAGAALQIPFAMQMAYRFNGIGVTQNVLYENQKLIANQFNSAIGKIQDSLSSTASALGKLQDVVNQNAQALNTLVKQLSSNFGAISSVLNDILSRLDKVEAEVQIDRLITGRLQSLQTYVTQQLIRAAEIRASANLAATKMSECVLGQSKRVDFCGKGYHLMSFPQSAPHGVVFLHVTYVPAQEKNFTCAPAICHDGKAHFPREGVFVSNGTHWFVTQRNFYEPQIITTDNTFVSGNCDVVIGIVNNTVYDPLQPELDS

SEQ ID NO: 3003 - protein, 1147 aa, Artificial Sequence
  SARS-CoV-2/USA/NY-NYUMC7/2020__EPI_ISL_418192 spike protein (1-1147)(I712C_T1077C)
MFVFLVLLPLVSSQCVNLTTRTQLPPAYTNSFTRGVYYPDKVFRSSVLHSTQDLFLPFFSNVTWFHAIHVSGTNGTKRFDNPVLPFNDGVYFASTEKSNIIRGWIFGTTLDSKTQSLLIVNNATNVVIKVCEFQFCNDPFLGVYHHKNNKSWMESEFRVYSSANNCTFEYVSQPFLMDLEGKQGNFKNLREFVFKNIDGYFKIYSKHTPINLVRDLPQGFSALEPLVDLPIGINITRFQTLLALHRSYLTPGDSSSGWTAGAAAYYVGYLQPRTFLLKYNENGTITDAVDCALDPLSETKCTLKSFTVEKGIYQTSNFRVQPTESIVRFPNITNLCPFGEVFNATRFASVYAWNRKRISNCVADYSVLYNSASFSTFKCYGVSPTKLNDLCFTNVYADSFVIRGDEVRQIAPGQTGKIADYNYKLPDDFTGCVIAWNSNNLDSKVGGNYNYLYRLFRKSNLKPFERDISTEIYQAGSTPCNGVEGFNCYFPLQSYGFQPTNGVGYQPYRVVVLSFELLHAPATVCGPKKSTNLVKNKCVNFNFNGLTGTGVLTESNKKFLPFQQFGRDIADTTDAVRDPQTLEILDITPCSFGGVSVITPGTNTSNQVAVLYQGVNCTEVPVAIHADQLTPTWRVYSTGSNVFQTRAGCLIGAEHVNNSYECDIPIGAGICASYQTQTNSPRRARSVASQSIIAYTMSLGAENSVAYSNNSCAIPTNFTISVTTEILPVSMTKTSVDCTMYICGDSTECSNLLLQYGSFCTQLNRALTGIAVEQDKNTQEVFAQVKQIYKTPPIKDFGGFNFSQILPDPSKPSKRSFIEDLLFNKVTLADAGFIKQYGDCLGDIAARDLICAQKFNGLTVLPPLLTDEMIAQYTSALLAGTITSGWTFGAGAALQIPFAMQMAYRFNGIGVTQNVLYENQKLIANQFNSAIGKIQDSLSSTASALGKLQDVVNQNAQALNTLVKQLSSNFGAISSVLNDILSRLDKVEAEVQIDRLITGRLQSLQTYVTQQLIRAAEIRASANLAATKMSECVLGQSKRVDFCGKGYHLMSFPQSAPHGVVFLHVTYVPAQEKNFTCAPAICHDGKAHFPREGVFVSNGTHWFVTQRNFYEPQIITTDNTFVSGNCDVVIGIVNNTVYDPLQPELDS

SEQ ID NO: 3004 - protein, 1147 aa, Artificial Sequence
  SARS-CoV-2/Iceland/189/2020__EPI_ISL_417709 spike protein (1-1147)(I712C_T1077C)
MFVFLVLLPLVSSQCVNLTTRTQLPPAYTNSFTRGVYYPDKVFRSSVLHSTQDLFLPFFSNVTWFHAIHVSGTNGTKRFDNPVLPFNDGVYFASTEKSNIIRGWIFGTTLDSKTQSLLIVNNATNVVIKVCEFQFCNDPFLGVYYHKNNKSWMESEFRVYSSANNCTFEYVSQPFLMDLEGKQGNFKNLREFVFKNIDGYFKIYSKHTPINLVRDLPQGFSALEPLVDLPIGINITRFQTLLALHRSYLTPGDSSSGWTAGAAAYYVGYLQPRTFLLKYNENGTITDAVDCALDPLSETKCTLKSFTVEKGIYQTSNFRVQPTESIVRFPNITNLCPFGEVFNATRFASVYAWNRKRISNCVADYSVLYNSASFSTFKCYGVSPTKLNDLCFTNVYADSFVIRGDEVRQIAPGQTGKIADYNYKLPDDFTGCVIAWNSNNLDSKVGGNYNYLYRLFRKSNLKPFERDISTEIYQAGSTPCNGVEGFNCYFPLQSYGFQPTNGVGYQPYRVVVLSFELLHAPATVCGPKKSTNLVKNKCVNFNFNGLTGTGVLTESNKKFLPFQQFGRDIADTTDAVRDPQTLEILDITPCSFGGVSVITPGTNTSNQVAVLYQGVNCTEVPVAIHADQLTPTWRVYSTGSNVFQTRAGCLIGAEHVNNSYECDIPIGAGICASYQTQTNSPRRARSVASQSIIAYTMSLGAENSVAYSNNSCAIPTNFTISVTTEILPVSMTKTSVDCTMYICGDSTECSNLLLQYGSFCTQLNRALTGIAVEQDKNTQEVFAQVKQIYKTPPIKDFGGFNFSQILPDPSKPSKRSFIEDLLFNKVTLADAGFTKQYGDCLGDIAARDLICAQKFNGLTVLPPLLTDEMIAQYTSALLAGTITSGWTFGAGAALQIPFAMQMAYRFNGIGVTQNVLYENQKLIANQFNSAIGKIQDSLSSTASALGKLQDVVNQNAQALNTLVKQLSSNFGAISSVLNDILSRLDKVEAEVQIDRLITGRLQSLQTYVTQQLIRAAEIRASANLAATKMSECVLGQSKRVDFCGKGYHLMSFPQSAPHGVVFLHVTYVPAQEKNFTCAPAICHDGKAHFPREGVFVSNGTHWFVTQRNFYEPQIITTDNTFVSGNCDVVIGIVNNTVYDPLQPELDS

SEQ ID NO: 3005 - protein, 1147 aa, Artificial Sequence
  SARS-CoV-2/Australia/NSW56/2020__EPI_ISL_417408 spike protein (1-1147)(I712C_T1077C)
MFVFLVLLPLVSSQCVNLTTRTQLPPAYTNSFTRGVYYPDKVFRSSVLHSTQDLFLPFFSNVTWFHAIHVSGTNGTKRFDNPVLPFNDGVYFASTEKSNIIRGWIFGTTLDSKTQSLLIVNNATNVVIKVCEFQFCNDPFLGVYYHKNNKSWMESEFRVYSSANNCTFEYVSQPFLMDLEGKQGNFKNLREFVFKNIDGYFKIYSKHTPINLVRDLPQGFSALEPLVDLPIGINITRFQTLLALHRSYLTPGDSSSGWTAGAAAYYVGYLQPRTFLLKYNENGTITDAVDCALDPLSETKCTLKSFTVEKGIYQTSNFRVQPTESIVRFPNITNLCPFGEVFNATRFASVYAWNRKRISNCVADYSVLYNSASFSTFKCYGVSPTKLNDLCFTNVYADSFVIRGDEVRQIAPGQTGKIADYNYKLPDDFTGCVIAWNSNNLDSKVGGNYNYLYRLFRKSNLKPFERDISTEIYQAGSTPCNGVEGFNCYFPLQSYGFQPTNGVGYQPYRVVVLSFELLHAPATVCGPKKSTNLVKNKCVNFNFNGLTGTGVLTESNKKFLPFQQFGRDIADTTDAVRDPQTLEILDITPCSFGGVSVITPGTNTSNQVAVLYQDVNCTEVPVAIHADQLTPTWRVYSTGSNVFQTRAGCLIGAEHVNNSYECDIPIGAGICASYQTQTNSPRRARSVASQSIIAYTMSLGAENSVAYSNNSCAIPTNFTISVTTEILPVSMTKTSVDCTMYICGDSTECSNLLLQYGSFCTQLNRALTGIAVEQDKNTQEVFAQVKQIYKTPPIKDFGGFNFSQILPDSSKPSKRSFIEDLLFNKVTLADAGFIKQYGDCLGDIAARDLICAQKFNGLTVLPPLLTDEMIAQYTSALLAGTITSGWTFGAGAALQIPFAMQMAYRFNGIGVTQNVLYENQKLIANQFNSAIGKIQDSLSSTASALGKLQDVVNQNAQALNTLVKQLSSNFGAISSVLNDILSRLDKVEAEVQIDRLITGRLQSLQTYVTQQLIRAAEIRASANLAATKMSECVLGQSKRVDFCGKGYHLMSFPQSAPHGVVFLHVTYVPAQEKNFTCAPAICHDGKAHFPREGVFVSNGTHWFVTQRNFYEPQIITTDNTFVSGNCDVVIGIVNNTVYDPLQPELDS

SEQ ID NO: 3006 - protein, 1147 aa, Artificial Sequence
  SARS-CoV-2/Iceland/280/2020__EPI_ISL_417608 spike protein (1-1147)(I712C_T1077C)
MFVFLVLLPLVSSQCVNLTTRTQLPPAYTNSFTRGVYYPDKVFRSSVLHSTQDLFLPFFSNVTWFHAIHVSGTNGTKRFDNPVLPFNDGVYFASTEKSNIIRGWIFGTTLDSKTQSLLIVNNATNVVIKVCEFQFCNDPFLGVYYHKNNKSWMESEFRVYSSANNCTFEYVSQPFLMDLEGKQGNFKNLREFVFKNIDGYFKIYSKHTPINLVRDLPQGFSALEPLVDLPIGINITRFQTLLALHRSYLTPGDSSSGWTAGAAAYYVGYLQPRTFLLKYNENGTITDAVDCALDPLSETKCTLKSFTVEKGIYQTSNFRVQPTESIVRFPNITNLCPFGEVFNATRFASVYAWNRKRISNCVADYSVLYNSASFSTFKCYGVSPTKLNDLCFTNVYADSFVIRGDEVRQIAPGQTGKIADYNYKLPDDFTGCVIAWNSNNLDSKVGGNYNYLYRLFRKSNLKPFERDISTEIYQAGSTPCNGVEGFNCYFPLQSYGFQPTNGVGYQPYRVVVLSFELLHAPATVCGPKKSTNLVKNKCVNFNFNGLTGTGVLTESNKKFLPFQQFGRDIADTTDAVRDPQTLEILDITPCSFGGVSVITPGTNTSNQVAVLYQGVNCTEVPVAIHADQLTPTWRVYSTGSNVFQTRAGCLIGAEHVNNSYECDIPIGAGICASYHTQTNSPRRARSVASQSIIAYTMSLGAENSVAYSNNSCAIPTNFTISVTTEILPVSMTKTSVDCTMYICGDSTECSNLLLQYGSFCTQLNRALTGIAVEQDKNTQEVFAQVKQIYKTPPIKDFGGFNFSQILPDPSKPSKRSFIEDLLFNKVTLADAGFIKQYGDCLGDIAARDLICAQKFNGLTVLPPLLTDEMIAQYTSALLAGTITSGWTFGAGAALQIPFAMQMAYRFNGIGVTQNVLYENQKLIANQFNSAIGKIQDSLSSTASALGKLQDVVNQNAQALNTLVKQLSSNFGAISSVLNDILSRLDKVEAEVQIDRLITGRLQSLQTYVTQQLIRAAEIRASANLAATKMSECVLGQSKRVDFCGKGYHLMSFPQSAPHGVVFLHVTYVPAQEKNFTCAPAICHDGKAHFPREGVFVSNGTHWFVTQRNFYEPQIITTDNTFVSGNCDVVIGIVNNTVYDPLQPELDS

SEQ ID NO: 3007 - protein, 1147 aa, Artificial Sequence; identical to SEQ ID NO: 2962
  SARS-CoV-2/Iceland/247/2020__EPI_ISL_417575 spike protein (1-1147)(I712C_T1077C)

SEQ ID NO: 3008 - protein, 1147 aa, Artificial Sequence
  SARS-CoV-2/Iceland/238/2020__EPI_ISL_417566 spike protein (1-1147)(I712C_T1077C)
MFVFLVLLPLVSSQCVNLTTRTQLPPAYTNSFTRGVYYPDKVFRSSVLHSTQDLFLPFFSNVTWFHAIHVSGTNGTKRFDNPVLPFNDGVYFASTEKSNIIRGWIFGTTLDSKTQSLLIVNNATNVVIKVCEFQFCNDPFLGVYYHKNNKSWMESEFRVYSSANNCTFEYVSQPFLMDLEGKQGNFKNLREFVFKNIDGYFKIYSKHTPINLVRDLPQGFSALEPLVDLPIGINITRFQTLLALHRSYLTPGDSSSGWTAGAAAYYVGYLQPRTFLLKYNENGTITDAVDCALDPLSETKCTLKSFTVEKGIYQTSNFRVQPTESIVRFPNITNLCPFGEVFNATRFASVYAWNRKRISNCVADYSVLYNSASFSTFKCYGVSPTKLNDLCFTNVYADSFVIRGDEVRQIAPGQTGKIADYNYKLPDDFTGCVIAWNSNNLDSKVGGNYNYLYRLFRKSNLKPFERDISTEIYQAGSTPCNGVEGFNCYFPLQSYGFQPTNGVGYQPYRVVVLSFELLHAPATVCGPKKSTNLVKNKCVNFNFNGLTGTGVLTESNKKFLPFQQFGRDIADTTDAVRDPQTLEILDITPCSFGGVSVITPGTNTSNQVAVLYQGVNCTEVPVAIHADQLTPTWRVYSTGSNVFQTRAGCLIGAEHVNNSYECDIPIGAGICASYQTQTNSPRRARSVASQSIIAYTMSLGAENSVAYSNNSCAIPTNFTISVTTEILPVSMTKTSVDCTMYICGDSTECSNLLLQYGSFCTQLNRALTGIAVEQDKNTQEVFAQVKQIYKTPPIKDFGGFNFSQILPDPSKPSKRSFIEDLLFNKVTLADVGFIKQYGDCLGDIAARDLICAQKFNGLTVLPPLLTDEMIAQYTSALLAGTITSGWTFGAGAALQIPFAMQMAYRFNGIGVTQNVLYENQKLIANQFNSAIGKIQDSLSSTASALGKLQDVVNQNAQALNTLVKQLSSNFGAISSVLNDILSRLDKVEAEVQIDRLITGRLQSLQTYVTQQLIRAAEIRASANLAATKMSECVLGQSKRVDFCGKGYHLMSFPQSAPHGVVFLHVTYVPAQEKNFTCAPAICHDGKAHFPREGVFVSNGTHWFVTQRNFYEPQIITTDNTFVSGNCDVVIGIVNNTVYDPLQPELDS

SEQ ID NO: 3009 - protein, 1147 aa, Artificial Sequence
  SARS-CoV-2/Greece/16/2020__EPI_ISL_418265 spike protein (1-1147)(I712C_T1077C)
MFVFLVLLPLVSSQCVNLTTRTQLPPAYTNSFTRGVYYPDKVFRSSVLHSTQDLFLPFFSNVTWFHAIHVSGTNGTKRFDNPVLPFNDGVYFASTEKSNIIRGWIFGTTLDSKTQSLLIVNNATNVVIKVCEFQFCNDPFLGVYYHKNNKSWMESEFRVYSSANNCTFEYVSQPFLMDLEGKQGNFKNLREFVFKNVDGYFKIYSKHTPINLVRDLPQGFSALEPLVDLPIGINITRFQTLLALHRSYLTPGDSSSGWTAGAAAYYVGYLQPRTFLLKYNENGTITDAVDCALDPLSETKCTLKSFTVEKGIYQTSNFRVQPTESIVRFPNITNLCPFGEVFNATRFASVYAWNRKRISNCVADYSVLYNSASFSTFKCYGVSPTKLNDLCFTNVYADSFVIRGDEVRQIAPGQTGKIADYNYKLPDDFTGCVIAWNSNNLDSKVGGNYNYLYRLFRKSNLKPFERDISTEIYQAGSTPCNGVEGFNCYFPLQSYGFQPTNGVGYQPYRVVVLSFELLHAPATVCGPKKSTNLVKNKCVNFNFNGLTGTGVLTESNKKFLPFQQFGRDIADTTDAVRDPQTLEILDITPCSFGGVSVITPGTNTSNQVAVLYQDVNCTEVPVAIHADQLTPTWRVYSTGSNVFQTRAGCLIGAEHVNNSYECDIPIGAGICASYQTQTNSPRRARSVASQSIIAYTMSLGAENSVAYSNNSCAIPTNFTISVTTEILPVSMTKTSVDCTMYICGDSTECSNLLLQYGSFCTQLNRALTGIAVEQDKNTQEVFAQVKQIYKTPPIKDFGGFNFSQILPDPSKPSKRSFIEDLLFNKVTLADAGFIKQYGDCLGDIAARDLICAQKFNGLTVLPPLLTDEMIAQYTSALLAGTITSGWTFGAGAALQIPFAMQMAYRFNGIGVTQNVLYENQKLIANQFNSAIGKIQDSLSSTASALGKLQDVVNQNAQALNTLVKQLSSNFGAISSVLNDILSRLDKVEAEVQIDRLITGRLQSLQTYVTQQLIRAAEIRASANLAATKMSECVLGQSKRVDFCGKGYHLMSFPQSAPHGVVFLHVTYVPAQEKNFTCAPAICHDGKAHFPREGVFVSNGTHWFVTQRNFYEPQIITTDNTFVSGNCDVVIGIVNNTVYDPLQPELDS

SEQ ID NO: 3010 - protein, 1147 aa, Artificial Sequence
  SARS-CoV-2/Iceland/319/2020__EPI_ISL_417648 spike protein (1-1147)(I712C_T1077C)
MFVFLVLLPLVSSQCVNLTTRTQLPPAYTNSFTRGVYYPDKVFRSSVLHSTQDLFLPFFSNVTWFHAIHVSGTNGTKRFDNPVLPFNDGVYFASTEKSNIIRGWIFGTTLDSKTQSLLIVNNATNVVIKVCEFQFCNDPFLGVYYHKNNKSWMESEFRVYSSANNCTFEYVSQPFLIDLEGKQGNFKNLREFVFKNIDGYFKIYSKHTPINLVRDLPQGFSALEPLVDLPIGINITRFQTLLALHRSYLTPGDSSSGWTAGAAAYYVGYLQPRTFLLKYNENGTITDAVDCALDPLSETKCTLKSFTVEKGIYQTSNFRVQPTESIVRFPNITNLCPFGEVFNATRFASVYAWNRKRISNCVADYSVLYNSASFSTFKCYGVSPTKLNDLCFTNVYADSFVIRGDEVRQIAPGQTGKIADYNYKLPDDFTGCVIAWNSNNLDSKVGGNYNYLYRLFRKSNLKPFERDISTEIYQAGSTPCNGVEGFNCYFPLQSYGFQPTNGVGYQPYRVVVLSFELLHAPATVCGPKKSTNLVKNKCVNFNFNGLTGTGVLTESNKKFLPFQQFGRDIADTTDAVRDPQTLEILDITPCSFGGVSVITPGTNTSNQVAVLYQGVNCTEVPVAIHADQLTPTWRVYSTGSNVFQTRAGCLIGAEHVNNSYECDIPIGAGICASYQTQTNSPRRARSVASQSIIAYTMSLGAENSVAYSNNSCAIPTNFTISVTTEILPVSMTKTSVDCTMYICGDSTECSNLLLQYGSFCTQLNRALTGIAVEQDKNTQEVFAQVKQIYKTPPIKDFGGFNFSQILPDPSKPSKRSFIEDLLFNKVTLADAGFIKQYGDCLGDIAARDLICAQKFNGLTVLPPLLTDEMIAQYTSALLAGTITSGWTFGAGAALQIPFAMQMAYRFNGIGVTQNVLYENQKLIANQFNSAIGKIQDSLSSTASALGKLQDVVNQNAQALNTLVKQLSSNFGAISSVLNDILSRLDKVEAEVQIDRLITGRLQSLQTYVTQQLIRAAEIRASANLAATKMSECVLGQSKRVDFCGKGYHLMSFPQSAPHGVVFLHVTYVPAQEKNFTCAPAICHDGKAHFPREGVFVSNGTHWFVTQRNFYEPQIITTDNTFVSGNCDVVIGIVNNTVYDPLQPELDS

SEQ ID NO: 3011 - protein, 1147 aa, Artificial Sequence
  SARS-CoV-2/Congo/94/2020__EPI_ISL_417947 spike protein (1-1147)(I712C_T1077C)
MFVFLVLLPLVSSQCVNLTTRTQLPPAYTNSFTRGVYYPDKVFRSSVLHSTQDLFLPFFSNVTWFHAIHVSGTNGTKRFDNPVLPFNDGVYFASTEKSNIIRGWIFGTTLDSKTQSLLIVNNATNVVIKVCEFQFCNDPFLGVYYHKNNKSWMESEFRVYSSANNCTFEYVSQPFLMDLEGKQGNFKNLREFVFKNIDGYFKIYSKHTPINLVRDLPQGFSALEPLVDLPIGINITRFQTLLALHRSYLTPGDSSSGWTAGAAAYYVGYLQPRTFLLKYNENGTITDAVDCALDPLSETKCTLKSFTVEKGIYQTSNFRVQPTESIVRFPNITNLCPFGEVFNATRFASVYAWNRKRISNCVADYSVLYNSASFSTFKCYGVSPTKLNDLCFTNVYADSFVIRGDEVRQIAPGQTGKIADYNYKLPDDFTGCVIAWNSNNLDSKVGGNYNYLYRLFRKSNLKPFERDISTEIYQAGSTPCNGVEGFNCYFPLQSYGFQPTNGVGYQPYRVVVLSFELLHAPATVCGPKKSTNLVKNKCVNFNFNGLTGTGVLTESNKKFLPFQQFGRDIADTTDAVRDPQTLEILDITPCSFGGVSVITPGTNTSNQVAVLYQGVNCTEVPVAIHADQLTPTWRVYSTGSNVFQTRAGCLIGAEHVNNSYECDIPIGAGICASYQTQTNSPRRARSVASQSIIAYTMSLGAENSVAYSNNSCAIPTNFTISVTTEILPVSMTKTSVDCTMYICGDSTECSNLLLQYGSFCTQLNRALTGIAVEQDKNTQEVFAQVKQIYKTPPIKDFGGFNFSQILPDPSKPSKRSFIEDILFNKVTLADAGFIKQYGDCLGDIAARDLICAQKFNGLTVLPPLLTDEMIAQYTSALLAGTITSGWTFGAGAALQIPFAMQMAYRFNGIGVTQNVLYENQKLIANQFNSAIGKIQDSLSSTASALGKLQDVVNQNAQALNTLVKQLSSNFGAISSVLNDILSRLDKVEAEVQIDRLITGRLQSLQTYVTQQLIRAAEIRASANLAATKMSECVLGQSKRVDFCGKGYHLMSFPQSAPHGVVFLHVTYVPAQEKNFTCAPAICHDGKAHFPREGVFVSNGTHWFVTQRNFYEPQIITTDNTFVSGNCDVVIGIVNNTVYDPLQPELDS

SEQ ID NO: 3012 - protein, 1147 aa, Artificial Sequence
  SARS-CoV-2/Congo/158/2020__EPI_ISL_417950 spike protein (1-1147)(I712C_T1077C)
MFVFLVLLPLVSSQCVNLTTRTQLPPAYTNSFTRGVYYPDKVFRSSVLHSTQDLFLPFFSNVTWFHAIHVSGTNGTKRFDNPVLPFNDGVYFASTEKSNIIRGWIFGTTLDSKTQSLLIVNNATNVVIKVCEFQFCNDPFLGVYYHKNNKSWMESEFRVYSSANNCTFEYVSQPFLMDLEGKQGNFKNLREFVFKNIDGYFKIYSKHTPINLVRDLPQGFSALEPLVDLPIGINITRFQTLLALHRSYLTPGDSSSGWTAGAAAYYVGYLQPRTFLLKYNENGTITDAVDCALDPLSETKCTLKSFTVEKGIYQTSNFRVQPTESIVRFPNITNLCPFGEVFNATRFASVYAWNRKRISNCVADYSVLYNSASFSTFKCYGVSPTKLNDLCFTNVYADSFVIRGDEVRQIAPGQTGKIADYNYKLPDDFTGCVIAWNSNNLDSKVGGNYNYLYRLFRKSNLKPFERDISTEIYQAGSTPCNGVEGFNCYFPLQSYGFQPTNGVGYQPYRVVVLSFELLHAPATVCGPKKSTNLVKNKCVNFNFNGLTGTGVLTESNKKFLPFQQFGRDIADTTDAVRDPQTLEILDITPCSFGGVSVITPGTNTSNQVAVLYQDVNCTEVPVAIHADQLTPTWRVYSTGSNVFQTRAGCLIGAEHVNNSYECDIPIGAGICASYQTQTNSPRRARSVASQSIIAYTMSLGAENSVAYSNNSCAIPTNFTISVTTEILPVSMTKTSVDCTMYICGDSTECSNLLLQYGSFCTQLNRALTGIAVEQDKNTQEVFAQVKQIYKTPPIKDFGGFNFSQILPDPSKPSKRSFIEDLLFNKVTLADAGFIKQYGDCLGDIAARDLICAQKFNGLTVLPPLLTDEMIAQYTSALLAGTITSGWTFGAGAALQIPFAMQMAYRFNGIGVTQNVLYENQKLIANQFNSAIGKIQDSLSSTASALGKLQDVVNQNAQALNTLVKQLSSNFGAISSVLNDILSRLDKVEAEVQIDRLITGRLQSLQTYVTQQLIRAAEIRASANLAATKMSECVLGQSKRVDFCGKGYHLMSFPQSAPHGVVFLHVTYVPAQEKNFTCAPAICHDGKAHFPREGVFVSNGTHWFVTQRNFYEPQIITTDNTFLSGNCDVVIGIVNNTVYDPLQPELDS

SEQ ID NO: 3013 - protein, 1147 aa, Artificial Sequence
  SARS-CoV-2/USA/UT-00034/2020__EPI_ISL_417977 spike protein (1-1147)(I712C_T1077C)
MFVFLVLLPLVSSQCVNLTTRTQLPPAYTNSFTRGVYYPDKVFRSSVLHSTQDLFLPFFSNVTWFHAIHVSGTNGTKRFDNPVLPFNDGVYFASTEKSNIIRGWIFGTTLDSKTQSLLIVNNATNVVIKVCEFQFCNDPFLGVYYYKNNKSWMESEFRVYSSANNCTFEYVSQPFLMDLEGKQGNFKNLREFVFKNIDGYFKIYSKHTPINLVRDLPQGFSALEPLVDLPIGINITRFQTLLALHRSYLTPGDSSSGWTAGAAAYYVGYLQPRTFLLKYNENGTITDAVDCALDPLSETKCTLKSFTVEKGIYQTSNFRVQPTESIVRFPNITNLCPFGEVFNATRFASVYAWNRKRISNCVADYSVLYNSASFSTFKCYGVSPTKLNDLCFTNVYADSFVIRGDEVRQIAPGQTGKIADYNYKLPDDFTGCVIAWNSNNLDSKVGGNYNYLYRLFRKSNLKPFERDISTEIYQAGSTPCNGVEGFNCYFPLQSYGFQPTNGVGYQPYRVVVLSFELLHAPATVCGPKKSTNLVKNKCVNFNFNGLTGTGVLTESNKKFLPFQQFGRDIADTTDAVRDPQTLEILDITPCSFGGVSVITPGTNTSNQVAVLYQGVNCTEVPVAIHADQLTPTWRVYSTGSNVFQTRAGCLIGAEHVNNSYECDIPIGAGICASYQTQTNSPRRARSVASQSIIAYTMSLGAENSVAYSNNSCAIPTNFTISVTTEILPVSMTKTSVDCTMYICGDSTECSNLLLQYGSFCTQLNRALTGIAVEQDKNTQEVFAQVKQIYKTPPIKDFGGFNFSQILPDPSKPSKRSFIEDLLFNKVTLADAGFIKQYGDCLGDIAARDLICAQKFNGLTVLPPLLTDEMIAQYTSALLAGTITSGWTFGAGAALQIPFAMQMAYRFNGIGVTQNVLYENQKLIANQFNSAIGKIQDSLSSTASALGKLQDVVNQNAQALNTLVKQLSSNFGAISSVLNDILSRLDKVEAEVQIDRLITGRLQSLQTYVTQQLIRAAEIRASANLAATKMSECVLGQSKRVDFCGKGYHLMSFPQSAPHGVVFLHVTYVPAQEKNFTCAPAICHDGKAHFPREGVFVSNGTHWFVTQRNFYEPQIITTDNTFVSGNCDVVIGIVNNTVYDPLQPELDS

SEQ ID NO: 3014 - protein, 1147 aa, Artificial Sequence
  SARS-CoV-2/USA/UT-00033/2020__EPI_ISL_417976 spike protein (1-1147)(I712C_T1077C)
MFVFLVLLPLVSSQCVNLTTRTQLPPAYTNSFTRGVYYPDKVFRSSVLHSTQDLFLPFFSNVTWFHAIHVSGTNGTKRFDNPVLPFNDGVYFASTEKSNIIRGWIFGTTLDSKTQSLLIVNNATNVVIKVCEFQFCNDPFLGVYYHKNNKSWMESEFRVYSSANNCTFEYVSQPFLMDLEGKQGNFKNLREFVFKNIDGYFKIYSKHTPINLVRDLPQGFSALEPLVDLPIGINITRFQTLLALHRSYLTPGDSSSGLTAGAAAYYVGYLQPRTFLLKYNENGTITDAVDCALDPLSETKCTLKSFTVEKGIYQTSNFRVQPTESIVRFPNITNLCPFGEVFNATRFASVYAWNRKRISNCVADYSVLYNSASFSTFKCYGVSPTKLNDLCFTNVYADSFVIRGDEVRQIAPGQTGKIADYNYKLPDDFTGCVIAWNSNNLDSKVGGNYNYLYRLFRKSNLKPFERDISTEIYQAGSTPCNGVEGFNCYFPLQSYGFQPTNGVGYQPYRVVVLSFELLHAPATVCGPKKSTNLVKNKCVNFNFNGLTGTGVLTESNKKFLPFQQFGRDIADTTDAVRDPQTLEILDITPCSFGGVSVITPGTNTSNQVAVLYQGVNCTEVPVAIHADQLTPTWRVYSTGSNVFQTRAGCLIGAEHVNNSYECDIPIGAGICASYQTQTNSPRRARSVASQSIIAYTMSLGAENSVAYSNNSCAIPTNFTISVTTEILPVSMTKTSVDCTMYICGDSTECSNLLLQYGSFCTQLNRALTGIAVEQDKNTQEVFAQVKQIYKTPPIKDFGGFNFSQILPDPSKPSKRSFIEDLLFNKVTLADAGFIKQYGDCLGDIAARDLICAQKFNGLTVLPPLLTDEMIAQYTSALLAGTITSGWTFGAGAALQIPFAMQMAYRFNGIGVTQNVLYENQKLIANQFNSAIGKIQDSLSSTASALGKLQDVVNQNAQALNTLVKQLSSNFGAISSVLNDILSRLDKVEAEVQIDRLITGRLQSLQTYVTQQLIRAAEIRASANLAATKMSECVLGQSKRVDFCGKGYHLMSFPQSAPHGVVFLHVTYVPAQEKNFTCAPAICHDGKAHFPREGVFVSNGTHWFVTQRNFYEPQIITTDNTFVSGNCDVVIGIVNNTVYDPLQPELDS

SEQ ID NO: 3015 - protein, 1147 aa, Artificial Sequence
  SARS-CoV-2/USA/WI-13/2020__EPI_ISL_417516 spike protein (1-1147)(I712C_T1077C)
MFVFLVLLPLVSSQCVNLTTRTQLPPAYTNSFTRGVYYPDKVFRSSVLHSTQDLFLPFFSNVTWFHAIHVSGTNGTKRFDNPVLPFNDGVYFASTEKSNIIRGWIFGTTLDSKTQSLLIVNNATNVVIKVCEFQFCNDPFLGVYYHKNNKSWMESEFRVYSSANNCTFEYVSQPFLMDLEGKQGNFKNLREFVFKNIDGYFKIYSKHTPINLVRDLPQGFSALEPLVDLPIGINITRFQTLLALHRSYLTPGDSSSGWTAGAAAYYVGYLQPRTFLLKYNENGTITDAVDCALDPLSETKCTLKSFTVEKGIYQTSNFRVLPTESIVRFPNITNLCPFGEVFNATRFASVYAWNRKRISNCVADYSVLYNSASFSTFKCYGVSPTKLNDLCFTNVYADSFVIRGDEVRQIAPGQTGKIADYNYKLPDDFTGCVIAWNSNNLDSKVGGNYNYLYRLFRKSNLKPFERDISTEIYQAGSTPCNGVEGFNCYFPLQSYGFQPTNGVGYQPYRVVVLSFELLHAPATVCGPKKSTNLVKNKCVNFNFNGLTGTGVLTESNKKFLPFQQFGRDIADTTDAVRDPQTLEILDITPCSFGGVSVITPGTNTSNQVAVLYQGVNCTEVPVAIHADQLTPTWRVYSTGSNVFQTRAGCLIGAEHVNNSYECDIPIGAGICASYQTQTNSPRRARSVASQSIIAYTMSLGAENSVAYSNNSCAIPTNFTISVTTEILPVSMTKTSVDCTMYICGDSTECSNLLLQYGSFCTQLNRALTGIAVEQDKNTQEVFAQVKQIYKTPPIKDFGGFNFSQILPDPSKPSKRSFIEDLLFNKVTLADAGFIKQYGDCLGDIAARDLICAQKFNGLTVLPPLLTDEMIAQYTSALLAGTITSGWTFGAGAALQIPFAMQMAYRFNGIGVTQNVLYENQKLIANQFNSAIGKIQDSLSSTASALGKLQDVVNQNAQALNTLVKQLSSNFGAISSVLNDILSRLDKVEAEVQIDRLITGRLQSLQTYVTQQLIRAAEIRASANLAATKMSECVLGQSKRVDFCGKGYHLMSFPQSAPHGVVFLHVTYVPAQEKNFTCAPAICHDGKAHFPREGVFVSNGTHWFVTQRNFYEPQIITTDNTFVSGNCDVVIGIVNNTVYDPLQPELDS

SEQ ID NO: 3016 - protein, 1146 aa, Artificial Sequence
  SARS-CoV-2/India/1-27/2020__EPI_ISL_413522 spike protein (1-1146)(I711C_T1076C)
MFVFLVLLPLVSSQCVNLTTRTQLPPAYTNSFTRGVYYPDKVFRSSVLHSTQDLFLPFFSNVTWFHAIHVSGTNGTKRFDNPVLPFNDGVYFASTEKSNIIRGWIFGTTLDSKTQSLLIVNNATNVVIKVCEFQFCNDPFLGVYHKNNKSWMESEFRVYSSANNCTFEYVSQPFLMDLEGKQGNFKNLREFVFKNIDGYFKIYSKHTPINLVRDLPQGFSALEPLVDLPIGINITRFQTLLALHRSYLTPGDSSSGWTAGAAAYYVGYLQPRTFLLKYNENGTITDAVDCALDPLSETKCTLKSFTVEKGIYQTSNFRVQPTESIVRFPNITNLCPFGEVFNATRFASVYAWNRKRISNCVADYSVLYNSASFSTFKCYGVSPTKLNDLCFTNVYADSFVIRGDEVIQIAPGQTGKIADYNYKLPDDFTGCVIAWNSNNLDSKVGGNYNYLYRLFRKSNLKPFERDISTEIYQAGSTPCNGVEGFNCYFPLQSYGFQPTNGVGYQPYRVVVLSFELLHAPATVCGPKKSTNLVKNKCVNFNFNGLTGTGVLTESNKKFLPFQQFGRDIADTTDAVRDPQTLEILDITPCSFGGVSVITPGTNTSNQVAVLYQDVNCTEVPVAIHADQLTPTWRVYSTGSNVFQTRAGCLIGAEHVNNSYECDIPIGAGICASYQTQTNSPRRARSVASQSIIAYTMSLGAENSVAYSNNSCAIPTNFTISVTTEILPVSMTKTSVDCTMYICGDSTECSNLLLQYGSFCTQLNRALTGIAVEQDKNTQEVFAQVKQIYKTPPIKDFGGFNFSQILPDPSKPSKRSFIEDLLFNKVTLADAGFIKQYGDCLGDIAARDLICAQKFNGLTVLPPLLTDEMIAQYTSALLAGTITSGWTFGAGAALQIPFAMQMAYRFNGIGVTQNVLYENQKLIANQFNSAIGKIQDSLSSTASALGKLQDVVNQNAQALNTLVKQLSSNFGAISSVLNDILSRLDKVEAEVQIDRLITGRLQSLQTYVTQQLIRAAEIRASANLAATKMSECVLGQSKRVDFCGKGYHLMSFPQSAPHGVVFLHVTYVPAQEKNFTCAPAICHDGKAHFPREGVFVSNGTHWFVTQRNFYEPQIITTDNTFVSGNCDVVIGIVNNTVYDPLQPELDS

SEQ ID NO: 3017 - protein, 1141 aa, Artificial Sequence
  SARS-CoV-2/pangolin/Guangxi/P4L/2017__EPI_ISL_410538 spike protein (1-1141)(I706C_T1071C)
MFVFLFVLPLVSSQCVNLTTRTGIPPGYTNSSTRGVYYPDKVFRSSILHLTQDLFLPFFSNVTWFNTINYQGGFKKFDNPVLPFNDGVYFASTEKSNIIRGWIFGTTLDARTQSLLIVNNATNVVIKVCEFQFCTDPFLGVYYHNNNKTWVENEFRVYSSANNCTFEYISQPFLMDLEGKQGNFKNLREFVFKNVDGYFKIYSKHTPIDLVRDLPRGFAALEPLVDLPIGINITRFQTLLALHRSYLTPGNLESGWTTGAAAYYVGYLQQRTFLLSYNQNGTITDAVDCSLDPLSETKCTLKSLTVEKGIYQTSNFRVQPTISIVRFPNITNLCPFGEVFNASKFASVYAWNRKRISNCVADYSVLYNSTSFSTFKCYGVSPTKLNDLCFTNVYADSFVVKGDEVRQIAPGQTGVIADYNYKLPDDFTGCVIAWNSVKQDALTGGNYGYLYRLFRKSKLKPFERDISTEIYQAGSTPCNGQVGLNCYYPLERYGFHPTTGVNYQPFRVVVLSFELLNGPATVCGPKLSTTLVKDKCVNFNFNGLTGTGVLTTSKKQFLPFQQFGRDISDTTDAVRDPQTLEILDITPCSFGGVSVITPGTNTSNQVAVLYQDVNCTEVPMAIHAEQLTPAWRVYSAGANVFQTRAGCLVGAEHVNNSYECDIPVGAGICASYHSMSSLRSVNQRSIIAYTMSLGAENSVAYSNNSCAIPTNFTISVTTEILPVSMTKTSVDCTMYICGDSIECSNLLLQYGSFCTQLNRALTGIAVEQDKNTQEVFAQVKQIYKTPPIKDFGGFNFSQILPDPSKPSKRSFIEDLLFNKVTLADAGFIKQYGDCLGDIAARDLICAQKFNGLTVLPPLLTDEMIAQYTSALLAGTITSGWTFGAGAALQIPFAMQMAYRFNGIGVTQNVLYENQKLIANQFNSAIGKIQDSLSSTASALGKLQDVVNQNAQALNTLVKQLSSNFGAISSVLNDILSRLDKVEAEVQIDRLITGRLQSLQTYVTQQLIRAAEIRASANLAATKMSECVLGQSKRVDFCGKGYHLMSFPQSAPHGVVFLHVTYVPAQEKNFTCAPAICHEGKAHFPREGVFVSNGTHWFITQRNFYEPQIITTDNTFVSGSCDVVIGIVNNTVYDPLQPELDS

SEQ ID NO: 3018 - protein, 1141 aa, Artificial Sequence
  SARS-CoV-2/pangolin/Guangxi/P5L/2017__EPI_ISL_410540 spike protein (1-1141)(I706C_T1071C)
MFVFLFVLPLVSSQCVNLTTRTGIPPGYTNSSTRGVYYPDKVFRSSILHLTQDLFLPFFSNVTWFNTINYQGGFKKFDNPVLPFNDGVYFASTEKSNIIRGWIFGTTLDARTQSLLIVNNATNVVIKVCEFQFCTDPFLGVYYHNNNKTWVENEFRVYSSANNCTFEYISQPFLMDLEGKQGNFKNLREFVFKNVDGYFKIYSKHTPIDLVRDLPRGFAALEPLVDLPIGINITRFQTLLALHRSYLTPGKLESGWTTGAAAYYVGYLQQRTFLLSYNQNGTITDAVDCSLDPLSETKCTLKSLTVEKGIYQTSNFRVQPTISIVRFPNITNLCPFGEVFNASKFASVYAWNRKRISNCVADYSVLYNSTSFSTFKCYGVSPTKLNDLCFTNVYADSFVVKGDEVRQIAPGQTGVIADYNYKLPDDFTGCVIAWNSVKQDALTGGNYGYLYRLFRKSKLKPFERDISTEIYQAGSTPCNGQVGLNCYYPLERYGFHPTTGVNYQPFRVVVLSFELLNGPATVCGPKLSTTLVKDKCVNFNFNGLTGTGVLTTSKKQFLPFQQFGRDISDTTDAVRDPQTLEILDITPCSFGGVSVITPGTNTSNQVAVLYQDVNCTEVPMAIHAEQLTPAWRVYSAGANVFQTRAGCLVGAEHVNNSYECDIPVGAGICASYHSMSSFRSVNQRSIIAYTMSLGAENSVAYSNNSCAIPTNFTISVTTEILPVSMTKTSVDCTMYICGDSIECSNLLLQYGSFCTQLNRALTGIAVEQDKNTQEVFAQVKQIYKTPPIKDFGGFNFSQILPDPSKPSKRSFIEDLLFNKVTLADAGFIKQYGDCLGDIAARDLICAQKFNGLTVLPPLLTDEMIAQYTSALLAGTITSGWTFGAGAALQIPFAMQMAYRFNGIGVTQNVLYENQKLIANQFNSAIGKIQDSLSSTASALGKLQDVVNQNAQALNTLVKQLSSNFGAISSVLNDILSRLDKVEAEVQIDRLITGRLQSLQTYVTQQLIRAAEIRASANLAATKMSECVLGQSKRVDFCGKGYHLMSFPQSAPHGVVFLHVTYVPAQEKNFTCAPAICHEGKAHFPREGVFVSNGTHWFITQRNFYEPQIITTDNTFVSGSCDVVIGIVNNTVYDPLQPELDS

SEQ ID NO: 3019 - protein, 1141 aa, Artificial Sequence
  SARS-CoV-2/pangolin/Guangxi/P5E/2017__EPI_ISL_410541 spike protein (1-1141)(I706C_T1071C)
MFVFLFVLPLVSSQCVNLTTRTGIPPGYTNSSTRGVYYPDKVFRSSILHLTQDLFLPFFSNVTWFNTITYQGGSKKFDNPVLPFNDGVYFASTEKSNIIRGWIFGTTLDARTQSLLIVNNATNVVIKVCEFQFCTDPFLGVYYHNNNKTWVENEFRVYSSANNCTFEYISQPFLMDLEGKQGNFKNLREFVFKNVDGYFKIYSKHTPIDLVRDLPRGFAALEPLVDLPIGINITRFQTLLALHRSYLTPGKLESGWTTGAAAYYVGYLQQRTFLLSYNQNGTITDAVDCSLDPLSETKCTLKSLTVEKGIYQTSNFRVQPTISIVRFPNITNLCPFGEVFNASKFASVYAWNRKRISNCVADYSVLYNSTSFSTFKCYGVSPTKLNDLCFTNVYADSFVVKGDEVRQIAPGQTGVIADYNYKLPDDFTGCVIAWNSVKQDALTGDNYGYLYRLFRKSKLKPFERDISTEIYQAGSTPCNGQVGLNCYYPLERYGFHPTTGVNYQPFRVVVLSFELLNGPATVCGPKLSTTLVKDKCVNFNFNGLTGTGVLTTSKKQFLPFQQFGRDISDTTDAVRDPQTLEILDITPCSFGGVSVITPGTNTSNQVAVLYQDVNCTEVPMAIHAEQLTPAWRVYSAGANVFQTRAGCLVGAEHVNNSYECDIPVGAGICASYHSMSSFRSVNQRSIIAYTMSLGAENSVAYSNNSCAIPTNFTISVTTEILPVSMTKTSVDCTMYICGDSIECSNLLLQYGSFCTQLNRALTGIAVEQDKNTQEVFAQVKQIYKTPPIKDFGGFNFSQILPDPSKPSKRSFIEDLLFNKVTLADAGFIKQYGDCLGDIAARDLICAQKFNGLTVLPPLLTDEMIAQYTSALLAGTITSGWTFGAGAALQIPFAMQMAYRFNGIGVTQNVLYENQKLIANQFNSAIGKIQDSLSSTASALGKLQDVVNQNAQALNTLVKQLSSNFGAISSVLNDILSRLDKVEAEVQIDRLITGRLQSLQTYVTQQLIRAAEIRASANLAATKMSECVLGQSKRVDFCGKGYHLMSFPQSAPHGVVFLHVTYVPAQEKNFTCAPAICHEGKAHFPREGVFVSNGTHWFITQRNFYEPQIITTDNTFVSGSCDVVIGIVNNTVYDPLQPELDS

SEQ ID NO: 3020 - protein, 1139 aa, Artificial Sequence
  SARS-CoV-2/pangolin/Guangxi/P1E/2017__EPI_ISL_410539 spike protein (1-1139)(I704C_T1069C)
MFVFLFVLPLVSSQCVNLTTRTGIQPGYTNSSTRGVYYPDKVFRSSILHLTQDLFLPFFSNVTWFNTINYQGGFKKFDNPVLPFNDGVYFASTEKSNIIRGWIFGTTLDARTQSLLIVNNATNVVIKVCEFQFCTDPFLGVYYHNNNKTWVENEFRVYSSANNCTFEYISQPFLMDLEGKQGNFKNLREFVFKNVDGYFKIYSKHTPIDLVRDLPRGFAALEPLVDLPIGINITRFQTLLALHRSYLTPGKLESGWTTGAAAYYVGYLQQRTFLLSYNQNGTITDAVDCSLDPLSETKCTLKSLTVEKGIYQTSNFRVQPTISIVRFPNITNLCPFGEVFNASKFASVYAWNRKRISNCVADYSVLYNSTSFSTFKCYGVSPTKLNDLCFTNVYADSFVVKGDEVRQIAPGQTGVIADYNYKLPDDFTGCVIAWNSVKQDALTGGNYLYRLFRKSKLKPFERDISTEIYQAGSTPCNGQVGLNCYYPLERYGFHPTTGVNYQPFRVVVLSFELLNGPATVCGPKLSTTLVKDKCVNFNFNGLTGTGVLTTSKKQFLPFQQFGRDISDTTDAVRDPQTLEILDITPCSFGGVSVITPGTNTSNQVAVLYQDVNCTEVPMAIHAEQLTPAWRVYSAGANVFQTRAGCLVGAEHVNNSYECDIPVGAGICASYHSMSSLRSVNQRSIIAYTMSLGAENSVAYSNNSCAIPTNFTISVTTEILPVSMTKTSVDCTMYICGDSIECSNLLLQYGSFCTQLNRALTGIAVEQDKNTQEVFAQVKQIYKTPPIKDFGGFNFSQILPDPSKPSKRSFIEDLLFNKVTLADAGFIKQYGDCLGDIAARDLICAQKFNGLTVLPPLLTDEMIAQYTSALLAGTITSGWTFGAGAALQIPFAMQMAYRFNGIGVTQNVLYENQKLIANQFNSAIGKIQDSLSSTASALGKLQDVVNQNAQALNTLVKQLSSNFGAISSVLNDILSRLDKVEAEVQIDRLITGRLQSLQTYVTQQLIRAAEIRASANLAATKMSECVLGQSKRVDFCGKGYHLMSFPQSAPHGVVFLHVTYVPAQEKNFTCAPAICHEGKAHFPREGVFVSNGTHWFITQRNFYEPQIITTDNTFVSGSCDVVIGIVNNTVYDPLQPELDS

SEQ ID NO: 3021 - protein, 1147 aa, Artificial Sequence
  SARS-CoV-2/Wuhan/WIV05/2019__EPI_ISL_402128 spike protein (1-1147)(I714C_Y1110C)
MFVFLVLLPLVSSQCVNLTTRTQLPPAYTNSFTRGVYYPDKVFRSSVLHSTQDLFLPFFSNVTWFHAIHVSGTNGTKRFDNPVLPFNDGVYFASTEKSNIIRGWIFGTTLDSKTQSLLIVNNATNVVIKVCEFQFCNDPFLGVYYHKNNKSWMESEFRVYSSANNCTFEYVSQPFLMDLEGKQGNFKNLREFVFKNIDGYFKIYSKHTPINLVRDLPQGFSALEPLVDLPIGINITRFQTLLALHRSYLTPGDSSSGWTAGAAAYYVGYLQPRTFLLKYNENGTITDAVDCALDPLSETKCTLKSFTVEKGIYQTSNFRVQPTESIVRFPNITNLCPFGEVFNATRFASVYAWNRKRISNCVADYSVLYNSASFSTFKCYGVSPTKLNDLCFTNVYADSFVIRGDEVRQIAPGQTGKIADYNYKLPDDFTGCVIAWNSNNLDSKVGGNYNYLYRLFRKSNLKPFERDISTEIYQAGSTPCNGVEGFNCYFPLQSYGFQPTNGVGYQPYRVVVLSFELLHAPATVCGPKKSTNLVKNKCVNFNFNGLTGTGVLTESNKKFLPFQQFGRDIADTTDAVRDPQTLEILDITPCSFGGVSVITPGTNTSNQVAVLYQDVNCTEVPVAIHADQLTPTWRVYSTGSNVFQTRAGCLIGAEHVNNSYECDIPIGAGICASYQTQTNSPRRARSVASQSIIAYTMSLGAENSVAYSNNSIACPTNFTISVTTEILPVSMTKTSVDCTMYICGDSTECSNLLLQYGSFCTQLNRALTGIAVEQDKNTQEVFAQVKQIYKTPPIKDFGGFNFSQILPDPSKPSKRSFIEDLLFNKVTLADAGFIKQYGDCLGDIAARDLICAQKFNGLTVLPPLLTDEMIAQYTSALLAGTITSGWTFGAGAALQIPFAMQMAYRFNGIGVTQNVLYENQKLIANQFNSAIGKIQDSLSSTASALGKLQDVVNQNAQALNTLVKQLSSNFGAISSVLNDILSRLDKVEAEVQIDRLITGRLQSLQTYVTQQLIRAAEIRASANLAATKMSECVLGQSKRVDFCGKGYHLMSFPQSAPHGVVFLHVTYVPAQEKNFTTAPAICHDGKAHFPREGVFVSNGTHWFVTQRNFCEPQIITTDNTFVSGNCDVVIGIVNNTVYDPLQPELDS

SEQ ID NO: 3022 - protein, 1143 aa, Artificial Sequence
  SARS-CoV-2/bat/Yunnan/RaTG13/2013__EPI_ISL_402131 spike protein (1-1143)(I710C_Y1106C)
MFVFLVLLPLVSSQCVNLTTRTQLPPAYTNSSTRGVYYPDKVFRSSVLHLTQDLFLPFFSNVTWFHAIHVSGTNGIKRFDNPVLPFNDGVYFASTEKSNIIRGWIFGTTLDSKTQSLLIVNNATNVVIKVCEFQFCNDPFLGVYYHKNNKSWMESEFRVYSSANNCTFEYVSQPFLMDLEGKQGNFKNLREFVFKNIDGYFKIYSKHTPINLVRDLPPGFSALEPLVDLPIGINITRFQTLLALHRSYLTPGDSSSGWTAGAAAYYVGYLQPRTFLLKYNENGTITDAVDCALDPLSETKCTLKSFTVEKGIYQTSNFRVQPTDSIVRFPNITNLCPFGEVFNATTFASVYAWNRKRISNCVADYSVLYNSTSFSTFKCYGVSPTKLNDLCFTNVYADSFVITGDEVRQIAPGQTGKIADYNYKLPDDFTGCVIAWNSKHIDAKEGGNFNYLYRLFRKANLKPFERDISTEIYQAGSKPCNGQTGLNCYYPLYRYGFYPTDGVGHQPYRVVVLSFELLNAPATVCGPKKSTNLVKNKCVNFNFNGLTGTGVLTESNKKFLPFQQFGRDIADTTDAVRDPQTLEILDITPCSFGGVSVITPGTNASNQVAVLYQDVNCTEVPVAIHADQLTPTWRVYSTGSNVFQTRAGCLIGAEHVNNSYECDIPIGAGICASYQTQTNSRSVASQSIIAYTMSLGAENSVAYSNNSIACPTNFTISVTTEILPVSMTKTSVDCTMYICGDSTECSNLLLQYGSFCTQLNRALTGIAVEQDKNTQEVFAQVKQIYKTPPIKDFGGFNFSQILPDPSKPSKRSFIEDLLFNKVTLADAGFIKQYGDCLGDIAARDLICAQKFNGLTVLPPLLTDEMIAQYTSALLAGTITSGWTFGAGAALQIPFAMQMAYRFNGIGVTQNVLYENQKLIANQFNSAIGKIQDSLSSTASALGKLQDVVNQNAQALNTLVKQLSSNFGAISSVLNDILSRLDKVEAEVQIDRLITGRLQSLQTYVTQQLIRAAEIRASANLAATKMSECVLGQSKRVDFCGKGYHLMSFPQSAPHGVVFLHVTYVPAQEKNFTTAPAICHDGKAHFPREGVFVSNGTHWFVTQRNFCEPQIITTDNTFVSGSCDVVIGIVNNTVYDPLQPELDS

SEQ ID NO: 3023 - protein, 1147 aa, Artificial Sequence
  SARS-CoV-2/Wuhan/HBCDC-HB-01/2019__EPI_ISL_402132 spike protein (1-1147)(I714C_Y1110C)
MFVFLVLLPLVSSQCVNLTTRTQLPPAYTNSITRGVYYPDKVFRSSVLHSTQDLFLPFFSNVTWFHAIHVSGTNGTKRFDNPVLPFNDGVYFASTEKSNIIRGWIFGTTLDSKTQSLLIVNNATNVVIKVCEFQFCNDPFLGVYYHKNNKSWMESEFRVYSSANNCTFEYVSQPFLMDLEGKQGNFKNLREFVFKNIDGYFKIYSKHTPINLVRDLPQGFSALEPLVDLPIGINITRFQTLLALHRSYLTPGDSSSGWTAGAAAYYVGYLQPRTFLLKYNENGTITDAVDCALDPLSETKCTLKSFTVEKGIYQTSNFRVQPTESIVRFPNITNLCPFGEVFNATRFASVYAWNRKRISNCVADYSVLYNSASFSTFKCYGVSPTKLNDLCFTNVYADSFVIRGDEVRQIAPGQTGKIADYNYKLPDDFTGCVIAWNSNNLDSKVGGNYNYLYRLFRKSNLKPFERDISTEIYQAGSTPCNGVEGFNCYFPLQSYGFQPTNGVGYQPYRVVVLSFELLHAPATVCGPKKSTNLVKNKCVNFNFNGLTGTGVLTESNKKFLPFQQFGRDIADTTDAVRDPQTLEILDITPCSFGGVSVITPGTNTSNQVAVLYQDVNCTEVPVAIHADQLTPTWRVYSTGSNVFQTRAGCLIGAEHVNNSYECDIPIGAGICASYQTQTNSPRRARSVASQSIIAYTMSLGAENSVAYSNNSIACPTNFTISVTTEILPVSMTKTSVDCTMYICGDSTECSNLLLQYGSFCTQLNRALTGIAVEQDKNTQEVFAQVKQIYKTPPIKDFGGFNFSQILPDPSKPSKRSFIEDLLFNKVTLADAGFIKQYGDCLGDIAARDLICAQKFNGLTVLPPLLTDEMIAQYTSALLAGTITSGWTFGAGAALQIPFAMQMAYRFNGIGVTQNVLYENQKLIANQFNSAIGKIQDSLSSTASALGKLQDVVNQNAQALNTLVKQLSSNFGAISSVLNDILSRLDKVEAEVQIDRLITGRLQSLQTYVTQQLIRAAEIRASANLAATKMSECVLGQSKRVDFCGKGYHLMSFPQSAPHGVVFLHVTYVPAQEKNFTTAPAICHDGKAHFPREGVFVSNGTHWFVTQRNFCEPQIITTDNTFVSGNCDVVIGIVNNTVYDPLQPELDS

SEQ ID NO: 3024 - protein, 1147 aa, Artificial Sequence
  SARS-CoV-2/Guangdong/20SF028/2020__EPI_ISL_403936 spike protein (1-1147)(I714C_Y1110C)
MFVFLVLLPLVSSQCVNLTTRTQLPPAYTNSFTRGVYYPDKVFRSSVLYSTQDLFLPFFSNVTWFHAIHVSGTNGTKRFDNPVLPFNDGVYFASTEKSNIIRGWIFGTTLDSKTQSLLIVNNATNVVIKVCEFQFCNDPFLGVYYHKNNKSWMESEFRVYSSANNCTFEYVSQPFLMDLEGKQGNFKNLREFVFKNIDGYFKIYSKHTPINLVRDLPQGFSALEPLVDLPIGINITRFQTLLALHRSYLTPGDSSSGWTAGAAAYYVGYLQPRTFLLKYNENGTITDAVDCALDPLSETKCTLKSFTVEKGIYQTSNFRVQPTESIVRFPNITNLCPFGEVFNATRFASVYAWNRKRISNCVADYSVLYNSASFSTFKCYGVSPTKLNDLCFTNVYADSFVIRGDEVRQIAPGQTGKIADYNYKLPDDFTGCVIAWNSNNLDSKVGGNYNYLYRLFRKSNLKPFERDISTEIYQAGSTPCNGVEGFNCYFPLQSYGFQPTNGVGYQPYRVVVLSFELLHAPATVCGPKKSTNLVKNKCVNFNFNGLTGTGVLTESNKKFLPFQQFGRDIADTTDAVRDPQTLEILDITPCSFGGVSVITPGTNTSNQVAVLYQDVNCTEVPVAIHADQLTPTWRVYSTGSNVFQTRAGCLIGAEHVNNSYECDIPIGAGICASYQTQTNSPRRARSVASQSIIAYTMSLGAENSVAYSNNSIACPTNFTISVTTEILPVSMTKTSVDCTMYICGDSTECSNLLLQYGSFCTQLNRALTGIAVEQDKNTQEVFAQVKQIYKTPPIKDFGGFNFSQILPDPSKPSKRSFIEDLLFNKVTLADAGFIKQYGDCLGDIAARDLICAQKFNGLTVLPPLLTDEMIAQYTSALLAGTITSGWTFGAGAALQIPFAMQMAYRFNGIGVTQNVLYENQKLIANQFNSAIGKIQDSLSSTASALGKLQDVVNQNAQALNTLVKQLSSNFGAISSVLNDILSRLDKVEAEVQIDRLITGRLQSLQTYVTQQLIRAAEIRASANLAATKMSECVLGQSKRVDFCGKGYHLMSFPQSAPHGVVFLHVTYVPAQEKNFTTAPAICHDGKAHFPREGVFVSNGTHWFVTQRNFCEPQIITTDNTFVSGNCDVVIGIVNNTVYDPLQPELDS

SEQ ID NO: 3025 - protein, 1147 aa, Artificial Sequence
  SARS-CoV-2/Shenzhen/SZTH-001/2020__EPI_ISL_406592 spike protein (1-1147)(I714C_Y1110C)
MFVFLVLLPLVSSQCVNLTTRTQLPPAYTNSFTRGVYYPDKVFRSSVLHSTQDLFLPFFSNVTWFHAIHVSGTNGTKRFDNPVLPFNDGVYFASTEKSNIIRGWIFGTTLDSKTQSLLIVNNATNVVIKVCEFQFCNDPFLGVYYHKNNKSWMESEFRVYSSANNCTFEYVSQPFLMDLEGKQGNFKNLREFVFKNIDGYFKIYSKHTPINLVRDLPQGFSALEPLVDLPIGINITRFQTLLALHRSYLTPGDSSSGWTAGAAAYYVGYLQPRTFLLKYNENGTITDAVDCALDPLSETKCTLKSFTVEKGIYQTSNFRVQPTESIVRFPNITNLCPFGEVFNATRFASVYAWNRKRISNCVADYSVLYNSASFSTFKCYGVSPTKLNDLCFTNVYADSFVIRGDEVRQIAPGQTGKIADYNYKLPDDFTGCVIAWNSNNLDSKVGGNYNYLYRLFRKSNLKPFERDISTEIYQAGSTPCNGVEGFNCYFPLQSYGFQPTNGVGYQPYRVVVLSFELLHAPATVCGPKKSTNLVKNKCVNFNFNGLTGTGVLTESNKKFLPFQQFGRDIADTTDAVRDPQTLEILDITPCSFGGVSVITPGTNTSNQVAVLYQDVNCTEVPVAIHADQLTPTWRVYSTGSNVFQTRAGCLIGAEHVNNSYECDIPIGAGICASYQTQTNSPRRARSVASQSIIAYTMSLGAENSVAYSNNSIACPTNFTISVTTEILPVSMTKTSVDCTMYICGDSTECSNLLLQYGSFCTQLNRALTGIAVEQDKNTQEVFAQVKQIYKTPPIKDFGGFNFSQILPDPSKPSKRSFIEDLLFNKVTLADAGFIKQYGDCLGDIAARDLICAQKFNGLTVLPPLLTDEMIAQYTSALLAGTITSGWTFGAGAALQIPFAMQMAYRFNGIGVTQNVLYENQKLIANQFNSAIGKIQDSLSSTASALGKLQDVVNQNAQALNTLVKQLSSNFGAISSVLNDILSRLDKVEAEVQIDRLITGRLQSLQTYVTQQLIRAAEIRASANLAATKMSECVLGQSKRVDFCGKGYHLMSFPQSAPHGVVFLHVTYVPAQEKNFTTAPAICHDGKAHFPREGVFVSNGTHWFVTQRNFCEPQIITTDNTFVSGNCDVLIGIVNNTVYDPLQPELDS

SEQ ID NO: 3026 - protein, 1147 aa, Artificial Sequence
  SARS-CoV-2/Shenzhen/SZTH-004/2020__EPI_ISL_406595 spike protein (1-1147)(I714C_Y1110C)
MFVFLVLLPLVSSQCVNLTTRTQLPPAYTNSFTRGVYYPDKVFRSSVLHSTQDLFLPFFSNVTWFHAIHVSGTNGTKRFDNPVLPFNDGVYFASTEKSNIIRGWIFGTTLDSKTQSLLIVNNATNVVIKVCEFQFCNDPFLGVYYHKNNKSWMESEFRVYSSANNCTFEYVSQPFLMDLEGKQGNFKNLREFVFKNIDGYFKIYSKHTPINLVRDLPQGFSALEPLVDLPIGINITRFQTLLALHRSYLTPGDSSSGWTAGAAAYYVGYLQPRTFLLKYNENGTITDAVDCALDPLSETKCTLKSFTVEKGIYQTSNFRVQPTESIVRFPNITNLCPFGEVFNATRFASVYAWDRKRISNCVAYYSVLYNSASFSTFKCYGVSPTKLNDLCFTNVYADSFVIRGDEVRQIAPGQTGKIADYNYKLPDDFTGCVIAWNSNNLDSKVGGNYNYLYRLFRKSNLKPFERDISTEIYQAGSTPCNGVEGFNCYFPLQSYGFQPTNGVGYQPYRVVVLSFELLHAPATVCGPKKSTNLVKNKCVNFNFNGLTGTGVLTESNKKFLPFQQFGRDIADTTDAVRDPQTLEILDITPCSFGGVSVITPGTNTSNQVAVLYQDVNCTEVPVAIHADQLTPTWRVYSTGSNVFQTRAGCLIGAEHVNNSYECDIPIGAGICASYQTQTNSPRRARSVASQSIIAYTMSLGAENSVAYSNNSIACPTNFTISVTTEILPVSMTKTSVDCTMYICGDSTECSNLLLQYGSFCTQLNRALTGIAVEQDKNTQEVFAQVKQIYKTPPIKDFGGFNFSQILPDPSKPSKRSFIEDLLFNKVTLADAGFIKQYGDCLGDIAARDLICAQKFNGLTVLPPLLTDEMIAQYTSALLAGTITSGWTFGAGAALQIPFAMQMAYRFNGIGVTQNVLYENQKLIANQFNSAIGKIQDSLSSTASALGKLQDVVNQNAQALNTLVKQLSSNFGAISSVLNDILSRLDKVEAEVQIDRLITGRLQSLQTYVTQQLIRAAEIRASANLAATKMSECVLGQSKRVDFCGKGYHLMSFPQSAPHGVVFLHVTYVPAQEKNFTTAPAICHDGKAHFPREGVFVSNGTHWFVTQRNFCEPQIITTDNTFVSGNCDVVIGIVNNTVYDPLQPELDS

SEQ ID NO: 3027 - protein, 1147 aa, Artificial Sequence
  SARS-CoV-2/France/IDF0372/2020__EPI_ISL_406596 spike protein (1-1147)(I714C_Y1110C)
MFVFLVLLPLVSSQCVNLTTRTQLPPAYTNSFTRGVYYPDKVFRSSVLHSTQDLFLPFFSNVTWFHAIHVSGTNGTKRFDNPVLPFNDGVYFASTEKSNIIRGWIFGTTLDSKTQSLLIVNNATNVVIKVCEFQFCNDPFLGVYYHKNNKSWMESEFRVYSSANNCTFEYVSQPFLMDLEGKQGNFKNLREFVFKNIDGYFKIYSKHTPINLVRDLPQGFSALEPLVDLPIGINITRFQTLLALHRSYLTPGDSSSGWTAGAAAYYVGYLQPRTFLLKYNENGTITDAVDCALDPLSETKCTLKSFTVEKGIYQTSNFRVQPTESIVRFPNITNLCPFGEVFNATRFASVYAWNRKRISNCVADYSFLYNSASFSTFKCYGVSPTKLNDLCFTNVYADSFVIRGDEVRQIAPGQTGKIADYNYKLPDDFTGCVIAWNSNNLDSKVGGNYNYLYRLFRKSNLKPFERDISTEIYQAGSTPCNGVEGFNCYFPLQSYGFQPTNGVGYQPYRVVVLSFELLHAPATVCGPKKSTNLVKNKCVNFNFNGLTGTGVLTESNKKFLPFQQFGRDIADTTDAVRDPQTLEILDITPCSFGGVSVITPGTNTSNQVAVLYQDVNCTEVPVAIHADQLTPTWRVYSTGSNVFQTRAGCLIGAEHVNNSYECDIPIGAGICASYQTQTNSPRRARSVASQSIIAYTMSLGAENSVAYSNNSIACPTNFTISVTTEILPVSMTKTSVDCTMYICGDSTECSNLLLQYGSFCTQLNRALTGIAVEQDKNTQEVFAQVKQIYKTPPIKDFGGFNFSQILPDPSKPSKRSFIEDLLFNKVTLADAGFIKQYGDCLGDIAARDLICAQKFNGLTVLPPLLTDEMIAQYTSALLAGTITSGWTFGAGAALQIPFAMQMAYRFNGIGVTQNVLYENQKLIANQFNSAIGKIQDSLSSTASALGKLQDVVNQNAQALNTLVKQLSSNFGAISSVLNDILSRLDKVEAEVQIDRLITGRLQSLQTYVTQQLIRAAEIRASANLAATKMSECVLGQSKRVDFCGKGYHLMSFPQSAPHGVVFLHVTYVPAQEKNFTTAPAICHDGKAHFPREGVFVSNGTHWFVTQRNFCEPQIITTDNTFVSGNCDVVIGIVNNTVYDPLQPELDS

SEQ ID NO: 3028 - protein, 1147 aa, Artificial Sequence
  SARS-CoV-2/Australia/VIC01/2020__EPI_ISL_406844 spike protein (1-1147)(I714C_Y1110C)
MFVFLVLLPLVSSQCVNLTTRTQLPPAYTNSFTRGVYYPDKVFRSSVLHSTQDLFLPFFSNVTWFHAIHVSGTNGTKRFDNPVLPFNDGVYFASTEKSNIIRGWIFGTTLDSKTQSLLIVNNATNVVIKVCEFQFCNDPFLGVYYHKNNKSWMESEFRVYSSANNCTFEYVSQPFLMDLEGKQGNFKNLREFVFKNIDGYFKIYSKHTPINLVRDLPQGFSALEPLVDLPIGINITRFQTLLALHRRYLTPGDSSSGWTAGAAAYYVGYLQPRTFLLKYNENGTITDAVDCALDPLSETKCTLKSFTVEKGIYQTSNFRVQPTESIVRFPNITNLCPFGEVFNATRFASVYAWNRKRISNCVADYSVLYNSASFSTFKCYGVSPTKLNDLCFTNVYADSFVIRGDEVRQIAPGQTGKIADYNYKLPDDFTGCVIAWNSNNLDSKVGGNYNYLYRLFRKSNLKPFERDISTEIYQAGSTPCNGVEGFNCYFPLQSYGFQPTNGVGYQPYRVVVLSFELLHAPATVCGPKKSTNLVKNKCVNFNFNGLTGTGVLTESNKKFLPFQQFGRDIADTTDAVRDPQTLEILDITPCSFGGVSVITPGTNTSNQVAVLYQDVNCTEVPVAIHADQLTPTWRVYSTGSNVFQTRAGCLIGAEHVNNSYECDIPIGAGICASYQTQTNSPRRARSVASQSIIAYTMSLGAENSVAYSNNSIACPTNFTISVTTEILPVSMTKTSVDCTMYICGDSTECSNLLLQYGSFCTQLNRALTGIAVEQDKNTQEVFAQVKQIYKTPPIKDFGGFNFSQILPDPSKPSKRSFIEDLLFNKVTLADAGFIKQYGDCLGDIAARDLICAQKFNGLTVLPPLLTDEMIAQYTSALLAGTITSGWTFGAGAALQIPFAMQMAYRFNGIGVTQNVLYENQKLIANQFNSAIGKIQDSLSSTASALGKLQDVVNQNAQALNTLVKQLSSNFGAISSVLNDILSRLDKVEAEVQIDRLITGRLQSLQTYVTQQLIRAAEIRASANLAATKMSECVLGQSKRVDFCGKGYHLMSFPQSAPHGVVFLHVTYVPAQEKNFTTAPAICHDGKAHFPREGVFVSNGTHWFVTQRNFCEPQIITTDNTFVSGNCDVVIGIVNNTVYDPLQPELDS

SEQ ID NO: 3029 - protein, 1147 aa, Artificial Sequence
  SARS-CoV-2/Germany/BavPat1/2020__EPI_ISL_406862 spike protein (1-1147)(I714C_Y1110C)
MFVFLVLLPLVSSQCVNLTTRTQLPPAYTNSFTRGVYYPDKVFRSSVLHSTQDLFLPFFSNVTWFHAIHVSGTNGTKRFDNPVLPFNDGVYFASTEKSNIIRGWIFGTTLDSKTQSLLIVNNATNVVIKVCEFQFCNDPFLGVYYHKNNKSWMESEFRVYSSANNCTFEYVSQPFLMDLEGKQGNFKNLREFVFKNIDGYFKIYSKHTPINLVRDLPQGFSALEPLVDLPIGINITRFQTLLALHRSYLTPGDSSSGWTAGAAAYYVGYLQPRTFLLKYNENGTITDAVDCALDPLSETKCTLKSFTVEKGIYQTSNFRVQPTESIVRFPNITNLCPFGEVFNATRFASVYAWNRKRISNCVADYSVLYNSASFSTFKCYGVSPTKLNDLCFTNVYADSFVIRGDEVRQIAPGQTGKIADYNYKLPDDFTGCVIAWNSNNLDSKVGGNYNYLYRLFRKSNLKPFERDISTEIYQAGSTPCNGVEGFNCYFPLQSYGFQPTNGVGYQPYRVVVLSFELLHAPATVCGPKKSTNLVKNKCVNFNFNGLTGTGVLTESNKKFLPFQQFGRDIADTTDAVRDPQTLEILDITPCSFGGVSVITPGTNTSNQVAVLYQGVNCTEVPVAIHADQLTPTWRVYSTGSNVFQTRAGCLIGAEHVNNSYECDIPIGAGICASYQTQTNSPRRARSVASQSIIAYTMSLGAENSVAYSNNSIACPTNFTISVTTEILPVSMTKTSVDCTMYICGDSTECSNLLLQYGSFCTQLNRALTGIAVEQDKNTQEVFAQVKQIYKTPPIKDFGGFNFSQILPDPSKPSKRSFIEDLLFNKVTLADAGFIKQYGDCLGDIAARDLICAQKFNGLTVLPPLLTDEMIAQYTSALLAGTITSGWTFGAGAALQIPFAMQMAYRFNGIGVTQNVLYENQKLIANQFNSAIGKIQDSLSSTASALGKLQDVVNQNAQALNTLVKQLSSNFGAISSVLNDILSRLDKVEAEVQIDRLITGRLQSLQTYVTQQLIRAAEIRASANLAATKMSECVLGQSKRVDFCGKGYHLMSFPQSAPHGVVFLHVTYVPAQEKNFTTAPAICHDGKAHFPREGVFVSNGTHWFVTQRNFCEPQIITTDNTFVSGNCDVVIGIVNNTVYDPLQPELDS

SEQ ID NO: 3030 - protein, 1147 aa, Artificial Sequence
  SARS-CoV-2/Wuhan/HBCDC-HB-02/2020__EPI_ISL_412978 spike protein (1-1147)(I714C_Y1110C)
MFVFLVLLPLVSSQCVNLTTRTQLPPAYTNSFTRGVYYPDKVFRSSVLHSTQDLFLPFFSNVTWFHAIHVSGTNGTKRFDNPVLPFNDGVYFASTEKSNIIRGWIFGTTLDSKTQSLLIVNNATNVVIKVCEFQFCNDPFLGVYYHKNNKSWMESEFRVYSSANNCTFEYVSQPFLMDLEGKQGNFKNLREFVFKNIDGYFKIYSKHTPINLVRDLPQGFSALEPLVDLPIGINITRFQTLLALHRSYLTPGDSSSGWTAGAAAYYVGYLQPRTFLLKYNENGTITDAVDCALDPLSETKCTLKSFTVEKGIYQTSNFRVQPTESIVRFPNITNLCPFGEVFNATRFASVYAWNRKRISNCVADYSVLYNSASFSTFKCYGVSPTKLNDLCFTNVYADSFVIRGDEVRQIAPGQTGKIADYNYKLPDDFTGCVIAWNSNNLDSKVGGNYNYLYRLFRKSNLKPFERDISTEIYQAGSTPCNGVEGFNCYFPLQSYGFQPTNGVGYQPYRVVVLSFELLHAPATVCGPKKSTNLVKNKCVNFNFNGLTGTGVLTESNKKFLPFQQFGRDIADTTDAVRDPQTLEILDITPCSFGGVSVITPGTNTSNQVAVLYQDVNCTEVPVAIHADQLTPTWRVYSTGSNVFQTRAGCLIGAEHVNNSYECDIPIGAGICASYQTQTNSPRRARSVASQSIIAYTMSLGAENSVAYSNNSIACPTNFTISVTTEILPVSMTKTSVDCTMYICGDSTECSNFLLQYGSFCTQLNRALTGIAVEQDKNTQEVFAQVKQIYKTPPIKDFGGFNFSQILPDPSKPSKRSFIEDLLFNKVTLADAGFIKQYGDCLGDIAARDLICAQKFNGLTVLPPLLTDEMIAQYTSALLAGTITSGWTFGAGAALQIPFAMQMAYRFNGIGVTQNVLYENQKLIANQFNSAIGKIQDSLSSTASALGKLQDVVNQNAQALNTLVKQLSSNFGAISSVLNDILSRLDKVEAEVQIDRLITGRLQSLQTYVTQQLIRAAEIRASANLAATKMSECVLGQSKRVDFCGKGYHLMSFPQSAPHGVVFLHVTYVPAQEKNFTTAPAICHDGKAHFPREGVFVSNGTHWFVTQRNFCEPQIITTDNTFVSGNCDVVIGIVNNTVYDPLQPELDS

SEQ ID NO: 3031 - protein, 1147 aa, Artificial Sequence
  SARS-CoV-2/Australia/QLD02/2020__EPI_ISL_407896 spike protein (1-1147)(I714C_Y1110C)
MFVFLVLLPLVSSQCVNLTTRTQLPPAYTNSFTRGVYYPDKVFRSSVLHSTQDLFLPFFSNVTWFHAIHVSGTNGTKRFDNPVLPFNDGVYFASTEKSNIIRGWIFGTTLDSKTQSLLIVNNATNVVIKVCEFQFCNDPFLGVYYHKNNKSWMESEFRVYSSANNCTFEYVSQPFLMDLEGKQGNFKNLREFVFKNIDGYFKIYSKHTPINLVRDLPQGFSALEPLVDLPIGINITRFQTLLALHRSYLTPGDSSSGWTAGAAAYYVGYLQPRTFLLKYNENGTITDAVDCALDPLSETKCTLKSFTVEKGIYQTSNFRVQPTESIVRFPNITNLCPFGEVFNATRFASVYAWNRKRISNCVADYSVLYNSASFSTFKCYGVSPTKLNDLCFTNVYADSFVIRGDEVRQIAPGQTGKIADYNYKLPDDFTGCVIAWNSNNLDSKVGGNYNYLYRLFRKSNLKPFERDISTEIYQAGSTPCNGVEGFNCYFPLQSYGFQPTNGVGYQPYRVVVLSFELLHAPATVCGPKKSTNLVKNKCVNFNFNGLTGTGVLTESNKKFLPFQQFGRDIADTTDAVRDPQTLEILDITPCSFGGVSVITPGTNTSNQVAVLYQDVNCTEVPVAIHADQLTPTWRVYSTGSNVFQTRAGCLIGAEHVNNSYECDIPIGAGICASYQTQTNSPRRARSVASQSIIAYTMSLGAENSVAYSNNSIACPTNFTISVTTEILPVSMTKTSVDCTMYICGDSTECSNLLLQYGSFCTQLNRALTGIAVEQDKNTQEVFAQVKQIYKTPPIKDFGGFNFSQILPDPSKPSKRSFIEDLLFNKVTLADAGFIKQYGDCLGDIAARDLICAQKFNGLTVLPPLLTDEMIAQYTSALLAGTITSGWTFGAGAALQIPFAMQMAYRFNGIGVTQNVLYENQKLIANQFNSAIGKIQDSLSSTASALGKLQDVVNQNAQALNTLVKQLSSNFGAISSVLNDILSRLDKVEAEVQIDRLITGRLQSLQTYVTQQLIRAAEIRASANLAATKMSECVLGQSKRVDFCGKGYHLMSFPQSAPHGVVFLHVTYVPAQEKNFTTAPAICHDGKAHFPREGVFVSNGTHWFVTQRNFCEPQIITTDNTFVSGNCDVVIGIVNNTVYDPLQLELDS

SEQ ID NO: 3032 - protein, 1147 aa, Artificial Sequence
  SARS-CoV-2/India/1-31/2020__EPI_ISL_413523 spike protein (1-1147)(I714C_Y1110C)
MFVFLVLLPLVSSQCVNLTTRTQLPPAYTNSFTRGVYYPDKVFRSSVLHSTQDLFLPFFSNVTWFHAIHVSGTNGTKRFDNPVLPFNDGVYFASTEKSNIIRGWIFGTTLDSKTQSLLIVNNATNVVIKVCEFQFCNDPFLGVYYHKNNKSWMESEFRVYSSANNCTFEYVSQPFLMDLEGKQGNFKNLREFVFKNIDGYFKIYSKHTPINLVRDLPQGFSALEPLVDLPIGINITRFQTLLALHRSYLTPGDSSSGWTAGAAAYYVGYLQPRTFLLKYNENGTITDAVDCALDPLSETKCTLKSFTVEKGIYQTSNFRVQPTESIVRFPNITNLCPFGEVFNATRFASVYAWNRKRISNCVADYSVLYNSASFSTFKCYGVSPTKLNDLCFTNVYADSFVIRGDEVRQIAPGQTGKIADYNYKLPDDFTGCVIAWNSNNLDSKVGGNYNYLYRLFRKSNLKPFERDISTEIYQAGSTPCNGVEGFNCYFPLQSYGFQPTNGVGYQPYRVVVLSFELLHAPATVCGPKKSTNLVKNKCVNFNFNGLTGTGVLTESNKKFLPFQQFGRDIADTTDAVRDPQTLEILDITPCSFGGVSVITPGTNTSNQVAVLYQDVNCTEVPVAIHADQLTPTWRVYSTGSNVFQTRAGCLIGAEHVNNSYECDIPIGAGICASYQTQTNSPRRARSVASQSIIAYTMSLGAENSVAYSNNSIACPTNFTISVTTEILPVSMTKTSVDCTMYICGDSTECSNLLLQYGSFCTQLNRALTGIAVEQDKNTQEVFAQVKQIYKTPPIKDFGGFNFSQILPDPSKPSKRSFIEDLLFNKVTLADAGFIKQYGDCLGDIAARDLICAQKFNGLTVLPPLLTDEMIAQYTSALLAGTITSGWTFGAGAALQIPFAMQMAYRFNGIGVTQNVLYENQKLIANQFNSVIGKIQDSLSSTASALGKLQDVVNQNAQALNTLVKQLSSNFGAISSVLNDILSRLDKVEAEVQIDRLITGRLQSLQTYVTQQLIRAAEIRASANLAATKMSECVLGQSKRVDFCGKGYHLMSFPQSAPHGVVFLHVTYVPAQEKNFTTAPAICHDGKAHFPREGVFVSNGTHWFVTQRNFCEPQIITTDNTFVSGNCDVVIGIVNNTVYDPLQPELDS

SEQ ID NO: 3033 - protein, 1147 aa, Artificial Sequence
  SARS-CoV-2/Guangdong/GD2020087-P0008/2020__EPI_ISL_413863 spike protein (1-1147)(I714C_Y1110C)
MFVFLVLLPLVSSQCVNLTTRTQLPPAYTNSFTRGVYYPDKVFRSSVLHSTQDLFLPFFSNVTWFHAIHVSGTNGTKRFDNPVLPFNDGVYFASTEKSNIIRGWIFGTTLDSKTQSLLIVNNATNVVIKVCEFQFCNDPFLGVYYHKNNKSWMESEFRVYSSANNCTFEYVSQPFLMDLEGKQGNFKNLREFVFKNIDGYFKIYSKHTPINLVRDLPQGFSALEPLVDLPIGINITRFQTLLALHRSYLTPGDSSSGWTAGAAAYYVGYLQPRTFLLKYNENGTITDAVDCALDPLSETKCTLKSFTVEKGIYQTSNFRVQPTESIVRFPNITNLCPFGEVFNATRFASVYAWNRKRISNCVADYSVLYNSASFSTFKCYGVSPTKLNDLCFTNVYADSFVIRGDEVREIAPGQTGKIADYNYKLPDDFTGCVIAWNSNNLDSKVGGNYNYLYRLFRKSNLKPFERDISTEIYQAGSTPCNGVEGFNCYFPLQSYGFQPTNGVGYQPYRVVVLSFELLHAPATVCGPKKSTNLVKNKCVNFNFNGLTGTGVLTESNKKFLPFQQFGRDIADTTDAVRDPQTLEILDITPCSFGGVSVITPGTNTSNQVAVLYQDVNCTEVPVAIHADQLTPTWRVYSTGSNVFQTRAGCLIGAEHVNNSYECDIPIGAGICASYQTQTNSPRRARSVASQSIIAYTMSLGAENSVAYSNNSIACPTNFTISVTTEILPVSMTKTSVDCTMYICGDSTECSNLLLQYGSFCTQLNRALTGIAVEQDKNTQEVFAQVKQIYKTPPIKDFGGFNFSQILPDPSKPSKRSFIEDLLFNKVTLADAGFIKQYGDCLGDIAARDLICAQKFNGLTVLPPLLTDEMIAQYTSALLAGTITSGWTFGAGAALQIPFAMQMAYRFNGIGVTQNVLYENQKLIANQFNSAIGKIQDSLSSTASALGKLQDVVNQNAQALNTLVKQLSSNFGAISSVLNDILSRLDKVEAEVQIDRLITGRLQSLQTYVTQQLIRAAEIRASANLAATKMSECVLGQSKRVDFCGKGYHLMSFPQSAPHGVVFLHVTYVPAQEKNFTTAPAICHDGKAHFPREGVFVSNGTHWFVTQRNFCEPQIITTDNTFVSGNCDVVIGIVNNTVYDPLQPELDS

SEQ ID NO: 3034 - protein, 1147 aa, Artificial Sequence
  SARS-CoV-2/Sweden/01/2020__EPI_ISL_411951 spike protein (1-1147)(I714C_Y1110C)
MFVFLVLLPLVSSQCVNLTTRTQLPPAYTNSFTRGVYYPDKVFRSSVLHSTQDLFLPFFSNVTWFHAIHVSGTNGTKRFDNPVLPFNDGVYFASTEKSNIIRGWIFGTTLDSKTQSLLIVNNATNVVIKVCEFQFCNDPFLGVYYHKNNKSWMESEFRVYSSANNCTFEYVSQPFLMDLEGKQGNFKNLREFVFKNIDGYFKIYSKHTPINLVRDLPQGFSALEPLVDLPIGINITRFQTLLALHRSYLTPGDSSSGWTAGAAAYYVGYLQPRTFLLKYNENGTITDAVDCALDPLSETKCTLKSFTVEKGIYQTSNFRVQPTESIVRFPNITNLCPFGEVFNATRFASVYAWNRKRISNCVADYSVLYNSASFSTFKCYGVSPTKLNDLCFTNVYADSFVIRGDEVRQIAPGQTGKIADYNYKLPDDFTGCVIAWNSNNLDSKVGGNYNYLYRLFRKSNLKPFERDISTEIYQAGSTPCNGVEGFNCYFPLQSYGFQPTNGVGYQPYRVVVLSFELLHAPATVCGPKKSTNLVKNKCVNFNFNGLTGTGVLTESNKKFLPFQQFGRDIADTTDAVRDPQTLEILDITPCSFGGVSVITPGTNTSNQVAVLYQDVNCTEVPVAIHADQLTPTWRVYSTGSNVFQTRAGCLIGAEHVNNSYECDIPIGAGICASYQTQTNSPRRARSVASQSIIAYTMSLGAENSVAYSNNSIACPTNFTISVTTEILPVSMTKTSVDCTMYICGDSTECSNLLLQYGSFCTQLNRALTGIAVEQDKNTQEVFAQVKQIYKTPPIKDCGGFNFSQILPDPSKPSKRSFIEDLLFNKVTLADAGFIKQYGDCLGDIAARDLICAQKFNGLTVLPPLLTDEMIAQYTSALLAGTITSGWTFGAGAALQIPFAMQMAYRFNGIGVTQNVLYENQKLIANQFNSAIGKIQDSLSSTASALGKLQDVVNQNAQALNTLVKQLSSNFGAISSVLNDILSRLDKVEAEVQIDRLITGRLQSLQTYVTQQLIRAAEIRASANLAATKMSECVLGQSKRVDFCGKGYHLMSFPQSAPHGVVFLHVTYVPAQEKNFTTAPAICHDGKAHFPREGVFVSNGTHWFVTQRNFCEPQIITTDNTFVSGNCDVVIGIVNNTVYDPLQPELDS

SEQ ID NO: 3035 - protein, 1147 aa, Artificial Sequence
  SARS-CoV-2/Tianmen/HBCDC-HB-07/2020__EPI_ISL_412983 spike protein (1-1147)(I714C_Y1110C)
MFVFLVLLPLVSSQCVNLTTRTQLPPAYTNSFTRGVYYPDKVFRSSVLHSTQDLFLPFFSNVTWFHAIHVSGTNGTKRFDNPVLPFNDGVYFASTEKSNIIRGWIFGTTLDSKTQSLLIVNNATNVVIKVCEFQFCNDPFLGVYYHKNNKSWMESEFRVYSSANNCTFEYVSQPFLMDLEGKQGNFKNLREFVFKNIDGYFKIYSKHTPINLVRDLPQGFSALEPLVDLPIGINITRFQTLLALHRSYLTPGDSSSGWTAGAAAYYVGYLQPRTFLLKYNENGTITDAVDCALDPLSETKCTLKSFTVEKGIYQTSNFRVQPTESIVRFPNITNLCPFGEVFNATRFASVYAWNRKRISNCVADYSVLYNSASFSTFKCYGVSPTKLNDLCFTNVYADSFVIRGDEVRQIAPGQTGKIADYNYKLPDDFTGCVIAWNSNNLDSKVGGNYNYLYRLFRKSNLKPFERDISTEIYQAGSTPCNGVEGFNCYFPLQSYGFQPTNGVGYQPYRVVVLSFELLHAPATVCGPKKSTNLVKNKCVNFNFNGLTGTGVLTESNKKFLPFQQFGRDIADTTDAVRDPQTLEILDITPCSFGGVSVITPGTNTSNQVAVLYQDLNCTEVPVAIHADQLTPTWRVYSTGSNVFQTRAGCLIGAEHVNNSYECDIPIGAGICASYQTQTNSPRRARSVASQSIIAYTMSLGAENSVAYSNNSIACPTNFTISVTTEILPVSMTKTSVDCTMYICGDSTECSNLLLQYGSFCTQLNRALTGIAVEQDKNTQEVFAQVKQIYKTPPIKDFGGFNFSQILPDPSKPSKRSFIEDLLFNKVTLADAGFIKQYGDCLGDIAARDLICAQKFNGLTVLPPLLTDEMIAQYTSALLAGTITSGWTFGAGAALQIPFAMQMAYRFNGIGVTQNVLYENQKLIANQFNSAIGKIQDSLSSTASALGKLQDVVNQNAQALNTLVKQLSSNFGAISSVLNDILSRLDKVEAEVQIDRLITGRLQSLQTYVTQQLIRAAEIRASANLAATKMSECVLGQSKRVDFCGKGYHLMSFPQSAPHGVVFLHVTYVPAQEKNFTTAPAICHDGKAHFPREGVFVSNGTHWFVTQRNFCEPQIITTDNTFVSGNCDVVIGIVNNTVYDPLQPELDS

SEQ ID NO: 3036 - protein, 1147 aa, Artificial Sequence
  SARS-CoV-2/Hong Kong/case42_VM20002493/2020__EPI_ISL_414527 spike protein (1-1147)(I714C_Y1110C)
MFVFLVLLPLVSSQCVNLTTRTQLPPAYTNSFTRGVYYPDKVFRSSVLHSTQDLFLPFFSNVTWFHAIHVSGTNGTKRFDNPVLPFNDGVYFASTEKSNIIRGWIFGTTLDSKTQSLLIVNNATNVVIKVCEFQFCNDPFLGVYYHKNNKSWMESEFRVYSSANNCTFEYVSQPFLMDLEGKQGNFKNLREFVFKNIDGYFKIYSKHTPINLVRDLPQGFSALEPLVDLPIGINITRFQTLLALHRSYLTPGDSSSGWTAGAAAYYVGYLQPRTFLLKYNENGTITDAVDCALDPLSETKCTLKSFTVEKGIYQTSNFRVQPTESIVRFPNITNLCPFGEVFNATRFASVYAWNRKRISNCVADYSVLYNSASFSTFKCYGVSPTKLNDLCFTNVYADSFVIRGDEVRQIAPGQTGKIADYNYKLPDDFTGCVIAWNSNNLDSKVGGNYNYLYRLFRKSNLKPFERDISTEIYQAGSTPCNGVEGFNCYFPLQSYGFQPTNGVGYQPYRVVVLSFELLHAPATVCGPKKSTNLVKNKCVNFNFNGLTGTGVLTESNKKFLPFQQFGRDIADTTDAVRDPQTLEILDITPCSFGGVSVITPGTNTSNQVAVLYQDVNCTEVPVAIHADQLTPTWRVYSTGSNVFQTRAGCLIGAEHVNNSYECDIPIGAGICASYQTQTNSPRRARSVASQSIIAYTMSLGAENSVAYSNNSIACPTNFAISVTTEILPVSMTKTSVDCTMYICGDSTECSNLLLQYGSFCTQLNRALTGIAVEQDKNTQEVFAQVKQIYKTPPIKDFGGFNFSQILPDPSKPSKRSFIEDLLFNKVTLADAGFIKQYGDCLGDIAARDLICAQKFNGLTVLPPLLTDEMIAQYTSALLAGTITSGWTFGAGAALQIPFAMQMAYRFNGIGVTQNVLYENQKLIANQFNSAIGKIQDSLSSTASALGKLQDVVNQNAQALNTLVKQLSSNFGAISSVLNDILSRLDKVEAEVQIDRLITGRLQSLQTYVTQQLIRAAEIRASANLAATKMSECVLGQSKRVDFCGKGYHLMSFPQSAPHGVVFLHVTYVPAQEKNFTTAPAICHDGKAHFPREGVFVSNGTHWFVTQRNFCEPQIITTDNTFVSGNCDVVIGIVNNTVYDPLQPELDS

SEQ ID NO: 3037 - protein, 1147 aa, Artificial Sequence
  SARS-CoV-2/USA/CruiseA-23/2020__EPI_ISL_414482 spike protein (1-1147)(I714C_Y1110C)
MFVFLVLLPLVSSQCVNLTTRTQLPPAYTNSFTRGVYYPDKVFRSSVLHSTQDLFLPFFSNVTWFHAIHVSGTNGTKRFDNPVLPFNDGVYFASTEKSNIIRGWIFGTTLDSKTQSLLIVNNATNVVIKVCEFQFCNDPFLGVYYHKNNKSWMESEFRVYSSANNCTFEYVSQPFLMDLEVKQGNFKNLREFVFKNIDGYFKIYSKHTPINLVRDLPQGFSALEPLVDLPIGINITRFQTLLALHRSYLTPGDSSSGWTAGAAAYYVGYLQPRTFLLKYNENGTITDAVDCALDPLSETKCTLKSFTVEKGIYQTSNFRVQPTESIVRFPNITNLCPFGEVFNATRFASVYAWNRKRISNCVADYSVLYNSASFSTFKCYGVSPTKLNDLCFTNVYADSFVIRGDEVRQIAPGQTGKIADYNYKLPDDFTGCVIAWNSNNLDSKVGGNYNYLYRLFRKSNLKPFERDISTEIYQAGSTPCNGVEGFNCYFPLQSYGFQPTNGVGYQPYRVVVLSFELLHAPATVCGPKKSTNLVKNKCVNFNFNGLTGTGVLTESNKKFLPFQQFGRDIADTTDAVRDPQTLEILDITPCSFGGVSVITPGTNTSNQVAVLYQDVNCTEVPVAIHADQLTPTWRVYSTGSNVFQTRAGCLIGAEHVNNSYECDIPIGAGICASYQTQTNSPRRARSVASQSIIAYTMSLGAENSVAYSNNSIACPTNFTISVTTEILPVSMTKTSVDCTMYICGDSTECSNLLLQYGSFCTQLNRALTGIAVEQDKNTQEVFAQVKQIYKTPPIKDFGGFNFSQILPDPSKPSKRSFIEDLLFNKVTLADAGFIKQYGDCLGDIAARDLICAQKFNGLTVLPPLLTDEMIAQYTSALLAGTITSGWTFGAGAALQIPFAMQMAYRFNGIGVTQNVLYENQKLIANQFNSAIGKIQDSLSSTASALGKLQDVVNQNAQALNTLVKQLSSNFGAISSVLNDILSRLDKVEAEVQIDRLITGRLQSLQTYVTQQLIRAAEIRASANLAATKMSECVLGQSKRVDFCGKGYHLMSFPQSAPHGVVFLHVTYVPAQEKNFTTAPAICHDGKAHFPREGVFVSNGTHWFVTQRNFCEPQIITTDNTFVSGNCDVVIGIVNNTVYDPLQPELDS

SEQ ID NO: 3038 - protein, 1147 aa, Artificial Sequence
  SARS-CoV-2/Hong Kong/case85_VM20002868/2020__EPI_ISL_414519 spike protein (1-1147)(I714C_Y1110C)
MFVFLVLVPLVSSQCVNLTTRTQLPPAYTNSFTRGVYYPDKVFRSSVLHSTQDLFLPFFSNVTWFHAIHVSGTNGTKRFDNPVLPFNDGVYFASTEKSNIIRGWIFGTTLDSKTQSLLIVNNATNVVIKVCEFQFCNDPFLGVYYHKNNKSWMESEFRVYSSANNCTFEYVSQPFLMDLEGKQGNFKNLREFVFKNIDGYFKIYSKHTPINLVRDLPQGFSALEPLVDLPIGINITRFQTLLALHRSYLTPGDSSSGWTAGAAAYYVGYLQPRTFLLKYNENGTITDAVDCALDPLSETKCTLKSFTVEKGIYQTSNFRVQPTESIVRFPNITNLCPFGEVFNATRFASVYAWNRKRISNCVADYSVLYNSASFSTFKCYGVSPTKLNDLCFTNVYADSFVIRGDEVRQIAPGQTGKIADYNYKLPDDFTGCVIAWNSNNLDSKVGGNYNYLYRLFRKSNLKPFERDISTEIYQAGSTPCNGVEGFNCYFPLQSYGFQPTNGVGYQPYRVVVLSFELLHAPATVCGPKKSTNLVKNKCVNFNFNGLTGTGVLTESNKKFLPFQQFGRDIADTTDAVRDPQTLEILDITPCSFGGVSVITPGTNTSNQVAVLYQDVNCTEVPVAIHADQLTPTWRVYSTGSNVFQTRAGCLIGAEHVNNSYECDIPIGAGICASYQTQTNSPRRARSVASQSIIAYTMSLGAENSVAYSNNSIACPTNFTISVTTEILPVSMTKTSVDCTMYICGDSTECSNLLLQYGSFCTQLNRALTGIAVEQDKNTQEVFAQVKQIYKTPPIKDFGGFNFSQILPDPSKPSKRSFIEDLLFNKVTLADAGFIKQYGDCLGDIAARDLICAQKFNGLTVLPPLLTDEMIAQYTSALLAGTITSGWTFGAGAALQIPFAMQMAYRFNGIGVTQNVLYENQKLIANQFNSAIGKIQDSLSSTASALGKLQDVVNQNAQALNTLVKQLSSNFGAISSVLNDILSRLDKVEAEVQIDRLITGRLQSLQTYVTQQLIRAAEIRASANLAATKMSECVLGQSKRVDFCGKGYHLMSFPQSAPHGVVFLHVTYVPAQEKNFTTAPAICHDGKAHFPREGVFVSNGTHWFVTQRNFCEPQIITTDNTFVSGNCDVVIGIVNNTVYDPLQPELDS

SEQ ID NO: 3039 - protein, 1147 aa, Artificial Sequence; identical to SEQ ID NO: 3029
  SARS-CoV-2/England/200990660/2020__EPI_ISL_414523 spike protein (1-1147)(I714C_Y1110C)

SEQ ID NO: 3040 - protein, 1147 aa, Artificial Sequence
  SARS-CoV-2/Australia/NSW09/2020__EPI_ISL_413595 spike protein (1-1147)(I714C_Y1110C)
MFVFLVLLPLVSSQCVNLTTRTQLPPAYTNSFTRGVYYPDKVFRSSVLHSTQDLFLPFFSNVTWFHAIHVSGTNGTKRFDNPVLPFNDGVYFASTEKSNIIRGWIFGTTLDSKTQSLLIVNNATNVVIKVCEFQFCNDPFLGVYYHKNNKSWMESEFRVYSSANNCTFEYVSQPFLMDLEGKQGNFKNLREFVFKNIDGYFKIYSKHTPINLVRDLPQGFSALEPLVDLPIGINITRFQTLLALHRSYLTPGDSSSGWTAGAAAYYVGYLQPRTFLLKYNENGTITDAVDCALDPLSETKCTLKSFTVEKGIYQTSNFRVQPTESIVRFPNITNLCPFGEVFNATRFASVYAWNRKRISNCVADYSVLYNSASFSTFKCYGVSPTKLNDLCFTNVYADSFVIRGDEVRQIAPGQTGKIADYNYKLPDDFTGCVIAWNSNNLDSKVGGNYNYLYRLFRKSNLKPFERDISTEIYQAGSTPCNGVEGFNCYFPLQSYGFQPTNGVGYQPYRVVVLSFELLHAPATVCGPKKSTNLVKNKCVNFNFNGLTGTGVLTESNKKFLPFQQFGRDIADTTDAVRDPQTLEILDITPCSFGGVSVITPGTNTSNQVAVLYQDVNCTEVPVAIHADQLTPTWRVYSTGSNVFQTRAGCLIGAEHVNNSYECDIPIGAGICASYQTQTNSPRRARSVASQSIIAYTMSLGAENSVAYSNNSIACPTNFTISVTTEILPVSMTKTSVDCTMYICGDSTECSNLLLQYGSFCTQLNRALTGIAVEQDKNTQEVFAQVKQIYKTPPIKDFGGFNFSQILPDPSKPSKRSFIEDLLFNKVTLADAGFIKQYGDCLGDIAARDLICAQKFNGLTVLPPLLTDEMIAQYTSALLAGTITSGWTFGAGAALQIPFAMQMAYRFNGIGVTQNVLYENQKLIANQFNSAIGKIQDSLSFTASALGKLQDVVNQNAQALNTLVKQLSSNFGAISSVLNDILSRLDKVEAEVQIDRLITGRLQSLQTYVTQQLIRAAEIRASANLAATKMSECVLGQSKRVDFCGKGYHLMSFPQSAPHGVVFLHVTYVPAQEKNFTTAPAICHDGKAHFPREGVFVSNGTHWFVTQRNFCEPQIITTDNTFVSGNCDVVIGIVNNTVYDPLQPELDS

SEQ ID NO: 3041 - protein, 1147 aa, Artificial Sequence; identical to SEQ ID NO: 3021
  SARS-CoV-2/Australia/NSW10/2020__EPI_ISL_413596 spike protein (1-1147)(I714C_Y1110C)

SEQ ID NO: 3042 - protein, 1147 aa, Artificial Sequence
  SARS-CoV-2/Switzerland/1000477797/2020__EPI_ISL_413023 spike protein (1-1147)(I714C_Y1110C)
MFVFLVLLPLVSSQCVNLTTRTQLPPAYTNSFTRGVYYPDKVFRSSVLHSTQDLFLPFFSNVTWFHAIHVSGTNGTKRFDNPVLPFNDGVYFASTEKSNIIRGWIFGTTLDSKTQSLLIVNNATNVVIKVCEFQFCNDPFLGVYYHKNNKSWMESEFRVYSSANNCTFEYVSQPFLMDLEGKQGNFKNLREFVFKNIDGYFNIYSKHTPINLVRDLPQGFSALEPLVDLPIGINITRFQTLLALHRSYLTPGDSSSGWTAGAAAYYVGYLQPRTFLLKYNENGTITDAVDCALDPLSETKCTLKSFTVEKGIYQTSNFRVQPTESIVRFPNITNLCPFGEVFNATRFASVYAWNRKRISNCVADYSVLYNSASFSTFKCYGVSPTKLNDLCFTNVYADSFVIRGDEVRQIAPGQTGKIADYNYKLPDDFTGCVIAWNSNNLDSKVGGNYNYLYRLFRKSNLKPFERDISTEIYQAGSTPCNGVEGFNCYFPLQSYGFQPTNGVGYQPYRVVVLSFELLHAPATVCGPKKSTNLVKNKCVNFNFNGLTGTGVLTESNKKFLPFQQFGRDIADTTDAVRDPQTLEILDITPCSFGGVSVITPGTNTSNQVAVLYQGVNCTEVPVAIHADQLTPTWRVYSTGSNVFQTRAGCLIGAEHVNNSYECDIPIGAGICASYQTQTNSPRRARSVASQSIIAYTMSLGAENSVAYSNNSIACPTNFTISVTTEILPVSMTKTSVDCTMYICGDSTECSNLLLQYGSFCTQLNRALTGIAVEQDKNTQEVFAQVKQIYKTPPIKDFGGFNFSQILPDPSKPSKRSFIEDLLFNKVTLADAGFIKQYGDCLGDIAARDLICAQKFNGLTVLPPLLTDEMIAQYTSALLAGTITSGWTFGAGAALQIPFAMQMAYRFNGIGVTQNVLYENQKLIANQFNSAIGKIQDSLSSTASALGKLQDVVNQNAQALNTLVKQLSSNFGAISSVLNDILSRLDKVEAEVQIDRLITGRLQSLQTYVTQQLIRAAEIRASANLAATKMSECVLGQSKRVDFCGKGYHLMSFPQSAPHGVVFLHVTYVPAQEKNFTTAPAICHDGKAHFPREGVFVSNGTHWFVTQRNFCEPQIITTDNTFVSGNCDVVIGIVNNTVYDPLQPELDS

SEQ ID NO: 3043 - protein, 1147 aa, Artificial Sequence
  SARS-CoV-2/Belgium/BA-02291/2020__EPI_ISL_415159 spike protein (1-1147)(I714C_Y1110C)
MFVFLVLLPLVSSQCVNLTTRTQLPPAYTNSFTRGVYYPDKVFRSSVLHSTQDLFLPFFSNVTWFHAIHVSGTNGTKRFDNPVLPFNDGVYFASTEKSNIIRGWIFGTTLDSKTQSLLIVNNATNVVIKVCEFQFCNDPFLGVYYHKNNKSWMESEFRVYSSANNCTFEYVSQPFLMDLEGKQGNFKNLREFVFKNIDGYFKIYSKHTPINLVRDLPQGFSALEPLVDLPIGINITRFQTLLALHRSYLTPGDSSSGWTAGAAAYYVGYLQPRTFLLKYNENGTITDAVDCALDPLSETKCTLKSFTVEKGIYQTSNFRVQPTESIVRFPNITNLCPFGEVFNATRFASVYAWNRKRISNCVADYSVLYNSASFSTFKCYGVSPTKLNDLCFTNVYADSFVIRGDEVRQIAPGQTGKIADYNYKLPDDFTGCVIAWNSNNLDSKVGGNYNYLYRLFRRSNLKPFERDISTEIYQAGSTPCNGVEGFNCYFPLQSYGFQPTNGVGYQPYRVVVLSFELLPAPATVCGPKKSTNLVKNKCVNFNFNGLTGTGVLTESNKKFLPFQQFGRDIADTTDAVRDPQTLEILDITPCSFGGVSVITPGTNTSNQVAVLYQGVNCTEVPVAIHADQLTPTWRVYSTGSNVFQTRAGCLIGAEHVNNSYECDIPIGAGICASYQTQTNSPRRARSVASQSIIAYTMSLGAENSVAYSNNSIACPTNFTISVTTEILPVSMTKTSVDCTMYICGDSTECSNLLLQYGSFCTQLNRALTGIAVEQDKNTQEVFAQVKQIYKTPPIKDFGGFNFSQILPDPSKPSKRSFIEDLLFNKVTLADAGFIKQYGDCLGDIAARDLICAQKFNGLTVLPPLLTDEMIAQYTSALLAGTITSGWTFGAGAALQIPFAMQMAYRFNGIGVTQNVLYENQKLIANQFNSAIGKIQDSLSSAAPALGKLQDVVNQNAQALNTLVKQLSSNFGAISSVLNDILSRLDKVEAEVQIDRLITGRLQSLQTYVTQQLIRAAEIRASANLAATKMSECVLGQSKRVDFCGKGYHLMSFPQSAPHGVVFLHVTYVPAQEKNFTTAPAICHDGKAHFPREGVFVSNGTHWFVTQRNFCEPQIITTDNTFVSGNCDVVIGIVNNTVYDPLQPELDS

SEQ ID NO: 3044 - protein, 1147 aa, Artificial Sequence
  SARS-CoV-2/USA/WA8-UW5/2020__EPI_ISL_413486 spike protein (1-1147)(I714C_Y1110C)
MFVFLVLLPLVSSQCVNLTTRTQLPPAYTNSFTRGVYYPDKVFRSSVLHSTQDLFLPFFSNVTWFHAIHVSGTNGTKRFDNPVLPFNDGVYFASTEKSNIIRGWIFGTTLDSKTQSLLIVNNATNVVIKVCEFQFCNDPFLGVYYHKNNKSWMESEFRVYSSANNCTFEYVSQPFLMDLEGKQGNFKNLREFVFKNIDGYFKIYSKHTPINLVRDLPQGFSALEPLVDLPIGINITRFQTLLALHRSYLTPGDSSSGWTAGAAAYYVGYLQPRTFLLKYNENGTITDAVDCALDPLSETKCTLKSFTVEKGIYQTSNFRVQPTESIVRFPNITNLCPFGEVFNATRFASVYAWNRKRISNCVADYSVLYNSASFSTFKCYGVSPTKLNDLCFTNVYADSFVIRGDEVRQIAPGQTGKIADYNYKLPDDFTGCVIAWNSNNLDSKVGGNYNYLYRLFRKSNLKPFERDISTEIYQAGSTPCNGVEGFNCYFPLQSYGFQPTNGVGYQPYRVVVLSFELLHAPATVCGPKKSTNLVKNKCVNFNFNGLTGTGVLTESNKKFLPFQQFGRDIADTTDAVRDPQTLEILDITPCSFGGVSVITPGTNTSNQVAVLYQDVNCTEVPVAIHADQLTPTWRVYSTGSNVFQTRAGCLIGAEYVNNSYECDIPIGAGICASYQTQTNSPRRARSVASQSIIAYTMSLGAENSVAYSNNSIACPTNFTISVTTEILPVSMTKTSVDCTMYICGDSTECSNLLLQYGSFCTQLNRALTGIAVEQDKNTQEVFAQVKQIYKTPPIKDFGGFNFSQILPDPSKPSKRSFIEDLLFNKVTLADAGFIKQYGDCLGDIAARDLICAQKFNGLTVLPPLLTDEMIAQYTSALLAGTITSGWTFGAGAALQIPFAMQMAYRFNGIGVTQNVLYENQKLIANQFNSAIGKIQDSLSSTASALGKLQDVVNQNAQALNTLVKQLSSNFGAISSVLNDILSRLDKVEAEVQIDRLITGRLQSLQTYVTQQLIRAAEIRASANLAATKMSECVLGQSKRVDFCGKGYHLMSFPQSAPHGVVFLHVTYVPAQEKNFTTAPAICHDGKAHFPREGVFVSNGTHWFVTQRNFCEPQIITTDNTFVSGNCDVVIGIVNNTVYDPLQPELDS

SEQ ID NO: 3045 - protein, 1147 aa, Artificial Sequence
  SARS-CoV-2/England/20102000506/2020__EPI_ISL_415147 spike protein (1-1147)(I714C_Y1110C)
MFVFLVLLPLVSSQCVNLTTRTQLPPAYTNSFTRGVYYPDKVFRSSVLHSTQDLFLPFFSNVTWFHAIHVSGTNGTKRFDNPVLPFNDGVYFASTEKSNIIRGWIFGTTLDSKTQSLLIVNNATNVVIKVCEFQFCNDPFLGVYYHKNNKSWMESEFRVYSSANNCTFEYVSQPFLMDLEGKQGNFKNLREFVFKNIDGYFKIYSKHTPINLVRDLPQGFSALEPLVDLPIGINITRFQTLLALHRSYLTPGDSSSGWTAGAAAYYVGYLQPRTFLLKYNENGTITDAVDCALDPLSETKCTLKSFTVEKGIYQTSNFRVQPTESIVRFPNITNLCPFGEVFNATRFASVYAWNRKRISNCVADYSVLYNSASFSTFKCYGVSPTKLNDLCFTNVYADSFVIRGDEVRQIAPGQTGKIADYNYKLPDDFTGCVIAWNSNNLDSKVGGNYNYLYRLFRKSNLKPFERDISTEIYQAGSTPCNGVEGFNCYFPLQSYGFQPTNGVGYQPYRVVVLSFELLHAPATVCGPKKSTNLVKNKCVNFNFNGLTGTGVLTESNKKFLPFQQFGRDIADTTDAVRDPQTLEILDITPCSFGGVSVITPGTNTSNQVAVLYQGVNCTEVPVAIHADQLTPTWRVYSTGSNVFQTRAGCLIGAEHVNNSYECDIPIGAGICASYQTQTNSPRRARSVASQSIIAYTMSLGAENSVAYSNNSIACPTNFTISVTTEILPVSMTKTSVDCTMYICGDSTECSNLLLQYGSFCTQLNRALTGIAVEQDKNTQEVFAQVKQIYKTPPIKDFGGFNFSQILPDPSKPSKRSFIEDLLFNKVTLADAGFIKQYGYCLGDIAARDLICAQKFNGLTVLPPLLTDEMIAQYTSALLAGTITSGWTFGAGAALQIPFAMQMAYRFNGIGVTQNVLYENQKLIANQFNSAIGKIQDSLSSTASALGKLQDVVNQNAQALNTLVKQLSSNFGAISSVLNDILSRLDKVEAEVQIDRLITGRLQSLQTYVTQQLIRAAEIRASANLAATKMSECVLGQSKRVDFCGKGYHLMSFPQSAPHGVVFLHVTYVPAQEKNFTTAPAICHDGKAHFPREGVFVSNGTHWFVTQRNFCEPQIITTDNTFVSGNCDVVIGIVNNTVYDPLQPELDS

SEQ ID NO: 3046 - protein, 1147 aa, Artificial Sequence
  SARS-CoV-2/Belgium/VAG-03013/2020__EPI_ISL_415155 spike protein (1-1147)(I714C_Y1110C)
MFVFLVLLPLVSSQCVNLTTRTQLPPAYTNSFTRGVYYPDKVFRSSVLHSTQDLFLPFFSNVTWFHAIHVSGTNGTKRFDNPVLPFNDGVYFASTEKSNIIRGWIFGTTLDSKTQSLLIVNNATNVVIKVCEFQFCNDPFLGVYYHKNNKSWMESEFRVYSSANNCTFEYVSQPFLMDLEGKQGNFKNLREFVFKNIDGYFKIYSKHTPINLVRDLPQGFSALEPLVDLPIGINITRFQTLLALHRSYLTPGDSSSGWTAGAAAYYVGYLQPRTFLLKYNENGTITDAVDCALDPLSETKCTLKSFTVEKGIYQTSNFRVQPTESIVRFPNITNLCPFGEVFNATRFASVYAWNRKRISNCVADYSVLYNSASFSTFKCYGVSPTKLNDLCFTNVYADSFVIRGDEVRQIAPGQTGKIADYNYKLPDDFTGCVIAWNSNNLDSKVGGNYNYLYRLFRKSNLKPFERDISTEIYQAGSTPCNGVEGFNCYFPLQSYGFQPTNGVGYQPYRVVVLSFELLHAPATVCGPKKSTNLVKNKCVNFNFNGLTGTGVLTESNKKFLPFQQFGRDIADTTDAVRDPQTLEILDITPCSFGGVSVITPGTNTSNQVAVLYQGVNCTEVPVAIHADQLTPTWRVYSTGSNVFQTRAGCLIGAEHVNNSYECDIPIGAGICASYQTQTNSPRRARSVASQSIIAYTMSLGAENSVAYSNNSIACPTNFTISVTTEILPVSMTKTSVDCTMYICGDSTECSNLLLQYGSFCTQLNRALTGIAVEQDKNTQEVFAQVKQIYKTPPIKDFGGFNFSQILPDPSKPSKRSFIEDLLFNKVTLADAGFIKQYGDCLGDIAARDLICAQKFNGLTVLPPLLTDEMIAQYTSALLAGTITSGWTFGAGAALQIPFAMQMAYRFNGIGVTQNVLYENQKLIANQFNSAIGKIQDSLSSTATALGKLQDVVNQNAQALNTLVKQLSSNFGAISSVLNDILSRLDKVEAEVQIDRLITGRLQSLQTYVTQQLIRAAEIRASANLAATKMSECVLGQSKRVDFCGKGYHLMSFPQSAPHGVVFLHVTYVPAQEKNFTTAPAICHDGKAHFPREGVFVSNGTHWFVTQRNFCEPQIITTDNTFVSGNCDVVIGIVNNTVYDPLQPELDS

SEQ ID NO: 3047 - protein, 1147 aa, Artificial Sequence
  SARS-CoV-2/Belgium/BC-03016/2020__EPI_ISL_415157 spike protein (1-1147)(I714C_Y1110C)
MFVFLVLLPLVSSQCVNLTTRTQLPPAYTNSFTRGVYYPDKVFRSSVLHSTQDLFLPFFSNVTWFHAIHVSGTNGTKRFDNPVLPFNDGVYFASTEKSNIIRGWIFGTTLDSKTQSLLIVNNATNVVIKVCEFQFCNDPFLGVYYHKNNKSWMESEFRVYSSANNCTFEYVSQPFLMDLEGKQGNFKNLREFVFKNIDGYFKIYSKHTPINLVRDLPQGFSALEPLVDLPIGINITRFQTLLALHRSYLTPGDSSSGWTAGAAAYYVGYLQPRTFLLKYNENGTITDAVDCALDPLSETKCTLKSFTVEKGIYQTSNFRVQPTESIVRFPNITNLCPFGEVFNATRFASVYAWNRKRISNCVADYSVLYNSASFSTFKCYGVSPTKLNDLCFTNVYADSFVIRGDEVRQIAPGQTGKIADYNYKLPDDFTGCVIAWNSNNLDSKVGGNYNYLYRLFRKSNLKPFERDISTEIYQAGSTPCNGVEGFNCYFPLQSYGFQPTNGVGYQPYRVVVLSFELLHAPATVCGPKKSTNLVKNKCVNFNFNGLTGTGVLTESNKKFLPFQQFGRDIADTTDAVRDPQTLEILDITPCSFGGVSVITPGTNTSNQVAVLYQGVNCTEVPVAIHADQLTPTWRVYSTGSNVFQTRAGCLIGAEHVNNSYECDIPIGAGICASYQTQTNSPRRARSVASQSIIAYTMSLGAENSVAYSNNSIACPTNFTISVTTEILPVSMTKTSVDCTMYICGDSTECSNLLLQYGSFCTQLNRALTGIAVEQDKNTQEVFAQVKQIYKTPPIKDFGGFNFSQILPDPSKPSKRSFIEDLLFNKVTLADAGFIKQYGDCLGDIAARDLICAQKFNGLTVLPPLLTDEMIAQYTSALLAGTITSGWTFGAGAALQIPFAMQMAYRFNGIGVTQNVLYENQKLIANQFNSAIGKIQDSLSSTAPALGKLQDVVNQNAQALNTLVKQLSSNFGAISSVLNDILSRLDKVEAEVQIDRLITGRLQSLQTYVTQQLIRAAEIRASANLAATKMSECVLGQSKRVDFCGKGYHLMSFPQSAPHGVVFLHVTYVPAQEKNFTTAPAICHDGKAHFPREGVFVSNGTHWFVTQRNFCEPQIITTDNTFVSGNCDVVIGIVNNTVYDPLQPELDS

SEQ ID NO: 3048 - protein, 1147 aa, Artificial Sequence
  SARS-CoV-2/Germany/BavPat3/2020__EPI_ISL_414521 spike protein (1-1147)(I714C_Y1110C)
MFVFLVLLPLVSSQCVNLTTRTQLPPAYTNSFTRGVYYPDKVFRSSVLHSTQDLFLPFFSNVTWFHAIHVSGTNGTKRFDNPVLPFNDGVYFASTEKSNIIRGWIFGTTLDSKTQSLLIVNNATNVVIKVCEFQFCNDPFLGVYYHKNNKSWMESEFRVYSSANNCTFEYVSQPFLMDLEGKQGNFKNLREFVFKNIDGYFKIYSKHTPINLVRDLPQGFSALEPLVDLPIGINITRFQTLLALHRSYLTPGDSSSGWTAGAAAYYVGYLQPRTFLLKYNENGTITDAVDCALDPLSETKCTLKSFTVEKGIYQTSNFRVQPTESIVRFPNITNLCPFGEVFNATRFASVYAWNRKRISNCVADYSVLYNSASFSTFKCYGVSPTKLNDLCFTNVYADSFVIRGDEVRQIAPGQTGKIADYNYKLPDDFTGCVIAWNSNNLDSKVGGNYNYLYRLFRKSNLKPFERDISTEIYQAGSTPCNGVEGFNCYFPLQSYGFQPTNGVGYQPYRVVVLSFELLHAPATVCGPKKSTNLVKNKCVNFNFNGLTGTGVLTESNKKFLPFQQFGRDIADTTDAVRDPQTLEILDITPCSFGGVSVITPGTNTSNQVAVLYQDVNCTEVPVAIHADQLTPTWRVYSTGSNVFQTRAGCLIGAEHVNNSYECDIPIGAGICASYQTQTNSPRRARSVASQSIIAYTMSLGAENSVAYSNNSIACPTNFTISVTTEILPVSMTKTSVDCTMYICGDSTECSNLLLQYGSFCTQLNRALTGIAVEQDKNTQQVFAQVKQIYKTPPIKDFGGFNFSQILPDPSKPSKRSFIEDLLFNKVTLADAGFIKQYGDCLGDIAARDLICAQKFNGLTVLPPLLTDEMIAQYTSALLAGTITSGWTFGAGAALQIPFAMQMAYRFNGIGVTQNVLYENQKLIANQFNSAIGKIQDSLSSTASALGKLQDVVNQNAQALNTLVKQLSSNFGAISSVLNDILSRLDKVEAEVQIDRLITGRLQSLQTYVTQQLIRAAEIRASANLAATKMSECVLGQSKRVDFCGKGYHLMSFPQSAPHGVVFLHVTYVPAQEKNFTTAPAICHDGKAHFPREGVFVSNGTHWFVTQRNFCEPQIITTDNTFVSGNCDVVIGIVNNTVYDPLQPELDS

SEQ ID NO: 3049 - protein, 1147 aa, Artificial Sequence
  SARS-CoV-2/France/HF1805/2020__EPI_ISL_414628 spike protein (1-1147)(I714C_Y1110C)
MFVFLVLLPLVSSQCVNLTTRTQLPPAYTNSFTRGVYYPDKVFRSSVLHSTQDLFLPFFSNVTWFHAIHVSGTNGTKRFDNPVLPFNDGVYFASTEKSNIIRGWIFGTTLDSKTQSLLIVNNATNVVIKVCEFQFCNDPFLGVYYHKNNKSWMESEFRVYSSANNCTFEYVSQPFLMDLEGKQGNFKNLREFVFKNIDGYFKIYSKHTPINLVRDLPQGFSALEPLVDLPIGINITRFQTLLALHRSYLTPGDSSSGWTAGAAAYYVGYLQPRTFLLKYNENGTITDAVDCALDPLSETKCTLKSFTVEKGIYQTSNFRVQPTESIVRFPNITNLCPFGEVFNATRFASVYAWNRKRISNCVADYSVLYNSASFSTFKCYGVSPTKLNDLCFTNVYADSFVIRGDEVRQIAPGQTGKIADYNYKLPDDFTGCVIAWNSNNLDSKVGGNYNYLYRLFRKSNLKPFERDISTEIYQAGSTPCNGVEGFNCYFPLQSYGFQPTNGVGYQPYRVVVLSFELLHAPATVCGPKKSTNLVKNKCVNFNFNGLTGTGVLTESNKKFLPFQQFGRDIADTTDAVRDPQTLEILDITPCSFGGVSVITPGTNTSNQVAVLYQGVNCTEVPVAIHADQLTPTWRVYSTGSNVFQTRAGCLIGAEHVNNSYECDIPIGAGICASYQTQTNSPRRARSVASQSIIAYTMSLGAENSVAYSNNSIACPTNFTISVTTEILPVSMTKTSVDCTMYICGDSTECSNLLLQYGSFCTQLNRALTGIAVEQDKNTQEVFAQVKQIYKTPPIKDFGGFNFSQILPDPSKPSKRSFIEDLLFNKVTLADAGFIKQYGDCLGDIAARDLICAQKFNGLTVLPPLLTDEMIAQYTSALLAGTITSGWTFGAGAALQIPFAMQMAYRFNGIGVTQNVLYENQKLIANQFNSAIGKIQDSLSSTASALGKLQDVVNQNAQALNTLVKQLSSNFGAISSVLNDILSRLDKVEAEVQIDRLITGRLQSLQTYVTQQLIRAAEIRASANLAATKMSECVLGQSKRVDFCGKGYHLMSFPQSAPHGVVFLHVTYVPAQEKNFTTAPAICHDGKAHFPREGVFVSNGTHWFVTQRNFCEPQIITTDNTFVSGNCDVVIGVVNNTVYDPLQPELDS

SEQ ID NO: 3050 - protein, 1147 aa, Artificial Sequence
  SARS-CoV-2/Netherlands/ZuidHolland_9/2020__EPI_ISL_414445 spike protein (1-1147)(I714C_Y1110C)
MFVFLVLLPLVSSQCVNLTTRTQLPPAYTNSFTRGVYYPDKVFRSSVLHSTQDLFLPFFSNVTWFHAIHVSGTNGTKRFDNPVLPFNDGVYFASTEKSNIIRGWIFGTTLDSKTQSLLIVNNATNVVIKVCEFQFCNDPFLGVYYHKNNKSWMESEFRVYSSANNCTFEYVSQPFLMDLEGKQGNFKNLREFVFKNIDGYFKIYSKHTPINLVRDLPQGFSALEPLVDLPIGINITRFQTLLALHRSYLTPGDSSSGWTAGAAAYYVGYLQPRTFLLKYNENGTITDAVDCALDPLSETKCTLKSFTVEKGIYQTSNFRVQPTESIVRFPNITNLCPFGEVFNATRFASVYAWNRKRISNCVADYSVLYNSASFSTFKCYGVSPTKLNDLCFTNVYADSFVIRGDEVRQIAPGQTGKIADYNYKLPDDFTGCVIAWNSNNLDSKVGGNYNYLYRLFRKSNLKPFERDISTEIYQAGSTPCNGVEGFNCYFPLQSYGFQPTNGVGYQPYRVVVLSFELLHAPATVCGPKKSTNLVKNKCVNFNFNGLTGTGVLTESNKKFLPFQQFGRDIADTTDAVRDPQTLEILDITPCSFGGVSVITPGTNTSNQVAVLYQGVNCTEVPVAIHADQLTPTWRVYSTGSNVFQTRAGCLIGAEHVNNSYECDIPIGAGICASYQTQTNSPRRARSVASQSIIAYTMSLGAENSVAYSNNSIACPTNFTISVTTEILPVSMTKTSVDCTMYICGDSTECSNLLLQYGSFCTQLNRALTGIAVEQDKNTQEVFAQVKQIYKTPPIKDFGGFNFSQILPDPSKPSKRSFIEDLLFNKVTLADAGFIKQYGDCLGDIAARDLICVQKFNGLTVLPPLLTDEMIAQYTSALLAGTITSGWTFGAGAALQIPFAMQMAYRFNGIGVTQNVLYENQKLIANQFNSAIGKIQDSLSSTASALGKLQDVVNQNAQALNTLVKQLSSNFGAISSVLNDILSRLDKVEAEVQIDRLITGRLQSLQTYVTQQLIRAAEIRASANLAATKMSECVLGQSKRVDFCGKGYHLMSFPQSAPHGVVFLHVTYVPAQEKNFTTAPAICHDGKAHFPREGVFVSNGTHWFVTQRNFCEPQIITTDNTFVSGNCDVVIGIVNNTVYDPLQPELDS

SEQ ID NO: 3051 - protein, 1147 aa, Artificial Sequence
  SARS-CoV-2/Finland/FIN03032020A/2020__EPI_ISL_413602 spike protein (1-1147)(I714C_Y1110C)
MFVFLVLLPLVSSQCVNLTTRTQLPPAYTNSFTRGVYYPDKVFRSSVLHSTQDLFLPFFSNVTWFHAIHVSGTNGTKRFDNPVLPFNDGVYFASTEKSNIIRGWIFGTTLDSKTQSLLIVNNATNVVIKVCEFQFCNDPFLGVYYHKNNKSWMESEFRVYSSANNCTFEYVSQPFLMDLEGKQGNFKNLREFVFKNIDGYFKIYSKHTPINLVRDLPQGFSALEPLVDLPIGINITRFQTLLALHRSYLTPGDSSSGWTAGAAAYYVGYLQPRTFLLKYNENGTITDAVDCALDPLSETKCTLKSFTVEKGIYQTSNFRVQPTESIVRFPNITNLCPFGEVFNATRFASVYAWNRKRISNCVADYSVLYNSASFSTFKCYGVSPTKLNDLCFTNVYADSFVIRGDEVRQIAPGQTGKIADYNYKLPDDFTGCVISWNSNNLDSKVGGNYNYLYRLFRKSNLKPFERDISTEIYQAGSTPCNGVEGFNCYFPLQSYGFQPTNGVGYQPYRVVVLSFELLHAPATVCGPKKSTNLVKNKCVNFNFNGLTGTGVLTESNKKFLPFQQFGRDIADTTDAVRDPQTLEILDITPCSFGGVSVITPGTNTSNQVAVLYQGVNCTEVPVAIHADQLTPTWRVYSTGSNVFQTRAGCLIGAEHVNNSYECDIPIGAGICASYQTQTNSPRRARSVASQSIIAYTMSLGAENSVAYSNNSIACPTNFTISVTTEILPVSMTKTSVDCTMYICGDSTECSNLLLQYGSFCTQLNRALTGIAVEQDKNTQEVFAQVKQIYKTPPIKDFGGFNFSQILPDPSKPSKRSFIEDLLFNKVTLADAGFIKQYGDCLGDIAARDLICAQKFNGLTVLPPLLTDEMIAQYTSALLAGTITSGWTFGAGAALQIPFAMQMAYRFNGIGVTQNVLYENQKLIANQFNSAIGKIQDSLSSTASALGKLQDVVNQNAQALNTLVKQLSSNFGAISSVLNDILSRLDKVEAEVQIDRLITGRLQSLQTYVTQQLIRAAEIRASANLAATKMSECVLGQSKRVDFCGKGYHLMSFPQSAPHGVVFLHVTYVPAQEKNFTTAPAICHDGKAHFPREGVFVSNGTHWFVTQRNFCEPQIITTDNTFVSGNCDVVIGIVNNTVYDPLQPELDS

SEQ ID NO: 3052 - protein, 1147 aa, Artificial Sequence
  SARS-CoV-2/France/GE1977/2020__EPI_ISL_414632 spike protein (1-1147)(I714C_Y1110C)
MFVFLVLLPLVSSQCVNLTTRTQLPPAYTNSFTRGVYYPDKVFRSSVLHSTQDLFLPFFSNVTWFHAIHVSGTNGTKRFDNPVLPFNDGVYFASTEKSNIIRGWIFGTTLDSKTQSLLIVNNATNVVIKVCEFQFCNDPFLGVYYHKNNKSWMESEFRVYSSANNCTFEYVSQPFLMDLEGKQGNFKNLREFVFKNIDGYFKIYSKHTPINLVRDLPQGFSALEPLVDLPIGINITRFQTLLALHRSYLTPGDSSSGWTAGAAAYYVGYLQPRTFLLKYNENGTITDAVDCALDPLSETKCTLKSFTVEKGIYQTSNFRVQPTESIVRFPNITNLCPFGEVFNATRFASVYAWNRKRISNCVADYSVLYNSASFSTFKCYGVSPTKLNDLCFTNVYADSFVIRGDEVRQIAPGQTGKIADYNYKLPDDFTGCVIAWNSNNLDSKVGGNYNYLYRLFRKSNLKPFERDISTEIYQAGSTPCNGVEGFNCYFPLQSYGFQPTNGVGYQPYRVVVLSFELLHAPATVCGPKKSTNLVKNKCVNFNFNGLTGTGVLTESNKKFLPFQQFGRDIADTTDAVRDPQTLEILDITPCSFGGVSVITPGTNTSNQVAVLYQGVNCTEVPVAIHADQLTPTWRVYSTGSNVFQTRAGCLIGAEHVNNSYECDIPIGAGICASYQTQTNSPRRARSVASQSIIAYTMSLGAENSVAYSNNSIACPTNFTISVTTEILPVSMTKTSVDCTMYICGDSTECSNLLLQYGSFCTQLNRALTGIAVEQDKNTQEVFAQVKQIYKTPPIKDFGGFNFSQILPDPSKPSKRSFIEDLLFNKVTLADAGFIKQYGDCLGDIAARDLICAQKFNGLTVLPPLLTDEMIAQYTSALLAGTITSGWTFGAGAALQIPFAMQMAYRFNGIGVTQNVLYENQKLIANQFNSAIGKIQDSLFSTASALGKLQDVVNQNAQALNTLVKQLSSNFGAISSVLNDILSRLDKVEAEVQIDRLITGRLQSLQTYVTQQLIRAAEIRASANLAATKMSECVLGQSKRVDFCGKGYHLMSFPQSAPHGVVFLHVTYVPAQEKNFTTAPAICHDGKAHFPREGVFVSNGTHWFVTQRNFCEPQIITTDNTFVSGNCDVVIGIVNNTVYDPLQPELDS

SEQ ID NO: 3053 - protein, 1147 aa, Artificial Sequence
  SARS-CoV-2/Finland/FIN-313/2020__EPI_ISL_414641 spike protein (1-1147)(I714C_Y1110C)
MFVFLVLLPLVSSQCVNLTTRTQLPPAYTNSFTRGVYYPDKVFRSSVLHSTQDLFLPFFSNVTWFHAIHVSGTNGTKRFDNPVLPFNDGVYFASTEKSNIIRGWIFGTTLDSKTQSLLIVNNATNVVIKVCEFQFCNDPFLGVYYHKNNKSWMESEFRVYSSANNCTFEYVSQPFLMDLEGKQGNFKNLREFVFKNIDGYFKIYSKHTPINLVRDLPQGFSALEPLVDLPIGINITRFKTLLALHRSYLTPGDSSSGWTAGAAAYYVGYLQPRTFLLKYNENGTITDAVDCALDPLSETKCTLKSFTVEKGIYQTSNFRVQPTESIVRFPNITNLCPFGEVFNATRFASVYAWNRKRISNCVADYSVLYNSASFSTFKCYGVSPTKLNDLCFTNVYADSFVIRGDEVRQIAPGQTGKIADYNYKLPDDFTGCVIAWNSNNLDSKVGGNYNYLYRLFRKSNLKPFERDISTEIYQAGSTPCNGVEGFNCYFPLQSYGFQPTNGVGYQPYRVVVLSFELLHAPATVCGPKKSTNLVKNKCVNFNFNGLTGTGVLTESNKKFLPFQQFGRDIADTTDAVRDPQTLEILDITPCSFGGVSVITPGTNTSNQVAVLYQGVNCTEVPVAIHADQLTPTWRVYSTGSNVFQTRAGCLIGAEHVNNSYECDIPIGAGICASYQTQTNSPRRARSVASQSIIAYTMSLGAENSVAYSNNSIACPTNFTISVTTEILPVSMTKTSVDCTMYICGDSTECSNLLLQYGSFCTQLNRALTGIAVEQDKNTQEVFAQVKQIYKTPPIKDFGGFNFSQILPDPSKPSKRSFIEDLLFNKVTLADAGFIKQYGDCLGDIAARDLICAQKFNGLTVLPPLLTDEMIAQYTSALLAGTITSGWTFGAGAALQIPFAMQMAYRFNGIGVTQNVLYENQKLIANQFNSAIGKIQDSLSSTASALGKLQDVVNQNAQALNTLVKQLSSNFGAISSVLNDILSRLDKVEAEVQIDRLITGRLQSLQTYVTQQLIRAAEIRASANLAATKMSECVLGQSKRVDFCGKGYHLMSFPQSAPHGVVFLHVTYVPAQEKNFTTAPAICHDGKAHFPREGVFVSNGTHWFVTQRNFCEPQIITTDNTFVSGNCDVVIGIVNNTVYDPLQPELDS

SEQ ID NO: 3054 - protein, 1147 aa, Artificial Sequence
  SARS-CoV-2/Netherlands/ZuidHolland_2/2020__EPI_ISL_414556 spike protein (1-1147)(I714C_Y1110C)
MFVFLVLLPLVSSQCVNLTTRTQLPPAYTNSFTRGVYYPDKVFRSSVLHSTQDLFLPFFSNVTWFHAIHVSGTNGTKRFDNPVLPFNDGVYFASTEKSNIIRGWIFGTTLDSKTQSLLIVNNATNVVIKVCEFQFCNDPFLGVYYHKNNKSWMESEFRVYSSANNCTFEYVSQPFLMDLEGKQGNFKNLREFVFKNIDGYFKIYSKHTPINLVRDLPQGFSALEPLVDLPIGINITRFQTLLALHRSYLTPGDSSSGWTAGAAAYYVGYLQPRTFLLKYNENGTITDAVDCALDPLSETKCTLKSFTVEKGIYQTSNFRVQPTESIVRFPNITNLCPFGEVFNATRFASVYAWNRKRISNCVADYSVLYNSASFSTFKCYGVSPTKLNDLCFTNVYADSFVIRGDEVRQIAPGQTGKIADYNYKLPDDFTGCVIAWNSNNLDSKVGGNYNYLYRLFRKSNLKPFERDISTEIYQAGSTPCNGVEGFNCYFPLQSYGFQPTNGVGYQPYRVVVLSFELLHAPATVCGPKKSTNLVKNKCVNFNFNGLTGTGVLTESNKKFLPFQQFGRDIADTTDAVRDPQTLEILDITPCSFGGVSVITPGTNTSNQVAVLYQGVNCTEVPVAIHADQLTPTWRVYSTGSNVFQTRAGCLIGAEHVNNSYECDIPIGAGICASYQTQTNSPRRARSVASQSIIAYTMSLGAENSVAYSNNSIACPTNFTISVTTEILPVSMTKTSVDCTMYICGDSTECSNLLLQYGSFCTQLNRALTGIALEQDKNTQEVFAQVKQIYKTPPIKDFGGFNFSQILPDPSKPSKRSFIEDLLFNKVTLADAGFIKQYGDCLGDIAARDLICAQKFNGLTVLPPLLTDEMIAQYTSALLAGTITSGWTFGAGAALQIPFAMQMAYRFNGIGVTQNVLYENQKLIANQFNSAIGKIQDSLSSTASALGKLQDVVNQNAQALNTLVKQLSSNFGAISSVLNDILSRLDKVEAEVQIDRLITGRLQSLQTYVTQQLIRAAEIRASANLAATKMSECVLGQSKRVDFCGKGYHLMSFPQSAPHGVVFLHVTYVPAQEKNFTTAPAICHDGKAHFPREGVFVSNGTHWFVTQRNFCEPQIITTDNTFVSGNCDVVIGIVNNTVYDPLQPELDS

SEQ ID NO: 3055 - protein, 1147 aa, Artificial Sequence
  SARS-CoV-2/USA/WA-UW31/2020__EPI_ISL_414618 spike protein (1-1147)(I714C_Y1110C)
MFVFLVLLPLVSSQCVNLTTRTQLPPAYTNSFTRGVYYPDKVFRSSVLHSTQDLFLPFFSNVTWFHAIHVSGTNGTKRFDNPVLPFNDGVYFASTEKSNIIRGWIFGTTLDSKTQSLLIVNNATNVVIKVCEFQFCNDPFLGVYYHKNNKSWMESEFRVYSSANNCTFEYVSQPFLMDLEGKQGNFKNLREFVFKNIDGYFKIYSKHTPINLVRDLPQGFSALEPLVDLPIGINITRFQTLLALHRSYLTPGDSSSGWTAGAAAYYVGYLQPRTFLLKYNENGTITDAVDCALDPLSETKCTLKSFTVEKGIYQTSNFRVQPTESIVRFPNITNLCPFGEVFNATRFASVYAWNRKRISNCVADYSVLYNSASFSTFKCYGVSPTKLNDLCFTNVYADSFVIRGDEVRQIAPGQTGKIADYNYKLPDDFTGCVIAWNSNNLDSKVGGNYNYLYRLFRKSNLKPFERDISTEIYQAGSTPCNGAEGFNCYFPLQSYGFQPTNGVGYQPYRVVVLSFELLHAPATVCGPKKSTNLVKNKCVNFNFNGLTGTGVLTESNKKFLPFQQFGRDIADTTDAVRDPQTLEILDITPCSFGGVSVITPGTNTSNQVAVLYQDVNCTEVPVAIHADQLTPTWRVYSTGSNVFQTRAGCLIGAEHVNNSYECDIPIGAGICASYQTQTNSPRRARSVASQSIIAYTMSLGAENSVAYSNNSIACPTNFTISVTTEILPVSMTKTSVDCTMYICGDSTECSNLLLQYGSFCTQLNRALTGIAVEQDKNTQEVFAQVKQIYKTPPIKDFGGFNFSQILPDPSKPSKRSFIEDLLFNKVTLADAGFIKQYGDCLGDIAARDLICAQKFNGLTVLPPLLTDEMIAQYTSALLAGTITSGWTFGAGAALQIPFAMQMAYRFNGIGVTQNVLYENQKLIANQFNSAIGKIQDSLSSTASALGKLQDVVNQNAQALNTLVKQLSSNFGAISSVLNDILSRLDKVEAEVQIDRLITGRLQSLQTYVTQQLIRAAEIRASANLAATKMSECVLGQSKRVDFCGKGYHLMSFPQSAPHGVVFLHVTYVPAQEKNFTTAPAICHDGKAHFPREGVFVSNGTHWFVTQRNFCEPQIITTDNTFVSGNCDVVIGIVNNTVYDPLQPELDS

SEQ ID NO: 3056 - protein, 1147 aa, Artificial Sequence
  SARS-CoV-2/South Korea/SNU01/2020__EPI_ISL_411929 spike protein (1-1147)(I714C_Y1110C)
MFVFLVLLPLVSSQCVNLTTRTQLPPAYTNSFTRGVYYPDKVFRSSVLHSTQDLFLPFFSNVTWFHAIHVSGTNGTKRFDNPVLPFNDGVYFASTEKSNIIRGWIFGTTLDSKTQSLLIVNNATNVVIKVCEFQFCNDPFLGVYYHKNNKSWMESEFRVYSSANNCTFEYVSQPFLMDLEGKQGNFKNLREFVFKNIDGYFKIYSKHTPINLVRDLPQGFWALEPLVDLPIGINITRFQTLLALHRSYLTPGDSSSGWTAGAAAYYVGYLQPRTFLLKYNENGTITDAVDCALDPLSETKCTLKSFTVEKGIYQTSNFRVQPTESIVRFPNITNLCPFGEVFNATRFASVYAWNRKRISNCVADYSVLYNSASFSTFKCYGVSPTKLNDLCFTNVYADSFVIRGDEVRQIAPGQTGKIADYNYKLPDDFTGCVIAWNSNNLDSKVGGNYNYLYRLFRKSNLKPFERDISTEIYQAGSTPCNGVEGFNCYFPLQSYGFQPTNGVGYQPYRVVVLSFELLHAPATVCGPKKSTNLVKNKCVNFNFNGLTGTGVLTESNKKFLPFQQFGRDIADTTDAVRDPQTLEILDITPCSFGGVSVITPGTNTSNQVAVLYQDVNCTEVPVAIHADQLTPTWRVYSTGSNVFQTRAGCLIGAEHVNNSYECDIPIGAGICASYQTQTNSPRRARSVASQSIIAYTMSLGAENSVAYSNNSIACPTNFTISVTTEILPVSMTKTSVDCTMYICGDSTECSNLLLQYGSFCTQLNRALTGIAVEQDKNTQEVFAQVKQIYKTPPIKDFGGFNFSQILPDPSKPSKRSFIEDLLFNKVTLADAGFIKQYGDCLGDIAARDLICAQKFNGLTVLPPLLTDEMIAQYTSALLAGTITSGWTFGAGAALQIPFAMQMAYRFNGIGVTQNVLYENQKLIANQFNSAIGKIQDSLSSTASALGKLQDVVNQNAQALNTLVKQLSSNFGAISSVLNDILSRLDKVEAEVQIDRLITGRLQSLQTYVTQQLIRAAEIRASANLAATKMSECVLGQSKRVDFCGKGYHLMSFPQSAPHGVVFLHVTYVPAQEKNFTTAPAICHDGKAHFPREGVFVSNGTHWFVTQRNFCEPQIITTDNTFVSGNCDVVIGIVNNTVYDPLQPELDS

SEQ ID NO: 3057 - protein, 1147 aa, Artificial Sequence
  SARS-CoV-2/China/WF0004/2020__EPI_ISL_413694 spike protein (1-1147)(I714C_Y1110C)
MFVFLVLLPLVSSQCVNLTTRTQLPPAYTNSFTRGVYYPDKVFRSSVLHSTQDLFLPFFSNVTWFHAIHVSGTNGTKRFDNPVLPFNDGVYFASTEKSNIIRGWIFGTTLDSKTQSLLIVNNATNVVIKVCEFQFCNDPFLGVYYHKNNKSWTESEFRVYSSANNCTFEYVSQPFLMDLEGKQGNFKNLREFVFKNIDGYFKIYSKHTPINLVRDLPQGFSALEPLVDLPIGINITRFQTLLALHRSYLTPGDSSSGWTAGAAAYYVGYLQPRTFLLKYNENGTITDAVDCALDPLSETKCTLKSFTVEKGIYQTSNFRVQPTESIVRFPNITNLCPFGEVFNATRFASVYAWNRKRISNCVADYSVLYNSASFSTFKCYGVSPTKLNDLCFTNVYADSFVIRGDEVRQIAPGQTGKIADYNYKLPDDFTGCVIAWNSNNLDSKVGGNYNYLYRLFRKSNLKPFERDISTEIYQAGSTPCNGVEGFNCYFPLQSYGFQPTNGVGYQPYRVVVLSFELLHAPATVCGPKKSTNLVKNKCVNFNFNGLTGTGVLTESNKKFLPFQQFGRDIADTTDAVRDPQTLEILDITPCSFGGVSVITPGTNTSNQVAVLYQDVNCTEVPVAIHADQLTPTWRVYSTGSNVFQTRAGCLIGAEHVNNSYECDIPIGAGICASYQTQTNSPRRARSVASQSIIAYTMSLGAENSVAYSNNSIACPTNFTISVTTEILPVSMTKTSVDCTMYICGDSTECSNLLLQYGSFCTQLNRALTGIAVEQDKNTQEVFAQVKQIYKTPPIKDFGGFNFSQILPDPSKPSKRSFIEDLLFNKVTLADAGFIKQYGDCLGDIAARDLICAQKFNGLTVLPPLLTDEMIAQYTSALLAGTITSGWTFGAGAALQIPFAMQMAYRFNGIGVTQNVLYENQKLIANQFNSAIGKIQDSLSSTASALGKLQDVVNQNAQALNTLVKQLSSNFGAISSVLNDILSRLDKVEAEVQIDRLITGRLQSLQTYVTQQLIRAAEIRASANLAATKMSECVLGQSKRFDFCGKGYHLMSFPQSAPHGVVFLHVTYVPAQEKNFTTAPAICHDGKAHFPREGVFVSNGTHWFVTQRNFCEPQIITTDNTFVSGNCDVVIGIVNNTVYDPLQPELDS

SEQ ID NO: 3058 - protein, 1147 aa, Artificial Sequence
  SARS-CoV-2/China/WF0028/2020__EPI_ISL_413791 spike protein (1-1147)(I714C_Y1110C)
MFVFLVLLPLVSSQCVNLTTRTQLPPAYTNSFTRGVYYPDKVFRSSVLHSTQDLFLPFFSNVTWFHAIHVSGTNGTKRFDNPVLPFNDGVYFASTEKSNIIRGWIFGTTLDSKTQSLLIVNNATNVVIKVCEFQFCNDPFLGVYYHKNNKSWMESEFRVYSSANNCTFEYVSQPFLMDLEGKQGNFKNLREFVFKNIDGYFKIYSKHTPINLVRDLPQGFSALEPLVDLPIGINITRFQTLLALHRSYLTPGDSSSGWTAGAAAYYVGYLQPRTFLLKYNENGTITDAVDCALDPLSETKCTLKSFTVEKGIYQTSNFRVQPTESIVRFPNITNLCPFGEVFNATRFASVYAWNRKRISNCVADYSVLYNSASFSTFKCYGVSPTKLNDLCFTNVYADSFVIRGDEVRQIAPGQTGKIADYNYKLPDDFTGCVIAWNSNNLDSKVGGNYNYLYRLFRKSNLKPFERDISTEIYQAGSTPCNGVEGFNCYFPLQSYGFQPTNGVGYQPYRVVVLSFELLHAPATVCGPKKSTNLVKNKCVNFNFNGLTGTGVLTESNKKFLPFQQFGRDIADTTDAVRDPQTLEILDITPCSFGGVSVITPGTNTSNQVAVLYQDVNCTEVPVAIHADQLTPTWRVYSTGSNVFQTRAGCLIGAEHVNNSYECDIPIGAGICASYQTQTNSPRRARSVASQSIIAYTMSLGAENSVAYSNNSIACPTNFTISVTTEILPVSMTKTSVDCTMYICGDSTECSNLLLQYGSFCTQLNRALTGIAVEQDKNTQEVFAQVKQIYKTPPIKDFGGFNFSQILPDPSKPSKRSFIEDLLFNKVTLADAGFIKQYGDCLGDIAARDLICAQKFNGLTVLPPLLTDEMIAQYTSALLAGTITSGWTFGAGAALQIPFAMQMAYRFNGIGVTQNVLYENQKLIANQFNSAIGKIQDSLSSTASALGKLQDVVNQNAQALNTLVKQLSSNFGAISSVLNDILSRLDKVEAEVQIDRLITGRLQSLQTYVTQQLIRAAEIRASANLAATKMSECVLGQSKRVDFCGKGYHLMSFPQSAPHGVVFLHVTYVPAQEKNFTTAPAICHDGKAHFPREGVFVSNGTHWFVTQRNFCEPQIITTDNTFVSGNCDVVIGIVNNTVYDPLQPELES

SEQ ID NO: 3059 - protein, 1147 aa, Artificial Sequence
  SARS-CoV-2/2019-nCoV/USA-CruiseA-18/2020__MT159716.1 spike protein (1-1147)(I714C_Y1110C)
MFVFLVLLPLVSSQCVNLTTRTQLPPAYTNSFTRGVYYPDKVFRSSVLHSTQDLFLPFFSNVTWFHAIHVSGTNGTKRFDNPVLPFNDGVYFASTEKSNIIRGWIFGTTLDSKTQSLLIVNNATNVVIKVCEFQFCNDPFLGVYYHKNNKSWMESELRVYSSANNCTFEYVSQPFLMDLEGKQGNFKNLREFVFKNIDGYFKIYSKHTPINLVRDLPQGFSALEPLVDLPIGINITRFQTLLALHRSYLTPGDSSSGWTAGAAAYYVGYLQPRTFLLKYNENGTITDAVDCALDPLSETKCTLKSFTVEKGIYQTSNFRVQPTESIVRFPNITNLCPFGEVFNATRFASVYAWNRKRISNCVADYSVLYNSASFSTFKCYGVSPTKLNDLCFTNVYADSFVIRGDEVRQIAPGQTGKIADYNYKLPDDFTGCVIAWNSNNLDSKVGGNYNYLYRLFRKSNLKPFERDISTEIYQAGSTPCNGVEGFNCYFPLQSYGFQPTNGVGYQPYRVVVLSFELLHAPATVCGPKKSTNLVKNKCVNFNFNGLTGTGVLTESNKKFLPFQQFGRDIADTTDAVRDPQTLEILDITPCSFGGVSVITPGTNTSNQVAVLYQDVNCTEVPVAIHADQLTPTWRVYSTGSNVFQTRAGCLIGAEHVNNSYECDIPIGAGICASYQTQTNSPRRARSVASQSIIAYTMSLGAENSVAYSNNSIACPTNFTISVTTEILPVSMTKTSVDCTMYICGDSTECSNLLLQYGSFCTQLNRALTGIAVEQDKNTQEVFAQVKQIYKTPPIKDFGGFNFSQILPDPSKPSKRSFIEDLLFNKVTLADAGFIKQYGDCLGDIAARDLICAQKFNGLTVLPPLLTDEMIAQYTSALLAGTITSGWTFGAGAALQIPFAMQMAYRFNGIGVTQNVLYENQKLIANQFNSAIGKIQDSLSSTASALGKLQDVVNQNAQALNTLVKQLSSNFGAISSVLNDILSRLDKVEAEVQIDRLITGRLQSLQTYVTQQLIRAAEIRASANLAATKMSECVLGQSKRVDFCGKGYHLMSFPQSAPHGVVFLHVTYVPAQEKNFTTAPAICHDGKAHFPREGVFVSNGTHWFVTQRNFCEPQIITTDNTFVSGNCDVVIGIVNNTVYDPLQPELDS

SEQ ID NO: 3060 - protein, 1147 aa, Artificial Sequence
  SARS-CoV-2/SARS-CoV-2/Yunnan-01/human/2020/CHN__MT049951.1 spike protein (1-1147)(I714C_Y1110C)
MFVFLVLLPLVSSQCVNLTTRTQLPPANTNSFTRGVYYPDKVFRSSVLHSTQDLFLPFFSNVTWFHAIHVSGTNGTKRFDNPVLPFNDGVYFASTEKSNIIRGWIFGTTLDSKTQSLLIVNNATNVVIKVCEFQFCNDPFLGVYYHKNNKSWMESEFRVYSSANNCTFEYVSQPFLMDLEGKQGNFKNLREFVFKNIDGYFKIYSKHTPINLVRDLPQGFSALEPLVDLPIGINITRFQTLLALHRSYLTPGDSSSGWTAGAAAYYVGYLQPRTFLLKYNENGTITDAVDCALDPLSETKCTLKSFTVEKGIYQTSNFRVQPTESIVRFPNITNLCPFGEVFNATRFASVYAWNRKRISNCVADYSVLYNSASFSTFKCYGVSPTKLNDLCFTNVYADSFVIRGDEVRQIAPGQTGKIADYNYKLPDDFTGCVIAWNSNNLDSKVGGNYNYLYRLFRKSNLKPFERDISTEIYQAGSTPCNGVEGFNCYFPLQSYGFQPTNGVGYQPYRVVVLSFELLHAPATVCGPKKSTNLVKNKCVNFNFNGLTGTGVLTESNKKFLPFQQFGRDIADTTDAVRDPQTLEILDITPCSFGGVSVITPGTNTSNQVAVLYQDVNCTEVPVAIHADQLTPTWRVYSTGSNVFQTRAGCLIGAEHVNNSYECDIPIGAGICASYQTQTNSPRRARSVASQSIIAYTMSLGAENSVAYSNNSIACPTNFTISVTTEILPVSMTKTSVDCTMYICGDSTECSNLLLQYGSFCTQLNRALTGIAVEQDKNTQEVFAQVKQIYKTPPIKDFGGFNFSQILPDPSKPSKRSFIEDLLFNKVTLADAGFIKQYGDCLGDIAARDLICAQKFNGLTVLPPLLTDEMIAQYTSALLAGTITSGWTFGAGAALQIPFAMQMAYRFNGIGVTQNVLYENQKLIANQFNSAIGKIQDSLSSTASALGKLQDVVNQNAQALNTLVKQLSSNFGAISSVLNDILSRLDKVEAEVQIDRLITGRLQSLQTYVTQQLIRAAEIRASANLAATKMSECVLGQSKRVDFCGKGYHLMSFPQSAPHGVVFLHVTYVPAQEKNFTTAPAICHDGKAHFPREGVFVSNGTHWFVTQRNFCEPQIITTDNTFVSGNCDVVIGIVNNTVYDPLQPELDS

SEQ ID NO: 3061 - protein, 1147 aa, Artificial Sequence
  SARS-CoV-2/USA/WA-UW292/2020__EPI_ISL_418077 spike protein (1-1147)(I714C_Y1110C)
MFVFLVLLPLVSSQCVNLTTRTQLPPAYTNSFTRGVYYPDKVFRSSVLHSTQDLFLPFFSNVTWFHAIHVSGTNGTKRFDNPVLPFNDGVYFASTEKSNIIRGWIFGTTLDSKTQSLLIVNNATNVVIKVCEFQFCNDPFLGVYYHKNNKSWMESEFRVYSSANNCTFEYVSQPFLMDLEGKQGNFKNLREFVFKNIDGYFKIYSKHTPINLVRDLPQGFSALEPLVDLPIGINITRFQTLLALHRSYLTPGDSSSGWTAGAAAYYVGYLQPRTFLLKYNENGTITDAVDCALDPLSETKCTLKSFTVEKGIYQTSNFRVQPTESIVRFPNITNLCPFGEVFNATRFASVYAWNRKRISNCVADYSVLYNSASFSTFKCYGVSPTKLNDLCFTNVYADSFVIRGDEVRQIAPGQTGKIADYNYKLPDDFTGCVIAWNSNNLDSKVGGNYNYLYRLFRKSNLKPFERDISTEIYQASSTPCNGVEGFNCYFPLQSYGFQPTNGVGYQPYRVVVLSFELLHAPATVCGPKKSTNLVKNKCVNFNFNGLTGTGVLTESNKKFLPFQQFGRDIADTTDAVRDPQTLEILDITPCSFGGVSVITPGTNTSNQVAVLYQDVNCTEVPVAIHADQLTPTWRVYSTGSNVFQTRAGCLIGAEHVNNSYECDIPIGAGICASYQTQTNSPRRARSVASQSIIAYTMSLGAENSVAYSNNSIACPTNFTISVTTEILPVSMTKTSVDCTMYICGDSTECSNLLLQYGSFCTQLNRALTGIAVEQDKNTQEVFAQVKQIYKTPPIKDFGGFNFSQILPDPSKPSKRSFIEDLLFNKVTLADAGFIKQYGDCLGDIAARDLICAQKFNGLTVLPPLLTDEMIAQYTSALLAGTITSGWTFGAGAALQIPFAMQMAYRFNGIGVTQNVLYENQKLIANQFNSAIGKIQDSLSSTASALGKLQDVVNQNAQALNTLVKQLSSNFGAISSVLNDILSRLDKVEAEVQIDRLITGRLQSLQTYVTQQLIRAAEIRASANLAATKMSECVLGQSKRVDFCGKGYHLMSFPQSAPHGVVFLHVTYVPAQEKNFTTAPAICHDGKAHFPREGVFVSNGTHWFVTQRNFCEPQIITTDNTFVSGNCDVVIGIVNNTVYDPLQPELDS

SEQ ID NO: 3062 - protein, 1147 aa, Artificial Sequence
  SARS-CoV-2/Iceland/192/2020__EPI_ISL_417819 spike protein (1-1147)(I714C_Y1110C)
MFVFFVLLPLVSSQCVNLTTRTQLPPAYTNSFTRGVYYPDKVFRSSVLHSTQDLFLPFFSNVTWFHAIHVSGTNGTKRFDNPVLPFNDGVYFASTEKSNIIRGWIFGTTLDSKTQSLLIVNNATNVVIKVCEFQFCNDPFLGVYYHKNNKSWMESEFRVYSSANNCTFEYVSQPFLMDLEGKQGNFKNLREFVFKNIDGYFKIYSKHTPINLVRDLPQGFSALEPLVDLPIGINITRFQTLLALHRSYLTPGDSSSGWTAGAAAYYVGYLQPRTFLLKYNENGTITDAVDCALDPLSETKCTLKSFTVEKGIYQTSNFRVQPTESIVRFPNITNLCPFGEVFNATRFASVYAWNRKRISNCVADYSVLYNSASFSTFKCYGVSPTKLNDLCFTNVYADSFVIRGDEVRQIAPGQTGKIADYNYKLPDDFTGCVIAWNSNNLDSKVGGNYNYLYRLFRKSNLKPFERDISTEIYQAGSTPCNGVEGFNCYFPLQSYGFQPTNGVGYQPYRVVVLSFELLHAPATVCGPKKSTNLVKNKCVNFNFNGLTGTGVLTESNKKFLPFQQFGRDIADTTDAVRDPQTLEILDITPCSFGGVSVITPGTNTSNQVAVLYQGVNCTEVPVAIHADQLTPTWRVYSTGSNVFQTRAGCLIGAEHVNNSYECDIPIGAGICASYQTQTNSPRRARSVASQSIIAYTMSLGAENSVAYSNNSIACPTNFTISVTTEILPVSMTKTSVDCTMYICGDSTECSNLLLQYGSFCTQLNRALTGIAVEQDKNTQEVFAQVKQIYKTPPIKDFGGFNFSQILPDPSKPSKRSFIEDLLFNKVTLADAGFIKQYGDCLGDIAARDLICAQKFNGLTVLPPLLTDEMIAQYTSALLAGTITSGWTFGAGAALQIPFAMQMAYRFNGIGVTQNVLYENQKLIANQFNSAIGKIQDSLSSTASALGKLQDVVNQNAQALNTLVKQLSSNFGAISSVLNDILSRLDKVEAEVQIDRLITGRLQSLQTYVTQQLIRAAEIRASANLAATKMSECVLGQSKRVDFCGKGYHLMSFPQSAPHGVVFLHVTYVPAQEKNFTTAPAICHDGKAHFPREGVFVSNGTHWFVTQRNFCEPQIITTDNTFVSGNCDVVIGIVNNTVYDPLQPELDS

SEQ ID NO: 3063 - protein, 1147 aa, Artificial Sequence
  SARS-CoV-2/Belgium/ULG-6939/2020__EPI_ISL_417020 spike protein (1-1147)(I714C_Y1110C)
MFVFLVLLPLVSSQCVNLTTRTQLPPAYTNSFTRGVYYPDKVFRSSVLHSTQDLFLPFFSNVTWFHAIHVSGTNGTKRFDNPVLPFNDGVYFASTEKSNIIRGWIFGTTLDSKTQSLLIVNNATNVVIKVCEFQFCNDPFLGVYYHKNNKSWMESEFRVYSSANNCTFEYVSQPFLMDLEGKQGNFKNLREFVFKNIDGYFKIYSKHTPINLVRDLPQGFSALEPLVDLPIGINITRFQTLLALHRSYLTPGDSSSGWTAGAAAYYVGYLQPRTFLLKYNENGTITDAVDCALDPLSETKCTLKSFTVEKGIYQTSNFRVQPTESIVRFPNITNLCPFGEVFNATRFASVYAWNRKRISNCVADYSVLYNSASFSTFKCYGVSPTKLNDLCFTNVYADSFVIRGDEVRQIAPGQTGKIADYNYKLPDDFTGCVIAWNSNNLDSKVGGNYNYLYRLFRKSNLKPFERDISTEIYQAGSTPCNGVEGFNCYFPLQSYGFQPTNGVGYQPYRVVVLSFELLHAPATVCGPKKSTNLVKNKCVNFNFNGLTGTGVLTESNKKFLPFQQFGRDIADTTDAVRDPQTLEILDITPCSFGGVSVITPGTNTSNQVAVLYQGVNCTEVPVAIHADQLTPTWRVYSTGSNVFQTRAGCLIGAEHVNNSYECDIPIGAGICASYQTQTNSPRRARSVASQSIIAYTMSLGAENSVVYSNNSIACPTNFTISVTTEILPVSMTKTSVDCTMYICGDSTECSNLLLQYGSFCTQLNRALTGIAVEQDKNTQEVFAQVKQIYKTPPIKDFGGFNFSQILPDPSKPSKRSFIEDLLFNKVTLADAGFIKQYGDCLGDIAARDLICAQKFNGLTVLPPLLTDEMIAQYTSALLAGTITSGWTFGAGAALQIPFAMQMAYRFNGIGVTQNVLYENQKLIANQFNSAIGKIQDSLSSTASALGKLQDVVNQNAQALNTLVKQLSSNFGAISSVLNDILSRLDKVEAEVQIDRLITGRLQSLQTYVTQQLIRAAEIRASANLAATKMSECVLGQSKRVDFCGKGYHLMSFPQSAPHGVVFLHVTYVPAQEKNFTTAPAICHDGKAHFPREGVFVSNGTHWFVTQRNFCEPQIITTDNTFVSGNCDVVIGIVNNTVYDPLQPELDS

SEQ ID NO: 3064 - protein, 1147 aa, Artificial Sequence
  SARS-CoV-2/France/HF2496/2020__EPI_ISL_418231 spike protein (1-1147)(I714C_Y1110C)
MFVFLVLLPLVSSQCVNLTTRTQLPPAYTNSFTRGVYYPDKVFRSSVLHSTQDLFLPFFSNVTWFHAIHVSGTNGTKRFDNPVLPFNDGVYFASTEKSNIIRGWIFGTTLDSKTQSLLIVNNATNVVIKVCEFQFCNDPFLGVYYHKNNKSWMESEFRVYSSANNCTFEYVSQPFLMDLEGKQGNFKNLREFVFKNIDGYFKIYSKHTPINLVRDLPQGFSALEPLVDLPIGINITRFQTLLALHRSYLTPGDSSSGWTAGAAAYYVGYLQPRTFLLKYNENGTITDAVDCALDPLSETKCTLKSFTVEKGIYQTSNFRVQPTESIVRFPNITNLCPFGEVFNATRFASVYAWNRKRISNCVADYSVLYNSASFSTFKCYGVSPTKLNDLCFTNVYADSFVIRGDEVRQIAPGQTGKIADYNYKLPDDFTGCVIAWNSNNLDSKVGGNYNYLYRLFRKSNLKPFERDISTEIYQAGSTPCNGVEGFNCYFPLQSYGFQPTNGVGYQPYRVVVLSFELLHAPATVCGPKKSTNLVKNKCVNFNFNGLTGTGVLTESNKKFLPFQQFGRDIADTTDAVRDPQTLEILDITPCSFGGVSVITPGTNTSNQVAVLYQGVNCTEVPVAIHADQLTPTWRVYSTGSNVFQTRAGCLIGAEHVNNSYECDIPIGAGICASYQTQTNSPRRARSVASQSIIAYTMSLGAENSVAYSNNSIACPTNFTISVTTEILPVSMTKTSVDCTMYICGDSTECSNLLLQYGSFCTQLNRALTGIAVEQDKNTQEVFAQVKQIYKTPPIKDFGGFNFSQILPDPSKPSKRSFIEDLLFNKVTLADAGFIKQYGDCLGDIVARDLICAQKFNGLTVLPPLLTDEMIAQYTSALLAGTITSGWTFGAGAALQIPFAMQMAYRFNGIGVTQNVLYENQKLIANQFNSAIGKIQDSLSSTASALGKLQDVVNQNAQALNTLVKQLSSNFGAISSVLNDILSRLDKVEAEVQIDRLITGRLQSLQTYVTQQLIRAAEIRASANLAATKMSECVLGQSKRVDFCGKGYHLMSFPQSAPHGVVFLHVTYVPAQEKNFTTAPAICHDGKAHFPREGVFVSNGTHWFVTQRNFCEPQIITTDNTFVSGNCDVVIGIVNNTVYDPLQPELDS

SEQ ID NO: 3065 - protein, 1147 aa, Artificial Sequence
  SARS-CoV-2/USA/WA-UW291/2020__EPI_ISL_418076 spike protein (1-1147)(I714C_Y1110C)
MFVFLVLLPLVSSQCVNLTTRTQLPPAYTNSFTRGVYYPDKVFRSSVLHSTQDLFLPFFSNVTWFHAIHVSGTNGTKRFDNPVLPFNDGVYFASTEKSNIIRGWIFGTTLDSKTQSLLIVNNATNVVIKVCEFQFCNDPFLGVYYHKNNKSWMESEFRVYSSANNCTFEYVSQPFLMDLEGKQGNFKNLREFVFKNIDGYFKIYSKHTPINLVRDLPQGFSALEPLVDLPIGINITRFQTLLALHRSYLTPGDSSSGWTAGAAAYYVGYLQPRTFLLKYNENGTITDAVDCALDPLSETKCTLKSFTVEKGIYQTSNFRVQPTESIVRFPNITNLCPFGEVFNATRFASVYAWNRKRISNCVADYSVLYNSASFSTFKCYGVSPTKLNDLCFTNVYADSFVIRGDEVRQIAPGQTGKIADYNYKLPDDFTGCVIAWNSNNLDSKVGGNYNYLYRLFRKSNLKPFERDISTEIYQAGSTPCNGVEGFNCYFPLQSYGFQPTNGVGYQPYRVVVLSFELLHAPATVCGPKKSTNLVKNKCVNFNFNGLTGTGVLTESNKKFLPFQQFGRDIADTTDAVRDPQTLEILDITPCSFGGVSVITPGTNTSNQVAVLYQGVNCTEVPVAIHADQLTPTWRVYSTGSNVFQTRAGCLIGAEHVNNSYECDIPIGAGICASYQTQTNSPRRARSVASQSIIAYTMSLGAENSVAYSNNSIACPTNFTISVTTEILPVSMTKTSVDCTMYICGDSTECSNLLLQYGSFCTQLNRALTGIAVEQDKNTQEVFAQVKQIYKTPPIKDFGGFNFSQILPDPSKPSKRSFIEDLLFNKVTLADAGFIKQYGDCLGDIAARDLICAQKFNGLTVLPPLLTDEMIAQYTSALLAGTITSGWTFGAGAALQIPFAMQMAYRFNGIGVTQNVLYENQKLIANQFNSAIGKIQYSLSSTASALGKLQDVVNQNAQALNTLVKQLSSNFGAISSVLNDILSRLDKVEAEVQIDRLITGRLQSLQTYVTQQLIRAAEIRASANLAATKMSECVLGQSKRVDFCGKGYHLMSFPQSAPHGVVFLHVTYVPAQEKNFTTAPAICHDGKAHFPREGVFVSNGTHWFVTQRNFCEPQIITTDNTFVSGNCDVVIGIVNNTVYDPLQPELDS

SEQ ID NO: 3066 - protein, 1147 aa, Artificial Sequence; identical to SEQ ID NO: 3029
  SARS-CoV-2/Portugal/PT0034/2020__EPI_ISL_418019 spike protein (1-1147)(I714C_Y1110C)

SEQ ID NO: 3067 - protein, 1147 aa, Artificial Sequence; identical to SEQ ID NO: 3021
  SARS-CoV-2/Iceland/202/2020__EPI_ISL_417750 spike protein (1-1147)(I714C_Y1110C)

SEQ ID NO: 3068 - protein, 1147 aa, Artificial Sequence
  SARS-CoV-2/USA/WA-UW261/2020__EPI_ISL_418046 spike protein (1-1147)(I714C_Y1110C)
MFVFLVLLPLVSSQCVNLTTRTQLPPAYTNSFTRGVYYPDKVFRSSVLHSTQDLFLPFFSNVTWFHAIHVSGTNGTKRFDNPVLPFNDGVYFASTEKSNIIRGWIFGTTLDSKTQSLLIVNNATNVVIKVCEFQFCNDPFLGVYYHKNNKSWMESEFRVYSSANNCTFEYVSQPFLMDLEGKQGNFKNLREFVFKNIDGYFKIYSKHTPINLVRDLPQGFSALEPLVDLPIGINITRFQTLLALHRSYLTPGDSSSGWTAGAAAYYVGYLQPRTFLLKYNENGTITDAVDCALDPLSETKCTLKSFTVEKGIYQTSNFRVQPTESIVRFPNITNLCPFGEVFNATRFTSVYAWNRKRISNCVADYSVLYNSASFSTFKCYGVSPTKLNDLCFTNVYADSFVIRGDEVRQIAPGQTGKIADYNYKLPDDFTGCVIAWNSNNLDSKVGGNYNYLYRLFRKSNLKPFERDISTEIYQAGSTPCNGVEGFNCYFPLQSYGFQPTNGVGYQPYRVVVLSFELLHAPATVCGPKKSTNLVKNKCVNFNFNGLTGTGVLTESNKKFLPFQQFGRDIADTTDAVRDPQTLEILDITPCSFGGVSVITPGTNTSNQVAVLYQDVNCTEVPVAIHADQLTPTWRVYSTGSNVFQTRAGCLIGAEHVNNSYECDIPIGAGICASYQTQTNSPRRARSVASQSIIAYTMSLGAENSVAYSNNSIACPTNFTISVTTEILPVSMTKTSVDCTMYICGDSTECSNLLLQYGSFCTQLNRALTGIAVEQDKNTQEVFAQVKQIYKTPPIKDFGGFNFSQILPDPSKPSKRSFIEDLLFNKVTLADAGFIKQYGDCLGDIAARDLICAQKFNGLTVLPPLLTDEMIAQYTSALLAGTITSGWTFGAGAALQIPFAMQMAYRFNGIGVTQNVLYENQKLIANQFNSAIGKIQDSLSSTASALGKLQDVVNQNAQALNTLVKQLSSNFGAISSVLNDILSRLDKVEAEVQIDRLITGRLQSLQTYVTQQLIRAAEIRASANLAATKMSECVLGQSKRVDFCGKGYHLMSFPQSAPHGVVFLHVTYVPAQEKNFTTAPAICHDGKAHFPREGVFVSNGTHWFVTQRNFCEPQIITTDNTFVSGNCDVVIGIVNNTVYDPLQPELDS

SEQ ID NO: 3069 - protein, 1147 aa, Artificial Sequence
  SARS-CoV-2/Portugal/PT0035/2020__EPI_ISL_418020 spike protein (1-1147)(I714C_Y1110C)
MFVFLVLLPLVSSQCVNLTTRTQLPPAYTNSFTRGVYYPDKVFRSSVLHSTQDLFLPFFSNVTWFHAIHVSGTNGTKRFDNPVLPFNDGVYFASTEKSNIIRGWIFGTTLDSKTQSLLIVNNATNVVIKVCEFQFCNDPFLGVYYHKNNKSWMESEFRVYSSANNCTFEYVSQPFLMDLEGKQGNFKNLREFVFKNIDGYFKIYSKHTPINLVRDLPQGFSALEPLVDLPIGINITRFQTLLALHRSYLTPGDSSSGWTAGAAAYYVGYLQPRTFLLKYNENGTITDAVDCALDPLSETKCTLKSFTVEKGIYQTSNFRVQPTESIVRFPNITNLCPFGEVFNATRFASVYAWNRKRISNCVADYSVLYNSASFSTFKCYGVSPTKLNDLCFTNVYADSFVIRGDEVRQIAPGQTGKIADYNYKLPDDFTGCVIAWNSNNLDSKVGGNYNYLYRLFRKSNLKPFERDISTEIYQAGSTPCNGVEGFNCYFPLQSYGFQPTNGVGYQPYRVVVLSFELLHAPATVCGPKKSTNLVKNKCVNFNFNGLTGTGVLTESNKKFLPFQQFGRDIADTTDAVRDPQTLEILDITPCSFGGVSVITPGTNTSNQVAVLYQDVNCTEVPVAIHADQLTPTWRVYSTGSNVFQTRAGCLIGAEHVNNSYECDIPIGAGICASYQTQTNSPRRARSVASQSIIAYTMSLGAENSVAYSNNSIACPTNFTISVTTEILPVSMTKTSVDCTMYICGDSTECSNLLLQYGSFCTQLNRALTGIAVEQDKNTQEVFAQVKQIYKTPPIKDFGGFNFSQILPDPSKPSKRSFIEDLLFNKVTLADAGFIKQYGDCLGDISARDLICAQKFNGLTVLPPLLTDEMIAQYTSALLAGTITSGWTFGAGAALQIPFAMQMAYRFNGIGVTQNVLYENQKLIANQFNSAIGKIQDSLSSTASALGKLQDVVNQNAQALNTLVKQLSSNFGAISSVLNDILSRLDKVEAEVQIDRLITGRLQSLQTYVTQQLIRAAEIRASANLAATKMSECVLGQSKRVDFCGKGYHLMSFPQSAPHGVVFLHVTYVPAQEKNFTTAPAICHDGKAHFPREGVFVSNGTHWFVTQRNFCEPQIITTDNTFVSGNCDVVIGIVNNTVYDPLQPELDS

SEQ ID NO: 3070 - protein, 1147 aa, Artificial Sequence
  SARS-CoV-2/USA/NY-NYUMC7/2020__EPI_ISL_418192 spike protein (1-1147)(I714C_Y1110C)
MFVFLVLLPLVSSQCVNLTTRTQLPPAYTNSFTRGVYYPDKVFRSSVLHSTQDLFLPFFSNVTWFHAIHVSGTNGTKRFDNPVLPFNDGVYFASTEKSNIIRGWIFGTTLDSKTQSLLIVNNATNVVIKVCEFQFCNDPFLGVYHHKNNKSWMESEFRVYSSANNCTFEYVSQPFLMDLEGKQGNFKNLREFVFKNIDGYFKIYSKHTPINLVRDLPQGFSALEPLVDLPIGINITRFQTLLALHRSYLTPGDSSSGWTAGAAAYYVGYLQPRTFLLKYNENGTITDAVDCALDPLSETKCTLKSFTVEKGIYQTSNFRVQPTESIVRFPNITNLCPFGEVFNATRFASVYAWNRKRISNCVADYSVLYNSASFSTFKCYGVSPTKLNDLCFTNVYADSFVIRGDEVRQIAPGQTGKIADYNYKLPDDFTGCVIAWNSNNLDSKVGGNYNYLYRLFRKSNLKPFERDISTEIYQAGSTPCNGVEGFNCYFPLQSYGFQPTNGVGYQPYRVVVLSFELLHAPATVCGPKKSTNLVKNKCVNFNFNGLTGTGVLTESNKKFLPFQQFGRDIADTTDAVRDPQTLEILDITPCSFGGVSVITPGTNTSNQVAVLYQGVNCTEVPVAIHADQLTPTWRVYSTGSNVFQTRAGCLIGAEHVNNSYECDIPIGAGICASYQTQTNSPRRARSVASQSIIAYTMSLGAENSVAYSNNSIACPTNFTISVTTEILPVSMTKTSVDCTMYICGDSTECSNLLLQYGSFCTQLNRALTGIAVEQDKNTQEVFAQVKQIYKTPPIKDFGGFNFSQILPDPSKPSKRSFIEDLLFNKVTLADAGFIKQYGDCLGDIAARDLICAQKFNGLTVLPPLLTDEMIAQYTSALLAGTITSGWTFGAGAALQIPFAMQMAYRFNGIGVTQNVLYENQKLIANQFNSAIGKIQDSLSSTASALGKLQDVVNQNAQALNTLVKQLSSNFGAISSVLNDILSRLDKVEAEVQIDRLITGRLQSLQTYVTQQLIRAAEIRASANLAATKMSECVLGQSKRVDFCGKGYHLMSFPQSAPHGVVFLHVTYVPAQEKNFTTAPAICHDGKAHFPREGVFVSNGTHWFVTQRNFCEPQIITTDNTFVSGNCDVVIGIVNNTVYDPLQPELDS

SEQ ID NO: 3071 - protein, 1147 aa, Artificial Sequence
  SARS-CoV-2/Iceland/189/2020__EPI_ISL_417709 spike protein (1-1147)(I714C_Y1110C)
MFVFLVLLPLVSSQCVNLTTRTQLPPAYTNSFTRGVYYPDKVFRSSVLHSTQDLFLPFFSNVTWFHAIHVSGTNGTKRFDNPVLPFNDGVYFASTEKSNIIRGWIFGTTLDSKTQSLLIVNNATNVVIKVCEFQFCNDPFLGVYYHKNNKSWMESEFRVYSSANNCTFEYVSQPFLMDLEGKQGNFKNLREFVFKNIDGYFKIYSKHTPINLVRDLPQGFSALEPLVDLPIGINITRFQTLLALHRSYLTPGDSSSGWTAGAAAYYVGYLQPRTFLLKYNENGTITDAVDCALDPLSETKCTLKSFTVEKGIYQTSNFRVQPTESIVRFPNITNLCPFGEVFNATRFASVYAWNRKRISNCVADYSVLYNSASFSTFKCYGVSPTKLNDLCFTNVYADSFVIRGDEVRQIAPGQTGKIADYNYKLPDDFTGCVIAWNSNNLDSKVGGNYNYLYRLFRKSNLKPFERDISTEIYQAGSTPCNGVEGFNCYFPLQSYGFQPTNGVGYQPYRVVVLSFELLHAPATVCGPKKSTNLVKNKCVNFNFNGLTGTGVLTESNKKFLPFQQFGRDIADTTDAVRDPQTLEILDITPCSFGGVSVITPGTNTSNQVAVLYQGVNCTEVPVAIHADQLTPTWRVYSTGSNVFQTRAGCLIGAEHVNNSYECDIPIGAGICASYQTQTNSPRRARSVASQSIIAYTMSLGAENSVAYSNNSIACPTNFTISVTTEILPVSMTKTSVDCTMYICGDSTECSNLLLQYGSFCTQLNRALTGIAVEQDKNTQEVFAQVKQIYKTPPIKDFGGFNFSQILPDPSKPSKRSFIEDLLFNKVTLADAGFTKQYGDCLGDIAARDLICAQKFNGLTVLPPLLTDEMIAQYTSALLAGTITSGWTFGAGAALQIPFAMQMAYRFNGIGVTQNVLYENQKLIANQFNSAIGKIQDSLSSTASALGKLQDVVNQNAQALNTLVKQLSSNFGAISSVLNDILSRLDKVEAEVQIDRLITGRLQSLQTYVTQQLIRAAEIRASANLAATKMSECVLGQSKRVDFCGKGYHLMSFPQSAPHGVVFLHVTYVPAQEKNFTTAPAICHDGKAHFPREGVFVSNGTHWFVTQRNFCEPQIITTDNTFVSGNCDVVIGIVNNTVYDPLQPELDS

SEQ ID NO: 3072 - protein, 1147 aa, Artificial Sequence
  SARS-CoV-2/Australia/NSW56/2020__EPI_ISL_417408 spike protein (1-1147)(I714C_Y1110C)
MFVFLVLLPLVSSQCVNLTTRTQLPPAYTNSFTRGVYYPDKVFRSSVLHSTQDLFLPFFSNVTWFHAIHVSGTNGTKRFDNPVLPFNDGVYFASTEKSNIIRGWIFGTTLDSKTQSLLIVNNATNVVIKVCEFQFCNDPFLGVYYHKNNKSWMESEFRVYSSANNCTFEYVSQPFLMDLEGKQGNFKNLREFVFKNIDGYFKIYSKHTPINLVRDLPQGFSALEPLVDLPIGINITRFQTLLALHRSYLTPGDSSSGWTAGAAAYYVGYLQPRTFLLKYNENGTITDAVDCALDPLSETKCTLKSFTVEKGIYQTSNFRVQPTESIVRFPNITNLCPFGEVFNATRFASVYAWNRKRISNCVADYSVLYNSASFSTFKCYGVSPTKLNDLCFTNVYADSFVIRGDEVRQIAPGQTGKIADYNYKLPDDFTGCVIAWNSNNLDSKVGGNYNYLYRLFRKSNLKPFERDISTEIYQAGSTPCNGVEGFNCYFPLQSYGFQPTNGVGYQPYRVVVLSFELLHAPATVCGPKKSTNLVKNKCVNFNFNGLTGTGVLTESNKKFLPFQQFGRDIADTTDAVRDPQTLEILDITPCSFGGVSVITPGTNTSNQVAVLYQDVNCTEVPVAIHADQLTPTWRVYSTGSNVFQTRAGCLIGAEHVNNSYECDIPIGAGICASYQTQTNSPRRARSVASQSIIAYTMSLGAENSVAYSNNSIACPTNFTISVTTEILPVSMTKTSVDCTMYICGDSTECSNLLLQYGSFCTQLNRALTGIAVEQDKNTQEVFAQVKQIYKTPPIKDFGGFNFSQILPDSSKPSKRSFIEDLLFNKVTLADAGFIKQYGDCLGDIAARDLICAQKFNGLTVLPPLLTDEMIAQYTSALLAGTITSGWTFGAGAALQIPFAMQMAYRFNGIGVTQNVLYENQKLIANQFNSAIGKIQDSLSSTASALGKLQDVVNQNAQALNTLVKQLSSNFGAISSVLNDILSRLDKVEAEVQIDRLITGRLQSLQTYVTQQLIRAAEIRASANLAATKMSECVLGQSKRVDFCGKGYHLMSFPQSAPHGVVFLHVTYVPAQEKNFTTAPAICHDGKAHFPREGVFVSNGTHWFVTQRNFCEPQIITTDNTFVSGNCDVVIGIVNNTVYDPLQPELDS

SEQ ID NO: 3073 - protein, 1147 aa, Artificial Sequence
  SARS-CoV-2/Iceland/280/2020__EPI_ISL_417608 spike protein (1-1147)(I714C_Y1110C)
MFVFLVLLPLVSSQCVNLTTRTQLPPAYTNSFTRGVYYPDKVFRSSVLHSTQDLFLPFFSNVTWFHAIHVSGTNGTKRFDNPVLPFNDGVYFASTEKSNIIRGWIFGTTLDSKTQSLLIVNNATNVVIKVCEFQFCNDPFLGVYYHKNNKSWMESEFRVYSSANNCTFEYVSQPFLMDLEGKQGNFKNLREFVFKNIDGYFKIYSKHTPINLVRDLPQGFSALEPLVDLPIGINITRFQTLLALHRSYLTPGDSSSGWTAGAAAYYVGYLQPRTFLLKYNENGTITDAVDCALDPLSETKCTLKSFTVEKGIYQTSNFRVQPTESIVRFPNITNLCPFGEVFNATRFASVYAWNRKRISNCVADYSVLYNSASFSTFKCYGVSPTKLNDLCFTNVYADSFVIRGDEVRQIAPGQTGKIADYNYKLPDDFTGCVIAWNSNNLDSKVGGNYNYLYRLFRKSNLKPFERDISTEIYQAGSTPCNGVEGFNCYFPLQSYGFQPTNGVGYQPYRVVVLSFELLHAPATVCGPKKSTNLVKNKCVNFNFNGLTGTGVLTESNKKFLPFQQFGRDIADTTDAVRDPQTLEILDITPCSFGGVSVITPGTNTSNQVAVLYQGVNCTEVPVAIHADQLTPTWRVYSTGSNVFQTRAGCLIGAEHVNNSYECDIPIGAGICASYHTQTNSPRRARSVASQSIIAYTMSLGAENSVAYSNNSIACPTNFTISVTTEILPVSMTKTSVDCTMYICGDSTECSNLLLQYGSFCTQLNRALTGIAVEQDKNTQEVFAQVKQIYKTPPIKDFGGFNFSQILPDPSKPSKRSFIEDLLFNKVTLADAGFIKQYGDCLGDIAARDLICAQKFNGLTVLPPLLTDEMIAQYTSALLAGTITSGWTFGAGAALQIPFAMQMAYRFNGIGVTQNVLYENQKLIANQFNSAIGKIQDSLSSTASALGKLQDVVNQNAQALNTLVKQLSSNFGAISSVLNDILSRLDKVEAEVQIDRLITGRLQSLQTYVTQQLIRAAEIRASANLAATKMSECVLGQSKRVDFCGKGYHLMSFPQSAPHGVVFLHVTYVPAQEKNFTTAPAICHDGKAHFPREGVFVSNGTHWFVTQRNFCEPQIITTDNTFVSGNCDVVIGIVNNTVYDPLQPELDS

SEQ ID NO: 3074 - protein, 1147 aa, Artificial Sequence; identical to SEQ ID NO: 3029
  SARS-CoV-2/Iceland/247/2020__EPI_ISL_417575 spike protein (1-1147)(I714C_Y1110C)

SEQ ID NO: 3075 - protein, 1147 aa, Artificial Sequence
  SARS-CoV-2/Iceland/238/2020__EPI_ISL_417566 spike protein (1-1147)(I714C_Y1110C)
MFVFLVLLPLVSSQCVNLTTRTQLPPAYTNSFTRGVYYPDKVFRSSVLHSTQDLFLPFFSNVTWFHAIHVSGTNGTKRFDNPVLPFNDGVYFASTEKSNIIRGWIFGTTLDSKTQSLLIVNNATNVVIKVCEFQFCNDPFLGVYYHKNNKSWMESEFRVYSSANNCTFEYVSQPFLMDLEGKQGNFKNLREFVFKNIDGYFKIYSKHTPINLVRDLPQGFSALEPLVDLPIGINITRFQTLLALHRSYLTPGDSSSGWTAGAAAYYVGYLQPRTFLLKYNENGTITDAVDCALDPLSETKCTLKSFTVEKGIYQTSNFRVQPTESIVRFPNITNLCPFGEVFNATRFASVYAWNRKRISNCVADYSVLYNSASFSTFKCYGVSPTKLNDLCFTNVYADSFVIRGDEVRQIAPGQTGKIADYNYKLPDDFTGCVIAWNSNNLDSKVGGNYNYLYRLFRKSNLKPFERDISTEIYQAGSTPCNGVEGFNCYFPLQSYGFQPTNGVGYQPYRVVVLSFELLHAPATVCGPKKSTNLVKNKCVNFNFNGLTGTGVLTESNKKFLPFQQFGRDIADTTDAVRDPQTLEILDITPCSFGGVSVITPGTNTSNQVAVLYQGVNCTEVPVAIHADQLTPTWRVYSTGSNVFQTRAGCLIGAEHVNNSYECDIPIGAGICASYQTQTNSPRRARSVASQSIIAYTMSLGAENSVAYSNNSIACPTNFTISVTTEILPVSMTKTSVDCTMYICGDSTECSNLLLQYGSFCTQLNRALTGIAVEQDKNTQEVFAQVKQIYKTPPIKDFGGFNFSQILPDPSKPSKRSFIEDLLFNKVTLADVGFIKQYGDCLGDIAARDLICAQKFNGLTVLPPLLTDEMIAQYTSALLAGTITSGWTFGAGAALQIPFAMQMAYRFNGIGVTQNVLYENQKLIANQFNSAIGKIQDSLSSTASALGKLQDVVNQNAQALNTLVKQLSSNFGAISSVLNDILSRLDKVEAEVQIDRLITGRLQSLQTYVTQQLIRAAEIRASANLAATKMSECVLGQSKRVDFCGKGYHLMSFPQSAPHGVVFLHVTYVPAQEKNFTTAPAICHDGKAHFPREGVFVSNGTHWFVTQRNFCEPQIITTDNTFVSGNCDVVIGIVNNTVYDPLQPELDS

SEQ ID NO: 3076 - protein, 1147 aa, Artificial Sequence
  SARS-CoV-2/Greece/16/2020__EPI_ISL_418265 spike protein (1-1147)(I714C_Y1110C)
MFVFLVLLPLVSSQCVNLTTRTQLPPAYTNSFTRGVYYPDKVFRSSVLHSTQDLFLPFFSNVTWFHAIHVSGTNGTKRFDNPVLPFNDGVYFASTEKSNIIRGWIFGTTLDSKTQSLLIVNNATNVVIKVCEFQFCNDPFLGVYYHKNNKSWMESEFRVYSSANNCTFEYVSQPFLMDLEGKQGNFKNLREFVFKNVDGYFKIYSKHTPINLVRDLPQGFSALEPLVDLPIGINITRFQTLLALHRSYLTPGDSSSGWTAGAAAYYVGYLQPRTFLLKYNENGTITDAVDCALDPLSETKCTLKSFTVEKGIYQTSNFRVQPTESIVRFPNITNLCPFGEVFNATRFASVYAWNRKRISNCVADYSVLYNSASFSTFKCYGVSPTKLNDLCFTNVYADSFVIRGDEVRQIAPGQTGKIADYNYKLPDDFTGCVIAWNSNNLDSKVGGNYNYLYRLFRKSNLKPFERDISTEIYQAGSTPCNGVEGFNCYFPLQSYGFQPTNGVGYQPYRVVVLSFELLHAPATVCGPKKSTNLVKNKCVNFNFNGLTGTGVLTESNKKFLPFQQFGRDIADTTDAVRDPQTLEILDITPCSFGGVSVITPGTNTSNQVAVLYQDVNCTEVPVAIHADQLTPTWRVYSTGSNVFQTRAGCLIGAEHVNNSYECDIPIGAGICASYQTQTNSPRRARSVASQSIIAYTMSLGAENSVAYSNNSIACPTNFTISVTTEILPVSMTKTSVDCTMYICGDSTECSNLLLQYGSFCTQLNRALTGIAVEQDKNTQEVFAQVKQIYKTPPIKDFGGFNFSQILPDPSKPSKRSFIEDLLFNKVTLADAGFIKQYGDCLGDIAARDLICAQKFNGLTVLPPLLTDEMIAQYTSALLAGTITSGWTFGAGAALQIPFAMQMAYRFNGIGVTQNVLYENQKLIANQFNSAIGKIQDSLSSTASALGKLQDVVNQNAQALNTLVKQLSSNFGAISSVLNDILSRLDKVEAEVQIDRLITGRLQSLQTYVTQQLIRAAEIRASANLAATKMSECVLGQSKRVDFCGKGYHLMSFPQSAPHGVVFLHVTYVPAQEKNFTTAPAICHDGKAHFPREGVFVSNGTHWFVTQRNFCEPQIITTDNTFVSGNCDVVIGIVNNTVYDPLQPELDS

SEQ ID NO: 3077 - protein, 1147 aa, Artificial Sequence
  SARS-CoV-2/Iceland/319/2020__EPI_ISL_417648 spike protein (1-1147)(I714C_Y1110C)
MFVFLVLLPLVSSQCVNLTTRTQLPPAYTNSFTRGVYYPDKVFRSSVLHSTQDLFLPFFSNVTWFHAIHVSGTNGTKRFDNPVLPFNDGVYFASTEKSNIIRGWIFGTTLDSKTQSLLIVNNATNVVIKVCEFQFCNDPFLGVYYHKNNKSWMESEFRVYSSANNCTFEYVSQPFLIDLEGKQGNFKNLREFVFKNIDGYFKIYSKHTPINLVRDLPQGFSALEPLVDLPIGINITRFQTLLALHRSYLTPGDSSSGWTAGAAAYYVGYLQPRTFLLKYNENGTITDAVDCALDPLSETKCTLKSFTVEKGIYQTSNFRVQPTESIVRFPNITNLCPFGEVFNATRFASVYAWNRKRISNCVADYSVLYNSASFSTFKCYGVSPTKLNDLCFTNVYADSFVIRGDEVRQIAPGQTGKIADYNYKLPDDFTGCVIAWNSNNLDSKVGGNYNYLYRLFRKSNLKPFERDISTEIYQAGSTPCNGVEGFNCYFPLQSYGFQPTNGVGYQPYRVVVLSFELLHAPATVCGPKKSTNLVKNKCVNFNFNGLTGTGVLTESNKKFLPFQQFGRDIADTTDAVRDPQTLEILDITPCSFGGVSVITPGTNTSNQVAVLYQGVNCTEVPVAIHADQLTPTWRVYSTGSNVFQTRAGCLIGAEHVNNSYECDIPIGAGICASYQTQTNSPRRARSVASQSIIAYTMSLGAENSVAYSNNSIACPTNFTISVTTEILPVSMTKTSVDCTMYICGDSTECSNLLLQYGSFCTQLNRALTGIAVEQDKNTQEVFAQVKQIYKTPPIKDFGGFNFSQILPDPSKPSKRSFIEDLLFNKVTLADAGFIKQYGDCLGDIAARDLICAQKFNGLTVLPPLLTDEMIAQYTSALLAGTITSGWTFGAGAALQIPFAMQMAYRFNGIGVTQNVLYENQKLIANQFNSAIGKIQDSLSSTASALGKLQDVVNQNAQALNTLVKQLSSNFGAISSVLNDILSRLDKVEAEVQIDRLITGRLQSLQTYVTQQLIRAAEIRASANLAATKMSECVLGQSKRVDFCGKGYHLMSFPQSAPHGVVFLHVTYVPAQEKNFTTAPAICHDGKAHFPREGVFVSNGTHWFVTQRNFCEPQIITTDNTFVSGNCDVVIGIVNNTVYDPLQPELDS

SEQ ID NO: 3078 - protein, 1147 aa, Artificial Sequence
  SARS-CoV-2/Congo/94/2020__EPI_ISL_417947 spike protein (1-1147)(I714C_Y1110C)
MFVFLVLLPLVSSQCVNLTTRTQLPPAYTNSFTRGVYYPDKVFRSSVLHSTQDLFLPFFSNVTWFHAIHVSGTNGTKRFDNPVLPFNDGVYFASTEKSNIIRGWIFGTTLDSKTQSLLIVNNATNVVIKVCEFQFCNDPFLGVYYHKNNKSWMESEFRVYSSANNCTFEYVSQPFLMDLEGKQGNFKNLREFVFKNIDGYFKIYSKHTPINLVRDLPQGFSALEPLVDLPIGINITRFQTLLALHRSYLTPGDSSSGWTAGAAAYYVGYLQPRTFLLKYNENGTITDAVDCALDPLSETKCTLKSFTVEKGIYQTSNFRVQPTESIVRFPNITNLCPFGEVFNATRFASVYAWNRKRISNCVADYSVLYNSASFSTFKCYGVSPTKLNDLCFTNVYADSFVIRGDEVRQIAPGQTGKIADYNYKLPDDFTGCVIAWNSNNLDSKVGGNYNYLYRLFRKSNLKPFERDISTEIYQAGSTPCNGVEGFNCYFPLQSYGFQPTNGVGYQPYRVVVLSFELLHAPATVCGPKKSTNLVKNKCVNFNFNGLTGTGVLTESNKKFLPFQQFGRDIADTTDAVRDPQTLEILDITPCSFGGVSVITPGTNTSNQVAVLYQGVNCTEVPVAIHADQLTPTWRVYSTGSNVFQTRAGCLIGAEHVNNSYECDIPIGAGICASYQTQTNSPRRARSVASQSIIAYTMSLGAENSVAYSNNSIACPTNFTISVTTEILPVSMTKTSVDCTMYICGDSTECSNLLLQYGSFCTQLNRALTGIAVEQDKNTQEVFAQVKQIYKTPPIKDFGGFNFSQILPDPSKPSKRSFIEDILFNKVTLADAGFIKQYGDCLGDIAARDLICAQKFNGLTVLPPLLTDEMIAQYTSALLAGTITSGWTFGAGAALQIPFAMQMAYRFNGIGVTQNVLYENQKLIANQFNSAIGKIQDSLSSTASALGKLQDVVNQNAQALNTLVKQLSSNFGAISSVLNDILSRLDKVEAEVQIDRLITGRLQSLQTYVTQQLIRAAEIRASANLAATKMSECVLGQSKRVDFCGKGYHLMSFPQSAPHGVVFLHVTYVPAQEKNFTTAPAICHDGKAHFPREGVFVSNGTHWFVTQRNFCEPQIITTDNTFVSGNCDVVIGIVNNTVYDPLQPELDS

SEQ ID NO: 3079 - protein, 1147 aa, Artificial Sequence
  SARS-CoV-2/Congo/158/2020__EPI_ISL_417950 spike protein (1-1147)(I714C_Y1110C)
MFVFLVLLPLVSSQCVNLTTRTQLPPAYTNSFTRGVYYPDKVFRSSVLHSTQDLFLPFFSNVTWFHAIHVSGTNGTKRFDNPVLPFNDGVYFASTEKSNIIRGWIFGTTLDSKTQSLLIVNNATNVVIKVCEFQFCNDPFLGVYYHKNNKSWMESEFRVYSSANNCTFEYVSQPFLMDLEGKQGNFKNLREFVFKNIDGYFKIYSKHTPINLVRDLPQGFSALEPLVDLPIGINITRFQTLLALHRSYLTPGDSSSGWTAGAAAYYVGYLQPRTFLLKYNENGTITDAVDCALDPLSETKCTLKSFTVEKGIYQTSNFRVQPTESIVRFPNITNLCPFGEVFNATRFASVYAWNRKRISNCVADYSVLYNSASFSTFKCYGVSPTKLNDLCFTNVYADSFVIRGDEVRQIAPGQTGKIADYNYKLPDDFTGCVIAWNSNNLDSKVGGNYNYLYRLFRKSNLKPFERDISTEIYQAGSTPCNGVEGFNCYFPLQSYGFQPTNGVGYQPYRVVVLSFELLHAPATVCGPKKSTNLVKNKCVNFNFNGLTGTGVLTESNKKFLPFQQFGRDIADTTDAVRDPQTLEILDITPCSFGGVSVITPGTNTSNQVAVLYQDVNCTEVPVAIHADQLTPTWRVYSTGSNVFQTRAGCLIGAEHVNNSYECDIPIGAGICASYQTQTNSPRRARSVASQSIIAYTMSLGAENSVAYSNNSIACPTNFTISVTTEILPVSMTKTSVDCTMYICGDSTECSNLLLQYGSFCTQLNRALTGIAVEQDKNTQEVFAQVKQIYKTPPIKDFGGFNFSQILPDPSKPSKRSFIEDLLFNKVTLADAGFIKQYGDCLGDIAARDLICAQKFNGLTVLPPLLTDEMIAQYTSALLAGTITSGWTFGAGAALQIPFAMQMAYRFNGIGVTQNVLYENQKLIANQFNSAIGKIQDSLSSTASALGKLQDVVNQNAQALNTLVKQLSSNFGAISSVLNDILSRLDKVEAEVQIDRLITGRLQSLQTYVTQQLIRAAEIRASANLAATKMSECVLGQSKRVDFCGKGYHLMSFPQSAPHGVVFLHVTYVPAQEKNFTTAPAICHDGKAHFPREGVFVSNGTHWFVTQRNFCEPQIITTDNTFLSGNCDVVIGIVNNTVYDPLQPELDS

SEQ ID NO: 3080 - protein, 1147 aa, Artificial Sequence
  SARS-CoV-2/USA/UT-00034/2020__EPI_ISL_417977 spike protein (1-1147)(I714C_Y1110C)
MFVFLVLLPLVSSQCVNLTTRTQLPPAYTNSFTRGVYYPDKVFRSSVLHSTQDLFLPFFSNVTWFHAIHVSGTNGTKRFDNPVLPFNDGVYFASTEKSNIIRGWIFGTTLDSKTQSLLIVNNATNVVIKVCEFQFCNDPFLGVYYYKNNKSWMESEFRVYSSANNCTFEYVSQPFLMDLEGKQGNFKNLREFVFKNIDGYFKIYSKHTPINLVRDLPQGFSALEPLVDLPIGINITRFQTLLALHRSYLTPGDSSSGWTAGAAAYYVGYLQPRTFLLKYNENGTITDAVDCALDPLSETKCTLKSFTVEKGIYQTSNFRVQPTESIVRFPNITNLCPFGEVFNATRFASVYAWNRKRISNCVADYSVLYNSASFSTFKCYGVSPTKLNDLCFTNVYADSFVIRGDEVRQIAPGQTGKIADYNYKLPDDFTGCVIAWNSNNLDSKVGGNYNYLYRLFRKSNLKPFERDISTEIYQAGSTPCNGVEGFNCYFPLQSYGFQPTNGVGYQPYRVVVLSFELLHAPATVCGPKKSTNLVKNKCVNFNFNGLTGTGVLTESNKKFLPFQQFGRDIADTTDAVRDPQTLEILDITPCSFGGVSVITPGTNTSNQVAVLYQGVNCTEVPVAIHADQLTPTWRVYSTGSNVFQTRAGCLIGAEHVNNSYECDIPIGAGICASYQTQTNSPRRARSVASQSIIAYTMSLGAENSVAYSNNSIACPTNFTISVTTEILPVSMTKTSVDCTMYICGDSTECSNLLLQYGSFCTQLNRALTGIAVEQDKNTQEVFAQVKQIYKTPPIKDFGGFNFSQILPDPSKPSKRSFIEDLLFNKVTLADAGFIKQYGDCLGDIAARDLICAQKFNGLTVLPPLLTDEMIAQYTSALLAGTITSGWTFGAGAALQIPFAMQMAYRFNGIGVTQNVLYENQKLIANQFNSAIGKIQDSLSSTASALGKLQDVVNQNAQALNTLVKQLSSNFGAISSVLNDILSRLDKVEAEVQIDRLITGRLQSLQTYVTQQLIRAAEIRASANLAATKMSECVLGQSKRVDFCGKGYHLMSFPQSAPHGVVFLHVTYVPAQEKNFTTAPAICHDGKAHFPREGVFVSNGTHWFVTQRNFCEPQIITTDNTFVSGNCDVVIGIVNNTVYDPLQPELDS

SEQ ID NO: 3081 - protein, 1147 aa, Artificial Sequence
  SARS-CoV-2/USA/UT-00033/2020__EPI_ISL_417976 spike protein (1-1147)(I714C_Y1110C)
MFVFLVLLPLVSSQCVNLTTRTQLPPAYTNSFTRGVYYPDKVFRSSVLHSTQDLFLPFFSNVTWFHAIHVSGTNGTKRFDNPVLPFNDGVYFASTEKSNIIRGWIFGTTLDSKTQSLLIVNNATNVVIKVCEFQFCNDPFLGVYYHKNNKSWMESEFRVYSSANNCTFEYVSQPFLMDLEGKQGNFKNLREFVFKNIDGYFKIYSKHTPINLVRDLPQGFSALEPLVDLPIGINITRFQTLLALHRSYLTPGDSSSGLTAGAAAYYVGYLQPRTFLLKYNENGTITDAVDCALDPLSETKCTLKSFTVEKGIYQTSNFRVQPTESIVRFPNITNLCPFGEVFNATRFASVYAWNRKRISNCVADYSVLYNSASFSTFKCYGVSPTKLNDLCFTNVYADSFVIRGDEVRQIAPGQTGKIADYNYKLPDDFTGCVIAWNSNNLDSKVGGNYNYLYRLFRKSNLKPFERDISTEIYQAGSTPCNGVEGFNCYFPLQSYGFQPTNGVGYQPYRVVVLSFELLHAPATVCGPKKSTNLVKNKCVNFNFNGLTGTGVLTESNKKFLPFQQFGRDIADTTDAVRDPQTLEILDITPCSFGGVSVITPGTNTSNQVAVLYQGVNCTEVPVAIHADQLTPTWRVYSTGSNVFQTRAGCLIGAEHVNNSYECDIPIGAGICASYQTQTNSPRRARSVASQSIIAYTMSLGAENSVAYSNNSIACPTNFTISVTTEILPVSMTKTSVDCTMYICGDSTECSNLLLQYGSFCTQLNRALTGIAVEQDKNTQEVFAQVKQIYKTPPIKDFGGFNFSQILPDPSKPSKRSFIEDLLFNKVTLADAGFIKQYGDCLGDIAARDLICAQKFNGLTVLPPLLTDEMIAQYTSALLAGTITSGWTFGAGAALQIPFAMQMAYRFNGIGVTQNVLYENQKLIANQFNSAIGKIQDSLSSTASALGKLQDVVNQNAQALNTLVKQLSSNFGAISSVLNDILSRLDKVEAEVQIDRLITGRLQSLQTYVTQQLIRAAEIRASANLAATKMSECVLGQSKRVDFCGKGYHLMSFPQSAPHGVVFLHVTYVPAQEKNFTTAPAICHDGKAHFPREGVFVSNGTHWFVTQRNFCEPQIITTDNTFVSGNCDVVIGIVNNTVYDPLQPELDS

SEQ ID NO: 3082 - protein, 1147 aa, Artificial Sequence
  SARS-CoV-2/USA/WI-13/2020__EPI_ISL_417516 spike protein (1-1147)(I714C_Y1110C)
MFVFLVLLPLVSSQCVNLTTRTQLPPAYTNSFTRGVYYPDKVFRSSVLHSTQDLFLPFFSNVTWFHAIHVSGTNGTKRFDNPVLPFNDGVYFASTEKSNIIRGWIFGTTLDSKTQSLLIVNNATNVVIKVCEFQFCNDPFLGVYYHKNNKSWMESEFRVYSSANNCTFEYVSQPFLMDLEGKQGNFKNLREFVFKNIDGYFKIYSKHTPINLVRDLPQGFSALEPLVDLPIGINITRFQTLLALHRSYLTPGDSSSGWTAGAAAYYVGYLQPRTFLLKYNENGTITDAVDCALDPLSETKCTLKSFTVEKGIYQTSNFRVLPTESIVRFPNITNLCPFGEVFNATRFASVYAWNRKRISNCVADYSVLYNSASFSTFKCYGVSPTKLNDLCFTNVYADSFVIRGDEVRQIAPGQTGKIADYNYKLPDDFTGCVIAWNSNNLDSKVGGNYNYLYRLFRKSNLKPFERDISTEIYQAGSTPCNGVEGFNCYFPLQSYGFQPTNGVGYQPYRVVVLSFELLHAPATVCGPKKSTNLVKNKCVNFNFNGLTGTGVLTESNKKFLPFQQFGRDIADTTDAVRDPQTLEILDITPCSFGGVSVITPGTNTSNQVAVLYQGVNCTEVPVAIHADQLTPTWRVYSTGSNVFQTRAGCLIGAEHVNNSYECDIPIGAGICASYQTQTNSPRRARSVASQSIIAYTMSLGAENSVAYSNNSIACPTNFTISVTTEILPVSMTKTSVDCTMYICGDSTECSNLLLQYGSFCTQLNRALTGIAVEQDKNTQEVFAQVKQIYKTPPIKDFGGFNFSQILPDPSKPSKRSFIEDLLFNKVTLADAGFIKQYGDCLGDIAARDLICAQKFNGLTVLPPLLTDEMIAQYTSALLAGTITSGWTFGAGAALQIPFAMQMAYRFNGIGVTQNVLYENQKLIANQFNSAIGKIQDSLSSTASALGKLQDVVNQNAQALNTLVKQLSSNFGAISSVLNDILSRLDKVEAEVQIDRLITGRLQSLQTYVTQQLIRAAEIRASANLAATKMSECVLGQSKRVDFCGKGYHLMSFPQSAPHGVVFLHVTYVPAQEKNFTTAPAICHDGKAHFPREGVFVSNGTHWFVTQRNFCEPQIITTDNTFVSGNCDVVIGIVNNTVYDPLQPELDS

SEQ ID NO: 3083 - protein, 1146 aa, Artificial Sequence
  SARS-CoV-2/India/1-27/2020__EPI_ISL_413522 spike protein (1-1146)(I713C_Y1109C)
MFVFLVLLPLVSSQCVNLTTRTQLPPAYTNSFTRGVYYPDKVFRSSVLHSTQDLFLPFFSNVTWFHAIHVSGTNGTKRFDNPVLPFNDGVYFASTEKSNIIRGWIFGTTLDSKTQSLLIVNNATNVVIKVCEFQFCNDPFLGVYHKNNKSWMESEFRVYSSANNCTFEYVSQPFLMDLEGKQGNFKNLREFVFKNIDGYFKIYSKHTPINLVRDLPQGFSALEPLVDLPIGINITRFQTLLALHRSYLTPGDSSSGWTAGAAAYYVGYLQPRTFLLKYNENGTITDAVDCALDPLSETKCTLKSFTVEKGIYQTSNFRVQPTESIVRFPNITNLCPFGEVFNATRFASVYAWNRKRISNCVADYSVLYNSASFSTFKCYGVSPTKLNDLCFTNVYADSFVIRGDEVIQIAPGQTGKIADYNYKLPDDFTGCVIAWNSNNLDSKVGGNYNYLYRLFRKSNLKPFERDISTEIYQAGSTPCNGVEGFNCYFPLQSYGFQPTNGVGYQPYRVVVLSFELLHAPATVCGPKKSTNLVKNKCVNFNFNGLTGTGVLTESNKKFLPFQQFGRDIADTTDAVRDPQTLEILDITPCSFGGVSVITPGTNTSNQVAVLYQDVNCTEVPVAIHADQLTPTWRVYSTGSNVFQTRAGCLIGAEHVNNSYECDIPIGAGICASYQTQTNSPRRARSVASQSIIAYTMSLGAENSVAYSNNSIACPTNFTISVTTEILPVSMTKTSVDCTMYICGDSTECSNLLLQYGSFCTQLNRALTGIAVEQDKNTQEVFAQVKQIYKTPPIKDFGGFNFSQILPDPSKPSKRSFIEDLLFNKVTLADAGFIKQYGDCLGDIAARDLICAQKFNGLTVLPPLLTDEMIAQYTSALLAGTITSGWTFGAGAALQIPFAMQMAYRFNGIGVTQNVLYENQKLIANQFNSAIGKIQDSLSSTASALGKLQDVVNQNAQALNTLVKQLSSNFGAISSVLNDILSRLDKVEAEVQIDRLITGRLQSLQTYVTQQLIRAAEIRASANLAATKMSECVLGQSKRVDFCGKGYHLMSFPQSAPHGVVFLHVTYVPAQEKNFTTAPAICHDGKAHFPREGVFVSNGTHWFVTQRNFCEPQIITTDNTFVSGNCDVVIGIVNNTVYDPLQPELDS

SEQ ID NO: 3084 - protein, 1141 aa, Artificial Sequence
  SARS-CoV-2/pangolin/Guangxi/P4L/2017__EPI_ISL_410538 spike protein (1-1141)(I708C_Y1104C)
MFVFLFVLPLVSSQCVNLTTRTGIPPGYTNSSTRGVYYPDKVFRSSILHLTQDLFLPFFSNVTWFNTINYQGGFKKFDNPVLPFNDGVYFASTEKSNIIRGWIFGTTLDARTQSLLIVNNATNVVIKVCEFQFCTDPFLGVYYHNNNKTWVENEFRVYSSANNCTFEYISQPFLMDLEGKQGNFKNLREFVFKNVDGYFKIYSKHTPIDLVRDLPRGFAALEPLVDLPIGINITRFQTLLALHRSYLTPGNLESGWTTGAAAYYVGYLQQRTFLLSYNQNGTITDAVDCSLDPLSETKCTLKSLTVEKGIYQTSNFRVQPTISIVRFPNITNLCPFGEVFNASKFASVYAWNRKRISNCVADYSVLYNSTSFSTFKCYGVSPTKLNDLCFTNVYADSFVVKGDEVRQIAPGQTGVIADYNYKLPDDFTGCVIAWNSVKQDALTGGNYGYLYRLFRKSKLKPFERDISTEIYQAGSTPCNGQVGLNCYYPLERYGFHPTTGVNYQPFRVVVLSFELLNGPATVCGPKLSTTLVKDKCVNFNFNGLTGTGVLTTSKKQFLPFQQFGRDISDTTDAVRDPQTLEILDITPCSFGGVSVITPGTNTSNQVAVLYQDVNCTEVPMAIHAEQLTPAWRVYSAGANVFQTRAGCLVGAEHVNNSYECDIPVGAGICASYHSMSSLRSVNQRSIIAYTMSLGAENSVAYSNNSIACPTNFTISVTTEILPVSMTKTSVDCTMYICGDSIECSNLLLQYGSFCTQLNRALTGIAVEQDKNTQEVFAQVKQIYKTPPIKDFGGFNFSQILPDPSKPSKRSFIEDLLFNKVTLADAGFIKQYGDCLGDIAARDLICAQKFNGLTVLPPLLTDEMIAQYTSALLAGTITSGWTFGAGAALQIPFAMQMAYRFNGIGVTQNVLYENQKLIANQFNSAIGKIQDSLSSTASALGKLQDVVNQNAQALNTLVKQLSSNFGAISSVLNDILSRLDKVEAEVQIDRLITGRLQSLQTYVTQQLIRAAEIRASANLAATKMSECVLGQSKRVDFCGKGYHLMSFPQSAPHGVVFLHVTYVPAQEKNFTTAPAICHEGKAHFPREGVFVSNGTHWFITQRNFCEPQIITTDNTFVSGSCDVVIGIVNNTVYDPLQPELDS

SEQ ID NO: 3085 - protein, 1141 aa, Artificial Sequence
  SARS-CoV-2/pangolin/Guangxi/P5L/2017__EPI_ISL_410540 spike protein (1-1141)(I708C_Y1104C)
MFVFLFVLPLVSSQCVNLTTRTGIPPGYTNSSTRGVYYPDKVFRSSILHLTQDLFLPFFSNVTWFNTINYQGGFKKFDNPVLPFNDGVYFASTEKSNIIRGWIFGTTLDARTQSLLIVNNATNVVIKVCEFQFCTDPFLGVYYHNNNKTWVENEFRVYSSANNCTFEYISQPFLMDLEGKQGNFKNLREFVFKNVDGYFKIYSKHTPIDLVRDLPRGFAALEPLVDLPIGINITRFQTLLALHRSYLTPGKLESGWTTGAAAYYVGYLQQRTFLLSYNQNGTITDAVDCSLDPLSETKCTLKSLTVEKGIYQTSNFRVQPTISIVRFPNITNLCPFGEVFNASKFASVYAWNRKRISNCVADYSVLYNSTSFSTFKCYGVSPTKLNDLCFTNVYADSFVVKGDEVRQIAPGQTGVIADYNYKLPDDFTGCVIAWNSVKQDALTGGNYGYLYRLFRKSKLKPFERDISTEIYQAGSTPCNGQVGLNCYYPLERYGFHPTTGVNYQPFRVVVLSFELLNGPATVCGPKLSTTLVKDKCVNFNFNGLTGTGVLTTSKKQFLPFQQFGRDISDTTDAVRDPQTLEILDITPCSFGGVSVITPGTNTSNQVAVLYQDVNCTEVPMAIHAEQLTPAWRVYSAGANVFQTRAGCLVGAEHVNNSYECDIPVGAGICASYHSMSSFRSVNQRSIIAYTMSLGAENSVAYSNNSIACPTNFTISVTTEILPVSMTKTSVDCTMYICGDSIECSNLLLQYGSFCTQLNRALTGIAVEQDKNTQEVFAQVKQIYKTPPIKDFGGFNFSQILPDPSKPSKRSFIEDLLFNKVTLADAGFIKQYGDCLGDIAARDLICAQKFNGLTVLPPLLTDEMIAQYTSALLAGTITSGWTFGAGAALQIPFAMQMAYRFNGIGVTQNVLYENQKLIANQFNSAIGKIQDSLSSTASALGKLQDVVNQNAQALNTLVKQLSSNFGAISSVLNDILSRLDKVEAEVQIDRLITGRLQSLQTYVTQQLIRAAEIRASANLAATKMSECVLGQSKRVDFCGKGYHLMSFPQSAPHGVVFLHVTYVPAQEKNFTTAPAICHEGKAHFPREGVFVSNGTHWFITQRNFCEPQIITTDNTFVSGSCDVVIGIVNNTVYDPLQPELDS

SEQ ID NO: 3086 - protein, 1141 aa, Artificial Sequence
  SARS-CoV-2/pangolin/Guangxi/P5E/2017__EPI_ISL_410541 spike protein (1-1141)(I708C_Y1104C)
MFVFLFVLPLVSSQCVNLTTRTGIPPGYTNSSTRGVYYPDKVFRSSILHLTQDLFLPFFSNVTWFNTITYQGGSKKFDNPVLPFNDGVYFASTEKSNIIRGWIFGTTLDARTQSLLIVNNATNVVIKVCEFQFCTDPFLGVYYHNNNKTWVENEFRVYSSANNCTFEYISQPFLMDLEGKQGNFKNLREFVFKNVDGYFKIYSKHTPIDLVRDLPRGFAALEPLVDLPIGINITRFQTLLALHRSYLTPGKLESGWTTGAAAYYVGYLQQRTFLLSYNQNGTITDAVDCSLDPLSETKCTLKSLTVEKGIYQTSNFRVQPTISIVRFPNITNLCPFGEVFNASKFASVYAWNRKRISNCVADYSVLYNSTSFSTFKCYGVSPTKLNDLCFTNVYADSFVVKGDEVRQIAPGQTGVIADYNYKLPDDFTGCVIAWNSVKQDALTGDNYGYLYRLFRKSKLKPFERDISTEIYQAGSTPCNGQVGLNCYYPLERYGFHPTTGVNYQPFRVVVLSFELLNGPATVCGPKLSTTLVKDKCVNFNFNGLTGTGVLTTSKKQFLPFQQFGRDISDTTDAVRDPQTLEILDITPCSFGGVSVITPGTNTSNQVAVLYQDVNCTEVPMAIHAEQLTPAWRVYSAGANVFQTRAGCLVGAEHVNNSYECDIPVGAGICASYHSMSSFRSVNQRSIIAYTMSLGAENSVAYSNNSIACPTNFTISVTTEILPVSMTKTSVDCTMYICGDSIECSNLLLQYGSFCTQLNRALTGIAVEQDKNTQEVFAQVKQIYKTPPIKDFGGFNFSQILPDPSKPSKRSFIEDLLFNKVTLADAGFIKQYGDCLGDIAARDLICAQKFNGLTVLPPLLTDEMIAQYTSALLAGTITSGWTFGAGAALQIPFAMQMAYRFNGIGVTQNVLYENQKLIANQFNSAIGKIQDSLSSTASALGKLQDVVNQNAQALNTLVKQLSSNFGAISSVLNDILSRLDKVEAEVQIDRLITGRLQSLQTYVTQQLIRAAEIRASANLAATKMSECVLGQSKRVDFCGKGYHLMSFPQSAPHGVVFLHVTYVPAQEKNFTTAPAICHEGKAHFPREGVFVSNGTHWFITQRNFCEPQIITTDNTFVSGSCDVVIGIVNNTVYDPLQPELDS

SEQ ID NO: 3087 - protein, 1139 aa, Artificial Sequence
  SARS-CoV-2/pangolin/Guangxi/P1E/2017__EPI_ISL_410539 spike protein (1-1139)(I706C_Y1102C)
MFVFLFVLPLVSSQCVNLTTRTGIQPGYTNSSTRGVYYPDKVFRSSILHLTQDLFLPFFSNVTWFNTINYQGGFKKFDNPVLPFNDGVYFASTEKSNIIRGWIFGTTLDARTQSLLIVNNATNVVIKVCEFQFCTDPFLGVYYHNNNKTWVENEFRVYSSANNCTFEYISQPFLMDLEGKQGNFKNLREFVFKNVDGYFKIYSKHTPIDLVRDLPRGFAALEPLVDLPIGINITRFQTLLALHRSYLTPGKLESGWTTGAAAYYVGYLQQRTFLLSYNQNGTITDAVDCSLDPLSETKCTLKSLTVEKGIYQTSNFRVQPTISIVRFPNITNLCPFGEVFNASKFASVYAWNRKRISNCVADYSVLYNSTSFSTFKCYGVSPTKLNDLCFTNVYADSFVVKGDEVRQIAPGQTGVIADYNYKLPDDFTGCVIAWNSVKQDALTGGNYLYRLFRKSKLKPFERDISTEIYQAGSTPCNGQVGLNCYYPLERYGFHPTTGVNYQPFRVVVLSFELLNGPATVCGPKLSTTLVKDKCVNFNFNGLTGTGVLTTSKKQFLPFQQFGRDISDTTDAVRDPQTLEILDITPCSFGGVSVITPGTNTSNQVAVLYQDVNCTEVPMAIHAEQLTPAWRVYSAGANVFQTRAGCLVGAEHVNNSYECDIPVGAGICASYHSMSSLRSVNQRSIIAYTMSLGAENSVAYSNNSIACPTNFTISVTTEILPVSMTKTSVDCTMYICGDSIECSNLLLQYGSFCTQLNRALTGIAVEQDKNTQEVFAQVKQIYKTPPIKDFGGFNFSQILPDPSKPSKRSFIEDLLFNKVTLADAGFIKQYGDCLGDIAARDLICAQKFNGLTVLPPLLTDEMIAQYTSALLAGTITSGWTFGAGAALQIPFAMQMAYRFNGIGVTQNVLYENQKLIANQFNSAIGKIQDSLSSTASALGKLQDVVNQNAQALNTLVKQLSSNFGAISSVLNDILSRLDKVEAEVQIDRLITGRLQSLQTYVTQQLIRAAEIRASANLAATKMSECVLGQSKRVDFCGKGYHLMSFPQSAPHGVVFLHVTYVPAQEKNFTTAPAICHEGKAHFPREGVFVSNGTHWFITQRNFCEPQIITTDNTFVSGSCDVVIGIVNNTVYDPLQPELDS

SEQ ID NO: 3088 - protein, 1147 aa, Artificial Sequence
  SARS-CoV-2/Wuhan/WIV05/2019__EPI_ISL_402128 spike protein (1-1147)(P715C_P1069C)
MFVFLVLLPLVSSQCVNLTTRTQLPPAYTNSFTRGVYYPDKVFRSSVLHSTQDLFLPFFSNVTWFHAIHVSGTNGTKRFDNPVLPFNDGVYFASTEKSNIIRGWIFGTTLDSKTQSLLIVNNATNVVIKVCEFQFCNDPFLGVYYHKNNKSWMESEFRVYSSANNCTFEYVSQPFLMDLEGKQGNFKNLREFVFKNIDGYFKIYSKHTPINLVRDLPQGFSALEPLVDLPIGINITRFQTLLALHRSYLTPGDSSSGWTAGAAAYYVGYLQPRTFLLKYNENGTITDAVDCALDPLSETKCTLKSFTVEKGIYQTSNFRVQPTESIVRFPNITNLCPFGEVFNATRFASVYAWNRKRISNCVADYSVLYNSASFSTFKCYGVSPTKLNDLCFTNVYADSFVIRGDEVRQIAPGQTGKIADYNYKLPDDFTGCVIAWNSNNLDSKVGGNYNYLYRLFRKSNLKPFERDISTEIYQAGSTPCNGVEGFNCYFPLQSYGFQPTNGVGYQPYRVVVLSFELLHAPATVCGPKKSTNLVKNKCVNFNFNGLTGTGVLTESNKKFLPFQQFGRDIADTTDAVRDPQTLEILDITPCSFGGVSVITPGTNTSNQVAVLYQDVNCTEVPVAIHADQLTPTWRVYSTGSNVFQTRAGCLIGAEHVNNSYECDIPIGAGICASYQTQTNSPRRARSVASQSIIAYTMSLGAENSVAYSNNSIAICTNFTISVTTEILPVSMTKTSVDCTMYICGDSTECSNLLLQYGSFCTQLNRALTGIAVEQDKNTQEVFAQVKQIYKTPPIKDFGGFNFSQILPDPSKPSKRSFIEDLLFNKVTLADAGFIKQYGDCLGDIAARDLICAQKFNGLTVLPPLLTDEMIAQYTSALLAGTITSGWTFGAGAALQIPFAMQMAYRFNGIGVTQNVLYENQKLIANQFNSAIGKIQDSLSSTASALGKLQDVVNQNAQALNTLVKQLSSNFGAISSVLNDILSRLDKVEAEVQIDRLITGRLQSLQTYVTQQLIRAAEIRASANLAATKMSECVLGQSKRVDFCGKGYHLMSFPQSAPHGVVFLHVTYVCAQEKNFTTAPAICHDGKAHFPREGVFVSNGTHWFVTQRNFYEPQIITTDNTFVSGNCDVVIGIVNNTVYDPLQPELDS

SEQ ID NO: 3089 - protein, 1143 aa, Artificial Sequence
  SARS-CoV-2/bat/Yunnan/RaTG13/2013__EPI_ISL_402131 spike protein (1-1143)(P711C_P1065C)
MFVFLVLLPLVSSQCVNLTTRTQLPPAYTNSSTRGVYYPDKVFRSSVLHLTQDLFLPFFSNVTWFHAIHVSGTNGIKRFDNPVLPFNDGVYFASTEKSNIIRGWIFGTTLDSKTQSLLIVNNATNVVIKVCEFQFCNDPFLGVYYHKNNKSWMESEFRVYSSANNCTFEYVSQPFLMDLEGKQGNFKNLREFVFKNIDGYFKIYSKHTPINLVRDLPPGFSALEPLVDLPIGINITRFQTLLALHRSYLTPGDSSSGWTAGAAAYYVGYLQPRTFLLKYNENGTITDAVDCALDPLSETKCTLKSFTVEKGIYQTSNFRVQPTDSIVRFPNITNLCPFGEVFNATTFASVYAWNRKRISNCVADYSVLYNSTSFSTFKCYGVSPTKLNDLCFTNVYADSFVITGDEVRQIAPGQTGKIADYNYKLPDDFTGCVIAWNSKHIDAKEGGNFNYLYRLFRKANLKPFERDISTEIYQAGSKPCNGQTGLNCYYPLYRYGFYPTDGVGHQPYRVVVLSFELLNAPATVCGPKKSTNLVKNKCVNFNFNGLTGTGVLTESNKKFLPFQQFGRDIADTTDAVRDPQTLEILDITPCSFGGVSVITPGTNASNQVAVLYQDVNCTEVPVAIHADQLTPTWRVYSTGSNVFQTRAGCLIGAEHVNNSYECDIPIGAGICASYQTQTNSRSVASQSIIAYTMSLGAENSVAYSNNSIAICTNFTISVTTEILPVSMTKTSVDCTMYICGDSTECSNLLLQYGSFCTQLNRALTGIAVEQDKNTQEVFAQVKQIYKTPPIKDFGGFNFSQILPDPSKPSKRSFIEDLLFNKVTLADAGFIKQYGDCLGDIAARDLICAQKFNGLTVLPPLLTDEMIAQYTSALLAGTITSGWTFGAGAALQIPFAMQMAYRFNGIGVTQNVLYENQKLIANQFNSAIGKIQDSLSSTASALGKLQDVVNQNAQALNTLVKQLSSNFGAISSVLNDILSRLDKVEAEVQIDRLITGRLQSLQTYVTQQLIRAAEIRASANLAATKMSECVLGQSKRVDFCGKGYHLMSFPQSAPHGVVFLHVTYVCAQEKNFTTAPAICHDGKAHFPREGVFVSNGTHWFVTQRNFYEPQIITTDNTFVSGSCDVVIGIVNNTVYDPLQPELDS

SEQ ID NO: 3090 - protein, 1147 aa, Artificial Sequence
  SARS-CoV-2/Wuhan/HBCDC-HB-01/2019__EPI_ISL_402132 spike protein (1-1147)(P715C_P1069C)
MFVFLVLLPLVSSQCVNLTTRTQLPPAYTNSITRGVYYPDKVFRSSVLHSTQDLFLPFFSNVTWFHAIHVSGTNGTKRFDNPVLPFNDGVYFASTEKSNIIRGWIFGTTLDSKTQSLLIVNNATNVVIKVCEFQFCNDPFLGVYYHKNNKSWMESEFRVYSSANNCTFEYVSQPFLMDLEGKQGNFKNLREFVFKNIDGYFKIYSKHTPINLVRDLPQGFSALEPLVDLPIGINITRFQTLLALHRSYLTPGDSSSGWTAGAAAYYVGYLQPRTFLLKYNENGTITDAVDCALDPLSETKCTLKSFTVEKGIYQTSNFRVQPTESIVRFPNITNLCPFGEVFNATRFASVYAWNRKRISNCVADYSVLYNSASFSTFKCYGVSPTKLNDLCFTNVYADSFVIRGDEVRQIAPGQTGKIADYNYKLPDDFTGCVIAWNSNNLDSKVGGNYNYLYRLFRKSNLKPFERDISTEIYQAGSTPCNGVEGFNCYFPLQSYGFQPTNGVGYQPYRVVVLSFELLHAPATVCGPKKSTNLVKNKCVNFNFNGLTGTGVLTESNKKFLPFQQFGRDIADTTDAVRDPQTLEILDITPCSFGGVSVITPGTNTSNQVAVLYQDVNCTEVPVAIHADQLTPTWRVYSTGSNVFQTRAGCLIGAEHVNNSYECDIPIGAGICASYQTQTNSPRRARSVASQSIIAYTMSLGAENSVAYSNNSIAICTNFTISVTTEILPVSMTKTSVDCTMYICGDSTECSNLLLQYGSFCTQLNRALTGIAVEQDKNTQEVFAQVKQIYKTPPIKDFGGFNFSQILPDPSKPSKRSFIEDLLFNKVTLADAGFIKQYGDCLGDIAARDLICAQKFNGLTVLPPLLTDEMIAQYTSALLAGTITSGWTFGAGAALQIPFAMQMAYRFNGIGVTQNVLYENQKLIANQFNSAIGKIQDSLSSTASALGKLQDVVNQNAQALNTLVKQLSSNFGAISSVLNDILSRLDKVEAEVQIDRLITGRLQSLQTYVTQQLIRAAEIRASANLAATKMSECVLGQSKRVDFCGKGYHLMSFPQSAPHGVVFLHVTYVCAQEKNFTTAPAICHDGKAHFPREGVFVSNGTHWFVTQRNFYEPQIITTDNTFVSGNCDVVIGIVNNTVYDPLQPELDS

SEQ ID NO: 3091 - protein, 1147 aa, Artificial Sequence
  SARS-CoV-2/Guangdong/20SF028/2020__EPI_ISL_403936 spike protein (1-1147)(P715C_P1069C)
MFVFLVLLPLVSSQCVNLTTRTQLPPAYTNSFTRGVYYPDKVFRSSVLYSTQDLFLPFFSNVTWFHAIHVSGTNGTKRFDNPVLPFNDGVYFASTEKSNIIRGWIFGTTLDSKTQSLLIVNNATNVVIKVCEFQFCNDPFLGVYYHKNNKSWMESEFRVYSSANNCTFEYVSQPFLMDLEGKQGNFKNLREFVFKNIDGYFKIYSKHTPINLVRDLPQGFSALEPLVDLPIGINITRFQTLLALHRSYLTPGDSSSGWTAGAAAYYVGYLQPRTFLLKYNENGTITDAVDCALDPLSETKCTLKSFTVEKGIYQTSNFRVQPTESIVRFPNITNLCPFGEVFNATRFASVYAWNRKRISNCVADYSVLYNSASFSTFKCYGVSPTKLNDLCFTNVYADSFVIRGDEVRQIAPGQTGKIADYNYKLPDDFTGCVIAWNSNNLDSKVGGNYNYLYRLFRKSNLKPFERDISTEIYQAGSTPCNGVEGFNCYFPLQSYGFQPTNGVGYQPYRVVVLSFELLHAPATVCGPKKSTNLVKNKCVNFNFNGLTGTGVLTESNKKFLPFQQFGRDIADTTDAVRDPQTLEILDITPCSFGGVSVITPGTNTSNQVAVLYQDVNCTEVPVAIHADQLTPTWRVYSTGSNVFQTRAGCLIGAEHVNNSYECDIPIGAGICASYQTQTNSPRRARSVASQSIIAYTMSLGAENSVAYSNNSIAICTNFTISVTTEILPVSMTKTSVDCTMYICGDSTECSNLLLQYGSFCTQLNRALTGIAVEQDKNTQEVFAQVKQIYKTPPIKDFGGFNFSQILPDPSKPSKRSFIEDLLFNKVTLADAGFIKQYGDCLGDIAARDLICAQKFNGLTVLPPLLTDEMIAQYTSALLAGTITSGWTFGAGAALQIPFAMQMAYRFNGIGVTQNVLYENQKLIANQFNSAIGKIQDSLSSTASALGKLQDVVNQNAQALNTLVKQLSSNFGAISSVLNDILSRLDKVEAEVQIDRLITGRLQSLQTYVTQQLIRAAEIRASANLAATKMSECVLGQSKRVDFCGKGYHLMSFPQSAPHGVVFLHVTYVCAQEKNFTTAPAICHDGKAHFPREGVFVSNGTHWFVTQRNFYEPQIITTDNTFVSGNCDVVIGIVNNTVYDPLQPELDS

SEQ ID NO: 3092 - protein, 1147 aa, Artificial Sequence
  SARS-CoV-2/Shenzhen/SZTH-001/2020__EPI_ISL_406592 spike protein (1-1147)(P715C_P1069C)
MFVFLVLLPLVSSQCVNLTTRTQLPPAYTNSFTRGVYYPDKVFRSSVLHSTQDLFLPFFSNVTWFHAIHVSGTNGTKRFDNPVLPFNDGVYFASTEKSNIIRGWIFGTTLDSKTQSLLIVNNATNVVIKVCEFQFCNDPFLGVYYHKNNKSWMESEFRVYSSANNCTFEYVSQPFLMDLEGKQGNFKNLREFVFKNIDGYFKIYSKHTPINLVRDLPQGFSALEPLVDLPIGINITRFQTLLALHRSYLTPGDSSSGWTAGAAAYYVGYLQPRTFLLKYNENGTITDAVDCALDPLSETKCTLKSFTVEKGIYQTSNFRVQPTESIVRFPNITNLCPFGEVFNATRFASVYAWNRKRISNCVADYSVLYNSASFSTFKCYGVSPTKLNDLCFTNVYADSFVIRGDEVRQIAPGQTGKIADYNYKLPDDFTGCVIAWNSNNLDSKVGGNYNYLYRLFRKSNLKPFERDISTEIYQAGSTPCNGVEGFNCYFPLQSYGFQPTNGVGYQPYRVVVLSFELLHAPATVCGPKKSTNLVKNKCVNFNFNGLTGTGVLTESNKKFLPFQQFGRDIADTTDAVRDPQTLEILDITPCSFGGVSVITPGTNTSNQVAVLYQDVNCTEVPVAIHADQLTPTWRVYSTGSNVFQTRAGCLIGAEHVNNSYECDIPIGAGICASYQTQTNSPRRARSVASQSIIAYTMSLGAENSVAYSNNSIAICTNFTISVTTEILPVSMTKTSVDCTMYICGDSTECSNLLLQYGSFCTQLNRALTGIAVEQDKNTQEVFAQVKQIYKTPPIKDFGGFNFSQILPDPSKPSKRSFIEDLLFNKVTLADAGFIKQYGDCLGDIAARDLICAQKFNGLTVLPPLLTDEMIAQYTSALLAGTITSGWTFGAGAALQIPFAMQMAYRFNGIGVTQNVLYENQKLIANQFNSAIGKIQDSLSSTASALGKLQDVVNQNAQALNTLVKQLSSNFGAISSVLNDILSRLDKVEAEVQIDRLITGRLQSLQTYVTQQLIRAAEIRASANLAATKMSECVLGQSKRVDFCGKGYHLMSFPQSAPHGVVFLHVTYVCAQEKNFTTAPAICHDGKAHFPREGVFVSNGTHWFVTQRNFYEPQIITTDNTFVSGNCDVLIGIVNNTVYDPLQPELDS

SEQ ID NO: 3093 - protein, 1147 aa, Artificial Sequence
  SARS-CoV-2/Shenzhen/SZTH-004/2020__EPI_ISL_406595 spike protein (1-1147)(P715C_P1069C)
MFVFLVLLPLVSSQCVNLTTRTQLPPAYTNSFTRGVYYPDKVFRSSVLHSTQDLFLPFFSNVTWFHAIHVSGTNGTKRFDNPVLPFNDGVYFASTEKSNIIRGWIFGTTLDSKTQSLLIVNNATNVVIKVCEFQFCNDPFLGVYYHKNNKSWMESEFRVYSSANNCTFEYVSQPFLMDLEGKQGNFKNLREFVFKNIDGYFKIYSKHTPINLVRDLPQGFSALEPLVDLPIGINITRFQTLLALHRSYLTPGDSSSGWTAGAAAYYVGYLQPRTFLLKYNENGTITDAVDCALDPLSETKCTLKSFTVEKGIYQTSNFRVQPTESIVRFPNITNLCPFGEVFNATRFASVYAWDRKRISNCVAYYSVLYNSASFSTFKCYGVSPTKLNDLCFTNVYADSFVIRGDEVRQIAPGQTGKIADYNYKLPDDFTGCVIAWNSNNLDSKVGGNYNYLYRLFRKSNLKPFERDISTEIYQAGSTPCNGVEGFNCYFPLQSYGFQPTNGVGYQPYRVVVLSFELLHAPATVCGPKKSTNLVKNKCVNFNFNGLTGTGVLTESNKKFLPFQQFGRDIADTTDAVRDPQTLEILDITPCSFGGVSVITPGTNTSNQVAVLYQDVNCTEVPVAIHADQLTPTWRVYSTGSNVFQTRAGCLIGAEHVNNSYECDIPIGAGICASYQTQTNSPRRARSVASQSIIAYTMSLGAENSVAYSNNSIAICTNFTISVTTEILPVSMTKTSVDCTMYICGDSTECSNLLLQYGSFCTQLNRALTGIAVEQDKNTQEVFAQVKQIYKTPPIKDFGGFNFSQILPDPSKPSKRSFIEDLLFNKVTLADAGFIKQYGDCLGDIAARDLICAQKFNGLTVLPPLLTDEMIAQYTSALLAGTITSGWTFGAGAALQIPFAMQMAYRFNGIGVTQNVLYENQKLIANQFNSAIGKIQDSLSSTASALGKLQDVVNQNAQALNTLVKQLSSNFGAISSVLNDILSRLDKVEAEVQIDRLITGRLQSLQTYVTQQLIRAAEIRASANLAATKMSECVLGQSKRVDFCGKGYHLMSFPQSAPHGVVFLHVTYVCAQEKNFTTAPAICHDGKAHFPREGVFVSNGTHWFVTQRNFYEPQIITTDNTFVSGNCDVVIGIVNNTVYDPLQPELDS

SEQ ID NO: 3094 - protein, 1147 aa, Artificial Sequence
  SARS-CoV-2/France/IDF0372/2020__EPI_ISL_406596 spike protein (1-1147)(P715C_P1069C)
MFVFLVLLPLVSSQCVNLTTRTQLPPAYTNSFTRGVYYPDKVFRSSVLHSTQDLFLPFFSNVTWFHAIHVSGTNGTKRFDNPVLPFNDGVYFASTEKSNIIRGWIFGTTLDSKTQSLLIVNNATNVVIKVCEFQFCNDPFLGVYYHKNNKSWMESEFRVYSSANNCTFEYVSQPFLMDLEGKQGNFKNLREFVFKNIDGYFKIYSKHTPINLVRDLPQGFSALEPLVDLPIGINITRFQTLLALHRSYLTPGDSSSGWTAGAAAYYVGYLQPRTFLLKYNENGTITDAVDCALDPLSETKCTLKSFTVEKGIYQTSNFRVQPTESIVRFPNITNLCPFGEVFNATRFASVYAWNRKRISNCVADYSFLYNSASFSTFKCYGVSPTKLNDLCFTNVYADSFVIRGDEVRQIAPGQTGKIADYNYKLPDDFTGCVIAWNSNNLDSKVGGNYNYLYRLFRKSNLKPFERDISTEIYQAGSTPCNGVEGFNCYFPLQSYGFQPTNGVGYQPYRVVVLSFELLHAPATVCGPKKSTNLVKNKCVNFNFNGLTGTGVLTESNKKFLPFQQFGRDIADTTDAVRDPQTLEILDITPCSFGGVSVITPGTNTSNQVAVLYQDVNCTEVPVAIHADQLTPTWRVYSTGSNVFQTRAGCLIGAEHVNNSYECDIPIGAGICASYQTQTNSPRRARSVASQSIIAYTMSLGAENSVAYSNNSIAICTNFTISVTTEILPVSMTKTSVDCTMYICGDSTECSNLLLQYGSFCTQLNRALTGIAVEQDKNTQEVFAQVKQIYKTPPIKDFGGFNFSQILPDPSKPSKRSFIEDLLFNKVTLADAGFIKQYGDCLGDIAARDLICAQKFNGLTVLPPLLTDEMIAQYTSALLAGTITSGWTFGAGAALQIPFAMQMAYRFNGIGVTQNVLYENQKLIANQFNSAIGKIQDSLSSTASALGKLQDVVNQNAQALNTLVKQLSSNFGAISSVLNDILSRLDKVEAEVQIDRLITGRLQSLQTYVTQQLIRAAEIRASANLAATKMSECVLGQSKRVDFCGKGYHLMSFPQSAPHGVVFLHVTYVCAQEKNFTTAPAICHDGKAHFPREGVFVSNGTHWFVTQRNFYEPQIITTDNTFVSGNCDVVIGIVNNTVYDPLQPELDS

SEQ ID NO: 3095 - protein, 1147 aa, Artificial Sequence
  SARS-CoV-2/Australia/VIC01/2020__EPI_ISL_406844 spike protein (1-1147)(P715C_P1069C)
MFVFLVLLPLVSSQCVNLTTRTQLPPAYTNSFTRGVYYPDKVFRSSVLHSTQDLFLPFFSNVTWFHAIHVSGTNGTKRFDNPVLPFNDGVYFASTEKSNIIRGWIFGTTLDSKTQSLLIVNNATNVVIKVCEFQFCNDPFLGVYYHKNNKSWMESEFRVYSSANNCTFEYVSQPFLMDLEGKQGNFKNLREFVFKNIDGYFKIYSKHTPINLVRDLPQGFSALEPLVDLPIGINITRFQTLLALHRRYLTPGDSSSGWTAGAAAYYVGYLQPRTFLLKYNENGTITDAVDCALDPLSETKCTLKSFTVEKGIYQTSNFRVQPTESIVRFPNITNLCPFGEVFNATRFASVYAWNRKRISNCVADYSVLYNSASFSTFKCYGVSPTKLNDLCFTNVYADSFVIRGDEVRQIAPGQTGKIADYNYKLPDDFTGCVIAWNSNNLDSKVGGNYNYLYRLFRKSNLKPFERDISTEIYQAGSTPCNGVEGFNCYFPLQSYGFQPTNGVGYQPYRVVVLSFELLHAPATVCGPKKSTNLVKNKCVNFNFNGLTGTGVLTESNKKFLPFQQFGRDIADTTDAVRDPQTLEILDITPCSFGGVSVITPGTNTSNQVAVLYQDVNCTEVPVAIHADQLTPTWRVYSTGSNVFQTRAGCLIGAEHVNNSYECDIPIGAGICASYQTQTNSPRRARSVASQSIIAYTMSLGAENSVAYSNNSIAICTNFTISVTTEILPVSMTKTSVDCTMYICGDSTECSNLLLQYGSFCTQLNRALTGIAVEQDKNTQEVFAQVKQIYKTPPIKDFGGFNFSQILPDPSKPSKRSFIEDLLFNKVTLADAGFIKQYGDCLGDIAARDLICAQKFNGLTVLPPLLTDEMIAQYTSALLAGTITSGWTFGAGAALQIPFAMQMAYRFNGIGVTQNVLYENQKLIANQFNSAIGKIQDSLSSTASALGKLQDVVNQNAQALNTLVKQLSSNFGAISSVLNDILSRLDKVEAEVQIDRLITGRLQSLQTYVTQQLIRAAEIRASANLAATKMSECVLGQSKRVDFCGKGYHLMSFPQSAPHGVVFLHVTYVCAQEKNFTTAPAICHDGKAHFPREGVFVSNGTHWFVTQRNFYEPQIITTDNTFVSGNCDVVIGIVNNTVYDPLQPELDS

SEQ ID NO: 3096 - protein, 1147 aa, Artificial Sequence
  SARS-CoV-2/Germany/BavPat1/2020__EPI_ISL_406862 spike protein (1-1147)(P715C_P1069C)
MFVFLVLLPLVSSQCVNLTTRTQLPPAYTNSFTRGVYYPDKVFRSSVLHSTQDLFLPFFSNVTWFHAIHVSGTNGTKRFDNPVLPFNDGVYFASTEKSNIIRGWIFGTTLDSKTQSLLIVNNATNVVIKVCEFQFCNDPFLGVYYHKNNKSWMESEFRVYSSANNCTFEYVSQPFLMDLEGKQGNFKNLREFVFKNIDGYFKIYSKHTPINLVRDLPQGFSALEPLVDLPIGINITRFQTLLALHRSYLTPGDSSSGWTAGAAAYYVGYLQPRTFLLKYNENGTITDAVDCALDPLSETKCTLKSFTVEKGIYQTSNFRVQPTESIVRFPNITNLCPFGEVFNATRFASVYAWNRKRISNCVADYSVLYNSASFSTFKCYGVSPTKLNDLCFTNVYADSFVIRGDEVRQIAPGQTGKIADYNYKLPDDFTGCVIAWNSNNLDSKVGGNYNYLYRLFRKSNLKPFERDISTEIYQAGSTPCNGVEGFNCYFPLQSYGFQPTNGVGYQPYRVVVLSFELLHAPATVCGPKKSTNLVKNKCVNFNFNGLTGTGVLTESNKKFLPFQQFGRDIADTTDAVRDPQTLEILDITPCSFGGVSVITPGTNTSNQVAVLYQGVNCTEVPVAIHADQLTPTWRVYSTGSNVFQTRAGCLIGAEHVNNSYECDIPIGAGICASYQTQTNSPRRARSVASQSIIAYTMSLGAENSVAYSNNSIAICTNFTISVTTEILPVSMTKTSVDCTMYICGDSTECSNLLLQYGSFCTQLNRALTGIAVEQDKNTQEVFAQVKQIYKTPPIKDFGGFNFSQILPDPSKPSKRSFIEDLLFNKVTLADAGFIKQYGDCLGDIAARDLICAQKFNGLTVLPPLLTDEMIAQYTSALLAGTITSGWTFGAGAALQIPFAMQMAYRFNGIGVTQNVLYENQKLIANQFNSAIGKIQDSLSSTASALGKLQDVVNQNAQALNTLVKQLSSNFGAISSVLNDILSRLDKVEAEVQIDRLITGRLQSLQTYVTQQLIRAAEIRASANLAATKMSECVLGQSKRVDFCGKGYHLMSFPQSAPHGVVFLHVTYVCAQEKNFTTAPAICHDGKAHFPREGVFVSNGTHWFVTQRNFYEPQIITTDNTFVSGNCDVVIGIVNNTVYDPLQPELDS

SEQ ID NO: 3097 - protein, 1147 aa, Artificial Sequence
  SARS-CoV-2/Wuhan/HBCDC-HB-02/2020__EPI_ISL_412978 spike protein (1-1147)(P715C_P1069C)
MFVFLVLLPLVSSQCVNLTTRTQLPPAYTNSFTRGVYYPDKVFRSSVLHSTQDLFLPFFSNVTWFHAIHVSGTNGTKRFDNPVLPFNDGVYFASTEKSNIIRGWIFGTTLDSKTQSLLIVNNATNVVIKVCEFQFCNDPFLGVYYHKNNKSWMESEFRVYSSANNCTFEYVSQPFLMDLEGKQGNFKNLREFVFKNIDGYFKIYSKHTPINLVRDLPQGFSALEPLVDLPIGINITRFQTLLALHRSYLTPGDSSSGWTAGAAAYYVGYLQPRTFLLKYNENGTITDAVDCALDPLSETKCTLKSFTVEKGIYQTSNFRVQPTESIVRFPNITNLCPFGEVFNATRFASVYAWNRKRISNCVADYSVLYNSASFSTFKCYGVSPTKLNDLCFTNVYADSFVIRGDEVRQIAPGQTGKIADYNYKLPDDFTGCVIAWNSNNLDSKVGGNYNYLYRLFRKSNLKPFERDISTEIYQAGSTPCNGVEGFNCYFPLQSYGFQPTNGVGYQPYRVVVLSFELLHAPATVCGPKKSTNLVKNKCVNFNFNGLTGTGVLTESNKKFLPFQQFGRDIADTTDAVRDPQTLEILDITPCSFGGVSVITPGTNTSNQVAVLYQDVNCTEVPVAIHADQLTPTWRVYSTGSNVFQTRAGCLIGAEHVNNSYECDIPIGAGICASYQTQTNSPRRARSVASQSIIAYTMSLGAENSVAYSNNSIAICTNFTISVTTEILPVSMTKTSVDCTMYICGDSTECSNFLLQYGSFCTQLNRALTGIAVEQDKNTQEVFAQVKQIYKTPPIKDFGGFNFSQILPDPSKPSKRSFIEDLLFNKVTLADAGFIKQYGDCLGDIAARDLICAQKFNGLTVLPPLLTDEMIAQYTSALLAGTITSGWTFGAGAALQIPFAMQMAYRFNGIGVTQNVLYENQKLIANQFNSAIGKIQDSLSSTASALGKLQDVVNQNAQALNTLVKQLSSNFGAISSVLNDILSRLDKVEAEVQIDRLITGRLQSLQTYVTQQLIRAAEIRASANLAATKMSECVLGQSKRVDFCGKGYHLMSFPQSAPHGVVFLHVTYVCAQEKNFTTAPAICHDGKAHFPREGVFVSNGTHWFVTQRNFYEPQIITTDNTFVSGNCDVVIGIVNNTVYDPLQPELDS

SEQ ID NO: 3098 - protein, 1147 aa, Artificial Sequence
  SARS-CoV-2/Australia/QLD02/2020__EPI_ISL_407896 spike protein (1-1147)(P715C_P1069C)
MFVFLVLLPLVSSQCVNLTTRTQLPPAYTNSFTRGVYYPDKVFRSSVLHSTQDLFLPFFSNVTWFHAIHVSGTNGTKRFDNPVLPFNDGVYFASTEKSNIIRGWIFGTTLDSKTQSLLIVNNATNVVIKVCEFQFCNDPFLGVYYHKNNKSWMESEFRVYSSANNCTFEYVSQPFLMDLEGKQGNFKNLREFVFKNIDGYFKIYSKHTPINLVRDLPQGFSALEPLVDLPIGINITRFQTLLALHRSYLTPGDSSSGWTAGAAAYYVGYLQPRTFLLKYNENGTITDAVDCALDPLSETKCTLKSFTVEKGIYQTSNFRVQPTESIVRFPNITNLCPFGEVFNATRFASVYAWNRKRISNCVADYSVLYNSASFSTFKCYGVSPTKLNDLCFTNVYADSFVIRGDEVRQIAPGQTGKIADYNYKLPDDFTGCVIAWNSNNLDSKVGGNYNYLYRLFRKSNLKPFERDISTEIYQAGSTPCNGVEGFNCYFPLQSYGFQPTNGVGYQPYRVVVLSFELLHAPATVCGPKKSTNLVKNKCVNFNFNGLTGTGVLTESNKKFLPFQQFGRDIADTTDAVRDPQTLEILDITPCSFGGVSVITPGTNTSNQVAVLYQDVNCTEVPVAIHADQLTPTWRVYSTGSNVFQTRAGCLIGAEHVNNSYECDIPIGAGICASYQTQTNSPRRARSVASQSIIAYTMSLGAENSVAYSNNSIAICTNFTISVTTEILPVSMTKTSVDCTMYICGDSTECSNLLLQYGSFCTQLNRALTGIAVEQDKNTQEVFAQVKQIYKTPPIKDFGGFNFSQILPDPSKPSKRSFIEDLLFNKVTLADAGFIKQYGDCLGDIAARDLICAQKFNGLTVLPPLLTDEMIAQYTSALLAGTITSGWTFGAGAALQIPFAMQMAYRFNGIGVTQNVLYENQKLIANQFNSAIGKIQDSLSSTASALGKLQDVVNQNAQALNTLVKQLSSNFGAISSVLNDILSRLDKVEAEVQIDRLITGRLQSLQTYVTQQLIRAAEIRASANLAATKMSECVLGQSKRVDFCGKGYHLMSFPQSAPHGVVFLHVTYVCAQEKNFTTAPAICHDGKAHFPREGVFVSNGTHWFVTQRNFYEPQIITTDNTFVSGNCDVVIGIVNNTVYDPLQLELDS

SEQ ID NO: 3099 - protein, 1147 aa, Artificial Sequence
  SARS-CoV-2/India/1-31/2020__EPI_ISL_413523 spike protein (1-1147)(P715C_P1069C)
MFVFLVLLPLVSSQCVNLTTRTQLPPAYTNSFTRGVYYPDKVFRSSVLHSTQDLFLPFFSNVTWFHAIHVSGTNGTKRFDNPVLPFNDGVYFASTEKSNIIRGWIFGTTLDSKTQSLLIVNNATNVVIKVCEFQFCNDPFLGVYYHKNNKSWMESEFRVYSSANNCTFEYVSQPFLMDLEGKQGNFKNLREFVFKNIDGYFKIYSKHTPINLVRDLPQGFSALEPLVDLPIGINITRFQTLLALHRSYLTPGDSSSGWTAGAAAYYVGYLQPRTFLLKYNENGTITDAVDCALDPLSETKCTLKSFTVEKGIYQTSNFRVQPTESIVRFPNITNLCPFGEVFNATRFASVYAWNRKRISNCVADYSVLYNSASFSTFKCYGVSPTKLNDLCFTNVYADSFVIRGDEVRQIAPGQTGKIADYNYKLPDDFTGCVIAWNSNNLDSKVGGNYNYLYRLFRKSNLKPFERDISTEIYQAGSTPCNGVEGFNCYFPLQSYGFQPTNGVGYQPYRVVVLSFELLHAPATVCGPKKSTNLVKNKCVNFNFNGLTGTGVLTESNKKFLPFQQFGRDIADTTDAVRDPQTLEILDITPCSFGGVSVITPGTNTSNQVAVLYQDVNCTEVPVAIHADQLTPTWRVYSTGSNVFQTRAGCLIGAEHVNNSYECDIPIGAGICASYQTQTNSPRRARSVASQSIIAYTMSLGAENSVAYSNNSIAICTNFTISVTTEILPVSMTKTSVDCTMYICGDSTECSNLLLQYGSFCTQLNRALTGIAVEQDKNTQEVFAQVKQIYKTPPIKDFGGFNFSQILPDPSKPSKRSFIEDLLFNKVTLADAGFIKQYGDCLGDIAARDLICAQKFNGLTVLPPLLTDEMIAQYTSALLAGTITSGWTFGAGAALQIPFAMQMAYRFNGIGVTQNVLYENQKLIANQFNSVIGKIQDSLSSTASALGKLQDVVNQNAQALNTLVKQLSSNFGAISSVLNDILSRLDKVEAEVQIDRLITGRLQSLQTYVTQQLIRAAEIRASANLAATKMSECVLGQSKRVDFCGKGYHLMSFPQSAPHGVVFLHVTYVCAQEKNFTTAPAICHDGKAHFPREGVFVSNGTHWFVTQRNFYEPQIITTDNTFVSGNCDVVIGIVNNTVYDPLQPELDS

SEQ ID NO: 3100 - protein, 1147 aa, Artificial Sequence
  SARS-CoV-2/Guangdong/GD2020087-P0008/2020__EPI_ISL_413863 spike protein (1-1147)(P715C_P1069C)
MFVFLVLLPLVSSQCVNLTTRTQLPPAYTNSFTRGVYYPDKVFRSSVLHSTQDLFLPFFSNVTWFHAIHVSGTNGTKRFDNPVLPFNDGVYFASTEKSNIIRGWIFGTTLDSKTQSLLIVNNATNVVIKVCEFQFCNDPFLGVYYHKNNKSWMESEFRVYSSANNCTFEYVSQPFLMDLEGKQGNFKNLREFVFKNIDGYFKIYSKHTPINLVRDLPQGFSALEPLVDLPIGINITRFQTLLALHRSYLTPGDSSSGWTAGAAAYYVGYLQPRTFLLKYNENGTITDAVDCALDPLSETKCTLKSFTVEKGIYQTSNFRVQPTESIVRFPNITNLCPFGEVFNATRFASVYAWNRKRISNCVADYSVLYNSASFSTFKCYGVSPTKLNDLCFTNVYADSFVIRGDEVREIAPGQTGKIADYNYKLPDDFTGCVIAWNSNNLDSKVGGNYNYLYRLFRKSNLKPFERDISTEIYQAGSTPCNGVEGFNCYFPLQSYGFQPTNGVGYQPYRVVVLSFELLHAPATVCGPKKSTNLVKNKCVNFNFNGLTGTGVLTESNKKFLPFQQFGRDIADTTDAVRDPQTLEILDITPCSFGGVSVITPGTNTSNQVAVLYQDVNCTEVPVAIHADQLTPTWRVYSTGSNVFQTRAGCLIGAEHVNNSYECDIPIGAGICASYQTQTNSPRRARSVASQSIIAYTMSLGAENSVAYSNNSIAICTNFTISVTTEILPVSMTKTSVDCTMYICGDSTECSNLLLQYGSFCTQLNRALTGIAVEQDKNTQEVFAQVKQIYKTPPIKDFGGFNFSQILPDPSKPSKRSFIEDLLFNKVTLADAGFIKQYGDCLGDIAARDLICAQKFNGLTVLPPLLTDEMIAQYTSALLAGTITSGWTFGAGAALQIPFAMQMAYRFNGIGVTQNVLYENQKLIANQFNSAIGKIQDSLSSTASALGKLQDVVNQNAQALNTLVKQLSSNFGAISSVLNDILSRLDKVEAEVQIDRLITGRLQSLQTYVTQQLIRAAEIRASANLAATKMSECVLGQSKRVDFCGKGYHLMSFPQSAPHGVVFLHVTYVCAQEKNFTTAPAICHDGKAHFPREGVFVSNGTHWFVTQRNFYEPQIITTDNTFVSGNCDVVIGIVNNTVYDPLQPELDS

SEQ ID NO: 3101 - protein, 1147 aa, Artificial Sequence
  SARS-CoV-2/Sweden/01/2020__EPI_ISL_411951 spike protein (1-1147)(P715C_P1069C)
MFVFLVLLPLVSSQCVNLTTRTQLPPAYTNSFTRGVYYPDKVFRSSVLHSTQDLFLPFFSNVTWFHAIHVSGTNGTKRFDNPVLPFNDGVYFASTEKSNIIRGWIFGTTLDSKTQSLLIVNNATNVVIKVCEFQFCNDPFLGVYYHKNNKSWMESEFRVYSSANNCTFEYVSQPFLMDLEGKQGNFKNLREFVFKNIDGYFKIYSKHTPINLVRDLPQGFSALEPLVDLPIGINITRFQTLLALHRSYLTPGDSSSGWTAGAAAYYVGYLQPRTFLLKYNENGTITDAVDCALDPLSETKCTLKSFTVEKGIYQTSNFRVQPTESIVRFPNITNLCPFGEVFNATRFASVYAWNRKRISNCVADYSVLYNSASFSTFKCYGVSPTKLNDLCFTNVYADSFVIRGDEVRQIAPGQTGKIADYNYKLPDDFTGCVIAWNSNNLDSKVGGNYNYLYRLFRKSNLKPFERDISTEIYQAGSTPCNGVEGFNCYFPLQSYGFQPTNGVGYQPYRVVVLSFELLHAPATVCGPKKSTNLVKNKCVNFNFNGLTGTGVLTESNKKFLPFQQFGRDIADTTDAVRDPQTLEILDITPCSFGGVSVITPGTNTSNQVAVLYQDVNCTEVPVAIHADQLTPTWRVYSTGSNVFQTRAGCLIGAEHVNNSYECDIPIGAGICASYQTQTNSPRRARSVASQSIIAYTMSLGAENSVAYSNNSIAICTNFTISVTTEILPVSMTKTSVDCTMYICGDSTECSNLLLQYGSFCTQLNRALTGIAVEQDKNTQEVFAQVKQIYKTPPIKDCGGFNFSQILPDPSKPSKRSFIEDLLFNKVTLADAGFIKQYGDCLGDIAARDLICAQKFNGLTVLPPLLTDEMIAQYTSALLAGTITSGWTFGAGAALQIPFAMQMAYRFNGIGVTQNVLYENQKLIANQFNSAIGKIQDSLSSTASALGKLQDVVNQNAQALNTLVKQLSSNFGAISSVLNDILSRLDKVEAEVQIDRLITGRLQSLQTYVTQQLIRAAEIRASANLAATKMSECVLGQSKRVDFCGKGYHLMSFPQSAPHGVVFLHVTYVCAQEKNFTTAPAICHDGKAHFPREGVFVSNGTHWFVTQRNFYEPQIITTDNTFVSGNCDVVIGIVNNTVYDPLQPELDS

SEQ ID NO: 3102 - protein, 1147 aa, Artificial Sequence
  SARS-CoV-2/Tianmen/HBCDC-HB-07/2020__EPI_ISL_412983 spike protein (1-1147)(P715C_P1069C)
MFVFLVLLPLVSSQCVNLTTRTQLPPAYTNSFTRGVYYPDKVFRSSVLHSTQDLFLPFFSNVTWFHAIHVSGTNGTKRFDNPVLPFNDGVYFASTEKSNIIRGWIFGTTLDSKTQSLLIVNNATNVVIKVCEFQFCNDPFLGVYYHKNNKSWMESEFRVYSSANNCTFEYVSQPFLMDLEGKQGNFKNLREFVFKNIDGYFKIYSKHTPINLVRDLPQGFSALEPLVDLPIGINITRFQTLLALHRSYLTPGDSSSGWTAGAAAYYVGYLQPRTFLLKYNENGTITDAVDCALDPLSETKCTLKSFTVEKGIYQTSNFRVQPTESIVRFPNITNLCPFGEVFNATRFASVYAWNRKRISNCVADYSVLYNSASFSTFKCYGVSPTKLNDLCFTNVYADSFVIRGDEVRQIAPGQTGKIADYNYKLPDDFTGCVIAWNSNNLDSKVGGNYNYLYRLFRKSNLKPFERDISTEIYQAGSTPCNGVEGFNCYFPLQSYGFQPTNGVGYQPYRVVVLSFELLHAPATVCGPKKSTNLVKNKCVNFNFNGLTGTGVLTESNKKFLPFQQFGRDIADTTDAVRDPQTLEILDITPCSFGGVSVITPGTNTSNQVAVLYQDLNCTEVPVAIHADQLTPTWRVYSTGSNVFQTRAGCLIGAEHVNNSYECDIPIGAGICASYQTQTNSPRRARSVASQSIIAYTMSLGAENSVAYSNNSIAICTNFTISVTTEILPVSMTKTSVDCTMYICGDSTECSNLLLQYGSFCTQLNRALTGIAVEQDKNTQEVFAQVKQIYKTPPIKDFGGFNFSQILPDPSKPSKRSFIEDLLFNKVTLADAGFIKQYGDCLGDIAARDLICAQKFNGLTVLPPLLTDEMIAQYTSALLAGTITSGWTFGAGAALQIPFAMQMAYRFNGIGVTQNVLYENQKLIANQFNSAIGKIQDSLSSTASALGKLQDVVNQNAQALNTLVKQLSSNFGAISSVLNDILSRLDKVEAEVQIDRLITGRLQSLQTYVTQQLIRAAEIRASANLAATKMSECVLGQSKRVDFCGKGYHLMSFPQSAPHGVVFLHVTYVCAQEKNFTTAPAICHDGKAHFPREGVFVSNGTHWFVTQRNFYEPQIITTDNTFVSGNCDVVIGIVNNTVYDPLQPELDS

SEQ ID NO: 3103 - protein, 1147 aa, Artificial Sequence
  SARS-CoV-2/Hong Kong/case42_VM20002493/2020__EPI_ISL_414527 spike protein (1-1147)(P715C_P1069C)
MFVFLVLLPLVSSQCVNLTTRTQLPPAYTNSFTRGVYYPDKVFRSSVLHSTQDLFLPFFSNVTWFHAIHVSGTNGTKRFDNPVLPFNDGVYFASTEKSNIIRGWIFGTTLDSKTQSLLIVNNATNVVIKVCEFQFCNDPFLGVYYHKNNKSWMESEFRVYSSANNCTFEYVSQPFLMDLEGKQGNFKNLREFVFKNIDGYFKIYSKHTPINLVRDLPQGFSALEPLVDLPIGINITRFQTLLALHRSYLTPGDSSSGWTAGAAAYYVGYLQPRTFLLKYNENGTITDAVDCALDPLSETKCTLKSFTVEKGIYQTSNFRVQPTESIVRFPNITNLCPFGEVFNATRFASVYAWNRKRISNCVADYSVLYNSASFSTFKCYGVSPTKLNDLCFTNVYADSFVIRGDEVRQIAPGQTGKIADYNYKLPDDFTGCVIAWNSNNLDSKVGGNYNYLYRLFRKSNLKPFERDISTEIYQAGSTPCNGVEGFNCYFPLQSYGFQPTNGVGYQPYRVVVLSFELLHAPATVCGPKKSTNLVKNKCVNFNFNGLTGTGVLTESNKKFLPFQQFGRDIADTTDAVRDPQTLEILDITPCSFGGVSVITPGTNTSNQVAVLYQDVNCTEVPVAIHADQLTPTWRVYSTGSNVFQTRAGCLIGAEHVNNSYECDIPIGAGICASYQTQTNSPRRARSVASQSIIAYTMSLGAENSVAYSNNSIAICTNFAISVTTEILPVSMTKTSVDCTMYICGDSTECSNLLLQYGSFCTQLNRALTGIAVEQDKNTQEVFAQVKQIYKTPPIKDFGGFNFSQILPDPSKPSKRSFIEDLLFNKVTLADAGFIKQYGDCLGDIAARDLICAQKFNGLTVLPPLLTDEMIAQYTSALLAGTITSGWTFGAGAALQIPFAMQMAYRFNGIGVTQNVLYENQKLIANQFNSAIGKIQDSLSSTASALGKLQDVVNQNAQALNTLVKQLSSNFGAISSVLNDILSRLDKVEAEVQIDRLITGRLQSLQTYVTQQLIRAAEIRASANLAATKMSECVLGQSKRVDFCGKGYHLMSFPQSAPHGVVFLHVTYVCAQEKNFTTAPAICHDGKAHFPREGVFVSNGTHWFVTQRNFYEPQIITTDNTFVSGNCDVVIGIVNNTVYDPLQPELDS

SEQ ID NO: 3104 - protein, 1147 aa, Artificial Sequence
  SARS-CoV-2/USA/CruiseA-23/2020__EPI_ISL_414482 spike protein (1-1147)(P715C_P1069C)
MFVFLVLLPLVSSQCVNLTTRTQLPPAYTNSFTRGVYYPDKVFRSSVLHSTQDLFLPFFSNVTWFHAIHVSGTNGTKRFDNPVLPFNDGVYFASTEKSNIIRGWIFGTTLDSKTQSLLIVNNATNVVIKVCEFQFCNDPFLGVYYHKNNKSWMESEFRVYSSANNCTFEYVSQPFLMDLEVKQGNFKNLREFVFKNIDGYFKIYSKHTPINLVRDLPQGFSALEPLVDLPIGINITRFQTLLALHRSYLTPGDSSSGWTAGAAAYYVGYLQPRTFLLKYNENGTITDAVDCALDPLSETKCTLKSFTVEKGIYQTSNFRVQPTESIVRFPNITNLCPFGEVFNATRFASVYAWNRKRISNCVADYSVLYNSASFSTFKCYGVSPTKLNDLCFTNVYADSFVIRGDEVRQIAPGQTGKIADYNYKLPDDFTGCVIAWNSNNLDSKVGGNYNYLYRLFRKSNLKPFERDISTEIYQAGSTPCNGVEGFNCYFPLQSYGFQPTNGVGYQPYRVVVLSFELLHAPATVCGPKKSTNLVKNKCVNFNFNGLTGTGVLTESNKKFLPFQQFGRDIADTTDAVRDPQTLEILDITPCSFGGVSVITPGTNTSNQVAVLYQDVNCTEVPVAIHADQLTPTWRVYSTGSNVFQTRAGCLIGAEHVNNSYECDIPIGAGICASYQTQTNSPRRARSVASQSIIAYTMSLGAENSVAYSNNSIAICTNFTISVTTEILPVSMTKTSVDCTMYICGDSTECSNLLLQYGSFCTQLNRALTGIAVEQDKNTQEVFAQVKQIYKTPPIKDFGGFNFSQILPDPSKPSKRSFIEDLLFNKVTLADAGFIKQYGDCLGDIAARDLICAQKFNGLTVLPPLLTDEMIAQYTSALLAGTITSGWTFGAGAALQIPFAMQMAYRFNGIGVTQNVLYENQKLIANQFNSAIGKIQDSLSSTASALGKLQDVVNQNAQALNTLVKQLSSNFGAISSVLNDILSRLDKVEAEVQIDRLITGRLQSLQTYVTQQLIRAAEIRASANLAATKMSECVLGQSKRVDFCGKGYHLMSFPQSAPHGVVFLHVTYVCAQEKNFTTAPAICHDGKAHFPREGVFVSNGTHWFVTQRNFYEPQIITTDNTFVSGNCDVVIGIVNNTVYDPLQPELDS

SEQ ID NO: 3105 - protein, 1147 aa, Artificial Sequence
  SARS-CoV-2/Hong Kong/case85_VM20002868/2020__EPI_ISL_414519 spike protein (1-1147)(P715C_P1069C)
MFVFLVLVPLVSSQCVNLTTRTQLPPAYTNSFTRGVYYPDKVFRSSVLHSTQDLFLPFFSNVTWFHAIHVSGTNGTKRFDNPVLPFNDGVYFASTEKSNIIRGWIFGTTLDSKTQSLLIVNNATNVVIKVCEFQFCNDPFLGVYYHKNNKSWMESEFRVYSSANNCTFEYVSQPFLMDLEGKQGNFKNLREFVFKNIDGYFKIYSKHTPINLVRDLPQGFSALEPLVDLPIGINITRFQTLLALHRSYLTPGDSSSGWTAGAAAYYVGYLQPRTFLLKYNENGTITDAVDCALDPLSETKCTLKSFTVEKGIYQTSNFRVQPTESIVRFPNITNLCPFGEVFNATRFASVYAWNRKRISNCVADYSVLYNSASFSTFKCYGVSPTKLNDLCFTNVYADSFVIRGDEVRQIAPGQTGKIADYNYKLPDDFTGCVIAWNSNNLDSKVGGNYNYLYRLFRKSNLKPFERDISTEIYQAGSTPCNGVEGFNCYFPLQSYGFQPTNGVGYQPYRVVVLSFELLHAPATVCGPKKSTNLVKNKCVNFNFNGLTGTGVLTESNKKFLPFQQFGRDIADTTDAVRDPQTLEILDITPCSFGGVSVITPGTNTSNQVAVLYQDVNCTEVPVAIHADQLTPTWRVYSTGSNVFQTRAGCLIGAEHVNNSYECDIPIGAGICASYQTQTNSPRRARSVASQSIIAYTMSLGAENSVAYSNNSIAICTNFTISVTTEILPVSMTKTSVDCTMYICGDSTECSNLLLQYGSFCTQLNRALTGIAVEQDKNTQEVFAQVKQIYKTPPIKDFGGFNFSQILPDPSKPSKRSFIEDLLFNKVTLADAGFIKQYGDCLGDIAARDLICAQKFNGLTVLPPLLTDEMIAQYTSALLAGTITSGWTFGAGAALQIPFAMQMAYRFNGIGVTQNVLYENQKLIANQFNSAIGKIQDSLSSTASALGKLQDVVNQNAQALNTLVKQLSSNFGAISSVLNDILSRLDKVEAEVQIDRLITGRLQSLQTYVTQQLIRAAEIRASANLAATKMSECVLGQSKRVDFCGKGYHLMSFPQSAPHGVVFLHVTYVCAQEKNFTTAPAICHDGKAHFPREGVFVSNGTHWFVTQRNFYEPQIITTDNTFVSGNCDVVIGIVNNTVYDPLQPELDS

SEQ ID NO: 3106 - protein, 1147 aa, Artificial Sequence; identical to SEQ ID NO: 3096
  SARS-CoV-2/England/200990660/2020__EPI_ISL_414523 spike protein (1-1147)(P715C_P1069C)

SEQ ID NO: 3107 - protein, 1147 aa, Artificial Sequence
  SARS-CoV-2/Australia/NSW09/2020__EPI_ISL_413595 spike protein (1-1147)(P715C_P1069C)
MFVFLVLLPLVSSQCVNLTTRTQLPPAYTNSFTRGVYYPDKVFRSSVLHSTQDLFLPFFSNVTWFHAIHVSGTNGTKRFDNPVLPFNDGVYFASTEKSNIIRGWIFGTTLDSKTQSLLIVNNATNVVIKVCEFQFCNDPFLGVYYHKNNKSWMESEFRVYSSANNCTFEYVSQPFLMDLEGKQGNFKNLREFVFKNIDGYFKIYSKHTPINLVRDLPQGFSALEPLVDLPIGINITRFQTLLALHRSYLTPGDSSSGWTAGAAAYYVGYLQPRTFLLKYNENGTITDAVDCALDPLSETKCTLKSFTVEKGIYQTSNFRVQPTESIVRFPNITNLCPFGEVFNATRFASVYAWNRKRISNCVADYSVLYNSASFSTFKCYGVSPTKLNDLCFTNVYADSFVIRGDEVRQIAPGQTGKIADYNYKLPDDFTGCVIAWNSNNLDSKVGGNYNYLYRLFRKSNLKPFERDISTEIYQAGSTPCNGVEGFNCYFPLQSYGFQPTNGVGYQPYRVVVLSFELLHAPATVCGPKKSTNLVKNKCVNFNFNGLTGTGVLTESNKKFLPFQQFGRDIADTTDAVRDPQTLEILDITPCSFGGVSVITPGTNTSNQVAVLYQDVNCTEVPVAIHADQLTPTWRVYSTGSNVFQTRAGCLIGAEHVNNSYECDIPIGAGICASYQTQTNSPRRARSVASQSIIAYTMSLGAENSVAYSNNSIAICTNFTISVTTEILPVSMTKTSVDCTMYICGDSTECSNLLLQYGSFCTQLNRALTGIAVEQDKNTQEVFAQVKQIYKTPPIKDFGGFNFSQILPDPSKPSKRSFIEDLLFNKVTLADAGFIKQYGDCLGDIAARDLICAQKFNGLTVLPPLLTDEMIAQYTSALLAGTITSGWTFGAGAALQIPFAMQMAYRFNGIGVTQNVLYENQKLIANQFNSAIGKIQDSLSFTASALGKLQDVVNQNAQALNTLVKQLSSNFGAISSVLNDILSRLDKVEAEVQIDRLITGRLQSLQTYVTQQLIRAAEIRASANLAATKMSECVLGQSKRVDFCGKGYHLMSFPQSAPHGVVFLHVTYVCAQEKNFTTAPAICHDGKAHFPREGVFVSNGTHWFVTQRNFYEPQIITTDNTFVSGNCDVVIGIVNNTVYDPLQPELDS

SEQ ID NO: 3108 - protein, 1147 aa, Artificial Sequence; identical to SEQ ID NO: 3088
  SARS-CoV-2/Australia/NSW10/2020__EPI_ISL_413596 spike protein (1-1147)(P715C_P1069C)

SEQ ID NO: 3109 - protein, 1147 aa, Artificial Sequence
  SARS-CoV-2/Switzerland/1000477797/2020__EPI_ISL_413023 spike protein (1-1147)(P715C_P1069C)
MFVFLVLLPLVSSQCVNLTTRTQLPPAYTNSFTRGVYYPDKVFRSSVLHSTQDLFLPFFSNVTWFHAIHVSGTNGTKRFDNPVLPFNDGVYFASTEKSNIIRGWIFGTTLDSKTQSLLIVNNATNVVIKVCEFQFCNDPFLGVYYHKNNKSWMESEFRVYSSANNCTFEYVSQPFLMDLEGKQGNFKNLREFVFKNIDGYFNIYSKHTPINLVRDLPQGFSALEPLVDLPIGINITRFQTLLALHRSYLTPGDSSSGWTAGAAAYYVGYLQPRTFLLKYNENGTITDAVDCALDPLSETKCTLKSFTVEKGIYQTSNFRVQPTESIVRFPNITNLCPFGEVFNATRFASVYAWNRKRISNCVADYSVLYNSASFSTFKCYGVSPTKLNDLCFTNVYADSFVIRGDEVRQIAPGQTGKIADYNYKLPDDFTGCVIAWNSNNLDSKVGGNYNYLYRLFRKSNLKPFERDISTEIYQAGSTPCNGVEGFNCYFPLQSYGFQPTNGVGYQPYRVVVLSFELLHAPATVCGPKKSTNLVKNKCVNFNFNGLTGTGVLTESNKKFLPFQQFGRDIADTTDAVRDPQTLEILDITPCSFGGVSVITPGTNTSNQVAVLYQGVNCTEVPVAIHADQLTPTWRVYSTGSNVFQTRAGCLIGAEHVNNSYECDIPIGAGICASYQTQTNSPRRARSVASQSIIAYTMSLGAENSVAYSNNSIAICTNFTISVTTEILPVSMTKTSVDCTMYICGDSTECSNLLLQYGSFCTQLNRALTGIAVEQDKNTQEVFAQVKQIYKTPPIKDFGGFNFSQILPDPSKPSKRSFIEDLLFNKVTLADAGFIKQYGDCLGDIAARDLICAQKFNGLTVLPPLLTDEMIAQYTSALLAGTITSGWTFGAGAALQIPFAMQMAYRFNGIGVTQNVLYENQKLIANQFNSAIGKIQDSLSSTASALGKLQDVVNQNAQALNTLVKQLSSNFGAISSVLNDILSRLDKVEAEVQIDRLITGRLQSLQTYVTQQLIRAAEIRASANLAATKMSECVLGQSKRVDFCGKGYHLMSFPQSAPHGVVFLHVTYVCAQEKNFTTAPAICHDGKAHFPREGVFVSNGTHWFVTQRNFYEPQIITTDNTFVSGNCDVVIGIVNNTVYDPLQPELDS

SEQ ID NO: 3110 - protein, 1147 aa, Artificial Sequence
  SARS-CoV-2/Belgium/BA-02291/2020__EPI_ISL_415159 spike protein (1-1147)(P715C_P1069C)
MFVFLVLLPLVSSQCVNLTTRTQLPPAYTNSFTRGVYYPDKVFRSSVLHSTQDLFLPFFSNVTWFHAIHVSGTNGTKRFDNPVLPFNDGVYFASTEKSNIIRGWIFGTTLDSKTQSLLIVNNATNVVIKVCEFQFCNDPFLGVYYHKNNKSWMESEFRVYSSANNCTFEYVSQPFLMDLEGKQGNFKNLREFVFKNIDGYFKIYSKHTPINLVRDLPQGFSALEPLVDLPIGINITRFQTLLALHRSYLTPGDSSSGWTAGAAAYYVGYLQPRTFLLKYNENGTITDAVDCALDPLSETKCTLKSFTVEKGIYQTSNFRVQPTESIVRFPNITNLCPFGEVFNATRFASVYAWNRKRISNCVADYSVLYNSASFSTFKCYGVSPTKLNDLCFTNVYADSFVIRGDEVRQIAPGQTGKIADYNYKLPDDFTGCVIAWNSNNLDSKVGGNYNYLYRLFRRSNLKPFERDISTEIYQAGSTPCNGVEGFNCYFPLQSYGFQPTNGVGYQPYRVVVLSFELLPAPATVCGPKKSTNLVKNKCVNFNFNGLTGTGVLTESNKKFLPFQQFGRDIADTTDAVRDPQTLEILDITPCSFGGVSVITPGTNTSNQVAVLYQGVNCTEVPVAIHADQLTPTWRVYSTGSNVFQTRAGCLIGAEHVNNSYECDIPIGAGICASYQTQTNSPRRARSVASQSIIAYTMSLGAENSVAYSNNSIAICTNFTISVTTEILPVSMTKTSVDCTMYICGDSTECSNLLLQYGSFCTQLNRALTGIAVEQDKNTQEVFAQVKQIYKTPPIKDFGGFNFSQILPDPSKPSKRSFIEDLLFNKVTLADAGFIKQYGDCLGDIAARDLICAQKFNGLTVLPPLLTDEMIAQYTSALLAGTITSGWTFGAGAALQIPFAMQMAYRFNGIGVTQNVLYENQKLIANQFNSAIGKIQDSLSSAAPALGKLQDVVNQNAQALNTLVKQLSSNFGAISSVLNDILSRLDKVEAEVQIDRLITGRLQSLQTYVTQQLIRAAEIRASANLAATKMSECVLGQSKRVDFCGKGYHLMSFPQSAPHGVVFLHVTYVCAQEKNFTTAPAICHDGKAHFPREGVFVSNGTHWFVTQRNFYEPQIITTDNTFVSGNCDVVIGIVNNTVYDPLQPELDS

SEQ ID NO: 3111 - protein, 1147 aa, Artificial Sequence
  SARS-CoV-2/USA/WA8-UW5/2020__EPI_ISL_413486 spike protein (1-1147)(P715C_P1069C)
MFVFLVLLPLVSSQCVNLTTRTQLPPAYTNSFTRGVYYPDKVFRSSVLHSTQDLFLPFFSNVTWFHAIHVSGTNGTKRFDNPVLPFNDGVYFASTEKSNIIRGWIFGTTLDSKTQSLLIVNNATNVVIKVCEFQFCNDPFLGVYYHKNNKSWMESEFRVYSSANNCTFEYVSQPFLMDLEGKQGNFKNLREFVFKNIDGYFKIYSKHTPINLVRDLPQGFSALEPLVDLPIGINITRFQTLLALHRSYLTPGDSSSGWTAGAAAYYVGYLQPRTFLLKYNENGTITDAVDCALDPLSETKCTLKSFTVEKGIYQTSNFRVQPTESIVRFPNITNLCPFGEVFNATRFASVYAWNRKRISNCVADYSVLYNSASFSTFKCYGVSPTKLNDLCFTNVYADSFVIRGDEVRQIAPGQTGKIADYNYKLPDDFTGCVIAWNSNNLDSKVGGNYNYLYRLFRKSNLKPFERDISTEIYQAGSTPCNGVEGFNCYFPLQSYGFQPTNGVGYQPYRVVVLSFELLHAPATVCGPKKSTNLVKNKCVNFNFNGLTGTGVLTESNKKFLPFQQFGRDIADTTDAVRDPQTLEILDITPCSFGGVSVITPGTNTSNQVAVLYQDVNCTEVPVAIHADQLTPTWRVYSTGSNVFQTRAGCLIGAEYVNNSYECDIPIGAGICASYQTQTNSPRRARSVASQSIIAYTMSLGAENSVAYSNNSIAICTNFTISVTTEILPVSMTKTSVDCTMYICGDSTECSNLLLQYGSFCTQLNRALTGIAVEQDKNTQEVFAQVKQIYKTPPIKDFGGFNFSQILPDPSKPSKRSFIEDLLFNKVTLADAGFIKQYGDCLGDIAARDLICAQKFNGLTVLPPLLTDEMIAQYTSALLAGTITSGWTFGAGAALQIPFAMQMAYRFNGIGVTQNVLYENQKLIANQFNSAIGKIQDSLSSTASALGKLQDVVNQNAQALNTLVKQLSSNFGAISSVLNDILSRLDKVEAEVQIDRLITGRLQSLQTYVTQQLIRAAEIRASANLAATKMSECVLGQSKRVDFCGKGYHLMSFPQSAPHGVVFLHVTYVCAQEKNFTTAPAICHDGKAHFPREGVFVSNGTHWFVTQRNFYEPQIITTDNTFVSGNCDVVIGIVNNTVYDPLQPELDS

SEQ ID NO: 3112 - protein, 1147 aa, Artificial Sequence
  SARS-CoV-2/England/20102000506/2020__EPI_ISL_415147 spike protein (1-1147)(P715C_P1069C)
MFVFLVLLPLVSSQCVNLTTRTQLPPAYTNSFTRGVYYPDKVFRSSVLHSTQDLFLPFFSNVTWFHAIHVSGTNGTKRFDNPVLPFNDGVYFASTEKSNIIRGWIFGTTLDSKTQSLLIVNNATNVVIKVCEFQFCNDPFLGVYYHKNNKSWMESEFRVYSSANNCTFEYVSQPFLMDLEGKQGNFKNLREFVFKNIDGYFKIYSKHTPINLVRDLPQGFSALEPLVDLPIGINITRFQTLLALHRSYLTPGDSSSGWTAGAAAYYVGYLQPRTFLLKYNENGTITDAVDCALDPLSETKCTLKSFTVEKGIYQTSNFRVQPTESIVRFPNITNLCPFGEVFNATRFASVYAWNRKRISNCVADYSVLYNSASFSTFKCYGVSPTKLNDLCFTNVYADSFVIRGDEVRQIAPGQTGKIADYNYKLPDDFTGCVIAWNSNNLDSKVGGNYNYLYRLFRKSNLKPFERDISTEIYQAGSTPCNGVEGFNCYFPLQSYGFQPTNGVGYQPYRVVVLSFELLHAPATVCGPKKSTNLVKNKCVNFNFNGLTGTGVLTESNKKFLPFQQFGRDIADTTDAVRDPQTLEILDITPCSFGGVSVITPGTNTSNQVAVLYQGVNCTEVPVAIHADQLTPTWRVYSTGSNVFQTRAGCLIGAEHVNNSYECDIPIGAGICASYQTQTNSPRRARSVASQSIIAYTMSLGAENSVAYSNNSIAICTNFTISVTTEILPVSMTKTSVDCTMYICGDSTECSNLLLQYGSFCTQLNRALTGIAVEQDKNTQEVFAQVKQIYKTPPIKDFGGFNFSQILPDPSKPSKRSFIEDLLFNKVTLADAGFIKQYGYCLGDIAARDLICAQKFNGLTVLPPLLTDEMIAQYTSALLAGTITSGWTFGAGAALQIPFAMQMAYRFNGIGVTQNVLYENQKLIANQFNSAIGKIQDSLSSTASALGKLQDVVNQNAQALNTLVKQLSSNFGAISSVLNDILSRLDKVEAEVQIDRLITGRLQSLQTYVTQQLIRAAEIRASANLAATKMSECVLGQSKRVDFCGKGYHLMSFPQSAPHGVVFLHVTYVCAQEKNFTTAPAICHDGKAHFPREGVFVSNGTHWFVTQRNFYEPQIITTDNTFVSGNCDVVIGIVNNTVYDPLQPELDS

SEQ ID NO: 3113 - protein, 1147 aa, Artificial Sequence
  SARS-CoV-2/Belgium/VAG-03013/2020__EPI_ISL_415155 spike protein (1-1147)(P715C_P1069C)
MFVFLVLLPLVSSQCVNLTTRTQLPPAYTNSFTRGVYYPDKVFRSSVLHSTQDLFLPFFSNVTWFHAIHVSGTNGTKRFDNPVLPFNDGVYFASTEKSNIIRGWIFGTTLDSKTQSLLIVNNATNVVIKVCEFQFCNDPFLGVYYHKNNKSWMESEFRVYSSANNCTFEYVSQPFLMDLEGKQGNFKNLREFVFKNIDGYFKIYSKHTPINLVRDLPQGFSALEPLVDLPIGINITRFQTLLALHRSYLTPGDSSSGWTAGAAAYYVGYLQPRTFLLKYNENGTITDAVDCALDPLSETKCTLKSFTVEKGIYQTSNFRVQPTESIVRFPNITNLCPFGEVFNATRFASVYAWNRKRISNCVADYSVLYNSASFSTFKCYGVSPTKLNDLCFTNVYADSFVIRGDEVRQIAPGQTGKIADYNYKLPDDFTGCVIAWNSNNLDSKVGGNYNYLYRLFRKSNLKPFERDISTEIYQAGSTPCNGVEGFNCYFPLQSYGFQPTNGVGYQPYRVVVLSFELLHAPATVCGPKKSTNLVKNKCVNFNFNGLTGTGVLTESNKKFLPFQQFGRDIADTTDAVRDPQTLEILDITPCSFGGVSVITPGTNTSNQVAVLYQGVNCTEVPVAIHADQLTPTWRVYSTGSNVFQTRAGCLIGAEHVNNSYECDIPIGAGICASYQTQTNSPRRARSVASQSIIAYTMSLGAENSVAYSNNSIAICTNFTISVTTEILPVSMTKTSVDCTMYICGDSTECSNLLLQYGSFCTQLNRALTGIAVEQDKNTQEVFAQVKQIYKTPPIKDFGGFNFSQILPDPSKPSKRSFIEDLLFNKVTLADAGFIKQYGDCLGDIAARDLICAQKFNGLTVLPPLLTDEMIAQYTSALLAGTITSGWTFGAGAALQIPFAMQMAYRFNGIGVTQNVLYENQKLIANQFNSAIGKIQDSLSSTATALGKLQDVVNQNAQALNTLVKQLSSNFGAISSVLNDILSRLDKVEAEVQIDRLITGRLQSLQTYVTQQLIRAAEIRASANLAATKMSECVLGQSKRVDFCGKGYHLMSFPQSAPHGVVFLHVTYVCAQEKNFTTAPAICHDGKAHFPREGVFVSNGTHWFVTQRNFYEPQIITTDNTFVSGNCDVVIGIVNNTVYDPLQPELDS

SEQ ID NO: 3114 - protein, 1147 aa, Artificial Sequence
  SARS-CoV-2/Belgium/BC-03016/2020__EPI_ISL_415157 spike protein (1-1147)(P715C_P1069C)
MFVFLVLLPLVSSQCVNLTTRTQLPPAYTNSFTRGVYYPDKVFRSSVLHSTQDLFLPFFSNVTWFHAIHVSGTNGTKRFDNPVLPFNDGVYFASTEKSNIIRGWIFGTTLDSKTQSLLIVNNATNVVIKVCEFQFCNDPFLGVYYHKNNKSWMESEFRVYSSANNCTFEYVSQPFLMDLEGKQGNFKNLREFVFKNIDGYFKIYSKHTPINLVRDLPQGFSALEPLVDLPIGINITRFQTLLALHRSYLTPGDSSSGWTAGAAAYYVGYLQPRTFLLKYNENGTITDAVDCALDPLSETKCTLKSFTVEKGIYQTSNFRVQPTESIVRFPNITNLCPFGEVFNATRFASVYAWNRKRISNCVADYSVLYNSASFSTFKCYGVSPTKLNDLCFTNVYADSFVIRGDEVRQIAPGQTGKIADYNYKLPDDFTGCVIAWNSNNLDSKVGGNYNYLYRLFRKSNLKPFERDISTEIYQAGSTPCNGVEGFNCYFPLQSYGFQPTNGVGYQPYRVVVLSFELLHAPATVCGPKKSTNLVKNKCVNFNFNGLTGTGVLTESNKKFLPFQQFGRDIADTTDAVRDPQTLEILDITPCSFGGVSVITPGTNTSNQVAVLYQGVNCTEVPVAIHADQLTPTWRVYSTGSNVFQTRAGCLIGAEHVNNSYECDIPIGAGICASYQTQTNSPRRARSVASQSIIAYTMSLGAENSVAYSNNSIAICTNFTISVTTEILPVSMTKTSVDCTMYICGDSTECSNLLLQYGSFCTQLNRALTGIAVEQDKNTQEVFAQVKQIYKTPPIKDFGGFNFSQILPDPSKPSKRSFIEDLLFNKVTLADAGFIKQYGDCLGDIAARDLICAQKFNGLTVLPPLLTDEMIAQYTSALLAGTITSGWTFGAGAALQIPFAMQMAYRFNGIGVTQNVLYENQKLIANQFNSAIGKIQDSLSSTAPALGKLQDVVNQNAQALNTLVKQLSSNFGAISSVLNDILSRLDKVEAEVQIDRLITGRLQSLQTYVTQQLIRAAEIRASANLAATKMSECVLGQSKRVDFCGKGYHLMSFPQSAPHGVVFLHVTYVCAQEKNFTTAPAICHDGKAHFPREGVFVSNGTHWFVTQRNFYEPQIITTDNTFVSGNCDVVIGIVNNTVYDPLQPELDS

SEQ ID NO: 3115 - protein, 1147 aa, Artificial Sequence
  SARS-CoV-2/Germany/BavPat3/2020__EPI_ISL_414521 spike protein (1-1147)(P715C_P1069C)
MFVFLVLLPLVSSQCVNLTTRTQLPPAYTNSFTRGVYYPDKVFRSSVLHSTQDLFLPFFSNVTWFHAIHVSGTNGTKRFDNPVLPFNDGVYFASTEKSNIIRGWIFGTTLDSKTQSLLIVNNATNVVIKVCEFQFCNDPFLGVYYHKNNKSWMESEFRVYSSANNCTFEYVSQPFLMDLEGKQGNFKNLREFVFKNIDGYFKIYSKHTPINLVRDLPQGFSALEPLVDLPIGINITRFQTLLALHRSYLTPGDSSSGWTAGAAAYYVGYLQPRTFLLKYNENGTITDAVDCALDPLSETKCTLKSFTVEKGIYQTSNFRVQPTESIVRFPNITNLCPFGEVFNATRFASVYAWNRKRISNCVADYSVLYNSASFSTFKCYGVSPTKLNDLCFTNVYADSFVIRGDEVRQIAPGQTGKIADYNYKLPDDFTGCVIAWNSNNLDSKVGGNYNYLYRLFRKSNLKPFERDISTEIYQAGSTPCNGVEGFNCYFPLQSYGFQPTNGVGYQPYRVVVLSFELLHAPATVCGPKKSTNLVKNKCVNFNFNGLTGTGVLTESNKKFLPFQQFGRDIADTTDAVRDPQTLEILDITPCSFGGVSVITPGTNTSNQVAVLYQDVNCTEVPVAIHADQLTPTWRVYSTGSNVFQTRAGCLIGAEHVNNSYECDIPIGAGICASYQTQTNSPRRARSVASQSIIAYTMSLGAENSVAYSNNSIAICTNFTISVTTEILPVSMTKTSVDCTMYICGDSTECSNLLLQYGSFCTQLNRALTGIAVEQDKNTQQVFAQVKQIYKTPPIKDFGGFNFSQILPDPSKPSKRSFIEDLLFNKVTLADAGFIKQYGDCLGDIAARDLICAQKFNGLTVLPPLLTDEMIAQYTSALLAGTITSGWTFGAGAALQIPFAMQMAYRFNGIGVTQNVLYENQKLIANQFNSAIGKIQDSLSSTASALGKLQDVVNQNAQALNTLVKQLSSNFGAISSVLNDILSRLDKVEAEVQIDRLITGRLQSLQTYVTQQLIRAAEIRASANLAATKMSECVLGQSKRVDFCGKGYHLMSFPQSAPHGVVFLHVTYVCAQEKNFTTAPAICHDGKAHFPREGVFVSNGTHWFVTQRNFYEPQIITTDNTFVSGNCDVVIGIVNNTVYDPLQPELDS

SEQ ID NO: 3116 - protein, 1147 aa, Artificial Sequence
  SARS-CoV-2/France/HF1805/2020__EPI_ISL_414628 spike protein (1-1147)(P715C_P1069C)
MFVFLVLLPLVSSQCVNLTTRTQLPPAYTNSFTRGVYYPDKVFRSSVLHSTQDLFLPFFSNVTWFHAIHVSGTNGTKRFDNPVLPFNDGVYFASTEKSNIIRGWIFGTTLDSKTQSLLIVNNATNVVIKVCEFQFCNDPFLGVYYHKNNKSWMESEFRVYSSANNCTFEYVSQPFLMDLEGKQGNFKNLREFVFKNIDGYFKIYSKHTPINLVRDLPQGFSALEPLVDLPIGINITRFQTLLALHRSYLTPGDSSSGWTAGAAAYYVGYLQPRTFLLKYNENGTITDAVDCALDPLSETKCTLKSFTVEKGIYQTSNFRVQPTESIVRFPNITNLCPFGEVFNATRFASVYAWNRKRISNCVADYSVLYNSASFSTFKCYGVSPTKLNDLCFTNVYADSFVIRGDEVRQIAPGQTGKIADYNYKLPDDFTGCVIAWNSNNLDSKVGGNYNYLYRLFRKSNLKPFERDISTEIYQAGSTPCNGVEGFNCYFPLQSYGFQPTNGVGYQPYRVVVLSFELLHAPATVCGPKKSTNLVKNKCVNFNFNGLTGTGVLTESNKKFLPFQQFGRDIADTTDAVRDPQTLEILDITPCSFGGVSVITPGTNTSNQVAVLYQGVNCTEVPVAIHADQLTPTWRVYSTGSNVFQTRAGCLIGAEHVNNSYECDIPIGAGICASYQTQTNSPRRARSVASQSIIAYTMSLGAENSVAYSNNSIAICTNFTISVTTEILPVSMTKTSVDCTMYICGDSTECSNLLLQYGSFCTQLNRALTGIAVEQDKNTQEVFAQVKQIYKTPPIKDFGGFNFSQILPDPSKPSKRSFIEDLLFNKVTLADAGFIKQYGDCLGDIAARDLICAQKFNGLTVLPPLLTDEMIAQYTSALLAGTITSGWTFGAGAALQIPFAMQMAYRFNGIGVTQNVLYENQKLIANQFNSAIGKIQDSLSSTASALGKLQDVVNQNAQALNTLVKQLSSNFGAISSVLNDILSRLDKVEAEVQIDRLITGRLQSLQTYVTQQLIRAAEIRASANLAATKMSECVLGQSKRVDFCGKGYHLMSFPQSAPHGVVFLHVTYVCAQEKNFTTAPAICHDGKAHFPREGVFVSNGTHWFVTQRNFYEPQIITTDNTFVSGNCDVVIGVVNNTVYDPLQPELDS

SEQ ID NO: 3117 - protein, 1147 aa, Artificial Sequence
  SARS-CoV-2/Netherlands/ZuidHolland_9/2020__EPI_ISL_414445 spike protein (1-1147)(P715C_P1069C)
MFVFLVLLPLVSSQCVNLTTRTQLPPAYTNSFTRGVYYPDKVFRSSVLHSTQDLFLPFFSNVTWFHAIHVSGTNGTKRFDNPVLPFNDGVYFASTEKSNIIRGWIFGTTLDSKTQSLLIVNNATNVVIKVCEFQFCNDPFLGVYYHKNNKSWMESEFRVYSSANNCTFEYVSQPFLMDLEGKQGNFKNLREFVFKNIDGYFKIYSKHTPINLVRDLPQGFSALEPLVDLPIGINITRFQTLLALHRSYLTPGDSSSGWTAGAAAYYVGYLQPRTFLLKYNENGTITDAVDCALDPLSETKCTLKSFTVEKGIYQTSNFRVQPTESIVRFPNITNLCPFGEVFNATRFASVYAWNRKRISNCVADYSVLYNSASFSTFKCYGVSPTKLNDLCFTNVYADSFVIRGDEVRQIAPGQTGKIADYNYKLPDDFTGCVIAWNSNNLDSKVGGNYNYLYRLFRKSNLKPFERDISTEIYQAGSTPCNGVEGFNCYFPLQSYGFQPTNGVGYQPYRVVVLSFELLHAPATVCGPKKSTNLVKNKCVNFNFNGLTGTGVLTESNKKFLPFQQFGRDIADTTDAVRDPQTLEILDITPCSFGGVSVITPGTNTSNQVAVLYQGVNCTEVPVAIHADQLTPTWRVYSTGSNVFQTRAGCLIGAEHVNNSYECDIPIGAGICASYQTQTNSPRRARSVASQSIIAYTMSLGAENSVAYSNNSIAICTNFTISVTTEILPVSMTKTSVDCTMYICGDSTECSNLLLQYGSFCTQLNRALTGIAVEQDKNTQEVFAQVKQIYKTPPIKDFGGFNFSQILPDPSKPSKRSFIEDLLFNKVTLADAGFIKQYGDCLGDIAARDLICVQKFNGLTVLPPLLTDEMIAQYTSALLAGTITSGWTFGAGAALQIPFAMQMAYRFNGIGVTQNVLYENQKLIANQFNSAIGKIQDSLSSTASALGKLQDVVNQNAQALNTLVKQLSSNFGAISSVLNDILSRLDKVEAEVQIDRLITGRLQSLQTYVTQQLIRAAEIRASANLAATKMSECVLGQSKRVDFCGKGYHLMSFPQSAPHGVVFLHVTYVCAQEKNFTTAPAICHDGKAHFPREGVFVSNGTHWFVTQRNFYEPQIITTDNTFVSGNCDVVIGIVNNTVYDPLQPELDS

SEQ ID NO: 3118 - protein, 1147 aa, Artificial Sequence
  SARS-CoV-2/Finland/FIN03032020A/2020__EPI_ISL_413602 spike protein (1-1147)(P715C_P1069C)
MFVFLVLLPLVSSQCVNLTTRTQLPPAYTNSFTRGVYYPDKVFRSSVLHSTQDLFLPFFSNVTWFHAIHVSGTNGTKRFDNPVLPFNDGVYFASTEKSNIIRGWIFGTTLDSKTQSLLIVNNATNVVIKVCEFQFCNDPFLGVYYHKNNKSWMESEFRVYSSANNCTFEYVSQPFLMDLEGKQGNFKNLREFVFKNIDGYFKIYSKHTPINLVRDLPQGFSALEPLVDLPIGINITRFQTLLALHRSYLTPGDSSSGWTAGAAAYYVGYLQPRTFLLKYNENGTITDAVDCALDPLSETKCTLKSFTVEKGIYQTSNFRVQPTESIVRFPNITNLCPFGEVFNATRFASVYAWNRKRISNCVADYSVLYNSASFSTFKCYGVSPTKLNDLCFTNVYADSFVIRGDEVRQIAPGQTGKIADYNYKLPDDFTGCVISWNSNNLDSKVGGNYNYLYRLFRKSNLKPFERDISTEIYQAGSTPCNGVEGFNCYFPLQSYGFQPTNGVGYQPYRVVVLSFELLHAPATVCGPKKSTNLVKNKCVNFNFNGLTGTGVLTESNKKFLPFQQFGRDIADTTDAVRDPQTLEILDITPCSFGGVSVITPGTNTSNQVAVLYQGVNCTEVPVAIHADQLTPTWRVYSTGSNVFQTRAGCLIGAEHVNNSYECDIPIGAGICASYQTQTNSPRRARSVASQSIIAYTMSLGAENSVAYSNNSIAICTNFTISVTTEILPVSMTKTSVDCTMYICGDSTECSNLLLQYGSFCTQLNRALTGIAVEQDKNTQEVFAQVKQIYKTPPIKDFGGFNFSQILPDPSKPSKRSFIEDLLFNKVTLADAGFIKQYGDCLGDIAARDLICAQKFNGLTVLPPLLTDEMIAQYTSALLAGTITSGWTFGAGAALQIPFAMQMAYRFNGIGVTQNVLYENQKLIANQFNSAIGKIQDSLSSTASALGKLQDVVNQNAQALNTLVKQLSSNFGAISSVLNDILSRLDKVEAEVQIDRLITGRLQSLQTYVTQQLIRAAEIRASANLAATKMSECVLGQSKRVDFCGKGYHLMSFPQSAPHGVVFLHVTYVCAQEKNFTTAPAICHDGKAHFPREGVFVSNGTHWFVTQRNFYEPQIITTDNTFVSGNCDVVIGIVNNTVYDPLQPELDS

SEQ ID NO: 3119 - protein, 1147 aa, Artificial Sequence
  SARS-CoV-2/France/GE1977/2020__EPI_ISL_414632 spike protein (1-1147)(P715C_P1069C)
MFVFLVLLPLVSSQCVNLTTRTQLPPAYTNSFTRGVYYPDKVFRSSVLHSTQDLFLPFFSNVTWFHAIHVSGTNGTKRFDNPVLPFNDGVYFASTEKSNIIRGWIFGTTLDSKTQSLLIVNNATNVVIKVCEFQFCNDPFLGVYYHKNNKSWMESEFRVYSSANNCTFEYVSQPFLMDLEGKQGNFKNLREFVFKNIDGYFKIYSKHTPINLVRDLPQGFSALEPLVDLPIGINITRFQTLLALHRSYLTPGDSSSGWTAGAAAYYVGYLQPRTFLLKYNENGTITDAVDCALDPLSETKCTLKSFTVEKGIYQTSNFRVQPTESIVRFPNITNLCPFGEVFNATRFASVYAWNRKRISNCVADYSVLYNSASFSTFKCYGVSPTKLNDLCFTNVYADSFVIRGDEVRQIAPGQTGKIADYNYKLPDDFTGCVIAWNSNNLDSKVGGNYNYLYRLFRKSNLKPFERDISTEIYQAGSTPCNGVEGFNCYFPLQSYGFQPTNGVGYQPYRVVVLSFELLHAPATVCGPKKSTNLVKNKCVNFNFNGLTGTGVLTESNKKFLPFQQFGRDIADTTDAVRDPQTLEILDITPCSFGGVSVITPGTNTSNQVAVLYQGVNCTEVPVAIHADQLTPTWRVYSTGSNVFQTRAGCLIGAEHVNNSYECDIPIGAGICASYQTQTNSPRRARSVASQSIIAYTMSLGAENSVAYSNNSIAICTNFTISVTTEILPVSMTKTSVDCTMYICGDSTECSNLLLQYGSFCTQLNRALTGIAVEQDKNTQEVFAQVKQIYKTPPIKDFGGFNFSQILPDPSKPSKRSFIEDLLFNKVTLADAGFIKQYGDCLGDIAARDLICAQKFNGLTVLPPLLTDEMIAQYTSALLAGTITSGWTFGAGAALQIPFAMQMAYRFNGIGVTQNVLYENQKLIANQFNSAIGKIQDSLFSTASALGKLQDVVNQNAQALNTLVKQLSSNFGAISSVLNDILSRLDKVEAEVQIDRLITGRLQSLQTYVTQQLIRAAEIRASANLAATKMSECVLGQSKRVDFCGKGYHLMSFPQSAPHGVVFLHVTYVCAQEKNFTTAPAICHDGKAHFPREGVFVSNGTHWFVTQRNFYEPQIITTDNTFVSGNCDVVIGIVNNTVYDPLQPELDS

SEQ ID NO: 3120 - protein, 1147 aa, Artificial Sequence
  SARS-CoV-2/Finland/FIN-313/2020__EPI_ISL_414641 spike protein (1-1147)(P715C_P1069C)
MFVFLVLLPLVSSQCVNLTTRTQLPPAYTNSFTRGVYYPDKVFRSSVLHSTQDLFLPFFSNVTWFHAIHVSGTNGTKRFDNPVLPFNDGVYFASTEKSNIIRGWIFGTTLDSKTQSLLIVNNATNVVIKVCEFQFCNDPFLGVYYHKNNKSWMESEFRVYSSANNCTFEYVSQPFLMDLEGKQGNFKNLREFVFKNIDGYFKIYSKHTPINLVRDLPQGFSALEPLVDLPIGINITRFKTLLALHRSYLTPGDSSSGWTAGAAAYYVGYLQPRTFLLKYNENGTITDAVDCALDPLSETKCTLKSFTVEKGIYQTSNFRVQPTESIVRFPNITNLCPFGEVFNATRFASVYAWNRKRISNCVADYSVLYNSASFSTFKCYGVSPTKLNDLCFTNVYADSFVIRGDEVRQIAPGQTGKIADYNYKLPDDFTGCVIAWNSNNLDSKVGGNYNYLYRLFRKSNLKPFERDISTEIYQAGSTPCNGVEGFNCYFPLQSYGFQPTNGVGYQPYRVVVLSFELLHAPATVCGPKKSTNLVKNKCVNFNFNGLTGTGVLTESNKKFLPFQQFGRDIADTTDAVRDPQTLEILDITPCSFGGVSVITPGTNTSNQVAVLYQGVNCTEVPVAIHADQLTPTWRVYSTGSNVFQTRAGCLIGAEHVNNSYECDIPIGAGICASYQTQTNSPRRARSVASQSIIAYTMSLGAENSVAYSNNSIAICTNFTISVTTEILPVSMTKTSVDCTMYICGDSTECSNLLLQYGSFCTQLNRALTGIAVEQDKNTQEVFAQVKQIYKTPPIKDFGGFNFSQILPDPSKPSKRSFIEDLLFNKVTLADAGFIKQYGDCLGDIAARDLICAQKFNGLTVLPPLLTDEMIAQYTSALLAGTITSGWTFGAGAALQIPFAMQMAYRFNGIGVTQNVLYENQKLIANQFNSAIGKIQDSLSSTASALGKLQDVVNQNAQALNTLVKQLSSNFGAISSVLNDILSRLDKVEAEVQIDRLITGRLQSLQTYVTQQLIRAAEIRASANLAATKMSECVLGQSKRVDFCGKGYHLMSFPQSAPHGVVFLHVTYVCAQEKNFTTAPAICHDGKAHFPREGVFVSNGTHWFVTQRNFYEPQIITTDNTFVSGNCDVVIGIVNNTVYDPLQPELDS

SEQ ID NO: 3121 - protein, 1147 aa, Artificial Sequence
  SARS-CoV-2/Netherlands/ZuidHolland_2/2020__EPI_ISL_414556 spike protein (1-1147)(P715C_P1069C)
MFVFLVLLPLVSSQCVNLTTRTQLPPAYTNSFTRGVYYPDKVFRSSVLHSTQDLFLPFFSNVTWFHAIHVSGTNGTKRFDNPVLPFNDGVYFASTEKSNIIRGWIFGTTLDSKTQSLLIVNNATNVVIKVCEFQFCNDPFLGVYYHKNNKSWMESEFRVYSSANNCTFEYVSQPFLMDLEGKQGNFKNLREFVFKNIDGYFKIYSKHTPINLVRDLPQGFSALEPLVDLPIGINITRFQTLLALHRSYLTPGDSSSGWTAGAAAYYVGYLQPRTFLLKYNENGTITDAVDCALDPLSETKCTLKSFTVEKGIYQTSNFRVQPTESIVRFPNITNLCPFGEVFNATRFASVYAWNRKRISNCVADYSVLYNSASFSTFKCYGVSPTKLNDLCFTNVYADSFVIRGDEVRQIAPGQTGKIADYNYKLPDDFTGCVIAWNSNNLDSKVGGNYNYLYRLFRKSNLKPFERDISTEIYQAGSTPCNGVEGFNCYFPLQSYGFQPTNGVGYQPYRVVVLSFELLHAPATVCGPKKSTNLVKNKCVNFNFNGLTGTGVLTESNKKFLPFQQFGRDIADTTDAVRDPQTLEILDITPCSFGGVSVITPGTNTSNQVAVLYQGVNCTEVPVAIHADQLTPTWRVYSTGSNVFQTRAGCLIGAEHVNNSYECDIPIGAGICASYQTQTNSPRRARSVASQSIIAYTMSLGAENSVAYSNNSIAICTNFTISVTTEILPVSMTKTSVDCTMYICGDSTECSNLLLQYGSFCTQLNRALTGIALEQDKNTQEVFAQVKQIYKTPPIKDFGGFNFSQILPDPSKPSKRSFIEDLLFNKVTLADAGFIKQYGDCLGDIAARDLICAQKFNGLTVLPPLLTDEMIAQYTSALLAGTITSGWTFGAGAALQIPFAMQMAYRFNGIGVTQNVLYENQKLIANQFNSAIGKIQDSLSSTASALGKLQDVVNQNAQALNTLVKQLSSNFGAISSVLNDILSRLDKVEAEVQIDRLITGRLQSLQTYVTQQLIRAAEIRASANLAATKMSECVLGQSKRVDFCGKGYHLMSFPQSAPHGVVFLHVTYVCAQEKNFTTAPAICHDGKAHFPREGVFVSNGTHWFVTQRNFYEPQIITTDNTFVSGNCDVVIGIVNNTVYDPLQPELDS

SEQ ID NO: 3122 - protein, 1147 aa, Artificial Sequence
  SARS-CoV-2/USA/WA-UW31/2020__EPI_ISL_414618 spike protein (1-1147)(P715C_P1069C)
MFVFLVLLPLVSSQCVNLTTRTQLPPAYTNSFTRGVYYPDKVFRSSVLHSTQDLFLPFFSNVTWFHAIHVSGTNGTKRFDNPVLPFNDGVYFASTEKSNIIRGWIFGTTLDSKTQSLLIVNNATNVVIKVCEFQFCNDPFLGVYYHKNNKSWMESEFRVYSSANNCTFEYVSQPFLMDLEGKQGNFKNLREFVFKNIDGYFKIYSKHTPINLVRDLPQGFSALEPLVDLPIGINITRFQTLLALHRSYLTPGDSSSGWTAGAAAYYVGYLQPRTFLLKYNENGTITDAVDCALDPLSETKCTLKSFTVEKGIYQTSNFRVQPTESIVRFPNITNLCPFGEVFNATRFASVYAWNRKRISNCVADYSVLYNSASFSTFKCYGVSPTKLNDLCFTNVYADSFVIRGDEVRQIAPGQTGKIADYNYKLPDDFTGCVIAWNSNNLDSKVGGNYNYLYRLFRKSNLKPFERDISTEIYQAGSTPCNGAEGFNCYFPLQSYGFQPTNGVGYQPYRVVVLSFELLHAPATVCGPKKSTNLVKNKCVNFNFNGLTGTGVLTESNKKFLPFQQFGRDIADTTDAVRDPQTLEILDITPCSFGGVSVITPGTNTSNQVAVLYQDVNCTEVPVAIHADQLTPTWRVYSTGSNVFQTRAGCLIGAEHVNNSYECDIPIGAGICASYQTQTNSPRRARSVASQSIIAYTMSLGAENSVAYSNNSIAICTNFTISVTTEILPVSMTKTSVDCTMYICGDSTECSNLLLQYGSFCTQLNRALTGIAVEQDKNTQEVFAQVKQIYKTPPIKDFGGFNFSQILPDPSKPSKRSFIEDLLFNKVTLADAGFIKQYGDCLGDIAARDLICAQKFNGLTVLPPLLTDEMIAQYTSALLAGTITSGWTFGAGAALQIPFAMQMAYRFNGIGVTQNVLYENQKLIANQFNSAIGKIQDSLSSTASALGKLQDVVNQNAQALNTLVKQLSSNFGAISSVLNDILSRLDKVEAEVQIDRLITGRLQSLQTYVTQQLIRAAEIRASANLAATKMSECVLGQSKRVDFCGKGYHLMSFPQSAPHGVVFLHVTYVCAQEKNFTTAPAICHDGKAHFPREGVFVSNGTHWFVTQRNFYEPQIITTDNTFVSGNCDVVIGIVNNTVYDPLQPELDS

SEQ ID NO: 3123 - protein, 1147 aa, Artificial Sequence
  SARS-CoV-2/South Korea/SNU01/2020__EPI_ISL_411929 spike protein (1-1147)(P715C_P1069C)
MFVFLVLLPLVSSQCVNLTTRTQLPPAYTNSFTRGVYYPDKVFRSSVLHSTQDLFLPFFSNVTWFHAIHVSGTNGTKRFDNPVLPFNDGVYFASTEKSNIIRGWIFGTTLDSKTQSLLIVNNATNVVIKVCEFQFCNDPFLGVYYHKNNKSWMESEFRVYSSANNCTFEYVSQPFLMDLEGKQGNFKNLREFVFKNIDGYFKIYSKHTPINLVRDLPQGFWALEPLVDLPIGINITRFQTLLALHRSYLTPGDSSSGWTAGAAAYYVGYLQPRTFLLKYNENGTITDAVDCALDPLSETKCTLKSFTVEKGIYQTSNFRVQPTESIVRFPNITNLCPFGEVFNATRFASVYAWNRKRISNCVADYSVLYNSASFSTFKCYGVSPTKLNDLCFTNVYADSFVIRGDEVRQIAPGQTGKIADYNYKLPDDFTGCVIAWNSNNLDSKVGGNYNYLYRLFRKSNLKPFERDISTEIYQAGSTPCNGVEGFNCYFPLQSYGFQPTNGVGYQPYRVVVLSFELLHAPATVCGPKKSTNLVKNKCVNFNFNGLTGTGVLTESNKKFLPFQQFGRDIADTTDAVRDPQTLEILDITPCSFGGVSVITPGTNTSNQVAVLYQDVNCTEVPVAIHADQLTPTWRVYSTGSNVFQTRAGCLIGAEHVNNSYECDIPIGAGICASYQTQTNSPRRARSVASQSIIAYTMSLGAENSVAYSNNSIAICTNFTISVTTEILPVSMTKTSVDCTMYICGDSTECSNLLLQYGSFCTQLNRALTGIAVEQDKNTQEVFAQVKQIYKTPPIKDFGGFNFSQILPDPSKPSKRSFIEDLLFNKVTLADAGFIKQYGDCLGDIAARDLICAQKFNGLTVLPPLLTDEMIAQYTSALLAGTITSGWTFGAGAALQIPFAMQMAYRFNGIGVTQNVLYENQKLIANQFNSAIGKIQDSLSSTASALGKLQDVVNQNAQALNTLVKQLSSNFGAISSVLNDILSRLDKVEAEVQIDRLITGRLQSLQTYVTQQLIRAAEIRASANLAATKMSECVLGQSKRVDFCGKGYHLMSFPQSAPHGVVFLHVTYVCAQEKNFTTAPAICHDGKAHFPREGVFVSNGTHWFVTQRNFYEPQIITTDNTFVSGNCDVVIGIVNNTVYDPLQPELDS

SEQ ID NO: 3124 - protein, 1147 aa, Artificial Sequence
  SARS-CoV-2/China/WF0004/2020__EPI_ISL_413694 spike protein (1-1147)(P715C_P1069C)
MFVFLVLLPLVSSQCVNLTTRTQLPPAYTNSFTRGVYYPDKVFRSSVLHSTQDLFLPFFSNVTWFHAIHVSGTNGTKRFDNPVLPFNDGVYFASTEKSNIIRGWIFGTTLDSKTQSLLIVNNATNVVIKVCEFQFCNDPFLGVYYHKNNKSWTESEFRVYSSANNCTFEYVSQPFLMDLEGKQGNFKNLREFVFKNIDGYFKIYSKHTPINLVRDLPQGFSALEPLVDLPIGINITRFQTLLALHRSYLTPGDSSSGWTAGAAAYYVGYLQPRTFLLKYNENGTITDAVDCALDPLSETKCTLKSFTVEKGIYQTSNFRVQPTESIVRFPNITNLCPFGEVFNATRFASVYAWNRKRISNCVADYSVLYNSASFSTFKCYGVSPTKLNDLCFTNVYADSFVIRGDEVRQIAPGQTGKIADYNYKLPDDFTGCVIAWNSNNLDSKVGGNYNYLYRLFRKSNLKPFERDISTEIYQAGSTPCNGVEGFNCYFPLQSYGFQPTNGVGYQPYRVVVLSFELLHAPATVCGPKKSTNLVKNKCVNFNFNGLTGTGVLTESNKKFLPFQQFGRDIADTTDAVRDPQTLEILDITPCSFGGVSVITPGTNTSNQVAVLYQDVNCTEVPVAIHADQLTPTWRVYSTGSNVFQTRAGCLIGAEHVNNSYECDIPIGAGICASYQTQTNSPRRARSVASQSIIAYTMSLGAENSVAYSNNSIAICTNFTISVTTEILPVSMTKTSVDCTMYICGDSTECSNLLLQYGSFCTQLNRALTGIAVEQDKNTQEVFAQVKQIYKTPPIKDFGGFNFSQILPDPSKPSKRSFIEDLLFNKVTLADAGFIKQYGDCLGDIAARDLICAQKFNGLTVLPPLLTDEMIAQYTSALLAGTITSGWTFGAGAALQIPFAMQMAYRFNGIGVTQNVLYENQKLIANQFNSAIGKIQDSLSSTASALGKLQDVVNQNAQALNTLVKQLSSNFGAISSVLNDILSRLDKVEAEVQIDRLITGRLQSLQTYVTQQLIRAAEIRASANLAATKMSECVLGQSKRFDFCGKGYHLMSFPQSAPHGVVFLHVTYVCAQEKNFTTAPAICHDGKAHFPREGVFVSNGTHWFVTQRNFYEPQIITTDNTFVSGNCDVVIGIVNNTVYDPLQPELDS

SEQ ID NO: 3125 - protein, 1147 aa, Artificial Sequence
  SARS-CoV-2/China/WF0028/2020__EPI_ISL_413791 spike protein (1-1147)(P715C_P1069C)
MFVFLVLLPLVSSQCVNLTTRTQLPPAYTNSFTRGVYYPDKVFRSSVLHSTQDLFLPFFSNVTWFHAIHVSGTNGTKRFDNPVLPFNDGVYFASTEKSNIIRGWIFGTTLDSKTQSLLIVNNATNVVIKVCEFQFCNDPFLGVYYHKNNKSWMESEFRVYSSANNCTFEYVSQPFLMDLEGKQGNFKNLREFVFKNIDGYFKIYSKHTPINLVRDLPQGFSALEPLVDLPIGINITRFQTLLALHRSYLTPGDSSSGWTAGAAAYYVGYLQPRTFLLKYNENGTITDAVDCALDPLSETKCTLKSFTVEKGIYQTSNFRVQPTESIVRFPNITNLCPFGEVFNATRFASVYAWNRKRISNCVADYSVLYNSASFSTFKCYGVSPTKLNDLCFTNVYADSFVIRGDEVRQIAPGQTGKIADYNYKLPDDFTGCVIAWNSNNLDSKVGGNYNYLYRLFRKSNLKPFERDISTEIYQAGSTPCNGVEGFNCYFPLQSYGFQPTNGVGYQPYRVVVLSFELLHAPATVCGPKKSTNLVKNKCVNFNFNGLTGTGVLTESNKKFLPFQQFGRDIADTTDAVRDPQTLEILDITPCSFGGVSVITPGTNTSNQVAVLYQDVNCTEVPVAIHADQLTPTWRVYSTGSNVFQTRAGCLIGAEHVNNSYECDIPIGAGICASYQTQTNSPRRARSVASQSIIAYTMSLGAENSVAYSNNSIAICTNFTISVTTEILPVSMTKTSVDCTMYICGDSTECSNLLLQYGSFCTQLNRALTGIAVEQDKNTQEVFAQVKQIYKTPPIKDFGGFNFSQILPDPSKPSKRSFIEDLLFNKVTLADAGFIKQYGDCLGDIAARDLICAQKFNGLTVLPPLLTDEMIAQYTSALLAGTITSGWTFGAGAALQIPFAMQMAYRFNGIGVTQNVLYENQKLIANQFNSAIGKIQDSLSSTASALGKLQDVVNQNAQALNTLVKQLSSNFGAISSVLNDILSRLDKVEAEVQIDRLITGRLQSLQTYVTQQLIRAAEIRASANLAATKMSECVLGQSKRVDFCGKGYHLMSFPQSAPHGVVFLHVTYVCAQEKNFTTAPAICHDGKAHFPREGVFVSNGTHWFVTQRNFYEPQIITTDNTFVSGNCDVVIGIVNNTVYDPLQPELES

SEQ ID NO: 3126 - protein, 1147 aa, Artificial Sequence
  SARS-CoV-2/2019-nCoV/USA-CruiseA-18/2020__MT159716.1 spike protein (1-1147)(P715C_P1069C)
MFVFLVLLPLVSSQCVNLTTRTQLPPAYTNSFTRGVYYPDKVFRSSVLHSTQDLFLPFFSNVTWFHAIHVSGTNGTKRFDNPVLPFNDGVYFASTEKSNIIRGWIFGTTLDSKTQSLLIVNNATNVVIKVCEFQFCNDPFLGVYYHKNNKSWMESELRVYSSANNCTFEYVSQPFLMDLEGKQGNFKNLREFVFKNIDGYFKIYSKHTPINLVRDLPQGFSALEPLVDLPIGINITRFQTLLALHRSYLTPGDSSSGWTAGAAAYYVGYLQPRTFLLKYNENGTITDAVDCALDPLSETKCTLKSFTVEKGIYQTSNFRVQPTESIVRFPNITNLCPFGEVFNATRFASVYAWNRKRISNCVADYSVLYNSASFSTFKCYGVSPTKLNDLCFTNVYADSFVIRGDEVRQIAPGQTGKIADYNYKLPDDFTGCVIAWNSNNLDSKVGGNYNYLYRLFRKSNLKPFERDISTEIYQAGSTPCNGVEGFNCYFPLQSYGFQPTNGVGYQPYRVVVLSFELLHAPATVCGPKKSTNLVKNKCVNFNFNGLTGTGVLTESNKKFLPFQQFGRDIADTTDAVRDPQTLEILDITPCSFGGVSVITPGTNTSNQVAVLYQDVNCTEVPVAIHADQLTPTWRVYSTGSNVFQTRAGCLIGAEHVNNSYECDIPIGAGICASYQTQTNSPRRARSVASQSIIAYTMSLGAENSVAYSNNSIAICTNFTISVTTEILPVSMTKTSVDCTMYICGDSTECSNLLLQYGSFCTQLNRALTGIAVEQDKNTQEVFAQVKQIYKTPPIKDFGGFNFSQILPDPSKPSKRSFIEDLLFNKVTLADAGFIKQYGDCLGDIAARDLICAQKFNGLTVLPPLLTDEMIAQYTSALLAGTITSGWTFGAGAALQIPFAMQMAYRFNGIGVTQNVLYENQKLIANQFNSAIGKIQDSLSSTASALGKLQDVVNQNAQALNTLVKQLSSNFGAISSVLNDILSRLDKVEAEVQIDRLITGRLQSLQTYVTQQLIRAAEIRASANLAATKMSECVLGQSKRVDFCGKGYHLMSFPQSAPHGVVFLHVTYVCAQEKNFTTAPAICHDGKAHFPREGVFVSNGTHWFVTQRNFYEPQIITTDNTFVSGNCDVVIGIVNNTVYDPLQPELDS

SEQ ID NO: 3127 - protein, 1147 aa, Artificial Sequence
  SARS-CoV-2/SARS-CoV-2/Yunnan-01/human/2020/CHN__MT049951.1 spike protein (1-1147)(P715C_P1069C)
MFVFLVLLPLVSSQCVNLTTRTQLPPANTNSFTRGVYYPDKVFRSSVLHSTQDLFLPFFSNVTWFHAIHVSGTNGTKRFDNPVLPFNDGVYFASTEKSNIIRGWIFGTTLDSKTQSLLIVNNATNVVIKVCEFQFCNDPFLGVYYHKNNKSWMESEFRVYSSANNCTFEYVSQPFLMDLEGKQGNFKNLREFVFKNIDGYFKIYSKHTPINLVRDLPQGFSALEPLVDLPIGINITRFQTLLALHRSYLTPGDSSSGWTAGAAAYYVGYLQPRTFLLKYNENGTITDAVDCALDPLSETKCTLKSFTVEKGIYQTSNFRVQPTESIVRFPNITNLCPFGEVFNATRFASVYAWNRKRISNCVADYSVLYNSASFSTFKCYGVSPTKLNDLCFTNVYADSFVIRGDEVRQIAPGQTGKIADYNYKLPDDFTGCVIAWNSNNLDSKVGGNYNYLYRLFRKSNLKPFERDISTEIYQAGSTPCNGVEGFNCYFPLQSYGFQPTNGVGYQPYRVVVLSFELLHAPATVCGPKKSTNLVKNKCVNFNFNGLTGTGVLTESNKKFLPFQQFGRDIADTTDAVRDPQTLEILDITPCSFGGVSVITPGTNTSNQVAVLYQDVNCTEVPVAIHADQLTPTWRVYSTGSNVFQTRAGCLIGAEHVNNSYECDIPIGAGICASYQTQTNSPRRARSVASQSIIAYTMSLGAENSVAYSNNSIAICTNFTISVTTEILPVSMTKTSVDCTMYICGDSTECSNLLLQYGSFCTQLNRALTGIAVEQDKNTQEVFAQVKQIYKTPPIKDFGGFNFSQILPDPSKPSKRSFIEDLLFNKVTLADAGFIKQYGDCLGDIAARDLICAQKFNGLTVLPPLLTDEMIAQYTSALLAGTITSGWTFGAGAALQIPFAMQMAYRFNGIGVTQNVLYENQKLIANQFNSAIGKIQDSLSSTASALGKLQDVVNQNAQALNTLVKQLSSNFGAISSVLNDILSRLDKVEAEVQIDRLITGRLQSLQTYVTQQLIRAAEIRASANLAATKMSECVLGQSKRVDFCGKGYHLMSFPQSAPHGVVFLHVTYVCAQEKNFTTAPAICHDGKAHFPREGVFVSNGTHWFVTQRNFYEPQIITTDNTFVSGNCDVVIGIVNNTVYDPLQPELDS

SEQ ID NO: 3128 - protein, 1147 aa, Artificial Sequence
  SARS-CoV-2/USA/WA-UW292/2020__EPI_ISL_418077 spike protein (1-1147)(P715C_P1069C)
MFVFLVLLPLVSSQCVNLTTRTQLPPAYTNSFTRGVYYPDKVFRSSVLHSTQDLFLPFFSNVTWFHAIHVSGTNGTKRFDNPVLPFNDGVYFASTEKSNIIRGWIFGTTLDSKTQSLLIVNNATNVVIKVCEFQFCNDPFLGVYYHKNNKSWMESEFRVYSSANNCTFEYVSQPFLMDLEGKQGNFKNLREFVFKNIDGYFKIYSKHTPINLVRDLPQGFSALEPLVDLPIGINITRFQTLLALHRSYLTPGDSSSGWTAGAAAYYVGYLQPRTFLLKYNENGTITDAVDCALDPLSETKCTLKSFTVEKGIYQTSNFRVQPTESIVRFPNITNLCPFGEVFNATRFASVYAWNRKRISNCVADYSVLYNSASFSTFKCYGVSPTKLNDLCFTNVYADSFVIRGDEVRQIAPGQTGKIADYNYKLPDDFTGCVIAWNSNNLDSKVGGNYNYLYRLFRKSNLKPFERDISTEIYQASSTPCNGVEGFNCYFPLQSYGFQPTNGVGYQPYRVVVLSFELLHAPATVCGPKKSTNLVKNKCVNFNFNGLTGTGVLTESNKKFLPFQQFGRDIADTTDAVRDPQTLEILDITPCSFGGVSVITPGTNTSNQVAVLYQDVNCTEVPVAIHADQLTPTWRVYSTGSNVFQTRAGCLIGAEHVNNSYECDIPIGAGICASYQTQTNSPRRARSVASQSIIAYTMSLGAENSVAYSNNSIAICTNFTISVTTEILPVSMTKTSVDCTMYICGDSTECSNLLLQYGSFCTQLNRALTGIAVEQDKNTQEVFAQVKQIYKTPPIKDFGGFNFSQILPDPSKPSKRSFIEDLLFNKVTLADAGFIKQYGDCLGDIAARDLICAQKFNGLTVLPPLLTDEMIAQYTSALLAGTITSGWTFGAGAALQIPFAMQMAYRFNGIGVTQNVLYENQKLIANQFNSAIGKIQDSLSSTASALGKLQDVVNQNAQALNTLVKQLSSNFGAISSVLNDILSRLDKVEAEVQIDRLITGRLQSLQTYVTQQLIRAAEIRASANLAATKMSECVLGQSKRVDFCGKGYHLMSFPQSAPHGVVFLHVTYVCAQEKNFTTAPAICHDGKAHFPREGVFVSNGTHWFVTQRNFYEPQIITTDNTFVSGNCDVVIGIVNNTVYDPLQPELDS

SEQ ID NO: 3129 - protein, 1147 aa, Artificial Sequence
  SARS-CoV-2/Iceland/192/2020__EPI_ISL_417819 spike protein (1-1147)(P715C_P1069C)
MFVFFVLLPLVSSQCVNLTTRTQLPPAYTNSFTRGVYYPDKVFRSSVLHSTQDLFLPFFSNVTWFHAIHVSGTNGTKRFDNPVLPFNDGVYFASTEKSNIIRGWIFGTTLDSKTQSLLIVNNATNVVIKVCEFQFCNDPFLGVYYHKNNKSWMESEFRVYSSANNCTFEYVSQPFLMDLEGKQGNFKNLREFVFKNIDGYFKIYSKHTPINLVRDLPQGFSALEPLVDLPIGINITRFQTLLALHRSYLTPGDSSSGWTAGAAAYYVGYLQPRTFLLKYNENGTITDAVDCALDPLSETKCTLKSFTVEKGIYQTSNFRVQPTESIVRFPNITNLCPFGEVFNATRFASVYAWNRKRISNCVADYSVLYNSASFSTFKCYGVSPTKLNDLCFTNVYADSFVIRGDEVRQIAPGQTGKIADYNYKLPDDFTGCVIAWNSNNLDSKVGGNYNYLYRLFRKSNLKPFERDISTEIYQAGSTPCNGVEGFNCYFPLQSYGFQPTNGVGYQPYRVVVLSFELLHAPATVCGPKKSTNLVKNKCVNFNFNGLTGTGVLTESNKKFLPFQQFGRDIADTTDAVRDPQTLEILDITPCSFGGVSVITPGTNTSNQVAVLYQGVNCTEVPVAIHADQLTPTWRVYSTGSNVFQTRAGCLIGAEHVNNSYECDIPIGAGICASYQTQTNSPRRARSVASQSIIAYTMSLGAENSVAYSNNSIAICTNFTISVTTEILPVSMTKTSVDCTMYICGDSTECSNLLLQYGSFCTQLNRALTGIAVEQDKNTQEVFAQVKQIYKTPPIKDFGGFNFSQILPDPSKPSKRSFIEDLLFNKVTLADAGFIKQYGDCLGDIAARDLICAQKFNGLTVLPPLLTDEMIAQYTSALLAGTITSGWTFGAGAALQIPFAMQMAYRFNGIGVTQNVLYENQKLIANQFNSAIGKIQDSLSSTASALGKLQDVVNQNAQALNTLVKQLSSNFGAISSVLNDILSRLDKVEAEVQIDRLITGRLQSLQTYVTQQLIRAAEIRASANLAATKMSECVLGQSKRVDFCGKGYHLMSFPQSAPHGVVFLHVTYVCAQEKNFTTAPAICHDGKAHFPREGVFVSNGTHWFVTQRNFYEPQIITTDNTFVSGNCDVVIGIVNNTVYDPLQPELDS

SEQ ID NO: 3130 - protein, 1147 aa, Artificial Sequence
  SARS-CoV-2/Belgium/ULG-6939/2020__EPI_ISL_417020 spike protein (1-1147)(P715C_P1069C)
MFVFLVLLPLVSSQCVNLTTRTQLPPAYTNSFTRGVYYPDKVFRSSVLHSTQDLFLPFFSNVTWFHAIHVSGTNGTKRFDNPVLPFNDGVYFASTEKSNIIRGWIFGTTLDSKTQSLLIVNNATNVVIKVCEFQFCNDPFLGVYYHKNNKSWMESEFRVYSSANNCTFEYVSQPFLMDLEGKQGNFKNLREFVFKNIDGYFKIYSKHTPINLVRDLPQGFSALEPLVDLPIGINITRFQTLLALHRSYLTPGDSSSGWTAGAAAYYVGYLQPRTFLLKYNENGTITDAVDCALDPLSETKCTLKSFTVEKGIYQTSNFRVQPTESIVRFPNITNLCPFGEVFNATRFASVYAWNRKRISNCVADYSVLYNSASFSTFKCYGVSPTKLNDLCFTNVYADSFVIRGDEVRQIAPGQTGKIADYNYKLPDDFTGCVIAWNSNNLDSKVGGNYNYLYRLFRKSNLKPFERDISTEIYQAGSTPCNGVEGFNCYFPLQSYGFQPTNGVGYQPYRVVVLSFELLHAPATVCGPKKSTNLVKNKCVNFNFNGLTGTGVLTESNKKFLPFQQFGRDIADTTDAVRDPQTLEILDITPCSFGGVSVITPGTNTSNQVAVLYQGVNCTEVPVAIHADQLTPTWRVYSTGSNVFQTRAGCLIGAEHVNNSYECDIPIGAGICASYQTQTNSPRRARSVASQSIIAYTMSLGAENSVVYSNNSIAICTNFTISVTTEILPVSMTKTSVDCTMYICGDSTECSNLLLQYGSFCTQLNRALTGIAVEQDKNTQEVFAQVKQIYKTPPIKDFGGFNFSQILPDPSKPSKRSFIEDLLFNKVTLADAGFIKQYGDCLGDIAARDLICAQKFNGLTVLPPLLTDEMIAQYTSALLAGTITSGWTFGAGAALQIPFAMQMAYRFNGIGVTQNVLYENQKLIANQFNSAIGKIQDSLSSTASALGKLQDVVNQNAQALNTLVKQLSSNFGAISSVLNDILSRLDKVEAEVQIDRLITGRLQSLQTYVTQQLIRAAEIRASANLAATKMSECVLGQSKRVDFCGKGYHLMSFPQSAPHGVVFLHVTYVCAQEKNFTTAPAICHDGKAHFPREGVFVSNGTHWFVTQRNFYEPQIITTDNTFVSGNCDVVIGIVNNTVYDPLQPELDS

SEQ ID NO: 3131 - protein, 1147 aa, Artificial Sequence
  SARS-CoV-2/France/HF2496/2020__EPI_ISL_418231 spike protein (1-1147)(P715C_P1069C)
MFVFLVLLPLVSSQCVNLTTRTQLPPAYTNSFTRGVYYPDKVFRSSVLHSTQDLFLPFFSNVTWFHAIHVSGTNGTKRFDNPVLPFNDGVYFASTEKSNIIRGWIFGTTLDSKTQSLLIVNNATNVVIKVCEFQFCNDPFLGVYYHKNNKSWMESEFRVYSSANNCTFEYVSQPFLMDLEGKQGNFKNLREFVFKNIDGYFKIYSKHTPINLVRDLPQGFSALEPLVDLPIGINITRFQTLLALHRSYLTPGDSSSGWTAGAAAYYVGYLQPRTFLLKYNENGTITDAVDCALDPLSETKCTLKSFTVEKGIYQTSNFRVQPTESIVRFPNITNLCPFGEVFNATRFASVYAWNRKRISNCVADYSVLYNSASFSTFKCYGVSPTKLNDLCFTNVYADSFVIRGDEVRQIAPGQTGKIADYNYKLPDDFTGCVIAWNSNNLDSKVGGNYNYLYRLFRKSNLKPFERDISTEIYQAGSTPCNGVEGFNCYFPLQSYGFQPTNGVGYQPYRVVVLSFELLHAPATVCGPKKSTNLVKNKCVNFNFNGLTGTGVLTESNKKFLPFQQFGRDIADTTDAVRDPQTLEILDITPCSFGGVSVITPGTNTSNQVAVLYQGVNCTEVPVAIHADQLTPTWRVYSTGSNVFQTRAGCLIGAEHVNNSYECDIPIGAGICASYQTQTNSPRRARSVASQSIIAYTMSLGAENSVAYSNNSIAICTNFTISVTTEILPVSMTKTSVDCTMYICGDSTECSNLLLQYGSFCTQLNRALTGIAVEQDKNTQEVFAQVKQIYKTPPIKDFGGFNFSQILPDPSKPSKRSFIEDLLFNKVTLADAGFIKQYGDCLGDIVARDLICAQKFNGLTVLPPLLTDEMIAQYTSALLAGTITSGWTFGAGAALQIPFAMQMAYRFNGIGVTQNVLYENQKLIANQFNSAIGKIQDSLSSTASALGKLQDVVNQNAQALNTLVKQLSSNFGAISSVLNDILSRLDKVEAEVQIDRLITGRLQSLQTYVTQQLIRAAEIRASANLAATKMSECVLGQSKRVDFCGKGYHLMSFPQSAPHGVVFLHVTYVCAQEKNFTTAPAICHDGKAHFPREGVFVSNGTHWFVTQRNFYEPQIITTDNTFVSGNCDVVIGIVNNTVYDPLQPELDS

SEQ ID NO: 3132 - protein, 1147 aa, Artificial Sequence
  SARS-CoV-2/USA/WA-UW291/2020__EPI_ISL_418076 spike protein (1-1147)(P715C_P1069C)
MFVFLVLLPLVSSQCVNLTTRTQLPPAYTNSFTRGVYYPDKVFRSSVLHSTQDLFLPFFSNVTWFHAIHVSGTNGTKRFDNPVLPFNDGVYFASTEKSNIIRGWIFGTTLDSKTQSLLIVNNATNVVIKVCEFQFCNDPFLGVYYHKNNKSWMESEFRVYSSANNCTFEYVSQPFLMDLEGKQGNFKNLREFVFKNIDGYFKIYSKHTPINLVRDLPQGFSALEPLVDLPIGINITRFQTLLALHRSYLTPGDSSSGWTAGAAAYYVGYLQPRTFLLKYNENGTITDAVDCALDPLSETKCTLKSFTVEKGIYQTSNFRVQPTESIVRFPNITNLCPFGEVFNATRFASVYAWNRKRISNCVADYSVLYNSASFSTFKCYGVSPTKLNDLCFTNVYADSFVIRGDEVRQIAPGQTGKIADYNYKLPDDFTGCVIAWNSNNLDSKVGGNYNYLYRLFRKSNLKPFERDISTEIYQAGSTPCNGVEGFNCYFPLQSYGFQPTNGVGYQPYRVVVLSFELLHAPATVCGPKKSTNLVKNKCVNFNFNGLTGTGVLTESNKKFLPFQQFGRDIADTTDAVRDPQTLEILDITPCSFGGVSVITPGTNTSNQVAVLYQGVNCTEVPVAIHADQLTPTWRVYSTGSNVFQTRAGCLIGAEHVNNSYECDIPIGAGICASYQTQTNSPRRARSVASQSIIAYTMSLGAENSVAYSNNSIAICTNFTISVTTEILPVSMTKTSVDCTMYICGDSTECSNLLLQYGSFCTQLNRALTGIAVEQDKNTQEVFAQVKQIYKTPPIKDFGGFNFSQILPDPSKPSKRSFIEDLLFNKVTLADAGFIKQYGDCLGDIAARDLICAQKFNGLTVLPPLLTDEMIAQYTSALLAGTITSGWTFGAGAALQIPFAMQMAYRFNGIGVTQNVLYENQKLIANQFNSAIGKIQYSLSSTASALGKLQDVVNQNAQALNTLVKQLSSNFGAISSVLNDILSRLDKVEAEVQIDRLITGRLQSLQTYVTQQLIRAAEIRASANLAATKMSECVLGQSKRVDFCGKGYHLMSFPQSAPHGVVFLHVTYVCAQEKNFTTAPAICHDGKAHFPREGVFVSNGTHWFVTQRNFYEPQIITTDNTFVSGNCDVVIGIVNNTVYDPLQPELDS

SEQ ID NO: 3133 - protein, 1147 aa, Artificial Sequence; identical to SEQ ID NO: 3096
  SARS-CoV-2/Portugal/PT0034/2020__EPI_ISL_418019 spike protein (1-1147)(P715C_P1069C)

SEQ ID NO: 3134 - protein, 1147 aa, Artificial Sequence; identical to SEQ ID NO: 3088
  SARS-CoV-2/Iceland/202/2020__EPI_ISL_417750 spike protein (1-1147)(P715C_P1069C)

SEQ ID NO: 3135 - protein, 1147 aa, Artificial Sequence
  SARS-CoV-2/USA/WA-UW261/2020__EPI_ISL_418046 spike protein (1-1147)(P715C_P1069C)
MFVFLVLLPLVSSQCVNLTTRTQLPPAYTNSFTRGVYYPDKVFRSSVLHSTQDLFLPFFSNVTWFHAIHVSGTNGTKRFDNPVLPFNDGVYFASTEKSNIIRGWIFGTTLDSKTQSLLIVNNATNVVIKVCEFQFCNDPFLGVYYHKNNKSWMESEFRVYSSANNCTFEYVSQPFLMDLEGKQGNFKNLREFVFKNIDGYFKIYSKHTPINLVRDLPQGFSALEPLVDLPIGINITRFQTLLALHRSYLTPGDSSSGWTAGAAAYYVGYLQPRTFLLKYNENGTITDAVDCALDPLSETKCTLKSFTVEKGIYQTSNFRVQPTESIVRFPNITNLCPFGEVFNATRFTSVYAWNRKRISNCVADYSVLYNSASFSTFKCYGVSPTKLNDLCFTNVYADSFVIRGDEVRQIAPGQTGKIADYNYKLPDDFTGCVIAWNSNNLDSKVGGNYNYLYRLFRKSNLKPFERDISTEIYQAGSTPCNGVEGFNCYFPLQSYGFQPTNGVGYQPYRVVVLSFELLHAPATVCGPKKSTNLVKNKCVNFNFNGLTGTGVLTESNKKFLPFQQFGRDIADTTDAVRDPQTLEILDITPCSFGGVSVITPGTNTSNQVAVLYQDVNCTEVPVAIHADQLTPTWRVYSTGSNVFQTRAGCLIGAEHVNNSYECDIPIGAGICASYQTQTNSPRRARSVASQSIIAYTMSLGAENSVAYSNNSIAICTNFTISVTTEILPVSMTKTSVDCTMYICGDSTECSNLLLQYGSFCTQLNRALTGIAVEQDKNTQEVFAQVKQIYKTPPIKDFGGFNFSQILPDPSKPSKRSFIEDLLFNKVTLADAGFIKQYGDCLGDIAARDLICAQKFNGLTVLPPLLTDEMIAQYTSALLAGTITSGWTFGAGAALQIPFAMQMAYRFNGIGVTQNVLYENQKLIANQFNSAIGKIQDSLSSTASALGKLQDVVNQNAQALNTLVKQLSSNFGAISSVLNDILSRLDKVEAEVQIDRLITGRLQSLQTYVTQQLIRAAEIRASANLAATKMSECVLGQSKRVDFCGKGYHLMSFPQSAPHGVVFLHVTYVCAQEKNFTTAPAICHDGKAHFPREGVFVSNGTHWFVTQRNFYEPQIITTDNTFVSGNCDVVIGIVNNTVYDPLQPELDS

SEQ ID NO: 3136 - protein, 1147 aa, Artificial Sequence
  SARS-CoV-2/Portugal/PT0035/2020__EPI_ISL_418020 spike protein (1-1147)(P715C_P1069C)
MFVFLVLLPLVSSQCVNLTTRTQLPPAYTNSFTRGVYYPDKVFRSSVLHSTQDLFLPFFSNVTWFHAIHVSGTNGTKRFDNPVLPFNDGVYFASTEKSNIIRGWIFGTTLDSKTQSLLIVNNATNVVIKVCEFQFCNDPFLGVYYHKNNKSWMESEFRVYSSANNCTFEYVSQPFLMDLEGKQGNFKNLREFVFKNIDGYFKIYSKHTPINLVRDLPQGFSALEPLVDLPIGINITRFQTLLALHRSYLTPGDSSSGWTAGAAAYYVGYLQPRTFLLKYNENGTITDAVDCALDPLSETKCTLKSFTVEKGIYQTSNFRVQPTESIVRFPNITNLCPFGEVFNATRFASVYAWNRKRISNCVADYSVLYNSASFSTFKCYGVSPTKLNDLCFTNVYADSFVIRGDEVRQIAPGQTGKIADYNYKLPDDFTGCVIAWNSNNLDSKVGGNYNYLYRLFRKSNLKPFERDISTEIYQAGSTPCNGVEGFNCYFPLQSYGFQPTNGVGYQPYRVVVLSFELLHAPATVCGPKKSTNLVKNKCVNFNFNGLTGTGVLTESNKKFLPFQQFGRDIADTTDAVRDPQTLEILDITPCSFGGVSVITPGTNTSNQVAVLYQDVNCTEVPVAIHADQLTPTWRVYSTGSNVFQTRAGCLIGAEHVNNSYECDIPIGAGICASYQTQTNSPRRARSVASQSIIAYTMSLGAENSVAYSNNSIAICTNFTISVTTEILPVSMTKTSVDCTMYICGDSTECSNLLLQYGSFCTQLNRALTGIAVEQDKNTQEVFAQVKQIYKTPPIKDFGGFNFSQILPDPSKPSKRSFIEDLLFNKVTLADAGFIKQYGDCLGDISARDLICAQKFNGLTVLPPLLTDEMIAQYTSALLAGTITSGWTFGAGAALQIPFAMQMAYRFNGIGVTQNVLYENQKLIANQFNSAIGKIQDSLSSTASALGKLQDVVNQNAQALNTLVKQLSSNFGAISSVLNDILSRLDKVEAEVQIDRLITGRLQSLQTYVTQQLIRAAEIRASANLAATKMSECVLGQSKRVDFCGKGYHLMSFPQSAPHGVVFLHVTYVCAQEKNFTTAPAICHDGKAHFPREGVFVSNGTHWFVTQRNFYEPQIITTDNTFVSGNCDVVIGIVNNTVYDPLQPELDS

SEQ ID NO: 3137 - protein, 1147 aa, Artificial Sequence
  SARS-CoV-2/USA/NY-NYUMC7/2020__EPI_ISL_418192 spike protein (1-1147)(P715C_P1069C)
MFVFLVLLPLVSSQCVNLTTRTQLPPAYTNSFTRGVYYPDKVFRSSVLHSTQDLFLPFFSNVTWFHAIHVSGTNGTKRFDNPVLPFNDGVYFASTEKSNIIRGWIFGTTLDSKTQSLLIVNNATNVVIKVCEFQFCNDPFLGVYHHKNNKSWMESEFRVYSSANNCTFEYVSQPFLMDLEGKQGNFKNLREFVFKNIDGYFKIYSKHTPINLVRDLPQGFSALEPLVDLPIGINITRFQTLLALHRSYLTPGDSSSGWTAGAAAYYVGYLQPRTFLLKYNENGTITDAVDCALDPLSETKCTLKSFTVEKGIYQTSNFRVQPTESIVRFPNITNLCPFGEVFNATRFASVYAWNRKRISNCVADYSVLYNSASFSTFKCYGVSPTKLNDLCFTNVYADSFVIRGDEVRQIAPGQTGKIADYNYKLPDDFTGCVIAWNSNNLDSKVGGNYNYLYRLFRKSNLKPFERDISTEIYQAGSTPCNGVEGFNCYFPLQSYGFQPTNGVGYQPYRVVVLSFELLHAPATVCGPKKSTNLVKNKCVNFNFNGLTGTGVLTESNKKFLPFQQFGRDIADTTDAVRDPQTLEILDITPCSFGGVSVITPGTNTSNQVAVLYQGVNCTEVPVAIHADQLTPTWRVYSTGSNVFQTRAGCLIGAEHVNNSYECDIPIGAGICASYQTQTNSPRRARSVASQSIIAYTMSLGAENSVAYSNNSIAICTNFTISVTTEILPVSMTKTSVDCTMYICGDSTECSNLLLQYGSFCTQLNRALTGIAVEQDKNTQEVFAQVKQIYKTPPIKDFGGFNFSQILPDPSKPSKRSFIEDLLFNKVTLADAGFIKQYGDCLGDIAARDLICAQKFNGLTVLPPLLTDEMIAQYTSALLAGTITSGWTFGAGAALQIPFAMQMAYRFNGIGVTQNVLYENQKLIANQFNSAIGKIQDSLSSTASALGKLQDVVNQNAQALNTLVKQLSSNFGAISSVLNDILSRLDKVEAEVQIDRLITGRLQSLQTYVTQQLIRAAEIRASANLAATKMSECVLGQSKRVDFCGKGYHLMSFPQSAPHGVVFLHVTYVCAQEKNFTTAPAICHDGKAHFPREGVFVSNGTHWFVTQRNFYEPQIITTDNTFVSGNCDVVIGIVNNTVYDPLQPELDS

SEQ ID NO: 3138 - protein, 1147 aa, Artificial Sequence
  SARS-CoV-2/Iceland/189/2020__EPI_ISL_417709 spike protein (1-1147)(P715C_P1069C)
MFVFLVLLPLVSSQCVNLTTRTQLPPAYTNSFTRGVYYPDKVFRSSVLHSTQDLFLPFFSNVTWFHAIHVSGTNGTKRFDNPVLPFNDGVYFASTEKSNIIRGWIFGTTLDSKTQSLLIVNNATNVVIKVCEFQFCNDPFLGVYYHKNNKSWMESEFRVYSSANNCTFEYVSQPFLMDLEGKQGNFKNLREFVFKNIDGYFKIYSKHTPINLVRDLPQGFSALEPLVDLPIGINITRFQTLLALHRSYLTPGDSSSGWTAGAAAYYVGYLQPRTFLLKYNENGTITDAVDCALDPLSETKCTLKSFTVEKGIYQTSNFRVQPTESIVRFPNITNLCPFGEVFNATRFASVYAWNRKRISNCVADYSVLYNSASFSTFKCYGVSPTKLNDLCFTNVYADSFVIRGDEVRQIAPGQTGKIADYNYKLPDDFTGCVIAWNSNNLDSKVGGNYNYLYRLFRKSNLKPFERDISTEIYQAGSTPCNGVEGFNCYFPLQSYGFQPTNGVGYQPYRVVVLSFELLHAPATVCGPKKSTNLVKNKCVNFNFNGLTGTGVLTESNKKFLPFQQFGRDIADTTDAVRDPQTLEILDITPCSFGGVSVITPGTNTSNQVAVLYQGVNCTEVPVAIHADQLTPTWRVYSTGSNVFQTRAGCLIGAEHVNNSYECDIPIGAGICASYQTQTNSPRRARSVASQSIIAYTMSLGAENSVAYSNNSIAICTNFTISVTTEILPVSMTKTSVDCTMYICGDSTECSNLLLQYGSFCTQLNRALTGIAVEQDKNTQEVFAQVKQIYKTPPIKDFGGFNFSQILPDPSKPSKRSFIEDLLFNKVTLADAGFTKQYGDCLGDIAARDLICAQKFNGLTVLPPLLTDEMIAQYTSALLAGTITSGWTFGAGAALQIPFAMQMAYRFNGIGVTQNVLYENQKLIANQFNSAIGKIQDSLSSTASALGKLQDVVNQNAQALNTLVKQLSSNFGAISSVLNDILSRLDKVEAEVQIDRLITGRLQSLQTYVTQQLIRAAEIRASANLAATKMSECVLGQSKRVDFCGKGYHLMSFPQSAPHGVVFLHVTYVCAQEKNFTTAPAICHDGKAHFPREGVFVSNGTHWFVTQRNFYEPQIITTDNTFVSGNCDVVIGIVNNTVYDPLQPELDS

SEQ ID NO: 3139 - protein, 1147 aa, Artificial Sequence
  SARS-CoV-2/Australia/NSW56/2020__EPI_ISL_417408 spike protein (1-1147)(P715C_P1069C)
MFVFLVLLPLVSSQCVNLTTRTQLPPAYTNSFTRGVYYPDKVFRSSVLHSTQDLFLPFFSNVTWFHAIHVSGTNGTKRFDNPVLPFNDGVYFASTEKSNIIRGWIFGTTLDSKTQSLLIVNNATNVVIKVCEFQFCNDPFLGVYYHKNNKSWMESEFRVYSSANNCTFEYVSQPFLMDLEGKQGNFKNLREFVFKNIDGYFKIYSKHTPINLVRDLPQGFSALEPLVDLPIGINITRFQTLLALHRSYLTPGDSSSGWTAGAAAYYVGYLQPRTFLLKYNENGTITDAVDCALDPLSETKCTLKSFTVEKGIYQTSNFRVQPTESIVRFPNITNLCPFGEVFNATRFASVYAWNRKRISNCVADYSVLYNSASFSTFKCYGVSPTKLNDLCFTNVYADSFVIRGDEVRQIAPGQTGKIADYNYKLPDDFTGCVIAWNSNNLDSKVGGNYNYLYRLFRKSNLKPFERDISTEIYQAGSTPCNGVEGFNCYFPLQSYGFQPTNGVGYQPYRVVVLSFELLHAPATVCGPKKSTNLVKNKCVNFNFNGLTGTGVLTESNKKFLPFQQFGRDIADTTDAVRDPQTLEILDITPCSFGGVSVITPGTNTSNQVAVLYQDVNCTEVPVAIHADQLTPTWRVYSTGSNVFQTRAGCLIGAEHVNNSYECDIPIGAGICASYQTQTNSPRRARSVASQSIIAYTMSLGAENSVAYSNNSIAICTNFTISVTTEILPVSMTKTSVDCTMYICGDSTECSNLLLQYGSFCTQLNRALTGIAVEQDKNTQEVFAQVKQIYKTPPIKDFGGFNFSQILPDSSKPSKRSFIEDLLFNKVTLADAGFIKQYGDCLGDIAARDLICAQKFNGLTVLPPLLTDEMIAQYTSALLAGTITSGWTFGAGAALQIPFAMQMAYRFNGIGVTQNVLYENQKLIANQFNSAIGKIQDSLSSTASALGKLQDVVNQNAQALNTLVKQLSSNFGAISSVLNDILSRLDKVEAEVQIDRLITGRLQSLQTYVTQQLIRAAEIRASANLAATKMSECVLGQSKRVDFCGKGYHLMSFPQSAPHGVVFLHVTYVCAQEKNFTTAPAICHDGKAHFPREGVFVSNGTHWFVTQRNFYEPQIITTDNTFVSGNCDVVIGIVNNTVYDPLQPELDS

SEQ ID NO: 3140 - protein, 1147 aa, Artificial Sequence
  SARS-CoV-2/Iceland/280/2020__EPI_ISL_417608 spike protein (1-1147)(P715C_P1069C)
MFVFLVLLPLVSSQCVNLTTRTQLPPAYTNSFTRGVYYPDKVFRSSVLHSTQDLFLPFFSNVTWFHAIHVSGTNGTKRFDNPVLPFNDGVYFASTEKSNIIRGWIFGTTLDSKTQSLLIVNNATNVVIKVCEFQFCNDPFLGVYYHKNNKSWMESEFRVYSSANNCTFEYVSQPFLMDLEGKQGNFKNLREFVFKNIDGYFKIYSKHTPINLVRDLPQGFSALEPLVDLPIGINITRFQTLLALHRSYLTPGDSSSGWTAGAAAYYVGYLQPRTFLLKYNENGTITDAVDCALDPLSETKCTLKSFTVEKGIYQTSNFRVQPTESIVRFPNITNLCPFGEVFNATRFASVYAWNRKRISNCVADYSVLYNSASFSTFKCYGVSPTKLNDLCFTNVYADSFVIRGDEVRQIAPGQTGKIADYNYKLPDDFTGCVIAWNSNNLDSKVGGNYNYLYRLFRKSNLKPFERDISTEIYQAGSTPCNGVEGFNCYFPLQSYGFQPTNGVGYQPYRVVVLSFELLHAPATVCGPKKSTNLVKNKCVNFNFNGLTGTGVLTESNKKFLPFQQFGRDIADTTDAVRDPQTLEILDITPCSFGGVSVITPGTNTSNQVAVLYQGVNCTEVPVAIHADQLTPTWRVYSTGSNVFQTRAGCLIGAEHVNNSYECDIPIGAGICASYHTQTNSPRRARSVASQSIIAYTMSLGAENSVAYSNNSIAICTNFTISVTTEILPVSMTKTSVDCTMYICGDSTECSNLLLQYGSFCTQLNRALTGIAVEQDKNTQEVFAQVKQIYKTPPIKDFGGFNFSQILPDPSKPSKRSFIEDLLFNKVTLADAGFIKQYGDCLGDIAARDLICAQKFNGLTVLPPLLTDEMIAQYTSALLAGTITSGWTFGAGAALQIPFAMQMAYRFNGIGVTQNVLYENQKLIANQFNSAIGKIQDSLSSTASALGKLQDVVNQNAQALNTLVKQLSSNFGAISSVLNDILSRLDKVEAEVQIDRLITGRLQSLQTYVTQQLIRAAEIRASANLAATKMSECVLGQSKRVDFCGKGYHLMSFPQSAPHGVVFLHVTYVCAQEKNFTTAPAICHDGKAHFPREGVFVSNGTHWFVTQRNFYEPQIITTDNTFVSGNCDVVIGIVNNTVYDPLQPELDS

SEQ ID NO: 3141 - protein, 1147 aa, Artificial Sequence; identical to SEQ ID NO: 3096
  SARS-CoV-2/Iceland/247/2020__EPI_ISL_417575 spike protein (1-1147)(P715C_P1069C)

SEQ ID NO: 3142 - protein, 1147 aa, Artificial Sequence
  SARS-CoV-2/Iceland/238/2020__EPI_ISL_417566 spike protein (1-1147)(P715C_P1069C)
MFVFLVLLPLVSSQCVNLTTRTQLPPAYTNSFTRGVYYPDKVFRSSVLHSTQDLFLPFFSNVTWFHAIHVSGTNGTKRFDNPVLPFNDGVYFASTEKSNIIRGWIFGTTLDSKTQSLLIVNNATNVVIKVCEFQFCNDPFLGVYYHKNNKSWMESEFRVYSSANNCTFEYVSQPFLMDLEGKQGNFKNLREFVFKNIDGYFKIYSKHTPINLVRDLPQGFSALEPLVDLPIGINITRFQTLLALHRSYLTPGDSSSGWTAGAAAYYVGYLQPRTFLLKYNENGTITDAVDCALDPLSETKCTLKSFTVEKGIYQTSNFRVQPTESIVRFPNITNLCPFGEVFNATRFASVYAWNRKRISNCVADYSVLYNSASFSTFKCYGVSPTKLNDLCFTNVYADSFVIRGDEVRQIAPGQTGKIADYNYKLPDDFTGCVIAWNSNNLDSKVGGNYNYLYRLFRKSNLKPFERDISTEIYQAGSTPCNGVEGFNCYFPLQSYGFQPTNGVGYQPYRVVVLSFELLHAPATVCGPKKSTNLVKNKCVNFNFNGLTGTGVLTESNKKFLPFQQFGRDIADTTDAVRDPQTLEILDITPCSFGGVSVITPGTNTSNQVAVLYQGVNCTEVPVAIHADQLTPTWRVYSTGSNVFQTRAGCLIGAEHVNNSYECDIPIGAGICASYQTQTNSPRRARSVASQSIIAYTMSLGAENSVAYSNNSIAICTNFTISVTTEILPVSMTKTSVDCTMYICGDSTECSNLLLQYGSFCTQLNRALTGIAVEQDKNTQEVFAQVKQIYKTPPIKDFGGFNFSQILPDPSKPSKRSFIEDLLFNKVTLADVGFIKQYGDCLGDIAARDLICAQKFNGLTVLPPLLTDEMIAQYTSALLAGTITSGWTFGAGAALQIPFAMQMAYRFNGIGVTQNVLYENQKLIANQFNSAIGKIQDSLSSTASALGKLQDVVNQNAQALNTLVKQLSSNFGAISSVLNDILSRLDKVEAEVQIDRLITGRLQSLQTYVTQQLIRAAEIRASANLAATKMSECVLGQSKRVDFCGKGYHLMSFPQSAPHGVVFLHVTYVCAQEKNFTTAPAICHDGKAHFPREGVFVSNGTHWFVTQRNFYEPQIITTDNTFVSGNCDVVIGIVNNTVYDPLQPELDS

SEQ ID NO: 3143 - protein, 1147 aa, Artificial Sequence
  SARS-CoV-2/Greece/16/2020__EPI_ISL_418265 spike protein (1-1147)(P715C_P1069C)
MFVFLVLLPLVSSQCVNLTTRTQLPPAYTNSFTRGVYYPDKVFRSSVLHSTQDLFLPFFSNVTWFHAIHVSGTNGTKRFDNPVLPFNDGVYFASTEKSNIIRGWIFGTTLDSKTQSLLIVNNATNVVIKVCEFQFCNDPFLGVYYHKNNKSWMESEFRVYSSANNCTFEYVSQPFLMDLEGKQGNFKNLREFVFKNVDGYFKIYSKHTPINLVRDLPQGFSALEPLVDLPIGINITRFQTLLALHRSYLTPGDSSSGWTAGAAAYYVGYLQPRTFLLKYNENGTITDAVDCALDPLSETKCTLKSFTVEKGIYQTSNFRVQPTESIVRFPNITNLCPFGEVFNATRFASVYAWNRKRISNCVADYSVLYNSASFSTFKCYGVSPTKLNDLCFTNVYADSFVIRGDEVRQIAPGQTGKIADYNYKLPDDFTGCVIAWNSNNLDSKVGGNYNYLYRLFRKSNLKPFERDISTEIYQAGSTPCNGVEGFNCYFPLQSYGFQPTNGVGYQPYRVVVLSFELLHAPATVCGPKKSTNLVKNKCVNFNFNGLTGTGVLTESNKKFLPFQQFGRDIADTTDAVRDPQTLEILDITPCSFGGVSVITPGTNTSNQVAVLYQDVNCTEVPVAIHADQLTPTWRVYSTGSNVFQTRAGCLIGAEHVNNSYECDIPIGAGICASYQTQTNSPRRARSVASQSIIAYTMSLGAENSVAYSNNSIAICTNFTISVTTEILPVSMTKTSVDCTMYICGDSTECSNLLLQYGSFCTQLNRALTGIAVEQDKNTQEVFAQVKQIYKTPPIKDFGGFNFSQILPDPSKPSKRSFIEDLLFNKVTLADAGFIKQYGDCLGDIAARDLICAQKFNGLTVLPPLLTDEMIAQYTSALLAGTITSGWTFGAGAALQIPFAMQMAYRFNGIGVTQNVLYENQKLIANQFNSAIGKIQDSLSSTASALGKLQDVVNQNAQALNTLVKQLSSNFGAISSVLNDILSRLDKVEAEVQIDRLITGRLQSLQTYVTQQLIRAAEIRASANLAATKMSECVLGQSKRVDFCGKGYHLMSFPQSAPHGVVFLHVTYVCAQEKNFTTAPAICHDGKAHFPREGVFVSNGTHWFVTQRNFYEPQIITTDNTFVSGNCDVVIGIVNNTVYDPLQPELDS

SEQ ID NO: 3144 - protein, 1147 aa, Artificial Sequence
  SARS-CoV-2/Iceland/319/2020__EPI_ISL_417648 spike protein (1-1147)(P715C_P1069C)
MFVFLVLLPLVSSQCVNLTTRTQLPPAYTNSFTRGVYYPDKVFRSSVLHSTQDLFLPFFSNVTWFHAIHVSGTNGTKRFDNPVLPFNDGVYFASTEKSNIIRGWIFGTTLDSKTQSLLIVNNATNVVIKVCEFQFCNDPFLGVYYHKNNKSWMESEFRVYSSANNCTFEYVSQPFLIDLEGKQGNFKNLREFVFKNIDGYFKIYSKHTPINLVRDLPQGFSALEPLVDLPIGINITRFQTLLALHRSYLTPGDSSSGWTAGAAAYYVGYLQPRTFLLKYNENGTITDAVDCALDPLSETKCTLKSFTVEKGIYQTSNFRVQPTESIVRFPNITNLCPFGEVFNATRFASVYAWNRKRISNCVADYSVLYNSASFSTFKCYGVSPTKLNDLCFTNVYADSFVIRGDEVRQIAPGQTGKIADYNYKLPDDFTGCVIAWNSNNLDSKVGGNYNYLYRLFRKSNLKPFERDISTEIYQAGSTPCNGVEGFNCYFPLQSYGFQPTNGVGYQPYRVVVLSFELLHAPATVCGPKKSTNLVKNKCVNFNFNGLTGTGVLTESNKKFLPFQQFGRDIADTTDAVRDPQTLEILDITPCSFGGVSVITPGTNTSNQVAVLYQGVNCTEVPVAIHADQLTPTWRVYSTGSNVFQTRAGCLIGAEHVNNSYECDIPIGAGICASYQTQTNSPRRARSVASQSIIAYTMSLGAENSVAYSNNSIAICTNFTISVTTEILPVSMTKTSVDCTMYICGDSTECSNLLLQYGSFCTQLNRALTGIAVEQDKNTQEVFAQVKQIYKTPPIKDFGGFNFSQILPDPSKPSKRSFIEDLLFNKVTLADAGFIKQYGDCLGDIAARDLICAQKFNGLTVLPPLLTDEMIAQYTSALLAGTITSGWTFGAGAALQIPFAMQMAYRFNGIGVTQNVLYENQKLIANQFNSAIGKIQDSLSSTASALGKLQDVVNQNAQALNTLVKQLSSNFGAISSVLNDILSRLDKVEAEVQIDRLITGRLQSLQTYVTQQLIRAAEIRASANLAATKMSECVLGQSKRVDFCGKGYHLMSFPQSAPHGVVFLHVTYVCAQEKNFTTAPAICHDGKAHFPREGVFVSNGTHWFVTQRNFYEPQIITTDNTFVSGNCDVVIGIVNNTVYDPLQPELDS

SEQ ID NO: 3145 - protein, 1147 aa, Artificial Sequence
  SARS-CoV-2/Congo/94/2020__EPI_ISL_417947 spike protein (1-1147)(P715C_P1069C)
MFVFLVLLPLVSSQCVNLTTRTQLPPAYTNSFTRGVYYPDKVFRSSVLHSTQDLFLPFFSNVTWFHAIHVSGTNGTKRFDNPVLPFNDGVYFASTEKSNIIRGWIFGTTLDSKTQSLLIVNNATNVVIKVCEFQFCNDPFLGVYYHKNNKSWMESEFRVYSSANNCTFEYVSQPFLMDLEGKQGNFKNLREFVFKNIDGYFKIYSKHTPINLVRDLPQGFSALEPLVDLPIGINITRFQTLLALHRSYLTPGDSSSGWTAGAAAYYVGYLQPRTFLLKYNENGTITDAVDCALDPLSETKCTLKSFTVEKGIYQTSNFRVQPTESIVRFPNITNLCPFGEVFNATRFASVYAWNRKRISNCVADYSVLYNSASFSTFKCYGVSPTKLNDLCFTNVYADSFVIRGDEVRQIAPGQTGKIADYNYKLPDDFTGCVIAWNSNNLDSKVGGNYNYLYRLFRKSNLKPFERDISTEIYQAGSTPCNGVEGFNCYFPLQSYGFQPTNGVGYQPYRVVVLSFELLHAPATVCGPKKSTNLVKNKCVNFNFNGLTGTGVLTESNKKFLPFQQFGRDIADTTDAVRDPQTLEILDITPCSFGGVSVITPGTNTSNQVAVLYQGVNCTEVPVAIHADQLTPTWRVYSTGSNVFQTRAGCLIGAEHVNNSYECDIPIGAGICASYQTQTNSPRRARSVASQSIIAYTMSLGAENSVAYSNNSIAICTNFTISVTTEILPVSMTKTSVDCTMYICGDSTECSNLLLQYGSFCTQLNRALTGIAVEQDKNTQEVFAQVKQIYKTPPIKDFGGFNFSQILPDPSKPSKRSFIEDILFNKVTLADAGFIKQYGDCLGDIAARDLICAQKFNGLTVLPPLLTDEMIAQYTSALLAGTITSGWTFGAGAALQIPFAMQMAYRFNGIGVTQNVLYENQKLIANQFNSAIGKIQDSLSSTASALGKLQDVVNQNAQALNTLVKQLSSNFGAISSVLNDILSRLDKVEAEVQIDRLITGRLQSLQTYVTQQLIRAAEIRASANLAATKMSECVLGQSKRVDFCGKGYHLMSFPQSAPHGVVFLHVTYVCAQEKNFTTAPAICHDGKAHFPREGVFVSNGTHWFVTQRNFYEPQIITTDNTFVSGNCDVVIGIVNNTVYDPLQPELDS

SEQ ID NO: 3146 - protein, 1147 aa, Artificial Sequence
  SARS-CoV-2/Congo/158/2020__EPI_ISL_417950 spike protein (1-1147)(P715C_P1069C)
MFVFLVLLPLVSSQCVNLTTRTQLPPAYTNSFTRGVYYPDKVFRSSVLHSTQDLFLPFFSNVTWFHAIHVSGTNGTKRFDNPVLPFNDGVYFASTEKSNIIRGWIFGTTLDSKTQSLLIVNNATNVVIKVCEFQFCNDPFLGVYYHKNNKSWMESEFRVYSSANNCTFEYVSQPFLMDLEGKQGNFKNLREFVFKNIDGYFKIYSKHTPINLVRDLPQGFSALEPLVDLPIGINITRFQTLLALHRSYLTPGDSSSGWTAGAAAYYVGYLQPRTFLLKYNENGTITDAVDCALDPLSETKCTLKSFTVEKGIYQTSNFRVQPTESIVRFPNITNLCPFGEVFNATRFASVYAWNRKRISNCVADYSVLYNSASFSTFKCYGVSPTKLNDLCFTNVYADSFVIRGDEVRQIAPGQTGKIADYNYKLPDDFTGCVIAWNSNNLDSKVGGNYNYLYRLFRKSNLKPFERDISTEIYQAGSTPCNGVEGFNCYFPLQSYGFQPTNGVGYQPYRVVVLSFELLHAPATVCGPKKSTNLVKNKCVNFNFNGLTGTGVLTESNKKFLPFQQFGRDIADTTDAVRDPQTLEILDITPCSFGGVSVITPGTNTSNQVAVLYQDVNCTEVPVAIHADQLTPTWRVYSTGSNVFQTRAGCLIGAEHVNNSYECDIPIGAGICASYQTQTNSPRRARSVASQSIIAYTMSLGAENSVAYSNNSIAICTNFTISVTTEILPVSMTKTSVDCTMYICGDSTECSNLLLQYGSFCTQLNRALTGIAVEQDKNTQEVFAQVKQIYKTPPIKDFGGFNFSQILPDPSKPSKRSFIEDLLFNKVTLADAGFIKQYGDCLGDIAARDLICAQKFNGLTVLPPLLTDEMIAQYTSALLAGTITSGWTFGAGAALQIPFAMQMAYRFNGIGVTQNVLYENQKLIANQFNSAIGKIQDSLSSTASALGKLQDVVNQNAQALNTLVKQLSSNFGAISSVLNDILSRLDKVEAEVQIDRLITGRLQSLQTYVTQQLIRAAEIRASANLAATKMSECVLGQSKRVDFCGKGYHLMSFPQSAPHGVVFLHVTYVCAQEKNFTTAPAICHDGKAHFPREGVFVSNGTHWFVTQRNFYEPQIITTDNTFLSGNCDVVIGIVNNTVYDPLQPELDS

SEQ ID NO: 3147 - protein, 1147 aa, Artificial Sequence
  SARS-CoV-2/USA/UT-00034/2020__EPI_ISL_417977 spike protein (1-1147)(P715C_P1069C)
MFVFLVLLPLVSSQCVNLTTRTQLPPAYTNSFTRGVYYPDKVFRSSVLHSTQDLFLPFFSNVTWFHAIHVSGTNGTKRFDNPVLPFNDGVYFASTEKSNIIRGWIFGTTLDSKTQSLLIVNNATNVVIKVCEFQFCNDPFLGVYYYKNNKSWMESEFRVYSSANNCTFEYVSQPFLMDLEGKQGNFKNLREFVFKNIDGYFKIYSKHTPINLVRDLPQGFSALEPLVDLPIGINITRFQTLLALHRSYLTPGDSSSGWTAGAAAYYVGYLQPRTFLLKYNENGTITDAVDCALDPLSETKCTLKSFTVEKGIYQTSNFRVQPTESIVRFPNITNLCPFGEVFNATRFASVYAWNRKRISNCVADYSVLYNSASFSTFKCYGVSPTKLNDLCFTNVYADSFVIRGDEVRQIAPGQTGKIADYNYKLPDDFTGCVIAWNSNNLDSKVGGNYNYLYRLFRKSNLKPFERDISTEIYQAGSTPCNGVEGFNCYFPLQSYGFQPTNGVGYQPYRVVVLSFELLHAPATVCGPKKSTNLVKNKCVNFNFNGLTGTGVLTESNKKFLPFQQFGRDIADTTDAVRDPQTLEILDITPCSFGGVSVITPGTNTSNQVAVLYQGVNCTEVPVAIHADQLTPTWRVYSTGSNVFQTRAGCLIGAEHVNNSYECDIPIGAGICASYQTQTNSPRRARSVASQSIIAYTMSLGAENSVAYSNNSIAICTNFTISVTTEILPVSMTKTSVDCTMYICGDSTECSNLLLQYGSFCTQLNRALTGIAVEQDKNTQEVFAQVKQIYKTPPIKDFGGFNFSQILPDPSKPSKRSFIEDLLFNKVTLADAGFIKQYGDCLGDIAARDLICAQKFNGLTVLPPLLTDEMIAQYTSALLAGTITSGWTFGAGAALQIPFAMQMAYRFNGIGVTQNVLYENQKLIANQFNSAIGKIQDSLSSTASALGKLQDVVNQNAQALNTLVKQLSSNFGAISSVLNDILSRLDKVEAEVQIDRLITGRLQSLQTYVTQQLIRAAEIRASANLAATKMSECVLGQSKRVDFCGKGYHLMSFPQSAPHGVVFLHVTYVCAQEKNFTTAPAICHDGKAHFPREGVFVSNGTHWFVTQRNFYEPQIITTDNTFVSGNCDVVIGIVNNTVYDPLQPELDS

SEQ ID NO: 3148 - protein, 1147 aa, Artificial Sequence
  SARS-CoV-2/USA/UT-00033/2020__EPI_ISL_417976 spike protein (1-1147)(P715C_P1069C)
MFVFLVLLPLVSSQCVNLTTRTQLPPAYTNSFTRGVYYPDKVFRSSVLHSTQDLFLPFFSNVTWFHAIHVSGTNGTKRFDNPVLPFNDGVYFASTEKSNIIRGWIFGTTLDSKTQSLLIVNNATNVVIKVCEFQFCNDPFLGVYYHKNNKSWMESEFRVYSSANNCTFEYVSQPFLMDLEGKQGNFKNLREFVFKNIDGYFKIYSKHTPINLVRDLPQGFSALEPLVDLPIGINITRFQTLLALHRSYLTPGDSSSGLTAGAAAYYVGYLQPRTFLLKYNENGTITDAVDCALDPLSETKCTLKSFTVEKGIYQTSNFRVQPTESIVRFPNITNLCPFGEVFNATRFASVYAWNRKRISNCVADYSVLYNSASFSTFKCYGVSPTKLNDLCFTNVYADSFVIRGDEVRQIAPGQTGKIADYNYKLPDDFTGCVIAWNSNNLDSKVGGNYNYLYRLFRKSNLKPFERDISTEIYQAGSTPCNGVEGFNCYFPLQSYGFQPTNGVGYQPYRVVVLSFELLHAPATVCGPKKSTNLVKNKCVNFNFNGLTGTGVLTESNKKFLPFQQFGRDIADTTDAVRDPQTLEILDITPCSFGGVSVITPGTNTSNQVAVLYQGVNCTEVPVAIHADQLTPTWRVYSTGSNVFQTRAGCLIGAEHVNNSYECDIPIGAGICASYQTQTNSPRRARSVASQSIIAYTMSLGAENSVAYSNNSIAICTNFTISVTTEILPVSMTKTSVDCTMYICGDSTECSNLLLQYGSFCTQLNRALTGIAVEQDKNTQEVFAQVKQIYKTPPIKDFGGFNFSQILPDPSKPSKRSFIEDLLFNKVTLADAGFIKQYGDCLGDIAARDLICAQKFNGLTVLPPLLTDEMIAQYTSALLAGTITSGWTFGAGAALQIPFAMQMAYRFNGIGVTQNVLYENQKLIANQFNSAIGKIQDSLSSTASALGKLQDVVNQNAQALNTLVKQLSSNFGAISSVLNDILSRLDKVEAEVQIDRLITGRLQSLQTYVTQQLIRAAEIRASANLAATKMSECVLGQSKRVDFCGKGYHLMSFPQSAPHGVVFLHVTYVCAQEKNFTTAPAICHDGKAHFPREGVFVSNGTHWFVTQRNFYEPQIITTDNTFVSGNCDVVIGIVNNTVYDPLQPELDS

SEQ ID NO: 3149 - protein, 1147 aa, Artificial Sequence
  SARS-CoV-2/USA/WI-13/2020__EPI_ISL_417516 spike protein (1-1147)(P715C_P1069C)
MFVFLVLLPLVSSQCVNLTTRTQLPPAYTNSFTRGVYYPDKVFRSSVLHSTQDLFLPFFSNVTWFHAIHVSGTNGTKRFDNPVLPFNDGVYFASTEKSNIIRGWIFGTTLDSKTQSLLIVNNATNVVIKVCEFQFCNDPFLGVYYHKNNKSWMESEFRVYSSANNCTFEYVSQPFLMDLEGKQGNFKNLREFVFKNIDGYFKIYSKHTPINLVRDLPQGFSALEPLVDLPIGINITRFQTLLALHRSYLTPGDSSSGWTAGAAAYYVGYLQPRTFLLKYNENGTITDAVDCALDPLSETKCTLKSFTVEKGIYQTSNFRVLPTESIVRFPNITNLCPFGEVFNATRFASVYAWNRKRISNCVADYSVLYNSASFSTFKCYGVSPTKLNDLCFTNVYADSFVIRGDEVRQIAPGQTGKIADYNYKLPDDFTGCVIAWNSNNLDSKVGGNYNYLYRLFRKSNLKPFERDISTEIYQAGSTPCNGVEGFNCYFPLQSYGFQPTNGVGYQPYRVVVLSFELLHAPATVCGPKKSTNLVKNKCVNFNFNGLTGTGVLTESNKKFLPFQQFGRDIADTTDAVRDPQTLEILDITPCSFGGVSVITPGTNTSNQVAVLYQGVNCTEVPVAIHADQLTPTWRVYSTGSNVFQTRAGCLIGAEHVNNSYECDIPIGAGICASYQTQTNSPRRARSVASQSIIAYTMSLGAENSVAYSNNSIAICTNFTISVTTEILPVSMTKTSVDCTMYICGDSTECSNLLLQYGSFCTQLNRALTGIAVEQDKNTQEVFAQVKQIYKTPPIKDFGGFNFSQILPDPSKPSKRSFIEDLLFNKVTLADAGFIKQYGDCLGDIAARDLICAQKFNGLTVLPPLLTDEMIAQYTSALLAGTITSGWTFGAGAALQIPFAMQMAYRFNGIGVTQNVLYENQKLIANQFNSAIGKIQDSLSSTASALGKLQDVVNQNAQALNTLVKQLSSNFGAISSVLNDILSRLDKVEAEVQIDRLITGRLQSLQTYVTQQLIRAAEIRASANLAATKMSECVLGQSKRVDFCGKGYHLMSFPQSAPHGVVFLHVTYVCAQEKNFTTAPAICHDGKAHFPREGVFVSNGTHWFVTQRNFYEPQIITTDNTFVSGNCDVVIGIVNNTVYDPLQPELDS

SEQ ID NO: 3150 - protein, 1146 aa, Artificial Sequence
  SARS-CoV-2/India/1-27/2020__EPI_ISL_413522 spike protein (1-1146)(P714C_P1068C)
MFVFLVLLPLVSSQCVNLTTRTQLPPAYTNSFTRGVYYPDKVFRSSVLHSTQDLFLPFFSNVTWFHAIHVSGTNGTKRFDNPVLPFNDGVYFASTEKSNIIRGWIFGTTLDSKTQSLLIVNNATNVVIKVCEFQFCNDPFLGVYHKNNKSWMESEFRVYSSANNCTFEYVSQPFLMDLEGKQGNFKNLREFVFKNIDGYFKIYSKHTPINLVRDLPQGFSALEPLVDLPIGINITRFQTLLALHRSYLTPGDSSSGWTAGAAAYYVGYLQPRTFLLKYNENGTITDAVDCALDPLSETKCTLKSFTVEKGIYQTSNFRVQPTESIVRFPNITNLCPFGEVFNATRFASVYAWNRKRISNCVADYSVLYNSASFSTFKCYGVSPTKLNDLCFTNVYADSFVIRGDEVIQIAPGQTGKIADYNYKLPDDFTGCVIAWNSNNLDSKVGGNYNYLYRLFRKSNLKPFERDISTEIYQAGSTPCNGVEGFNCYFPLQSYGFQPTNGVGYQPYRVVVLSFELLHAPATVCGPKKSTNLVKNKCVNFNFNGLTGTGVLTESNKKFLPFQQFGRDIADTTDAVRDPQTLEILDITPCSFGGVSVITPGTNTSNQVAVLYQDVNCTEVPVAIHADQLTPTWRVYSTGSNVFQTRAGCLIGAEHVNNSYECDIPIGAGICASYQTQTNSPRRARSVASQSIIAYTMSLGAENSVAYSNNSIAICTNFTISVTTEILPVSMTKTSVDCTMYICGDSTECSNLLLQYGSFCTQLNRALTGIAVEQDKNTQEVFAQVKQIYKTPPIKDFGGFNFSQILPDPSKPSKRSFIEDLLFNKVTLADAGFIKQYGDCLGDIAARDLICAQKFNGLTVLPPLLTDEMIAQYTSALLAGTITSGWTFGAGAALQIPFAMQMAYRFNGIGVTQNVLYENQKLIANQFNSAIGKIQDSLSSTASALGKLQDVVNQNAQALNTLVKQLSSNFGAISSVLNDILSRLDKVEAEVQIDRLITGRLQSLQTYVTQQLIRAAEIRASANLAATKMSECVLGQSKRVDFCGKGYHLMSFPQSAPHGVVFLHVTYVCAQEKNFTTAPAICHDGKAHFPREGVFVSNGTHWFVTQRNFYEPQIITTDNTFVSGNCDVVIGIVNNTVYDPLQPELDS

SEQ ID NO: 3151 - protein, 1141 aa, Artificial Sequence
  SARS-CoV-2/pangolin/Guangxi/P4L/2017__EPI_ISL_410538 spike protein (1-1141)(P709C_P1063C)
MFVFLFVLPLVSSQCVNLTTRTGIPPGYTNSSTRGVYYPDKVFRSSILHLTQDLFLPFFSNVTWFNTINYQGGFKKFDNPVLPFNDGVYFASTEKSNIIRGWIFGTTLDARTQSLLIVNNATNVVIKVCEFQFCTDPFLGVYYHNNNKTWVENEFRVYSSANNCTFEYISQPFLMDLEGKQGNFKNLREFVFKNVDGYFKIYSKHTPIDLVRDLPRGFAALEPLVDLPIGINITRFQTLLALHRSYLTPGNLESGWTTGAAAYYVGYLQQRTFLLSYNQNGTITDAVDCSLDPLSETKCTLKSLTVEKGIYQTSNFRVQPTISIVRFPNITNLCPFGEVFNASKFASVYAWNRKRISNCVADYSVLYNSTSFSTFKCYGVSPTKLNDLCFTNVYADSFVVKGDEVRQIAPGQTGVIADYNYKLPDDFTGCVIAWNSVKQDALTGGNYGYLYRLFRKSKLKPFERDISTEIYQAGSTPCNGQVGLNCYYPLERYGFHPTTGVNYQPFRVVVLSFELLNGPATVCGPKLSTTLVKDKCVNFNFNGLTGTGVLTTSKKQFLPFQQFGRDISDTTDAVRDPQTLEILDITPCSFGGVSVITPGTNTSNQVAVLYQDVNCTEVPMAIHAEQLTPAWRVYSAGANVFQTRAGCLVGAEHVNNSYECDIPVGAGICASYHSMSSLRSVNQRSIIAYTMSLGAENSVAYSNNSIAICTNFTISVTTEILPVSMTKTSVDCTMYICGDSIECSNLLLQYGSFCTQLNRALTGIAVEQDKNTQEVFAQVKQIYKTPPIKDFGGFNFSQILPDPSKPSKRSFIEDLLFNKVTLADAGFIKQYGDCLGDIAARDLICAQKFNGLTVLPPLLTDEMIAQYTSALLAGTITSGWTFGAGAALQIPFAMQMAYRFNGIGVTQNVLYENQKLIANQFNSAIGKIQDSLSSTASALGKLQDVVNQNAQALNTLVKQLSSNFGAISSVLNDILSRLDKVEAEVQIDRLITGRLQSLQTYVTQQLIRAAEIRASANLAATKMSECVLGQSKRVDFCGKGYHLMSFPQSAPHGVVFLHVTYVCAQEKNFTTAPAICHEGKAHFPREGVFVSNGTHWFITQRNFYEPQIITTDNTFVSGSCDVVIGIVNNTVYDPLQPELDS

SEQ ID NO: 3152 - protein, 1141 aa, Artificial Sequence
  SARS-CoV-2/pangolin/Guangxi/P5L/2017__EPI_ISL_410540 spike protein (1-1141)(P709C_P1063C)
MFVFLFVLPLVSSQCVNLTTRTGIPPGYTNSSTRGVYYPDKVFRSSILHLTQDLFLPFFSNVTWFNTINYQGGFKKFDNPVLPFNDGVYFASTEKSNIIRGWIFGTTLDARTQSLLIVNNATNVVIKVCEFQFCTDPFLGVYYHNNNKTWVENEFRVYSSANNCTFEYISQPFLMDLEGKQGNFKNLREFVFKNVDGYFKIYSKHTPIDLVRDLPRGFAALEPLVDLPIGINITRFQTLLALHRSYLTPGKLESGWTTGAAAYYVGYLQQRTFLLSYNQNGTITDAVDCSLDPLSETKCTLKSLTVEKGIYQTSNFRVQPTISIVRFPNITNLCPFGEVFNASKFASVYAWNRKRISNCVADYSVLYNSTSFSTFKCYGVSPTKLNDLCFTNVYADSFVVKGDEVRQIAPGQTGVIADYNYKLPDDFTGCVIAWNSVKQDALTGGNYGYLYRLFRKSKLKPFERDISTEIYQAGSTPCNGQVGLNCYYPLERYGFHPTTGVNYQPFRVVVLSFELLNGPATVCGPKLSTTLVKDKCVNFNFNGLTGTGVLTTSKKQFLPFQQFGRDISDTTDAVRDPQTLEILDITPCSFGGVSVITPGTNTSNQVAVLYQDVNCTEVPMAIHAEQLTPAWRVYSAGANVFQTRAGCLVGAEHVNNSYECDIPVGAGICASYHSMSSFRSVNQRSIIAYTMSLGAENSVAYSNNSIAICTNFTISVTTEILPVSMTKTSVDCTMYICGDSIECSNLLLQYGSFCTQLNRALTGIAVEQDKNTQEVFAQVKQIYKTPPIKDFGGFNFSQILPDPSKPSKRSFIEDLLFNKVTLADAGFIKQYGDCLGDIAARDLICAQKFNGLTVLPPLLTDEMIAQYTSALLAGTITSGWTFGAGAALQIPFAMQMAYRFNGIGVTQNVLYENQKLIANQFNSAIGKIQDSLSSTASALGKLQDVVNQNAQALNTLVKQLSSNFGAISSVLNDILSRLDKVEAEVQIDRLITGRLQSLQTYVTQQLIRAAEIRASANLAATKMSECVLGQSKRVDFCGKGYHLMSFPQSAPHGVVFLHVTYVCAQEKNFTTAPAICHEGKAHFPREGVFVSNGTHWFITQRNFYEPQIITTDNTFVSGSCDVVIGIVNNTVYDPLQPELDS

SEQ ID NO: 3153 - protein, 1141 aa, Artificial Sequence
  SARS-CoV-2/pangolin/Guangxi/P5E/2017__EPI_ISL_410541 spike protein (1-1141)(P709C_P1063C)
MFVFLFVLPLVSSQCVNLTTRTGIPPGYTNSSTRGVYYPDKVFRSSILHLTQDLFLPFFSNVTWFNTITYQGGSKKFDNPVLPFNDGVYFASTEKSNIIRGWIFGTTLDARTQSLLIVNNATNVVIKVCEFQFCTDPFLGVYYHNNNKTWVENEFRVYSSANNCTFEYISQPFLMDLEGKQGNFKNLREFVFKNVDGYFKIYSKHTPIDLVRDLPRGFAALEPLVDLPIGINITRFQTLLALHRSYLTPGKLESGWTTGAAAYYVGYLQQRTFLLSYNQNGTITDAVDCSLDPLSETKCTLKSLTVEKGIYQTSNFRVQPTISIVRFPNITNLCPFGEVFNASKFASVYAWNRKRISNCVADYSVLYNSTSFSTFKCYGVSPTKLNDLCFTNVYADSFVVKGDEVRQIAPGQTGVIADYNYKLPDDFTGCVIAWNSVKQDALTGDNYGYLYRLFRKSKLKPFERDISTEIYQAGSTPCNGQVGLNCYYPLERYGFHPTTGVNYQPFRVVVLSFELLNGPATVCGPKLSTTLVKDKCVNFNFNGLTGTGVLTTSKKQFLPFQQFGRDISDTTDAVRDPQTLEILDITPCSFGGVSVITPGTNTSNQVAVLYQDVNCTEVPMAIHAEQLTPAWRVYSAGANVFQTRAGCLVGAEHVNNSYECDIPVGAGICASYHSMSSFRSVNQRSIIAYTMSLGAENSVAYSNNSIAICTNFTISVTTEILPVSMTKTSVDCTMYICGDSIECSNLLLQYGSFCTQLNRALTGIAVEQDKNTQEVFAQVKQIYKTPPIKDFGGFNFSQILPDPSKPSKRSFIEDLLFNKVTLADAGFIKQYGDCLGDIAARDLICAQKFNGLTVLPPLLTDEMIAQYTSALLAGTITSGWTFGAGAALQIPFAMQMAYRFNGIGVTQNVLYENQKLIANQFNSAIGKIQDSLSSTASALGKLQDVVNQNAQALNTLVKQLSSNFGAISSVLNDILSRLDKVEAEVQIDRLITGRLQSLQTYVTQQLIRAAEIRASANLAATKMSECVLGQSKRVDFCGKGYHLMSFPQSAPHGVVFLHVTYVCAQEKNFTTAPAICHEGKAHFPREGVFVSNGTHWFITQRNFYEPQIITTDNTFVSGSCDVVIGIVNNTVYDPLQPELDS

SEQ ID NO: 3154 - protein, 1139 aa, Artificial Sequence
  SARS-CoV-2/pangolin/Guangxi/P1E/2017__EPI_ISL_410539 spike protein (1-1139)(P707C_P1061C)
MFVFLFVLPLVSSQCVNLTTRTGIQPGYTNSSTRGVYYPDKVFRSSILHLTQDLFLPFFSNVTWFNTINYQGGFKKFDNPVLPFNDGVYFASTEKSNIIRGWIFGTTLDARTQSLLIVNNATNVVIKVCEFQFCTDPFLGVYYHNNNKTWVENEFRVYSSANNCTFEYISQPFLMDLEGKQGNFKNLREFVFKNVDGYFKIYSKHTPIDLVRDLPRGFAALEPLVDLPIGINITRFQTLLALHRSYLTPGKLESGWTTGAAAYYVGYLQQRTFLLSYNQNGTITDAVDCSLDPLSETKCTLKSLTVEKGIYQTSNFRVQPTISIVRFPNITNLCPFGEVFNASKFASVYAWNRKRISNCVADYSVLYNSTSFSTFKCYGVSPTKLNDLCFTNVYADSFVVKGDEVRQIAPGQTGVIADYNYKLPDDFTGCVIAWNSVKQDALTGGNYLYRLFRKSKLKPFERDISTEIYQAGSTPCNGQVGLNCYYPLERYGFHPTTGVNYQPFRVVVLSFELLNGPATVCGPKLSTTLVKDKCVNFNFNGLTGTGVLTTSKKQFLPFQQFGRDISDTTDAVRDPQTLEILDITPCSFGGVSVITPGTNTSNQVAVLYQDVNCTEVPMAIHAEQLTPAWRVYSAGANVFQTRAGCLVGAEHVNNSYECDIPVGAGICASYHSMSSLRSVNQRSIIAYTMSLGAENSVAYSNNSIAICTNFTISVTTEILPVSMTKTSVDCTMYICGDSIECSNLLLQYGSFCTQLNRALTGIAVEQDKNTQEVFAQVKQIYKTPPIKDFGGFNFSQILPDPSKPSKRSFIEDLLFNKVTLADAGFIKQYGDCLGDIAARDLICAQKFNGLTVLPPLLTDEMIAQYTSALLAGTITSGWTFGAGAALQIPFAMQMAYRFNGIGVTQNVLYENQKLIANQFNSAIGKIQDSLSSTASALGKLQDVVNQNAQALNTLVKQLSSNFGAISSVLNDILSRLDKVEAEVQIDRLITGRLQSLQTYVTQQLIRAAEIRASANLAATKMSECVLGQSKRVDFCGKGYHLMSFPQSAPHGVVFLHVTYVCAQEKNFTTAPAICHEGKAHFPREGVFVSNGTHWFITQRNFYEPQIITTDNTFVSGSCDVVIGIVNNTVYDPLQPELDS

SEQ ID NO: 3155 - protein, 1147 aa, Artificial Sequence
  SARS-CoV-2/Wuhan/WIV05/2019__EPI_ISL_402128 spike protein (1-1147)(G889C_L1034C)
MFVFLVLLPLVSSQCVNLTTRTQLPPAYTNSFTRGVYYPDKVFRSSVLHSTQDLFLPFFSNVTWFHAIHVSGTNGTKRFDNPVLPFNDGVYFASTEKSNIIRGWIFGTTLDSKTQSLLIVNNATNVVIKVCEFQFCNDPFLGVYYHKNNKSWMESEFRVYSSANNCTFEYVSQPFLMDLEGKQGNFKNLREFVFKNIDGYFKIYSKHTPINLVRDLPQGFSALEPLVDLPIGINITRFQTLLALHRSYLTPGDSSSGWTAGAAAYYVGYLQPRTFLLKYNENGTITDAVDCALDPLSETKCTLKSFTVEKGIYQTSNFRVQPTESIVRFPNITNLCPFGEVFNATRFASVYAWNRKRISNCVADYSVLYNSASFSTFKCYGVSPTKLNDLCFTNVYADSFVIRGDEVRQIAPGQTGKIADYNYKLPDDFTGCVIAWNSNNLDSKVGGNYNYLYRLFRKSNLKPFERDISTEIYQAGSTPCNGVEGFNCYFPLQSYGFQPTNGVGYQPYRVVVLSFELLHAPATVCGPKKSTNLVKNKCVNFNFNGLTGTGVLTESNKKFLPFQQFGRDIADTTDAVRDPQTLEILDITPCSFGGVSVITPGTNTSNQVAVLYQDVNCTEVPVAIHADQLTPTWRVYSTGSNVFQTRAGCLIGAEHVNNSYECDIPIGAGICASYQTQTNSPRRARSVASQSIIAYTMSLGAENSVAYSNNSIAIPTNFTISVTTEILPVSMTKTSVDCTMYICGDSTECSNLLLQYGSFCTQLNRALTGIAVEQDKNTQEVFAQVKQIYKTPPIKDFGGFNFSQILPDPSKPSKRSFIEDLLFNKVTLADAGFIKQYGDCLGDIAARDLICAQKFNGLTVLPPLLTDEMIAQYTSALLAGTITSGWTFCAGAALQIPFAMQMAYRFNGIGVTQNVLYENQKLIANQFNSAIGKIQDSLSSTASALGKLQDVVNQNAQALNTLVKQLSSNFGAISSVLNDILSRLDKVEAEVQIDRLITGRLQSLQTYVTQQLIRAAEIRASANLAATKMSECVCGQSKRVDFCGKGYHLMSFPQSAPHGVVFLHVTYVPAQEKNFTTAPAICHDGKAHFPREGVFVSNGTHWFVTQRNFYEPQIITTDNTFVSGNCDVVIGIVNNTVYDPLQPELDS

SEQ ID NO: 3156 - protein, 1143 aa, Artificial Sequence
  SARS-CoV-2/bat/Yunnan/RaTG13/2013__EPI_ISL_402131 spike protein (1-1143)(G885C_L1030C)
MFVFLVLLPLVSSQCVNLTTRTQLPPAYTNSSTRGVYYPDKVFRSSVLHLTQDLFLPFFSNVTWFHAIHVSGTNGIKRFDNPVLPFNDGVYFASTEKSNIIRGWIFGTTLDSKTQSLLIVNNATNVVIKVCEFQFCNDPFLGVYYHKNNKSWMESEFRVYSSANNCTFEYVSQPFLMDLEGKQGNFKNLREFVFKNIDGYFKIYSKHTPINLVRDLPPGFSALEPLVDLPIGINITRFQTLLALHRSYLTPGDSSSGWTAGAAAYYVGYLQPRTFLLKYNENGTITDAVDCALDPLSETKCTLKSFTVEKGIYQTSNFRVQPTDSIVRFPNITNLCPFGEVFNATTFASVYAWNRKRISNCVADYSVLYNSTSFSTFKCYGVSPTKLNDLCFTNVYADSFVITGDEVRQIAPGQTGKIADYNYKLPDDFTGCVIAWNSKHIDAKEGGNFNYLYRLFRKANLKPFERDISTEIYQAGSKPCNGQTGLNCYYPLYRYGFYPTDGVGHQPYRVVVLSFELLNAPATVCGPKKSTNLVKNKCVNFNFNGLTGTGVLTESNKKFLPFQQFGRDIADTTDAVRDPQTLEILDITPCSFGGVSVITPGTNASNQVAVLYQDVNCTEVPVAIHADQLTPTWRVYSTGSNVFQTRAGCLIGAEHVNNSYECDIPIGAGICASYQTQTNSRSVASQSIIAYTMSLGAENSVAYSNNSIAIPTNFTISVTTEILPVSMTKTSVDCTMYICGDSTECSNLLLQYGSFCTQLNRALTGIAVEQDKNTQEVFAQVKQIYKTPPIKDFGGFNFSQILPDPSKPSKRSFIEDLLFNKVTLADAGFIKQYGDCLGDIAARDLICAQKFNGLTVLPPLLTDEMIAQYTSALLAGTITSGWTFCAGAALQIPFAMQMAYRFNGIGVTQNVLYENQKLIANQFNSAIGKIQDSLSSTASALGKLQDVVNQNAQALNTLVKQLSSNFGAISSVLNDILSRLDKVEAEVQIDRLITGRLQSLQTYVTQQLIRAAEIRASANLAATKMSECVCGQSKRVDFCGKGYHLMSFPQSAPHGVVFLHVTYVPAQEKNFTTAPAICHDGKAHFPREGVFVSNGTHWFVTQRNFYEPQIITTDNTFVSGSCDVVIGIVNNTVYDPLQPELDS

SEQ ID NO: 3157 - protein, 1147 aa, Artificial Sequence
  SARS-CoV-2/Wuhan/HBCDC-HB-01/2019__EPI_ISL_402132 spike protein (1-1147)(G889C_L1034C)
MFVFLVLLPLVSSQCVNLTTRTQLPPAYTNSITRGVYYPDKVFRSSVLHSTQDLFLPFFSNVTWFHAIHVSGTNGTKRFDNPVLPFNDGVYFASTEKSNIIRGWIFGTTLDSKTQSLLIVNNATNVVIKVCEFQFCNDPFLGVYYHKNNKSWMESEFRVYSSANNCTFEYVSQPFLMDLEGKQGNFKNLREFVFKNIDGYFKIYSKHTPINLVRDLPQGFSALEPLVDLPIGINITRFQTLLALHRSYLTPGDSSSGWTAGAAAYYVGYLQPRTFLLKYNENGTITDAVDCALDPLSETKCTLKSFTVEKGIYQTSNFRVQPTESIVRFPNITNLCPFGEVFNATRFASVYAWNRKRISNCVADYSVLYNSASFSTFKCYGVSPTKLNDLCFTNVYADSFVIRGDEVRQIAPGQTGKIADYNYKLPDDFTGCVIAWNSNNLDSKVGGNYNYLYRLFRKSNLKPFERDISTEIYQAGSTPCNGVEGFNCYFPLQSYGFQPTNGVGYQPYRVVVLSFELLHAPATVCGPKKSTNLVKNKCVNFNFNGLTGTGVLTESNKKFLPFQQFGRDIADTTDAVRDPQTLEILDITPCSFGGVSVITPGTNTSNQVAVLYQDVNCTEVPVAIHADQLTPTWRVYSTGSNVFQTRAGCLIGAEHVNNSYECDIPIGAGICASYQTQTNSPRRARSVASQSIIAYTMSLGAENSVAYSNNSIAIPTNFTISVTTEILPVSMTKTSVDCTMYICGDSTECSNLLLQYGSFCTQLNRALTGIAVEQDKNTQEVFAQVKQIYKTPPIKDFGGFNFSQILPDPSKPSKRSFIEDLLFNKVTLADAGFIKQYGDCLGDIAARDLICAQKFNGLTVLPPLLTDEMIAQYTSALLAGTITSGWTFCAGAALQIPFAMQMAYRFNGIGVTQNVLYENQKLIANQFNSAIGKIQDSLSSTASALGKLQDVVNQNAQALNTLVKQLSSNFGAISSVLNDILSRLDKVEAEVQIDRLITGRLQSLQTYVTQQLIRAAEIRASANLAATKMSECVCGQSKRVDFCGKGYHLMSFPQSAPHGVVFLHVTYVPAQEKNFTTAPAICHDGKAHFPREGVFVSNGTHWFVTQRNFYEPQIITTDNTFVSGNCDVVIGIVNNTVYDPLQPELDS

SEQ ID NO: 3158 - protein, 1147 aa, Artificial Sequence
  SARS-CoV-2/Guangdong/20SF028/2020__EPI_ISL_403936 spike protein (1-1147)(G889C_L1034C)
MFVFLVLLPLVSSQCVNLTTRTQLPPAYTNSFTRGVYYPDKVFRSSVLYSTQDLFLPFFSNVTWFHAIHVSGTNGTKRFDNPVLPFNDGVYFASTEKSNIIRGWIFGTTLDSKTQSLLIVNNATNVVIKVCEFQFCNDPFLGVYYHKNNKSWMESEFRVYSSANNCTFEYVSQPFLMDLEGKQGNFKNLREFVFKNIDGYFKIYSKHTPINLVRDLPQGFSALEPLVDLPIGINITRFQTLLALHRSYLTPGDSSSGWTAGAAAYYVGYLQPRTFLLKYNENGTITDAVDCALDPLSETKCTLKSFTVEKGIYQTSNFRVQPTESIVRFPNITNLCPFGEVFNATRFASVYAWNRKRISNCVADYSVLYNSASFSTFKCYGVSPTKLNDLCFTNVYADSFVIRGDEVRQIAPGQTGKIADYNYKLPDDFTGCVIAWNSNNLDSKVGGNYNYLYRLFRKSNLKPFERDISTEIYQAGSTPCNGVEGFNCYFPLQSYGFQPTNGVGYQPYRVVVLSFELLHAPATVCGPKKSTNLVKNKCVNFNFNGLTGTGVLTESNKKFLPFQQFGRDIADTTDAVRDPQTLEILDITPCSFGGVSVITPGTNTSNQVAVLYQDVNCTEVPVAIHADQLTPTWRVYSTGSNVFQTRAGCLIGAEHVNNSYECDIPIGAGICASYQTQTNSPRRARSVASQSIIAYTMSLGAENSVAYSNNSIAIPTNFTISVTTEILPVSMTKTSVDCTMYICGDSTECSNLLLQYGSFCTQLNRALTGIAVEQDKNTQEVFAQVKQIYKTPPIKDFGGFNFSQILPDPSKPSKRSFIEDLLFNKVTLADAGFIKQYGDCLGDIAARDLICAQKFNGLTVLPPLLTDEMIAQYTSALLAGTITSGWTFCAGAALQIPFAMQMAYRFNGIGVTQNVLYENQKLIANQFNSAIGKIQDSLSSTASALGKLQDVVNQNAQALNTLVKQLSSNFGAISSVLNDILSRLDKVEAEVQIDRLITGRLQSLQTYVTQQLIRAAEIRASANLAATKMSECVCGQSKRVDFCGKGYHLMSFPQSAPHGVVFLHVTYVPAQEKNFTTAPAICHDGKAHFPREGVFVSNGTHWFVTQRNFYEPQIITTDNTFVSGNCDVVIGIVNNTVYDPLQPELDS

SEQ ID NO: 3159 - protein, 1147 aa, Artificial Sequence
  SARS-CoV-2/Shenzhen/SZTH-001/2020__EPI_ISL_406592 spike protein (1-1147)(G889C_L1034C)
MFVFLVLLPLVSSQCVNLTTRTQLPPAYTNSFTRGVYYPDKVFRSSVLHSTQDLFLPFFSNVTWFHAIHVSGTNGTKRFDNPVLPFNDGVYFASTEKSNIIRGWIFGTTLDSKTQSLLIVNNATNVVIKVCEFQFCNDPFLGVYYHKNNKSWMESEFRVYSSANNCTFEYVSQPFLMDLEGKQGNFKNLREFVFKNIDGYFKIYSKHTPINLVRDLPQGFSALEPLVDLPIGINITRFQTLLALHRSYLTPGDSSSGWTAGAAAYYVGYLQPRTFLLKYNENGTITDAVDCALDPLSETKCTLKSFTVEKGIYQTSNFRVQPTESIVRFPNITNLCPFGEVFNATRFASVYAWNRKRISNCVADYSVLYNSASFSTFKCYGVSPTKLNDLCFTNVYADSFVIRGDEVRQIAPGQTGKIADYNYKLPDDFTGCVIAWNSNNLDSKVGGNYNYLYRLFRKSNLKPFERDISTEIYQAGSTPCNGVEGFNCYFPLQSYGFQPTNGVGYQPYRVVVLSFELLHAPATVCGPKKSTNLVKNKCVNFNFNGLTGTGVLTESNKKFLPFQQFGRDIADTTDAVRDPQTLEILDITPCSFGGVSVITPGTNTSNQVAVLYQDVNCTEVPVAIHADQLTPTWRVYSTGSNVFQTRAGCLIGAEHVNNSYECDIPIGAGICASYQTQTNSPRRARSVASQSIIAYTMSLGAENSVAYSNNSIAIPTNFTISVTTEILPVSMTKTSVDCTMYICGDSTECSNLLLQYGSFCTQLNRALTGIAVEQDKNTQEVFAQVKQIYKTPPIKDFGGFNFSQILPDPSKPSKRSFIEDLLFNKVTLADAGFIKQYGDCLGDIAARDLICAQKFNGLTVLPPLLTDEMIAQYTSALLAGTITSGWTFCAGAALQIPFAMQMAYRFNGIGVTQNVLYENQKLIANQFNSAIGKIQDSLSSTASALGKLQDVVNQNAQALNTLVKQLSSNFGAISSVLNDILSRLDKVEAEVQIDRLITGRLQSLQTYVTQQLIRAAEIRASANLAATKMSECVCGQSKRVDFCGKGYHLMSFPQSAPHGVVFLHVTYVPAQEKNFTTAPAICHDGKAHFPREGVFVSNGTHWFVTQRNFYEPQIITTDNTFVSGNCDVLIGIVNNTVYDPLQPELDS

SEQ ID NO: 3160 - protein, 1147 aa, Artificial Sequence
  SARS-CoV-2/Shenzhen/SZTH-004/2020__EPI_ISL_406595 spike protein (1-1147)(G889C_L1034C)
MFVFLVLLPLVSSQCVNLTTRTQLPPAYTNSFTRGVYYPDKVFRSSVLHSTQDLFLPFFSNVTWFHAIHVSGTNGTKRFDNPVLPFNDGVYFASTEKSNIIRGWIFGTTLDSKTQSLLIVNNATNVVIKVCEFQFCNDPFLGVYYHKNNKSWMESEFRVYSSANNCTFEYVSQPFLMDLEGKQGNFKNLREFVFKNIDGYFKIYSKHTPINLVRDLPQGFSALEPLVDLPIGINITRFQTLLALHRSYLTPGDSSSGWTAGAAAYYVGYLQPRTFLLKYNENGTITDAVDCALDPLSETKCTLKSFTVEKGIYQTSNFRVQPTESIVRFPNITNLCPFGEVFNATRFASVYAWDRKRISNCVAYYSVLYNSASFSTFKCYGVSPTKLNDLCFTNVYADSFVIRGDEVRQIAPGQTGKIADYNYKLPDDFTGCVIAWNSNNLDSKVGGNYNYLYRLFRKSNLKPFERDISTEIYQAGSTPCNGVEGFNCYFPLQSYGFQPTNGVGYQPYRVVVLSFELLHAPATVCGPKKSTNLVKNKCVNFNFNGLTGTGVLTESNKKFLPFQQFGRDIADTTDAVRDPQTLEILDITPCSFGGVSVITPGTNTSNQVAVLYQDVNCTEVPVAIHADQLTPTWRVYSTGSNVFQTRAGCLIGAEHVNNSYECDIPIGAGICASYQTQTNSPRRARSVASQSIIAYTMSLGAENSVAYSNNSIAIPTNFTISVTTEILPVSMTKTSVDCTMYICGDSTECSNLLLQYGSFCTQLNRALTGIAVEQDKNTQEVFAQVKQIYKTPPIKDFGGFNFSQILPDPSKPSKRSFIEDLLFNKVTLADAGFIKQYGDCLGDIAARDLICAQKFNGLTVLPPLLTDEMIAQYTSALLAGTITSGWTFCAGAALQIPFAMQMAYRFNGIGVTQNVLYENQKLIANQFNSAIGKIQDSLSSTASALGKLQDVVNQNAQALNTLVKQLSSNFGAISSVLNDILSRLDKVEAEVQIDRLITGRLQSLQTYVTQQLIRAAEIRASANLAATKMSECVCGQSKRVDFCGKGYHLMSFPQSAPHGVVFLHVTYVPAQEKNFTTAPAICHDGKAHFPREGVFVSNGTHWFVTQRNFYEPQIITTDNTFVSGNCDVVIGIVNNTVYDPLQPELDS

SEQ ID NO: 3161 - protein, 1147 aa, Artificial Sequence
  SARS-CoV-2/France/IDF0372/2020__EPI_ISL_406596 spike protein (1-1147)(G889C_L1034C)
MFVFLVLLPLVSSQCVNLTTRTQLPPAYTNSFTRGVYYPDKVFRSSVLHSTQDLFLPFFSNVTWFHAIHVSGTNGTKRFDNPVLPFNDGVYFASTEKSNIIRGWIFGTTLDSKTQSLLIVNNATNVVIKVCEFQFCNDPFLGVYYHKNNKSWMESEFRVYSSANNCTFEYVSQPFLMDLEGKQGNFKNLREFVFKNIDGYFKIYSKHTPINLVRDLPQGFSALEPLVDLPIGINITRFQTLLALHRSYLTPGDSSSGWTAGAAAYYVGYLQPRTFLLKYNENGTITDAVDCALDPLSETKCTLKSFTVEKGIYQTSNFRVQPTESIVRFPNITNLCPFGEVFNATRFASVYAWNRKRISNCVADYSFLYNSASFSTFKCYGVSPTKLNDLCFTNVYADSFVIRGDEVRQIAPGQTGKIADYNYKLPDDFTGCVIAWNSNNLDSKVGGNYNYLYRLFRKSNLKPFERDISTEIYQAGSTPCNGVEGFNCYFPLQSYGFQPTNGVGYQPYRVVVLSFELLHAPATVCGPKKSTNLVKNKCVNFNFNGLTGTGVLTESNKKFLPFQQFGRDIADTTDAVRDPQTLEILDITPCSFGGVSVITPGTNTSNQVAVLYQDVNCTEVPVAIHADQLTPTWRVYSTGSNVFQTRAGCLIGAEHVNNSYECDIPIGAGICASYQTQTNSPRRARSVASQSIIAYTMSLGAENSVAYSNNSIAIPTNFTISVTTEILPVSMTKTSVDCTMYICGDSTECSNLLLQYGSFCTQLNRALTGIAVEQDKNTQEVFAQVKQIYKTPPIKDFGGFNFSQILPDPSKPSKRSFIEDLLFNKVTLADAGFIKQYGDCLGDIAARDLICAQKFNGLTVLPPLLTDEMIAQYTSALLAGTITSGWTFCAGAALQIPFAMQMAYRFNGIGVTQNVLYENQKLIANQFNSAIGKIQDSLSSTASALGKLQDVVNQNAQALNTLVKQLSSNFGAISSVLNDILSRLDKVEAEVQIDRLITGRLQSLQTYVTQQLIRAAEIRASANLAATKMSECVCGQSKRVDFCGKGYHLMSFPQSAPHGVVFLHVTYVPAQEKNFTTAPAICHDGKAHFPREGVFVSNGTHWFVTQRNFYEPQIITTDNTFVSGNCDVVIGIVNNTVYDPLQPELDS

SEQ ID NO: 3162 - protein, 1147 aa, Artificial Sequence
  SARS-CoV-2/Australia/VIC01/2020__EPI_ISL_406844 spike protein (1-1147)(G889C_L1034C)
MFVFLVLLPLVSSQCVNLTTRTQLPPAYTNSFTRGVYYPDKVFRSSVLHSTQDLFLPFFSNVTWFHAIHVSGTNGTKRFDNPVLPFNDGVYFASTEKSNIIRGWIFGTTLDSKTQSLLIVNNATNVVIKVCEFQFCNDPFLGVYYHKNNKSWMESEFRVYSSANNCTFEYVSQPFLMDLEGKQGNFKNLREFVFKNIDGYFKIYSKHTPINLVRDLPQGFSALEPLVDLPIGINITRFQTLLALHRRYLTPGDSSSGWTAGAAAYYVGYLQPRTFLLKYNENGTITDAVDCALDPLSETKCTLKSFTVEKGIYQTSNFRVQPTESIVRFPNITNLCPFGEVFNATRFASVYAWNRKRISNCVADYSVLYNSASFSTFKCYGVSPTKLNDLCFTNVYADSFVIRGDEVRQIAPGQTGKIADYNYKLPDDFTGCVIAWNSNNLDSKVGGNYNYLYRLFRKSNLKPFERDISTEIYQAGSTPCNGVEGFNCYFPLQSYGFQPTNGVGYQPYRVVVLSFELLHAPATVCGPKKSTNLVKNKCVNFNFNGLTGTGVLTESNKKFLPFQQFGRDIADTTDAVRDPQTLEILDITPCSFGGVSVITPGTNTSNQVAVLYQDVNCTEVPVAIHADQLTPTWRVYSTGSNVFQTRAGCLIGAEHVNNSYECDIPIGAGICASYQTQTNSPRRARSVASQSIIAYTMSLGAENSVAYSNNSIAIPTNFTISVTTEILPVSMTKTSVDCTMYICGDSTECSNLLLQYGSFCTQLNRALTGIAVEQDKNTQEVFAQVKQIYKTPPIKDFGGFNFSQILPDPSKPSKRSFIEDLLFNKVTLADAGFIKQYGDCLGDIAARDLICAQKFNGLTVLPPLLTDEMIAQYTSALLAGTITSGWTFCAGAALQIPFAMQMAYRFNGIGVTQNVLYENQKLIANQFNSAIGKIQDSLSSTASALGKLQDVVNQNAQALNTLVKQLSSNFGAISSVLNDILSRLDKVEAEVQIDRLITGRLQSLQTYVTQQLIRAAEIRASANLAATKMSECVCGQSKRVDFCGKGYHLMSFPQSAPHGVVFLHVTYVPAQEKNFTTAPAICHDGKAHFPREGVFVSNGTHWFVTQRNFYEPQIITTDNTFVSGNCDVVIGIVNNTVYDPLQPELDS

SEQ ID NO: 3163 - protein, 1147 aa, Artificial Sequence
  SARS-CoV-2/Germany/BavPat1/2020__EPI_ISL_406862 spike protein (1-1147)(G889C_L1034C)
MFVFLVLLPLVSSQCVNLTTRTQLPPAYTNSFTRGVYYPDKVFRSSVLHSTQDLFLPFFSNVTWFHAIHVSGTNGTKRFDNPVLPFNDGVYFASTEKSNIIRGWIFGTTLDSKTQSLLIVNNATNVVIKVCEFQFCNDPFLGVYYHKNNKSWMESEFRVYSSANNCTFEYVSQPFLMDLEGKQGNFKNLREFVFKNIDGYFKIYSKHTPINLVRDLPQGFSALEPLVDLPIGINITRFQTLLALHRSYLTPGDSSSGWTAGAAAYYVGYLQPRTFLLKYNENGTITDAVDCALDPLSETKCTLKSFTVEKGIYQTSNFRVQPTESIVRFPNITNLCPFGEVFNATRFASVYAWNRKRISNCVADYSVLYNSASFSTFKCYGVSPTKLNDLCFTNVYADSFVIRGDEVRQIAPGQTGKIADYNYKLPDDFTGCVIAWNSNNLDSKVGGNYNYLYRLFRKSNLKPFERDISTEIYQAGSTPCNGVEGFNCYFPLQSYGFQPTNGVGYQPYRVVVLSFELLHAPATVCGPKKSTNLVKNKCVNFNFNGLTGTGVLTESNKKFLPFQQFGRDIADTTDAVRDPQTLEILDITPCSFGGVSVITPGTNTSNQVAVLYQGVNCTEVPVAIHADQLTPTWRVYSTGSNVFQTRAGCLIGAEHVNNSYECDIPIGAGICASYQTQTNSPRRARSVASQSIIAYTMSLGAENSVAYSNNSIAIPTNFTISVTTEILPVSMTKTSVDCTMYICGDSTECSNLLLQYGSFCTQLNRALTGIAVEQDKNTQEVFAQVKQIYKTPPIKDFGGFNFSQILPDPSKPSKRSFIEDLLFNKVTLADAGFIKQYGDCLGDIAARDLICAQKFNGLTVLPPLLTDEMIAQYTSALLAGTITSGWTFCAGAALQIPFAMQMAYRFNGIGVTQNVLYENQKLIANQFNSAIGKIQDSLSSTASALGKLQDVVNQNAQALNTLVKQLSSNFGAISSVLNDILSRLDKVEAEVQIDRLITGRLQSLQTYVTQQLIRAAEIRASANLAATKMSECVCGQSKRVDFCGKGYHLMSFPQSAPHGVVFLHVTYVPAQEKNFTTAPAICHDGKAHFPREGVFVSNGTHWFVTQRNFYEPQIITTDNTFVSGNCDVVIGIVNNTVYDPLQPELDS

SEQ ID NO: 3164 - protein, 1147 aa, Artificial Sequence
  SARS-CoV-2/Wuhan/HBCDC-HB-02/2020__EPI_ISL_412978 spike protein (1-1147)(G889C_L1034C)
MFVFLVLLPLVSSQCVNLTTRTQLPPAYTNSFTRGVYYPDKVFRSSVLHSTQDLFLPFFSNVTWFHAIHVSGTNGTKRFDNPVLPFNDGVYFASTEKSNIIRGWIFGTTLDSKTQSLLIVNNATNVVIKVCEFQFCNDPFLGVYYHKNNKSWMESEFRVYSSANNCTFEYVSQPFLMDLEGKQGNFKNLREFVFKNIDGYFKIYSKHTPINLVRDLPQGFSALEPLVDLPIGINITRFQTLLALHRSYLTPGDSSSGWTAGAAAYYVGYLQPRTFLLKYNENGTITDAVDCALDPLSETKCTLKSFTVEKGIYQTSNFRVQPTESIVRFPNITNLCPFGEVFNATRFASVYAWNRKRISNCVADYSVLYNSASFSTFKCYGVSPTKLNDLCFTNVYADSFVIRGDEVRQIAPGQTGKIADYNYKLPDDFTGCVIAWNSNNLDSKVGGNYNYLYRLFRKSNLKPFERDISTEIYQAGSTPCNGVEGFNCYFPLQSYGFQPTNGVGYQPYRVVVLSFELLHAPATVCGPKKSTNLVKNKCVNFNFNGLTGTGVLTESNKKFLPFQQFGRDIADTTDAVRDPQTLEILDITPCSFGGVSVITPGTNTSNQVAVLYQDVNCTEVPVAIHADQLTPTWRVYSTGSNVFQTRAGCLIGAEHVNNSYECDIPIGAGICASYQTQTNSPRRARSVASQSIIAYTMSLGAENSVAYSNNSIAIPTNFTISVTTEILPVSMTKTSVDCTMYICGDSTECSNFLLQYGSFCTQLNRALTGIAVEQDKNTQEVFAQVKQIYKTPPIKDFGGFNFSQILPDPSKPSKRSFIEDLLFNKVTLADAGFIKQYGDCLGDIAARDLICAQKFNGLTVLPPLLTDEMIAQYTSALLAGTITSGWTFCAGAALQIPFAMQMAYRFNGIGVTQNVLYENQKLIANQFNSAIGKIQDSLSSTASALGKLQDVVNQNAQALNTLVKQLSSNFGAISSVLNDILSRLDKVEAEVQIDRLITGRLQSLQTYVTQQLIRAAEIRASANLAATKMSECVCGQSKRVDFCGKGYHLMSFPQSAPHGVVFLHVTYVPAQEKNFTTAPAICHDGKAHFPREGVFVSNGTHWFVTQRNFYEPQIITTDNTFVSGNCDVVIGIVNNTVYDPLQPELDS

SEQ ID NO: 3165 - protein, 1147 aa, Artificial Sequence
  SARS-CoV-2/Australia/QLD02/2020__EPI_ISL_407896 spike protein (1-1147)(G889C_L1034C)
MFVFLVLLPLVSSQCVNLTTRTQLPPAYTNSFTRGVYYPDKVFRSSVLHSTQDLFLPFFSNVTWFHAIHVSGTNGTKRFDNPVLPFNDGVYFASTEKSNIIRGWIFGTTLDSKTQSLLIVNNATNVVIKVCEFQFCNDPFLGVYYHKNNKSWMESEFRVYSSANNCTFEYVSQPFLMDLEGKQGNFKNLREFVFKNIDGYFKIYSKHTPINLVRDLPQGFSALEPLVDLPIGINITRFQTLLALHRSYLTPGDSSSGWTAGAAAYYVGYLQPRTFLLKYNENGTITDAVDCALDPLSETKCTLKSFTVEKGIYQTSNFRVQPTESIVRFPNITNLCPFGEVFNATRFASVYAWNRKRISNCVADYSVLYNSASFSTFKCYGVSPTKLNDLCFTNVYADSFVIRGDEVRQIAPGQTGKIADYNYKLPDDFTGCVIAWNSNNLDSKVGGNYNYLYRLFRKSNLKPFERDISTEIYQAGSTPCNGVEGFNCYFPLQSYGFQPTNGVGYQPYRVVVLSFELLHAPATVCGPKKSTNLVKNKCVNFNFNGLTGTGVLTESNKKFLPFQQFGRDIADTTDAVRDPQTLEILDITPCSFGGVSVITPGTNTSNQVAVLYQDVNCTEVPVAIHADQLTPTWRVYSTGSNVFQTRAGCLIGAEHVNNSYECDIPIGAGICASYQTQTNSPRRARSVASQSIIAYTMSLGAENSVAYSNNSIAIPTNFTISVTTEILPVSMTKTSVDCTMYICGDSTECSNLLLQYGSFCTQLNRALTGIAVEQDKNTQEVFAQVKQIYKTPPIKDFGGFNFSQILPDPSKPSKRSFIEDLLFNKVTLADAGFIKQYGDCLGDIAARDLICAQKFNGLTVLPPLLTDEMIAQYTSALLAGTITSGWTFCAGAALQIPFAMQMAYRFNGIGVTQNVLYENQKLIANQFNSAIGKIQDSLSSTASALGKLQDVVNQNAQALNTLVKQLSSNFGAISSVLNDILSRLDKVEAEVQIDRLITGRLQSLQTYVTQQLIRAAEIRASANLAATKMSECVCGQSKRVDFCGKGYHLMSFPQSAPHGVVFLHVTYVPAQEKNFTTAPAICHDGKAHFPREGVFVSNGTHWFVTQRNFYEPQIITTDNTFVSGNCDVVIGIVNNTVYDPLQLELDS

SEQ ID NO: 3166 - protein, 1147 aa, Artificial Sequence
  SARS-CoV-2/India/1-31/2020__EPI_ISL_413523 spike protein (1-1147)(G889C_L1034C)
MFVFLVLLPLVSSQCVNLTTRTQLPPAYTNSFTRGVYYPDKVFRSSVLHSTQDLFLPFFSNVTWFHAIHVSGTNGTKRFDNPVLPFNDGVYFASTEKSNIIRGWIFGTTLDSKTQSLLIVNNATNVVIKVCEFQFCNDPFLGVYYHKNNKSWMESEFRVYSSANNCTFEYVSQPFLMDLEGKQGNFKNLREFVFKNIDGYFKIYSKHTPINLVRDLPQGFSALEPLVDLPIGINITRFQTLLALHRSYLTPGDSSSGWTAGAAAYYVGYLQPRTFLLKYNENGTITDAVDCALDPLSETKCTLKSFTVEKGIYQTSNFRVQPTESIVRFPNITNLCPFGEVFNATRFASVYAWNRKRISNCVADYSVLYNSASFSTFKCYGVSPTKLNDLCFTNVYADSFVIRGDEVRQIAPGQTGKIADYNYKLPDDFTGCVIAWNSNNLDSKVGGNYNYLYRLFRKSNLKPFERDISTEIYQAGSTPCNGVEGFNCYFPLQSYGFQPTNGVGYQPYRVVVLSFELLHAPATVCGPKKSTNLVKNKCVNFNFNGLTGTGVLTESNKKFLPFQQFGRDIADTTDAVRDPQTLEILDITPCSFGGVSVITPGTNTSNQVAVLYQDVNCTEVPVAIHADQLTPTWRVYSTGSNVFQTRAGCLIGAEHVNNSYECDIPIGAGICASYQTQTNSPRRARSVASQSIIAYTMSLGAENSVAYSNNSIAIPTNFTISVTTEILPVSMTKTSVDCTMYICGDSTECSNLLLQYGSFCTQLNRALTGIAVEQDKNTQEVFAQVKQIYKTPPIKDFGGFNFSQILPDPSKPSKRSFIEDLLFNKVTLADAGFIKQYGDCLGDIAARDLICAQKFNGLTVLPPLLTDEMIAQYTSALLAGTITSGWTFCAGAALQIPFAMQMAYRFNGIGVTQNVLYENQKLIANQFNSVIGKIQDSLSSTASALGKLQDVVNQNAQALNTLVKQLSSNFGAISSVLNDILSRLDKVEAEVQIDRLITGRLQSLQTYVTQQLIRAAEIRASANLAATKMSECVCGQSKRVDFCGKGYHLMSFPQSAPHGVVFLHVTYVPAQEKNFTTAPAICHDGKAHFPREGVFVSNGTHWFVTQRNFYEPQIITTDNTFVSGNCDVVIGIVNNTVYDPLQPELDS

SEQ ID NO: 3167 - protein, 1147 aa, Artificial Sequence
  SARS-CoV-2/Guangdong/GD2020087-P0008/2020__EPI_ISL_413863 spike protein (1-1147)(G889C_L1034C)
MFVFLVLLPLVSSQCVNLTTRTQLPPAYTNSFTRGVYYPDKVFRSSVLHSTQDLFLPFFSNVTWFHAIHVSGTNGTKRFDNPVLPFNDGVYFASTEKSNIIRGWIFGTTLDSKTQSLLIVNNATNVVIKVCEFQFCNDPFLGVYYHKNNKSWMESEFRVYSSANNCTFEYVSQPFLMDLEGKQGNFKNLREFVFKNIDGYFKIYSKHTPINLVRDLPQGFSALEPLVDLPIGINITRFQTLLALHRSYLTPGDSSSGWTAGAAAYYVGYLQPRTFLLKYNENGTITDAVDCALDPLSETKCTLKSFTVEKGIYQTSNFRVQPTESIVRFPNITNLCPFGEVFNATRFASVYAWNRKRISNCVADYSVLYNSASFSTFKCYGVSPTKLNDLCFTNVYADSFVIRGDEVREIAPGQTGKIADYNYKLPDDFTGCVIAWNSNNLDSKVGGNYNYLYRLFRKSNLKPFERDISTEIYQAGSTPCNGVEGFNCYFPLQSYGFQPTNGVGYQPYRVVVLSFELLHAPATVCGPKKSTNLVKNKCVNFNFNGLTGTGVLTESNKKFLPFQQFGRDIADTTDAVRDPQTLEILDITPCSFGGVSVITPGTNTSNQVAVLYQDVNCTEVPVAIHADQLTPTWRVYSTGSNVFQTRAGCLIGAEHVNNSYECDIPIGAGICASYQTQTNSPRRARSVASQSIIAYTMSLGAENSVAYSNNSIAIPTNFTISVTTEILPVSMTKTSVDCTMYICGDSTECSNLLLQYGSFCTQLNRALTGIAVEQDKNTQEVFAQVKQIYKTPPIKDFGGFNFSQILPDPSKPSKRSFIEDLLFNKVTLADAGFIKQYGDCLGDIAARDLICAQKFNGLTVLPPLLTDEMIAQYTSALLAGTITSGWTFCAGAALQIPFAMQMAYRFNGIGVTQNVLYENQKLIANQFNSAIGKIQDSLSSTASALGKLQDVVNQNAQALNTLVKQLSSNFGAISSVLNDILSRLDKVEAEVQIDRLITGRLQSLQTYVTQQLIRAAEIRASANLAATKMSECVCGQSKRVDFCGKGYHLMSFPQSAPHGVVFLHVTYVPAQEKNFTTAPAICHDGKAHFPREGVFVSNGTHWFVTQRNFYEPQIITTDNTFVSGNCDVVIGIVNNTVYDPLQPELDS

SEQ ID NO: 3168 - protein, 1147 aa, Artificial Sequence
  SARS-CoV-2/Sweden/01/2020__EPI_ISL_411951 spike protein (1-1147)(G889C_L1034C)
MFVFLVLLPLVSSQCVNLTTRTQLPPAYTNSFTRGVYYPDKVFRSSVLHSTQDLFLPFFSNVTWFHAIHVSGTNGTKRFDNPVLPFNDGVYFASTEKSNIIRGWIFGTTLDSKTQSLLIVNNATNVVIKVCEFQFCNDPFLGVYYHKNNKSWMESEFRVYSSANNCTFEYVSQPFLMDLEGKQGNFKNLREFVFKNIDGYFKIYSKHTPINLVRDLPQGFSALEPLVDLPIGINITRFQTLLALHRSYLTPGDSSSGWTAGAAAYYVGYLQPRTFLLKYNENGTITDAVDCALDPLSETKCTLKSFTVEKGIYQTSNFRVQPTESIVRFPNITNLCPFGEVFNATRFASVYAWNRKRISNCVADYSVLYNSASFSTFKCYGVSPTKLNDLCFTNVYADSFVIRGDEVRQIAPGQTGKIADYNYKLPDDFTGCVIAWNSNNLDSKVGGNYNYLYRLFRKSNLKPFERDISTEIYQAGSTPCNGVEGFNCYFPLQSYGFQPTNGVGYQPYRVVVLSFELLHAPATVCGPKKSTNLVKNKCVNFNFNGLTGTGVLTESNKKFLPFQQFGRDIADTTDAVRDPQTLEILDITPCSFGGVSVITPGTNTSNQVAVLYQDVNCTEVPVAIHADQLTPTWRVYSTGSNVFQTRAGCLIGAEHVNNSYECDIPIGAGICASYQTQTNSPRRARSVASQSIIAYTMSLGAENSVAYSNNSIAIPTNFTISVTTEILPVSMTKTSVDCTMYICGDSTECSNLLLQYGSFCTQLNRALTGIAVEQDKNTQEVFAQVKQIYKTPPIKDCGGFNFSQILPDPSKPSKRSFIEDLLFNKVTLADAGFIKQYGDCLGDIAARDLICAQKFNGLTVLPPLLTDEMIAQYTSALLAGTITSGWTFCAGAALQIPFAMQMAYRFNGIGVTQNVLYENQKLIANQFNSAIGKIQDSLSSTASALGKLQDVVNQNAQALNTLVKQLSSNFGAISSVLNDILSRLDKVEAEVQIDRLITGRLQSLQTYVTQQLIRAAEIRASANLAATKMSECVCGQSKRVDFCGKGYHLMSFPQSAPHGVVFLHVTYVPAQEKNFTTAPAICHDGKAHFPREGVFVSNGTHWFVTQRNFYEPQIITTDNTFVSGNCDVVIGIVNNTVYDPLQPELDS

SEQ ID NO: 3169 - protein, 1147 aa, Artificial Sequence
  SARS-CoV-2/Tianmen/HBCDC-HB-07/2020__EPI_ISL_412983 spike protein (1-1147)(G889C_L1034C)
MFVFLVLLPLVSSQCVNLTTRTQLPPAYTNSFTRGVYYPDKVFRSSVLHSTQDLFLPFFSNVTWFHAIHVSGTNGTKRFDNPVLPFNDGVYFASTEKSNIIRGWIFGTTLDSKTQSLLIVNNATNVVIKVCEFQFCNDPFLGVYYHKNNKSWMESEFRVYSSANNCTFEYVSQPFLMDLEGKQGNFKNLREFVFKNIDGYFKIYSKHTPINLVRDLPQGFSALEPLVDLPIGINITRFQTLLALHRSYLTPGDSSSGWTAGAAAYYVGYLQPRTFLLKYNENGTITDAVDCALDPLSETKCTLKSFTVEKGIYQTSNFRVQPTESIVRFPNITNLCPFGEVFNATRFASVYAWNRKRISNCVADYSVLYNSASFSTFKCYGVSPTKLNDLCFTNVYADSFVIRGDEVRQIAPGQTGKIADYNYKLPDDFTGCVIAWNSNNLDSKVGGNYNYLYRLFRKSNLKPFERDISTEIYQAGSTPCNGVEGFNCYFPLQSYGFQPTNGVGYQPYRVVVLSFELLHAPATVCGPKKSTNLVKNKCVNFNFNGLTGTGVLTESNKKFLPFQQFGRDIADTTDAVRDPQTLEILDITPCSFGGVSVITPGTNTSNQVAVLYQDLNCTEVPVAIHADQLTPTWRVYSTGSNVFQTRAGCLIGAEHVNNSYECDIPIGAGICASYQTQTNSPRRARSVASQSIIAYTMSLGAENSVAYSNNSIAIPTNFTISVTTEILPVSMTKTSVDCTMYICGDSTECSNLLLQYGSFCTQLNRALTGIAVEQDKNTQEVFAQVKQIYKTPPIKDFGGFNFSQILPDPSKPSKRSFIEDLLFNKVTLADAGFIKQYGDCLGDIAARDLICAQKFNGLTVLPPLLTDEMIAQYTSALLAGTITSGWTFCAGAALQIPFAMQMAYRFNGIGVTQNVLYENQKLIANQFNSAIGKIQDSLSSTASALGKLQDVVNQNAQALNTLVKQLSSNFGAISSVLNDILSRLDKVEAEVQIDRLITGRLQSLQTYVTQQLIRAAEIRASANLAATKMSECVCGQSKRVDFCGKGYHLMSFPQSAPHGVVFLHVTYVPAQEKNFTTAPAICHDGKAHFPREGVFVSNGTHWFVTQRNFYEPQIITTDNTFVSGNCDVVIGIVNNTVYDPLQPELDS

SEQ ID NO: 3170 - protein, 1147 aa, Artificial Sequence
  SARS-CoV-2/Hong Kong/case42_VM20002493/2020__EPI_ISL_414527 spike protein (1-1147)(G889C_L1034C)
MFVFLVLLPLVSSQCVNLTTRTQLPPAYTNSFTRGVYYPDKVFRSSVLHSTQDLFLPFFSNVTWFHAIHVSGTNGTKRFDNPVLPFNDGVYFASTEKSNIIRGWIFGTTLDSKTQSLLIVNNATNVVIKVCEFQFCNDPFLGVYYHKNNKSWMESEFRVYSSANNCTFEYVSQPFLMDLEGKQGNFKNLREFVFKNIDGYFKIYSKHTPINLVRDLPQGFSALEPLVDLPIGINITRFQTLLALHRSYLTPGDSSSGWTAGAAAYYVGYLQPRTFLLKYNENGTITDAVDCALDPLSETKCTLKSFTVEKGIYQTSNFRVQPTESIVRFPNITNLCPFGEVFNATRFASVYAWNRKRISNCVADYSVLYNSASFSTFKCYGVSPTKLNDLCFTNVYADSFVIRGDEVRQIAPGQTGKIADYNYKLPDDFTGCVIAWNSNNLDSKVGGNYNYLYRLFRKSNLKPFERDISTEIYQAGSTPCNGVEGFNCYFPLQSYGFQPTNGVGYQPYRVVVLSFELLHAPATVCGPKKSTNLVKNKCVNFNFNGLTGTGVLTESNKKFLPFQQFGRDIADTTDAVRDPQTLEILDITPCSFGGVSVITPGTNTSNQVAVLYQDVNCTEVPVAIHADQLTPTWRVYSTGSNVFQTRAGCLIGAEHVNNSYECDIPIGAGICASYQTQTNSPRRARSVASQSIIAYTMSLGAENSVAYSNNSIAIPTNFAISVTTEILPVSMTKTSVDCTMYICGDSTECSNLLLQYGSFCTQLNRALTGIAVEQDKNTQEVFAQVKQIYKTPPIKDFGGFNFSQILPDPSKPSKRSFIEDLLFNKVTLADAGFIKQYGDCLGDIAARDLICAQKFNGLTVLPPLLTDEMIAQYTSALLAGTITSGWTFCAGAALQIPFAMQMAYRFNGIGVTQNVLYENQKLIANQFNSAIGKIQDSLSSTASALGKLQDVVNQNAQALNTLVKQLSSNFGAISSVLNDILSRLDKVEAEVQIDRLITGRLQSLQTYVTQQLIRAAEIRASANLAATKMSECVCGQSKRVDFCGKGYHLMSFPQSAPHGVVFLHVTYVPAQEKNFTTAPAICHDGKAHFPREGVFVSNGTHWFVTQRNFYEPQIITTDNTFVSGNCDVVIGIVNNTVYDPLQPELDS

SEQ ID NO: 3171 - protein, 1147 aa, Artificial Sequence
  SARS-CoV-2/USA/CruiseA-23/2020__EPI_ISL_414482 spike protein (1-1147)(G889C_L1034C)
MFVFLVLLPLVSSQCVNLTTRTQLPPAYTNSFTRGVYYPDKVFRSSVLHSTQDLFLPFFSNVTWFHAIHVSGTNGTKRFDNPVLPFNDGVYFASTEKSNIIRGWIFGTTLDSKTQSLLIVNNATNVVIKVCEFQFCNDPFLGVYYHKNNKSWMESEFRVYSSANNCTFEYVSQPFLMDLEVKQGNFKNLREFVFKNIDGYFKIYSKHTPINLVRDLPQGFSALEPLVDLPIGINITRFQTLLALHRSYLTPGDSSSGWTAGAAAYYVGYLQPRTFLLKYNENGTITDAVDCALDPLSETKCTLKSFTVEKGIYQTSNFRVQPTESIVRFPNITNLCPFGEVFNATRFASVYAWNRKRISNCVADYSVLYNSASFSTFKCYGVSPTKLNDLCFTNVYADSFVIRGDEVRQIAPGQTGKIADYNYKLPDDFTGCVIAWNSNNLDSKVGGNYNYLYRLFRKSNLKPFERDISTEIYQAGSTPCNGVEGFNCYFPLQSYGFQPTNGVGYQPYRVVVLSFELLHAPATVCGPKKSTNLVKNKCVNFNFNGLTGTGVLTESNKKFLPFQQFGRDIADTTDAVRDPQTLEILDITPCSFGGVSVITPGTNTSNQVAVLYQDVNCTEVPVAIHADQLTPTWRVYSTGSNVFQTRAGCLIGAEHVNNSYECDIPIGAGICASYQTQTNSPRRARSVASQSIIAYTMSLGAENSVAYSNNSIAIPTNFTISVTTEILPVSMTKTSVDCTMYICGDSTECSNLLLQYGSFCTQLNRALTGIAVEQDKNTQEVFAQVKQIYKTPPIKDFGGFNFSQILPDPSKPSKRSFIEDLLFNKVTLADAGFIKQYGDCLGDIAARDLICAQKFNGLTVLPPLLTDEMIAQYTSALLAGTITSGWTFCAGAALQIPFAMQMAYRFNGIGVTQNVLYENQKLIANQFNSAIGKIQDSLSSTASALGKLQDVVNQNAQALNTLVKQLSSNFGAISSVLNDILSRLDKVEAEVQIDRLITGRLQSLQTYVTQQLIRAAEIRASANLAATKMSECVCGQSKRVDFCGKGYHLMSFPQSAPHGVVFLHVTYVPAQEKNFTTAPAICHDGKAHFPREGVFVSNGTHWFVTQRNFYEPQIITTDNTFVSGNCDVVIGIVNNTVYDPLQPELDS

SEQ ID NO: 3172 - protein, 1147 aa, Artificial Sequence
  SARS-CoV-2/Hong Kong/case85_VM20002868/2020__EPI_ISL_414519 spike protein (1-1147)(G889C_L1034C)
MFVFLVLVPLVSSQCVNLTTRTQLPPAYTNSFTRGVYYPDKVFRSSVLHSTQDLFLPFFSNVTWFHAIHVSGTNGTKRFDNPVLPFNDGVYFASTEKSNIIRGWIFGTTLDSKTQSLLIVNNATNVVIKVCEFQFCNDPFLGVYYHKNNKSWMESEFRVYSSANNCTFEYVSQPFLMDLEGKQGNFKNLREFVFKNIDGYFKIYSKHTPINLVRDLPQGFSALEPLVDLPIGINITRFQTLLALHRSYLTPGDSSSGWTAGAAAYYVGYLQPRTFLLKYNENGTITDAVDCALDPLSETKCTLKSFTVEKGIYQTSNFRVQPTESIVRFPNITNLCPFGEVFNATRFASVYAWNRKRISNCVADYSVLYNSASFSTFKCYGVSPTKLNDLCFTNVYADSFVIRGDEVRQIAPGQTGKIADYNYKLPDDFTGCVIAWNSNNLDSKVGGNYNYLYRLFRKSNLKPFERDISTEIYQAGSTPCNGVEGFNCYFPLQSYGFQPTNGVGYQPYRVVVLSFELLHAPATVCGPKKSTNLVKNKCVNFNFNGLTGTGVLTESNKKFLPFQQFGRDIADTTDAVRDPQTLEILDITPCSFGGVSVITPGTNTSNQVAVLYQDVNCTEVPVAIHADQLTPTWRVYSTGSNVFQTRAGCLIGAEHVNNSYECDIPIGAGICASYQTQTNSPRRARSVASQSIIAYTMSLGAENSVAYSNNSIAIPTNFTISVTTEILPVSMTKTSVDCTMYICGDSTECSNLLLQYGSFCTQLNRALTGIAVEQDKNTQEVFAQVKQIYKTPPIKDFGGFNFSQILPDPSKPSKRSFIEDLLFNKVTLADAGFIKQYGDCLGDIAARDLICAQKFNGLTVLPPLLTDEMIAQYTSALLAGTITSGWTFCAGAALQIPFAMQMAYRFNGIGVTQNVLYENQKLIANQFNSAIGKIQDSLSSTASALGKLQDVVNQNAQALNTLVKQLSSNFGAISSVLNDILSRLDKVEAEVQIDRLITGRLQSLQTYVTQQLIRAAEIRASANLAATKMSECVCGQSKRVDFCGKGYHLMSFPQSAPHGVVFLHVTYVPAQEKNFTTAPAICHDGKAHFPREGVFVSNGTHWFVTQRNFYEPQIITTDNTFVSGNCDVVIGIVNNTVYDPLQPELDS

SEQ ID NO: 3173 - protein, 1147 aa, Artificial Sequence; identical to SEQ ID NO: 3163
  SARS-CoV-2/England/200990660/2020__EPI_ISL_414523 spike protein (1-1147)(G889C_L1034C)

SEQ ID NO: 3174 - protein, 1147 aa, Artificial Sequence
  SARS-CoV-2/Australia/NSW09/2020__EPI_ISL_413595 spike protein (1-1147)(G889C_L1034C)
MFVFLVLLPLVSSQCVNLTTRTQLPPAYTNSFTRGVYYPDKVFRSSVLHSTQDLFLPFFSNVTWFHAIHVSGTNGTKRFDNPVLPFNDGVYFASTEKSNIIRGWIFGTTLDSKTQSLLIVNNATNVVIKVCEFQFCNDPFLGVYYHKNNKSWMESEFRVYSSANNCTFEYVSQPFLMDLEGKQGNFKNLREFVFKNIDGYFKIYSKHTPINLVRDLPQGFSALEPLVDLPIGINITRFQTLLALHRSYLTPGDSSSGWTAGAAAYYVGYLQPRTFLLKYNENGTITDAVDCALDPLSETKCTLKSFTVEKGIYQTSNFRVQPTESIVRFPNITNLCPFGEVFNATRFASVYAWNRKRISNCVADYSVLYNSASFSTFKCYGVSPTKLNDLCFTNVYADSFVIRGDEVRQIAPGQTGKIADYNYKLPDDFTGCVIAWNSNNLDSKVGGNYNYLYRLFRKSNLKPFERDISTEIYQAGSTPCNGVEGFNCYFPLQSYGFQPTNGVGYQPYRVVVLSFELLHAPATVCGPKKSTNLVKNKCVNFNFNGLTGTGVLTESNKKFLPFQQFGRDIADTTDAVRDPQTLEILDITPCSFGGVSVITPGTNTSNQVAVLYQDVNCTEVPVAIHADQLTPTWRVYSTGSNVFQTRAGCLIGAEHVNNSYECDIPIGAGICASYQTQTNSPRRARSVASQSIIAYTMSLGAENSVAYSNNSIAIPTNFTISVTTEILPVSMTKTSVDCTMYICGDSTECSNLLLQYGSFCTQLNRALTGIAVEQDKNTQEVFAQVKQIYKTPPIKDFGGFNFSQILPDPSKPSKRSFIEDLLFNKVTLADAGFIKQYGDCLGDIAARDLICAQKFNGLTVLPPLLTDEMIAQYTSALLAGTITSGWTFCAGAALQIPFAMQMAYRFNGIGVTQNVLYENQKLIANQFNSAIGKIQDSLSFTASALGKLQDVVNQNAQALNTLVKQLSSNFGAISSVLNDILSRLDKVEAEVQIDRLITGRLQSLQTYVTQQLIRAAEIRASANLAATKMSECVCGQSKRVDFCGKGYHLMSFPQSAPHGVVFLHVTYVPAQEKNFTTAPAICHDGKAHFPREGVFVSNGTHWFVTQRNFYEPQIITTDNTFVSGNCDVVIGIVNNTVYDPLQPELDS

SEQ ID NO: 3175 - protein, 1147 aa, Artificial Sequence; identical to SEQ ID NO: 3155
  SARS-CoV-2/Australia/NSW10/2020__EPI_ISL_413596 spike protein (1-1147)(G889C_L1034C)

SEQ ID NO: 3176 - protein, 1147 aa, Artificial Sequence
  SARS-CoV-2/Switzerland/1000477797/2020__EPI_ISL_413023 spike protein (1-1147)(G889C_L1034C)
MFVFLVLLPLVSSQCVNLTTRTQLPPAYTNSFTRGVYYPDKVFRSSVLHSTQDLFLPFFSNVTWFHAIHVSGTNGTKRFDNPVLPFNDGVYFASTEKSNIIRGWIFGTTLDSKTQSLLIVNNATNVVIKVCEFQFCNDPFLGVYYHKNNKSWMESEFRVYSSANNCTFEYVSQPFLMDLEGKQGNFKNLREFVFKNIDGYFNIYSKHTPINLVRDLPQGFSALEPLVDLPIGINITRFQTLLALHRSYLTPGDSSSGWTAGAAAYYVGYLQPRTFLLKYNENGTITDAVDCALDPLSETKCTLKSFTVEKGIYQTSNFRVQPTESIVRFPNITNLCPFGEVFNATRFASVYAWNRKRISNCVADYSVLYNSASFSTFKCYGVSPTKLNDLCFTNVYADSFVIRGDEVRQIAPGQTGKIADYNYKLPDDFTGCVIAWNSNNLDSKVGGNYNYLYRLFRKSNLKPFERDISTEIYQAGSTPCNGVEGFNCYFPLQSYGFQPTNGVGYQPYRVVVLSFELLHAPATVCGPKKSTNLVKNKCVNFNFNGLTGTGVLTESNKKFLPFQQFGRDIADTTDAVRDPQTLEILDITPCSFGGVSVITPGTNTSNQVAVLYQGVNCTEVPVAIHADQLTPTWRVYSTGSNVFQTRAGCLIGAEHVNNSYECDIPIGAGICASYQTQTNSPRRARSVASQSIIAYTMSLGAENSVAYSNNSIAIPTNFTISVTTEILPVSMTKTSVDCTMYICGDSTECSNLLLQYGSFCTQLNRALTGIAVEQDKNTQEVFAQVKQIYKTPPIKDFGGFNFSQILPDPSKPSKRSFIEDLLFNKVTLADAGFIKQYGDCLGDIAARDLICAQKFNGLTVLPPLLTDEMIAQYTSALLAGTITSGWTFCAGAALQIPFAMQMAYRFNGIGVTQNVLYENQKLIANQFNSAIGKIQDSLSSTASALGKLQDVVNQNAQALNTLVKQLSSNFGAISSVLNDILSRLDKVEAEVQIDRLITGRLQSLQTYVTQQLIRAAEIRASANLAATKMSECVCGQSKRVDFCGKGYHLMSFPQSAPHGVVFLHVTYVPAQEKNFTTAPAICHDGKAHFPREGVFVSNGTHWFVTQRNFYEPQIITTDNTFVSGNCDVVIGIVNNTVYDPLQPELDS

SEQ ID NO: 3177 - protein, 1147 aa, Artificial Sequence
  SARS-CoV-2/Belgium/BA-02291/2020__EPI_ISL_415159 spike protein (1-1147)(G889C_L1034C)
MFVFLVLLPLVSSQCVNLTTRTQLPPAYTNSFTRGVYYPDKVFRSSVLHSTQDLFLPFFSNVTWFHAIHVSGTNGTKRFDNPVLPFNDGVYFASTEKSNIIRGWIFGTTLDSKTQSLLIVNNATNVVIKVCEFQFCNDPFLGVYYHKNNKSWMESEFRVYSSANNCTFEYVSQPFLMDLEGKQGNFKNLREFVFKNIDGYFKIYSKHTPINLVRDLPQGFSALEPLVDLPIGINITRFQTLLALHRSYLTPGDSSSGWTAGAAAYYVGYLQPRTFLLKYNENGTITDAVDCALDPLSETKCTLKSFTVEKGIYQTSNFRVQPTESIVRFPNITNLCPFGEVFNATRFASVYAWNRKRISNCVADYSVLYNSASFSTFKCYGVSPTKLNDLCFTNVYADSFVIRGDEVRQIAPGQTGKIADYNYKLPDDFTGCVIAWNSNNLDSKVGGNYNYLYRLFRRSNLKPFERDISTEIYQAGSTPCNGVEGFNCYFPLQSYGFQPTNGVGYQPYRVVVLSFELLPAPATVCGPKKSTNLVKNKCVNFNFNGLTGTGVLTESNKKFLPFQQFGRDIADTTDAVRDPQTLEILDITPCSFGGVSVITPGTNTSNQVAVLYQGVNCTEVPVAIHADQLTPTWRVYSTGSNVFQTRAGCLIGAEHVNNSYECDIPIGAGICASYQTQTNSPRRARSVASQSIIAYTMSLGAENSVAYSNNSIAIPTNFTISVTTEILPVSMTKTSVDCTMYICGDSTECSNLLLQYGSFCTQLNRALTGIAVEQDKNTQEVFAQVKQIYKTPPIKDFGGFNFSQILPDPSKPSKRSFIEDLLFNKVTLADAGFIKQYGDCLGDIAARDLICAQKFNGLTVLPPLLTDEMIAQYTSALLAGTITSGWTFCAGAALQIPFAMQMAYRFNGIGVTQNVLYENQKLIANQFNSAIGKIQDSLSSAAPALGKLQDVVNQNAQALNTLVKQLSSNFGAISSVLNDILSRLDKVEAEVQIDRLITGRLQSLQTYVTQQLIRAAEIRASANLAATKMSECVCGQSKRVDFCGKGYHLMSFPQSAPHGVVFLHVTYVPAQEKNFTTAPAICHDGKAHFPREGVFVSNGTHWFVTQRNFYEPQIITTDNTFVSGNCDVVIGIVNNTVYDPLQPELDS

SEQ ID NO: 3178 - protein, 1147 aa, Artificial Sequence
  SARS-CoV-2/USA/WA8-UW5/2020__EPI_ISL_413486 spike protein (1-1147)(G889C_L1034C)
MFVFLVLLPLVSSQCVNLTTRTQLPPAYTNSFTRGVYYPDKVFRSSVLHSTQDLFLPFFSNVTWFHAIHVSGTNGTKRFDNPVLPFNDGVYFASTEKSNIIRGWIFGTTLDSKTQSLLIVNNATNVVIKVCEFQFCNDPFLGVYYHKNNKSWMESEFRVYSSANNCTFEYVSQPFLMDLEGKQGNFKNLREFVFKNIDGYFKIYSKHTPINLVRDLPQGFSALEPLVDLPIGINITRFQTLLALHRSYLTPGDSSSGWTAGAAAYYVGYLQPRTFLLKYNENGTITDAVDCALDPLSETKCTLKSFTVEKGIYQTSNFRVQPTESIVRFPNITNLCPFGEVFNATRFASVYAWNRKRISNCVADYSVLYNSASFSTFKCYGVSPTKLNDLCFTNVYADSFVIRGDEVRQIAPGQTGKIADYNYKLPDDFTGCVIAWNSNNLDSKVGGNYNYLYRLFRKSNLKPFERDISTEIYQAGSTPCNGVEGFNCYFPLQSYGFQPTNGVGYQPYRVVVLSFELLHAPATVCGPKKSTNLVKNKCVNFNFNGLTGTGVLTESNKKFLPFQQFGRDIADTTDAVRDPQTLEILDITPCSFGGVSVITPGTNTSNQVAVLYQDVNCTEVPVAIHADQLTPTWRVYSTGSNVFQTRAGCLIGAEYVNNSYECDIPIGAGICASYQTQTNSPRRARSVASQSIIAYTMSLGAENSVAYSNNSIAIPTNFTISVTTEILPVSMTKTSVDCTMYICGDSTECSNLLLQYGSFCTQLNRALTGIAVEQDKNTQEVFAQVKQIYKTPPIKDFGGFNFSQILPDPSKPSKRSFIEDLLFNKVTLADAGFIKQYGDCLGDIAARDLICAQKFNGLTVLPPLLTDEMIAQYTSALLAGTITSGWTFCAGAALQIPFAMQMAYRFNGIGVTQNVLYENQKLIANQFNSAIGKIQDSLSSTASALGKLQDVVNQNAQALNTLVKQLSSNFGAISSVLNDILSRLDKVEAEVQIDRLITGRLQSLQTYVTQQLIRAAEIRASANLAATKMSECVCGQSKRVDFCGKGYHLMSFPQSAPHGVVFLHVTYVPAQEKNFTTAPAICHDGKAHFPREGVFVSNGTHWFVTQRNFYEPQIITTDNTFVSGNCDVVIGIVNNTVYDPLQPELDS

SEQ ID NO: 3179 - protein, 1147 aa, Artificial Sequence
  SARS-CoV-2/England/20102000506/2020__EPI_ISL_415147 spike protein (1-1147)(G889C_L1034C)
MFVFLVLLPLVSSQCVNLTTRTQLPPAYTNSFTRGVYYPDKVFRSSVLHSTQDLFLPFFSNVTWFHAIHVSGTNGTKRFDNPVLPFNDGVYFASTEKSNIIRGWIFGTTLDSKTQSLLIVNNATNVVIKVCEFQFCNDPFLGVYYHKNNKSWMESEFRVYSSANNCTFEYVSQPFLMDLEGKQGNFKNLREFVFKNIDGYFKIYSKHTPINLVRDLPQGFSALEPLVDLPIGINITRFQTLLALHRSYLTPGDSSSGWTAGAAAYYVGYLQPRTFLLKYNENGTITDAVDCALDPLSETKCTLKSFTVEKGIYQTSNFRVQPTESIVRFPNITNLCPFGEVFNATRFASVYAWNRKRISNCVADYSVLYNSASFSTFKCYGVSPTKLNDLCFTNVYADSFVIRGDEVRQIAPGQTGKIADYNYKLPDDFTGCVIAWNSNNLDSKVGGNYNYLYRLFRKSNLKPFERDISTEIYQAGSTPCNGVEGFNCYFPLQSYGFQPTNGVGYQPYRVVVLSFELLHAPATVCGPKKSTNLVKNKCVNFNFNGLTGTGVLTESNKKFLPFQQFGRDIADTTDAVRDPQTLEILDITPCSFGGVSVITPGTNTSNQVAVLYQGVNCTEVPVAIHADQLTPTWRVYSTGSNVFQTRAGCLIGAEHVNNSYECDIPIGAGICASYQTQTNSPRRARSVASQSIIAYTMSLGAENSVAYSNNSIAIPTNFTISVTTEILPVSMTKTSVDCTMYICGDSTECSNLLLQYGSFCTQLNRALTGIAVEQDKNTQEVFAQVKQIYKTPPIKDFGGFNFSQILPDPSKPSKRSFIEDLLFNKVTLADAGFIKQYGYCLGDIAARDLICAQKFNGLTVLPPLLTDEMIAQYTSALLAGTITSGWTFCAGAALQIPFAMQMAYRFNGIGVTQNVLYENQKLIANQFNSAIGKIQDSLSSTASALGKLQDVVNQNAQALNTLVKQLSSNFGAISSVLNDILSRLDKVEAEVQIDRLITGRLQSLQTYVTQQLIRAAEIRASANLAATKMSECVCGQSKRVDFCGKGYHLMSFPQSAPHGVVFLHVTYVPAQEKNFTTAPAICHDGKAHFPREGVFVSNGTHWFVTQRNFYEPQIITTDNTFVSGNCDVVIGIVNNTVYDPLQPELDS

SEQ ID NO: 3180 - protein, 1147 aa, Artificial Sequence
  SARS-CoV-2/Belgium/VAG-03013/2020__EPI_ISL_415155 spike protein (1-1147)(G889C_L1034C)
MFVFLVLLPLVSSQCVNLTTRTQLPPAYTNSFTRGVYYPDKVFRSSVLHSTQDLFLPFFSNVTWFHAIHVSGTNGTKRFDNPVLPFNDGVYFASTEKSNIIRGWIFGTTLDSKTQSLLIVNNATNVVIKVCEFQFCNDPFLGVYYHKNNKSWMESEFRVYSSANNCTFEYVSQPFLMDLEGKQGNFKNLREFVFKNIDGYFKIYSKHTPINLVRDLPQGFSALEPLVDLPIGINITRFQTLLALHRSYLTPGDSSSGWTAGAAAYYVGYLQPRTFLLKYNENGTITDAVDCALDPLSETKCTLKSFTVEKGIYQTSNFRVQPTESIVRFPNITNLCPFGEVFNATRFASVYAWNRKRISNCVADYSVLYNSASFSTFKCYGVSPTKLNDLCFTNVYADSFVIRGDEVRQIAPGQTGKIADYNYKLPDDFTGCVIAWNSNNLDSKVGGNYNYLYRLFRKSNLKPFERDISTEIYQAGSTPCNGVEGFNCYFPLQSYGFQPTNGVGYQPYRVVVLSFELLHAPATVCGPKKSTNLVKNKCVNFNFNGLTGTGVLTESNKKFLPFQQFGRDIADTTDAVRDPQTLEILDITPCSFGGVSVITPGTNTSNQVAVLYQGVNCTEVPVAIHADQLTPTWRVYSTGSNVFQTRAGCLIGAEHVNNSYECDIPIGAGICASYQTQTNSPRRARSVASQSIIAYTMSLGAENSVAYSNNSIAIPTNFTISVTTEILPVSMTKTSVDCTMYICGDSTECSNLLLQYGSFCTQLNRALTGIAVEQDKNTQEVFAQVKQIYKTPPIKDFGGFNFSQILPDPSKPSKRSFIEDLLFNKVTLADAGFIKQYGDCLGDIAARDLICAQKFNGLTVLPPLLTDEMIAQYTSALLAGTITSGWTFCAGAALQIPFAMQMAYRFNGIGVTQNVLYENQKLIANQFNSAIGKIQDSLSSTATALGKLQDVVNQNAQALNTLVKQLSSNFGAISSVLNDILSRLDKVEAEVQIDRLITGRLQSLQTYVTQQLIRAAEIRASANLAATKMSECVCGQSKRVDFCGKGYHLMSFPQSAPHGVVFLHVTYVPAQEKNFTTAPAICHDGKAHFPREGVFVSNGTHWFVTQRNFYEPQIITTDNTFVSGNCDVVIGIVNNTVYDPLQPELDS

SEQ ID NO: 3181 - protein, 1147 aa, Artificial Sequence
  SARS-CoV-2/Belgium/BC-03016/2020__EPI_ISL_415157 spike protein (1-1147)(G889C_L1034C)
MFVFLVLLPLVSSQCVNLTTRTQLPPAYTNSFTRGVYYPDKVFRSSVLHSTQDLFLPFFSNVTWFHAIHVSGTNGTKRFDNPVLPFNDGVYFASTEKSNIIRGWIFGTTLDSKTQSLLIVNNATNVVIKVCEFQFCNDPFLGVYYHKNNKSWMESEFRVYSSANNCTFEYVSQPFLMDLEGKQGNFKNLREFVFKNIDGYFKIYSKHTPINLVRDLPQGFSALEPLVDLPIGINITRFQTLLALHRSYLTPGDSSSGWTAGAAAYYVGYLQPRTFLLKYNENGTITDAVDCALDPLSETKCTLKSFTVEKGIYQTSNFRVQPTESIVRFPNITNLCPFGEVFNATRFASVYAWNRKRISNCVADYSVLYNSASFSTFKCYGVSPTKLNDLCFTNVYADSFVIRGDEVRQIAPGQTGKIADYNYKLPDDFTGCVIAWNSNNLDSKVGGNYNYLYRLFRKSNLKPFERDISTEIYQAGSTPCNGVEGFNCYFPLQSYGFQPTNGVGYQPYRVVVLSFELLHAPATVCGPKKSTNLVKNKCVNFNFNGLTGTGVLTESNKKFLPFQQFGRDIADTTDAVRDPQTLEILDITPCSFGGVSVITPGTNTSNQVAVLYQGVNCTEVPVAIHADQLTPTWRVYSTGSNVFQTRAGCLIGAEHVNNSYECDIPIGAGICASYQTQTNSPRRARSVASQSIIAYTMSLGAENSVAYSNNSIAIPTNFTISVTTEILPVSMTKTSVDCTMYICGDSTECSNLLLQYGSFCTQLNRALTGIAVEQDKNTQEVFAQVKQIYKTPPIKDFGGFNFSQILPDPSKPSKRSFIEDLLFNKVTLADAGFIKQYGDCLGDIAARDLICAQKFNGLTVLPPLLTDEMIAQYTSALLAGTITSGWTFCAGAALQIPFAMQMAYRFNGIGVTQNVLYENQKLIANQFNSAIGKIQDSLSSTAPALGKLQDVVNQNAQALNTLVKQLSSNFGAISSVLNDILSRLDKVEAEVQIDRLITGRLQSLQTYVTQQLIRAAEIRASANLAATKMSECVCGQSKRVDFCGKGYHLMSFPQSAPHGVVFLHVTYVPAQEKNFTTAPAICHDGKAHFPREGVFVSNGTHWFVTQRNFYEPQIITTDNTFVSGNCDVVIGIVNNTVYDPLQPELDS

SEQ ID NO: 3182 - protein, 1147 aa, Artificial Sequence
  SARS-CoV-2/Germany/BavPat3/2020__EPI_ISL_414521 spike protein (1-1147)(G889C_L1034C)
MFVFLVLLPLVSSQCVNLTTRTQLPPAYTNSFTRGVYYPDKVFRSSVLHSTQDLFLPFFSNVTWFHAIHVSGTNGTKRFDNPVLPFNDGVYFASTEKSNIIRGWIFGTTLDSKTQSLLIVNNATNVVIKVCEFQFCNDPFLGVYYHKNNKSWMESEFRVYSSANNCTFEYVSQPFLMDLEGKQGNFKNLREFVFKNIDGYFKIYSKHTPINLVRDLPQGFSALEPLVDLPIGINITRFQTLLALHRSYLTPGDSSSGWTAGAAAYYVGYLQPRTFLLKYNENGTITDAVDCALDPLSETKCTLKSFTVEKGIYQTSNFRVQPTESIVRFPNITNLCPFGEVFNATRFASVYAWNRKRISNCVADYSVLYNSASFSTFKCYGVSPTKLNDLCFTNVYADSFVIRGDEVRQIAPGQTGKIADYNYKLPDDFTGCVIAWNSNNLDSKVGGNYNYLYRLFRKSNLKPFERDISTEIYQAGSTPCNGVEGFNCYFPLQSYGFQPTNGVGYQPYRVVVLSFELLHAPATVCGPKKSTNLVKNKCVNFNFNGLTGTGVLTESNKKFLPFQQFGRDIADTTDAVRDPQTLEILDITPCSFGGVSVITPGTNTSNQVAVLYQDVNCTEVPVAIHADQLTPTWRVYSTGSNVFQTRAGCLIGAEHVNNSYECDIPIGAGICASYQTQTNSPRRARSVASQSIIAYTMSLGAENSVAYSNNSIAIPTNFTISVTTEILPVSMTKTSVDCTMYICGDSTECSNLLLQYGSFCTQLNRALTGIAVEQDKNTQQVFAQVKQIYKTPPIKDFGGFNFSQILPDPSKPSKRSFIEDLLFNKVTLADAGFIKQYGDCLGDIAARDLICAQKFNGLTVLPPLLTDEMIAQYTSALLAGTITSGWTFCAGAALQIPFAMQMAYRFNGIGVTQNVLYENQKLIANQFNSAIGKIQDSLSSTASALGKLQDVVNQNAQALNTLVKQLSSNFGAISSVLNDILSRLDKVEAEVQIDRLITGRLQSLQTYVTQQLIRAAEIRASANLAATKMSECVCGQSKRVDFCGKGYHLMSFPQSAPHGVVFLHVTYVPAQEKNFTTAPAICHDGKAHFPREGVFVSNGTHWFVTQRNFYEPQIITTDNTFVSGNCDVVIGIVNNTVYDPLQPELDS

SEQ ID NO: 3183 - protein, 1147 aa, Artificial Sequence
  SARS-CoV-2/France/HF1805/2020__EPI_ISL_414628 spike protein (1-1147)(G889C_L1034C)
MFVFLVLLPLVSSQCVNLTTRTQLPPAYTNSFTRGVYYPDKVFRSSVLHSTQDLFLPFFSNVTWFHAIHVSGTNGTKRFDNPVLPFNDGVYFASTEKSNIIRGWIFGTTLDSKTQSLLIVNNATNVVIKVCEFQFCNDPFLGVYYHKNNKSWMESEFRVYSSANNCTFEYVSQPFLMDLEGKQGNFKNLREFVFKNIDGYFKIYSKHTPINLVRDLPQGFSALEPLVDLPIGINITRFQTLLALHRSYLTPGDSSSGWTAGAAAYYVGYLQPRTFLLKYNENGTITDAVDCALDPLSETKCTLKSFTVEKGIYQTSNFRVQPTESIVRFPNITNLCPFGEVFNATRFASVYAWNRKRISNCVADYSVLYNSASFSTFKCYGVSPTKLNDLCFTNVYADSFVIRGDEVRQIAPGQTGKIADYNYKLPDDFTGCVIAWNSNNLDSKVGGNYNYLYRLFRKSNLKPFERDISTEIYQAGSTPCNGVEGFNCYFPLQSYGFQPTNGVGYQPYRVVVLSFELLHAPATVCGPKKSTNLVKNKCVNFNFNGLTGTGVLTESNKKFLPFQQFGRDIADTTDAVRDPQTLEILDITPCSFGGVSVITPGTNTSNQVAVLYQGVNCTEVPVAIHADQLTPTWRVYSTGSNVFQTRAGCLIGAEHVNNSYECDIPIGAGICASYQTQTNSPRRARSVASQSIIAYTMSLGAENSVAYSNNSIAIPTNFTISVTTEILPVSMTKTSVDCTMYICGDSTECSNLLLQYGSFCTQLNRALTGIAVEQDKNTQEVFAQVKQIYKTPPIKDFGGFNFSQILPDPSKPSKRSFIEDLLFNKVTLADAGFIKQYGDCLGDIAARDLICAQKFNGLTVLPPLLTDEMIAQYTSALLAGTITSGWTFCAGAALQIPFAMQMAYRFNGIGVTQNVLYENQKLIANQFNSAIGKIQDSLSSTASALGKLQDVVNQNAQALNTLVKQLSSNFGAISSVLNDILSRLDKVEAEVQIDRLITGRLQSLQTYVTQQLIRAAEIRASANLAATKMSECVCGQSKRVDFCGKGYHLMSFPQSAPHGVVFLHVTYVPAQEKNFTTAPAICHDGKAHFPREGVFVSNGTHWFVTQRNFYEPQIITTDNTFVSGNCDVVIGVVNNTVYDPLQPELDS

SEQ ID NO: 3184 - protein, 1147 aa, Artificial Sequence
  SARS-CoV-2/Netherlands/ZuidHolland_9/2020__EPI_ISL_414445 spike protein (1-1147)(G889C_L1034C)
MFVFLVLLPLVSSQCVNLTTRTQLPPAYTNSFTRGVYYPDKVFRSSVLHSTQDLFLPFFSNVTWFHAIHVSGTNGTKRFDNPVLPFNDGVYFASTEKSNIIRGWIFGTTLDSKTQSLLIVNNATNVVIKVCEFQFCNDPFLGVYYHKNNKSWMESEFRVYSSANNCTFEYVSQPFLMDLEGKQGNFKNLREFVFKNIDGYFKIYSKHTPINLVRDLPQGFSALEPLVDLPIGINITRFQTLLALHRSYLTPGDSSSGWTAGAAAYYVGYLQPRTFLLKYNENGTITDAVDCALDPLSETKCTLKSFTVEKGIYQTSNFRVQPTESIVRFPNITNLCPFGEVFNATRFASVYAWNRKRISNCVADYSVLYNSASFSTFKCYGVSPTKLNDLCFTNVYADSFVIRGDEVRQIAPGQTGKIADYNYKLPDDFTGCVIAWNSNNLDSKVGGNYNYLYRLFRKSNLKPFERDISTEIYQAGSTPCNGVEGFNCYFPLQSYGFQPTNGVGYQPYRVVVLSFELLHAPATVCGPKKSTNLVKNKCVNFNFNGLTGTGVLTESNKKFLPFQQFGRDIADTTDAVRDPQTLEILDITPCSFGGVSVITPGTNTSNQVAVLYQGVNCTEVPVAIHADQLTPTWRVYSTGSNVFQTRAGCLIGAEHVNNSYECDIPIGAGICASYQTQTNSPRRARSVASQSIIAYTMSLGAENSVAYSNNSIAIPTNFTISVTTEILPVSMTKTSVDCTMYICGDSTECSNLLLQYGSFCTQLNRALTGIAVEQDKNTQEVFAQVKQIYKTPPIKDFGGFNFSQILPDPSKPSKRSFIEDLLFNKVTLADAGFIKQYGDCLGDIAARDLICVQKFNGLTVLPPLLTDEMIAQYTSALLAGTITSGWTFCAGAALQIPFAMQMAYRFNGIGVTQNVLYENQKLIANQFNSAIGKIQDSLSSTASALGKLQDVVNQNAQALNTLVKQLSSNFGAISSVLNDILSRLDKVEAEVQIDRLITGRLQSLQTYVTQQLIRAAEIRASANLAATKMSECVCGQSKRVDFCGKGYHLMSFPQSAPHGVVFLHVTYVPAQEKNFTTAPAICHDGKAHFPREGVFVSNGTHWFVTQRNFYEPQIITTDNTFVSGNCDVVIGIVNNTVYDPLQPELDS

SEQ ID NO: 3185 - protein, 1147 aa, Artificial Sequence
  SARS-CoV-2/Finland/FIN03032020A/2020__EPI_ISL_413602 spike protein (1-1147)(G889C_L1034C)
MFVFLVLLPLVSSQCVNLTTRTQLPPAYTNSFTRGVYYPDKVFRSSVLHSTQDLFLPFFSNVTWFHAIHVSGTNGTKRFDNPVLPFNDGVYFASTEKSNIIRGWIFGTTLDSKTQSLLIVNNATNVVIKVCEFQFCNDPFLGVYYHKNNKSWMESEFRVYSSANNCTFEYVSQPFLMDLEGKQGNFKNLREFVFKNIDGYFKIYSKHTPINLVRDLPQGFSALEPLVDLPIGINITRFQTLLALHRSYLTPGDSSSGWTAGAAAYYVGYLQPRTFLLKYNENGTITDAVDCALDPLSETKCTLKSFTVEKGIYQTSNFRVQPTESIVRFPNITNLCPFGEVFNATRFASVYAWNRKRISNCVADYSVLYNSASFSTFKCYGVSPTKLNDLCFTNVYADSFVIRGDEVRQIAPGQTGKIADYNYKLPDDFTGCVISWNSNNLDSKVGGNYNYLYRLFRKSNLKPFERDISTEIYQAGSTPCNGVEGFNCYFPLQSYGFQPTNGVGYQPYRVVVLSFELLHAPATVCGPKKSTNLVKNKCVNFNFNGLTGTGVLTESNKKFLPFQQFGRDIADTTDAVRDPQTLEILDITPCSFGGVSVITPGTNTSNQVAVLYQGVNCTEVPVAIHADQLTPTWRVYSTGSNVFQTRAGCLIGAEHVNNSYECDIPIGAGICASYQTQTNSPRRARSVASQSIIAYTMSLGAENSVAYSNNSIAIPTNFTISVTTEILPVSMTKTSVDCTMYICGDSTECSNLLLQYGSFCTQLNRALTGIAVEQDKNTQEVFAQVKQIYKTPPIKDFGGFNFSQILPDPSKPSKRSFIEDLLFNKVTLADAGFIKQYGDCLGDIAARDLICAQKFNGLTVLPPLLTDEMIAQYTSALLAGTITSGWTFCAGAALQIPFAMQMAYRFNGIGVTQNVLYENQKLIANQFNSAIGKIQDSLSSTASALGKLQDVVNQNAQALNTLVKQLSSNFGAISSVLNDILSRLDKVEAEVQIDRLITGRLQSLQTYVTQQLIRAAEIRASANLAATKMSECVCGQSKRVDFCGKGYHLMSFPQSAPHGVVFLHVTYVPAQEKNFTTAPAICHDGKAHFPREGVFVSNGTHWFVTQRNFYEPQIITTDNTFVSGNCDVVIGIVNNTVYDPLQPELDS

SEQ ID NO: 3186 - protein, 1147 aa, Artificial Sequence
  SARS-CoV-2/France/GE1977/2020__EPI_ISL_414632 spike protein (1-1147)(G889C_L1034C)
MFVFLVLLPLVSSQCVNLTTRTQLPPAYTNSFTRGVYYPDKVFRSSVLHSTQDLFLPFFSNVTWFHAIHVSGTNGTKRFDNPVLPFNDGVYFASTEKSNIIRGWIFGTTLDSKTQSLLIVNNATNVVIKVCEFQFCNDPFLGVYYHKNNKSWMESEFRVYSSANNCTFEYVSQPFLMDLEGKQGNFKNLREFVFKNIDGYFKIYSKHTPINLVRDLPQGFSALEPLVDLPIGINITRFQTLLALHRSYLTPGDSSSGWTAGAAAYYVGYLQPRTFLLKYNENGTITDAVDCALDPLSETKCTLKSFTVEKGIYQTSNFRVQPTESIVRFPNITNLCPFGEVFNATRFASVYAWNRKRISNCVADYSVLYNSASFSTFKCYGVSPTKLNDLCFTNVYADSFVIRGDEVRQIAPGQTGKIADYNYKLPDDFTGCVIAWNSNNLDSKVGGNYNYLYRLFRKSNLKPFERDISTEIYQAGSTPCNGVEGFNCYFPLQSYGFQPTNGVGYQPYRVVVLSFELLHAPATVCGPKKSTNLVKNKCVNFNFNGLTGTGVLTESNKKFLPFQQFGRDIADTTDAVRDPQTLEILDITPCSFGGVSVITPGTNTSNQVAVLYQGVNCTEVPVAIHADQLTPTWRVYSTGSNVFQTRAGCLIGAEHVNNSYECDIPIGAGICASYQTQTNSPRRARSVASQSIIAYTMSLGAENSVAYSNNSIAIPTNFTISVTTEILPVSMTKTSVDCTMYICGDSTECSNLLLQYGSFCTQLNRALTGIAVEQDKNTQEVFAQVKQIYKTPPIKDFGGFNFSQILPDPSKPSKRSFIEDLLFNKVTLADAGFIKQYGDCLGDIAARDLICAQKFNGLTVLPPLLTDEMIAQYTSALLAGTITSGWTFCAGAALQIPFAMQMAYRFNGIGVTQNVLYENQKLIANQFNSAIGKIQDSLFSTASALGKLQDVVNQNAQALNTLVKQLSSNFGAISSVLNDILSRLDKVEAEVQIDRLITGRLQSLQTYVTQQLIRAAEIRASANLAATKMSECVCGQSKRVDFCGKGYHLMSFPQSAPHGVVFLHVTYVPAQEKNFTTAPAICHDGKAHFPREGVFVSNGTHWFVTQRNFYEPQIITTDNTFVSGNCDVVIGIVNNTVYDPLQPELDS

SEQ ID NO: 3187 - protein, 1147 aa, Artificial Sequence
  SARS-CoV-2/Finland/FIN-313/2020__EPI_ISL_414641 spike protein (1-1147)(G889C_L1034C)
MFVFLVLLPLVSSQCVNLTTRTQLPPAYTNSFTRGVYYPDKVFRSSVLHSTQDLFLPFFSNVTWFHAIHVSGTNGTKRFDNPVLPFNDGVYFASTEKSNIIRGWIFGTTLDSKTQSLLIVNNATNVVIKVCEFQFCNDPFLGVYYHKNNKSWMESEFRVYSSANNCTFEYVSQPFLMDLEGKQGNFKNLREFVFKNIDGYFKIYSKHTPINLVRDLPQGFSALEPLVDLPIGINITRFKTLLALHRSYLTPGDSSSGWTAGAAAYYVGYLQPRTFLLKYNENGTITDAVDCALDPLSETKCTLKSFTVEKGIYQTSNFRVQPTESIVRFPNITNLCPFGEVFNATRFASVYAWNRKRISNCVADYSVLYNSASFSTFKCYGVSPTKLNDLCFTNVYADSFVIRGDEVRQIAPGQTGKIADYNYKLPDDFTGCVIAWNSNNLDSKVGGNYNYLYRLFRKSNLKPFERDISTEIYQAGSTPCNGVEGFNCYFPLQSYGFQPTNGVGYQPYRVVVLSFELLHAPATVCGPKKSTNLVKNKCVNFNFNGLTGTGVLTESNKKFLPFQQFGRDIADTTDAVRDPQTLEILDITPCSFGGVSVITPGTNTSNQVAVLYQGVNCTEVPVAIHADQLTPTWRVYSTGSNVFQTRAGCLIGAEHVNNSYECDIPIGAGICASYQTQTNSPRRARSVASQSIIAYTMSLGAENSVAYSNNSIAIPTNFTISVTTEILPVSMTKTSVDCTMYICGDSTECSNLLLQYGSFCTQLNRALTGIAVEQDKNTQEVFAQVKQIYKTPPIKDFGGFNFSQILPDPSKPSKRSFIEDLLFNKVTLADAGFIKQYGDCLGDIAARDLICAQKFNGLTVLPPLLTDEMIAQYTSALLAGTITSGWTFCAGAALQIPFAMQMAYRFNGIGVTQNVLYENQKLIANQFNSAIGKIQDSLSSTASALGKLQDVVNQNAQALNTLVKQLSSNFGAISSVLNDILSRLDKVEAEVQIDRLITGRLQSLQTYVTQQLIRAAEIRASANLAATKMSECVCGQSKRVDFCGKGYHLMSFPQSAPHGVVFLHVTYVPAQEKNFTTAPAICHDGKAHFPREGVFVSNGTHWFVTQRNFYEPQIITTDNTFVSGNCDVVIGIVNNTVYDPLQPELDS

SEQ ID NO: 3188 - protein, 1147 aa, Artificial Sequence
  SARS-CoV-2/Netherlands/ZuidHolland_2/2020__EPI_ISL_414556 spike protein (1-1147)(G889C_L1034C)
MFVFLVLLPLVSSQCVNLTTRTQLPPAYTNSFTRGVYYPDKVFRSSVLHSTQDLFLPFFSNVTWFHAIHVSGTNGTKRFDNPVLPFNDGVYFASTEKSNIIRGWIFGTTLDSKTQSLLIVNNATNVVIKVCEFQFCNDPFLGVYYHKNNKSWMESEFRVYSSANNCTFEYVSQPFLMDLEGKQGNFKNLREFVFKNIDGYFKIYSKHTPINLVRDLPQGFSALEPLVDLPIGINITRFQTLLALHRSYLTPGDSSSGWTAGAAAYYVGYLQPRTFLLKYNENGTITDAVDCALDPLSETKCTLKSFTVEKGIYQTSNFRVQPTESIVRFPNITNLCPFGEVFNATRFASVYAWNRKRISNCVADYSVLYNSASFSTFKCYGVSPTKLNDLCFTNVYADSFVIRGDEVRQIAPGQTGKIADYNYKLPDDFTGCVIAWNSNNLDSKVGGNYNYLYRLFRKSNLKPFERDISTEIYQAGSTPCNGVEGFNCYFPLQSYGFQPTNGVGYQPYRVVVLSFELLHAPATVCGPKKSTNLVKNKCVNFNFNGLTGTGVLTESNKKFLPFQQFGRDIADTTDAVRDPQTLEILDITPCSFGGVSVITPGTNTSNQVAVLYQGVNCTEVPVAIHADQLTPTWRVYSTGSNVFQTRAGCLIGAEHVNNSYECDIPIGAGICASYQTQTNSPRRARSVASQSIIAYTMSLGAENSVAYSNNSIAIPTNFTISVTTEILPVSMTKTSVDCTMYICGDSTECSNLLLQYGSFCTQLNRALTGIALEQDKNTQEVFAQVKQIYKTPPIKDFGGFNFSQILPDPSKPSKRSFIEDLLFNKVTLADAGFIKQYGDCLGDIAARDLICAQKFNGLTVLPPLLTDEMIAQYTSALLAGTITSGWTFCAGAALQIPFAMQMAYRFNGIGVTQNVLYENQKLIANQFNSAIGKIQDSLSSTASALGKLQDVVNQNAQALNTLVKQLSSNFGAISSVLNDILSRLDKVEAEVQIDRLITGRLQSLQTYVTQQLIRAAEIRASANLAATKMSECVCGQSKRVDFCGKGYHLMSFPQSAPHGVVFLHVTYVPAQEKNFTTAPAICHDGKAHFPREGVFVSNGTHWFVTQRNFYEPQIITTDNTFVSGNCDVVIGIVNNTVYDPLQPELDS

SEQ ID NO: 3189 - protein, 1147 aa, Artificial Sequence
  SARS-CoV-2/USA/WA-UW31/2020__EPI_ISL_414618 spike protein (1-1147)(G889C_L1034C)
MFVFLVLLPLVSSQCVNLTTRTQLPPAYTNSFTRGVYYPDKVFRSSVLHSTQDLFLPFFSNVTWFHAIHVSGTNGTKRFDNPVLPFNDGVYFASTEKSNIIRGWIFGTTLDSKTQSLLIVNNATNVVIKVCEFQFCNDPFLGVYYHKNNKSWMESEFRVYSSANNCTFEYVSQPFLMDLEGKQGNFKNLREFVFKNIDGYFKIYSKHTPINLVRDLPQGFSALEPLVDLPIGINITRFQTLLALHRSYLTPGDSSSGWTAGAAAYYVGYLQPRTFLLKYNENGTITDAVDCALDPLSETKCTLKSFTVEKGIYQTSNFRVQPTESIVRFPNITNLCPFGEVFNATRFASVYAWNRKRISNCVADYSVLYNSASFSTFKCYGVSPTKLNDLCFTNVYADSFVIRGDEVRQIAPGQTGKIADYNYKLPDDFTGCVIAWNSNNLDSKVGGNYNYLYRLFRKSNLKPFERDISTEIYQAGSTPCNGAEGFNCYFPLQSYGFQPTNGVGYQPYRVVVLSFELLHAPATVCGPKKSTNLVKNKCVNFNFNGLTGTGVLTESNKKFLPFQQFGRDIADTTDAVRDPQTLEILDITPCSFGGVSVITPGTNTSNQVAVLYQDVNCTEVPVAIHADQLTPTWRVYSTGSNVFQTRAGCLIGAEHVNNSYECDIPIGAGICASYQTQTNSPRRARSVASQSIIAYTMSLGAENSVAYSNNSIAIPTNFTISVTTEILPVSMTKTSVDCTMYICGDSTECSNLLLQYGSFCTQLNRALTGIAVEQDKNTQEVFAQVKQIYKTPPIKDFGGFNFSQILPDPSKPSKRSFIEDLLFNKVTLADAGFIKQYGDCLGDIAARDLICAQKFNGLTVLPPLLTDEMIAQYTSALLAGTITSGWTFCAGAALQIPFAMQMAYRFNGIGVTQNVLYENQKLIANQFNSAIGKIQDSLSSTASALGKLQDVVNQNAQALNTLVKQLSSNFGAISSVLNDILSRLDKVEAEVQIDRLITGRLQSLQTYVTQQLIRAAEIRASANLAATKMSECVCGQSKRVDFCGKGYHLMSFPQSAPHGVVFLHVTYVPAQEKNFTTAPAICHDGKAHFPREGVFVSNGTHWFVTQRNFYEPQIITTDNTFVSGNCDVVIGIVNNTVYDPLQPELDS

SEQ ID NO: 3190 - protein, 1147 aa, Artificial Sequence
  SARS-CoV-2/South Korea/SNU01/2020__EPI_ISL_411929 spike protein (1-1147)(G889C_L1034C)
MFVFLVLLPLVSSQCVNLTTRTQLPPAYTNSFTRGVYYPDKVFRSSVLHSTQDLFLPFFSNVTWFHAIHVSGTNGTKRFDNPVLPFNDGVYFASTEKSNIIRGWIFGTTLDSKTQSLLIVNNATNVVIKVCEFQFCNDPFLGVYYHKNNKSWMESEFRVYSSANNCTFEYVSQPFLMDLEGKQGNFKNLREFVFKNIDGYFKIYSKHTPINLVRDLPQGFWALEPLVDLPIGINITRFQTLLALHRSYLTPGDSSSGWTAGAAAYYVGYLQPRTFLLKYNENGTITDAVDCALDPLSETKCTLKSFTVEKGIYQTSNFRVQPTESIVRFPNITNLCPFGEVFNATRFASVYAWNRKRISNCVADYSVLYNSASFSTFKCYGVSPTKLNDLCFTNVYADSFVIRGDEVRQIAPGQTGKIADYNYKLPDDFTGCVIAWNSNNLDSKVGGNYNYLYRLFRKSNLKPFERDISTEIYQAGSTPCNGVEGFNCYFPLQSYGFQPTNGVGYQPYRVVVLSFELLHAPATVCGPKKSTNLVKNKCVNFNFNGLTGTGVLTESNKKFLPFQQFGRDIADTTDAVRDPQTLEILDITPCSFGGVSVITPGTNTSNQVAVLYQDVNCTEVPVAIHADQLTPTWRVYSTGSNVFQTRAGCLIGAEHVNNSYECDIPIGAGICASYQTQTNSPRRARSVASQSIIAYTMSLGAENSVAYSNNSIAIPTNFTISVTTEILPVSMTKTSVDCTMYICGDSTECSNLLLQYGSFCTQLNRALTGIAVEQDKNTQEVFAQVKQIYKTPPIKDFGGFNFSQILPDPSKPSKRSFIEDLLFNKVTLADAGFIKQYGDCLGDIAARDLICAQKFNGLTVLPPLLTDEMIAQYTSALLAGTITSGWTFCAGAALQIPFAMQMAYRFNGIGVTQNVLYENQKLIANQFNSAIGKIQDSLSSTASALGKLQDVVNQNAQALNTLVKQLSSNFGAISSVLNDILSRLDKVEAEVQIDRLITGRLQSLQTYVTQQLIRAAEIRASANLAATKMSECVCGQSKRVDFCGKGYHLMSFPQSAPHGVVFLHVTYVPAQEKNFTTAPAICHDGKAHFPREGVFVSNGTHWFVTQRNFYEPQIITTDNTFVSGNCDVVIGIVNNTVYDPLQPELDS

SEQ ID NO: 3191 - protein, 1147 aa, Artificial Sequence
  SARS-CoV-2/China/WF0004/2020__EPI_ISL_413694 spike protein (1-1147)(G889C_L1034C)
MFVFLVLLPLVSSQCVNLTTRTQLPPAYTNSFTRGVYYPDKVFRSSVLHSTQDLFLPFFSNVTWFHAIHVSGTNGTKRFDNPVLPFNDGVYFASTEKSNIIRGWIFGTTLDSKTQSLLIVNNATNVVIKVCEFQFCNDPFLGVYYHKNNKSWTESEFRVYSSANNCTFEYVSQPFLMDLEGKQGNFKNLREFVFKNIDGYFKIYSKHTPINLVRDLPQGFSALEPLVDLPIGINITRFQTLLALHRSYLTPGDSSSGWTAGAAAYYVGYLQPRTFLLKYNENGTITDAVDCALDPLSETKCTLKSFTVEKGIYQTSNFRVQPTESIVRFPNITNLCPFGEVFNATRFASVYAWNRKRISNCVADYSVLYNSASFSTFKCYGVSPTKLNDLCFTNVYADSFVIRGDEVRQIAPGQTGKIADYNYKLPDDFTGCVIAWNSNNLDSKVGGNYNYLYRLFRKSNLKPFERDISTEIYQAGSTPCNGVEGFNCYFPLQSYGFQPTNGVGYQPYRVVVLSFELLHAPATVCGPKKSTNLVKNKCVNFNFNGLTGTGVLTESNKKFLPFQQFGRDIADTTDAVRDPQTLEILDITPCSFGGVSVITPGTNTSNQVAVLYQDVNCTEVPVAIHADQLTPTWRVYSTGSNVFQTRAGCLIGAEHVNNSYECDIPIGAGICASYQTQTNSPRRARSVASQSIIAYTMSLGAENSVAYSNNSIAIPTNFTISVTTEILPVSMTKTSVDCTMYICGDSTECSNLLLQYGSFCTQLNRALTGIAVEQDKNTQEVFAQVKQIYKTPPIKDFGGFNFSQILPDPSKPSKRSFIEDLLFNKVTLADAGFIKQYGDCLGDIAARDLICAQKFNGLTVLPPLLTDEMIAQYTSALLAGTITSGWTFCAGAALQIPFAMQMAYRFNGIGVTQNVLYENQKLIANQFNSAIGKIQDSLSSTASALGKLQDVVNQNAQALNTLVKQLSSNFGAISSVLNDILSRLDKVEAEVQIDRLITGRLQSLQTYVTQQLIRAAEIRASANLAATKMSECVCGQSKRFDFCGKGYHLMSFPQSAPHGVVFLHVTYVPAQEKNFTTAPAICHDGKAHFPREGVFVSNGTHWFVTQRNFYEPQIITTDNTFVSGNCDVVIGIVNNTVYDPLQPELDS

SEQ ID NO: 3192 - protein, 1147 aa, Artificial Sequence
  SARS-CoV-2/China/WF0028/2020__EPI_ISL_413791 spike protein (1-1147)(G889C_L1034C)
MFVFLVLLPLVSSQCVNLTTRTQLPPAYTNSFTRGVYYPDKVFRSSVLHSTQDLFLPFFSNVTWFHAIHVSGTNGTKRFDNPVLPFNDGVYFASTEKSNIIRGWIFGTTLDSKTQSLLIVNNATNVVIKVCEFQFCNDPFLGVYYHKNNKSWMESEFRVYSSANNCTFEYVSQPFLMDLEGKQGNFKNLREFVFKNIDGYFKIYSKHTPINLVRDLPQGFSALEPLVDLPIGINITRFQTLLALHRSYLTPGDSSSGWTAGAAAYYVGYLQPRTFLLKYNENGTITDAVDCALDPLSETKCTLKSFTVEKGIYQTSNFRVQPTESIVRFPNITNLCPFGEVFNATRFASVYAWNRKRISNCVADYSVLYNSASFSTFKCYGVSPTKLNDLCFTNVYADSFVIRGDEVRQIAPGQTGKIADYNYKLPDDFTGCVIAWNSNNLDSKVGGNYNYLYRLFRKSNLKPFERDISTEIYQAGSTPCNGVEGFNCYFPLQSYGFQPTNGVGYQPYRVVVLSFELLHAPATVCGPKKSTNLVKNKCVNFNFNGLTGTGVLTESNKKFLPFQQFGRDIADTTDAVRDPQTLEILDITPCSFGGVSVITPGTNTSNQVAVLYQDVNCTEVPVAIHADQLTPTWRVYSTGSNVFQTRAGCLIGAEHVNNSYECDIPIGAGICASYQTQTNSPRRARSVASQSIIAYTMSLGAENSVAYSNNSIAIPTNFTISVTTEILPVSMTKTSVDCTMYICGDSTECSNLLLQYGSFCTQLNRALTGIAVEQDKNTQEVFAQVKQIYKTPPIKDFGGFNFSQILPDPSKPSKRSFIEDLLFNKVTLADAGFIKQYGDCLGDIAARDLICAQKFNGLTVLPPLLTDEMIAQYTSALLAGTITSGWTFCAGAALQIPFAMQMAYRFNGIGVTQNVLYENQKLIANQFNSAIGKIQDSLSSTASALGKLQDVVNQNAQALNTLVKQLSSNFGAISSVLNDILSRLDKVEAEVQIDRLITGRLQSLQTYVTQQLIRAAEIRASANLAATKMSECVCGQSKRVDFCGKGYHLMSFPQSAPHGVVFLHVTYVPAQEKNFTTAPAICHDGKAHFPREGVFVSNGTHWFVTQRNFYEPQIITTDNTFVSGNCDVVIGIVNNTVYDPLQPELES

SEQ ID NO: 3193 - protein, 1147 aa, Artificial Sequence
  SARS-CoV-2/2019-nCoV/USA-CruiseA-18/2020__MT159716.1 spike protein (1-1147)(G889C_L1034C)
MFVFLVLLPLVSSQCVNLTTRTQLPPAYTNSFTRGVYYPDKVFRSSVLHSTQDLFLPFFSNVTWFHAIHVSGTNGTKRFDNPVLPFNDGVYFASTEKSNIIRGWIFGTTLDSKTQSLLIVNNATNVVIKVCEFQFCNDPFLGVYYHKNNKSWMESELRVYSSANNCTFEYVSQPFLMDLEGKQGNFKNLREFVFKNIDGYFKIYSKHTPINLVRDLPQGFSALEPLVDLPIGINITRFQTLLALHRSYLTPGDSSSGWTAGAAAYYVGYLQPRTFLLKYNENGTITDAVDCALDPLSETKCTLKSFTVEKGIYQTSNFRVQPTESIVRFPNITNLCPFGEVFNATRFASVYAWNRKRISNCVADYSVLYNSASFSTFKCYGVSPTKLNDLCFTNVYADSFVIRGDEVRQIAPGQTGKIADYNYKLPDDFTGCVIAWNSNNLDSKVGGNYNYLYRLFRKSNLKPFERDISTEIYQAGSTPCNGVEGFNCYFPLQSYGFQPTNGVGYQPYRVVVLSFELLHAPATVCGPKKSTNLVKNKCVNFNFNGLTGTGVLTESNKKFLPFQQFGRDIADTTDAVRDPQTLEILDITPCSFGGVSVITPGTNTSNQVAVLYQDVNCTEVPVAIHADQLTPTWRVYSTGSNVFQTRAGCLIGAEHVNNSYECDIPIGAGICASYQTQTNSPRRARSVASQSIIAYTMSLGAENSVAYSNNSIAIPTNFTISVTTEILPVSMTKTSVDCTMYICGDSTECSNLLLQYGSFCTQLNRALTGIAVEQDKNTQEVFAQVKQIYKTPPIKDFGGFNFSQILPDPSKPSKRSFIEDLLFNKVTLADAGFIKQYGDCLGDIAARDLICAQKFNGLTVLPPLLTDEMIAQYTSALLAGTITSGWTFCAGAALQIPFAMQMAYRFNGIGVTQNVLYENQKLIANQFNSAIGKIQDSLSSTASALGKLQDVVNQNAQALNTLVKQLSSNFGAISSVLNDILSRLDKVEAEVQIDRLITGRLQSLQTYVTQQLIRAAEIRASANLAATKMSECVCGQSKRVDFCGKGYHLMSFPQSAPHGVVFLHVTYVPAQEKNFTTAPAICHDGKAHFPREGVFVSNGTHWFVTQRNFYEPQIITTDNTFVSGNCDVVIGIVNNTVYDPLQPELDS

SEQ ID NO: 3194 - protein, 1147 aa, Artificial Sequence
  SARS-CoV-2/SARS-CoV-2/Yunnan-01/human/2020/CHN__MT049951.1 spike protein (1-1147)(G889C_L1034C)
MFVFLVLLPLVSSQCVNLTTRTQLPPANTNSFTRGVYYPDKVFRSSVLHSTQDLFLPFFSNVTWFHAIHVSGTNGTKRFDNPVLPFNDGVYFASTEKSNIIRGWIFGTTLDSKTQSLLIVNNATNVVIKVCEFQFCNDPFLGVYYHKNNKSWMESEFRVYSSANNCTFEYVSQPFLMDLEGKQGNFKNLREFVFKNIDGYFKIYSKHTPINLVRDLPQGFSALEPLVDLPIGINITRFQTLLALHRSYLTPGDSSSGWTAGAAAYYVGYLQPRTFLLKYNENGTITDAVDCALDPLSETKCTLKSFTVEKGIYQTSNFRVQPTESIVRFPNITNLCPFGEVFNATRFASVYAWNRKRISNCVADYSVLYNSASFSTFKCYGVSPTKLNDLCFTNVYADSFVIRGDEVRQIAPGQTGKIADYNYKLPDDFTGCVIAWNSNNLDSKVGGNYNYLYRLFRKSNLKPFERDISTEIYQAGSTPCNGVEGFNCYFPLQSYGFQPTNGVGYQPYRVVVLSFELLHAPATVCGPKKSTNLVKNKCVNFNFNGLTGTGVLTESNKKFLPFQQFGRDIADTTDAVRDPQTLEILDITPCSFGGVSVITPGTNTSNQVAVLYQDVNCTEVPVAIHADQLTPTWRVYSTGSNVFQTRAGCLIGAEHVNNSYECDIPIGAGICASYQTQTNSPRRARSVASQSIIAYTMSLGAENSVAYSNNSIAIPTNFTISVTTEILPVSMTKTSVDCTMYICGDSTECSNLLLQYGSFCTQLNRALTGIAVEQDKNTQEVFAQVKQIYKTPPIKDFGGFNFSQILPDPSKPSKRSFIEDLLFNKVTLADAGFIKQYGDCLGDIAARDLICAQKFNGLTVLPPLLTDEMIAQYTSALLAGTITSGWTFCAGAALQIPFAMQMAYRFNGIGVTQNVLYENQKLIANQFNSAIGKIQDSLSSTASALGKLQDVVNQNAQALNTLVKQLSSNFGAISSVLNDILSRLDKVEAEVQIDRLITGRLQSLQTYVTQQLIRAAEIRASANLAATKMSECVCGQSKRVDFCGKGYHLMSFPQSAPHGVVFLHVTYVPAQEKNFTTAPAICHDGKAHFPREGVFVSNGTHWFVTQRNFYEPQIITTDNTFVSGNCDVVIGIVNNTVYDPLQPELDS

SEQ ID NO: 3195 - protein, 1147 aa, Artificial Sequence
  SARS-CoV-2/USA/WA-UW292/2020__EPI_ISL_418077 spike protein (1-1147)(G889C_L1034C)
MFVFLVLLPLVSSQCVNLTTRTQLPPAYTNSFTRGVYYPDKVFRSSVLHSTQDLFLPFFSNVTWFHAIHVSGTNGTKRFDNPVLPFNDGVYFASTEKSNIIRGWIFGTTLDSKTQSLLIVNNATNVVIKVCEFQFCNDPFLGVYYHKNNKSWMESEFRVYSSANNCTFEYVSQPFLMDLEGKQGNFKNLREFVFKNIDGYFKIYSKHTPINLVRDLPQGFSALEPLVDLPIGINITRFQTLLALHRSYLTPGDSSSGWTAGAAAYYVGYLQPRTFLLKYNENGTITDAVDCALDPLSETKCTLKSFTVEKGIYQTSNFRVQPTESIVRFPNITNLCPFGEVFNATRFASVYAWNRKRISNCVADYSVLYNSASFSTFKCYGVSPTKLNDLCFTNVYADSFVIRGDEVRQIAPGQTGKIADYNYKLPDDFTGCVIAWNSNNLDSKVGGNYNYLYRLFRKSNLKPFERDISTEIYQASSTPCNGVEGFNCYFPLQSYGFQPTNGVGYQPYRVVVLSFELLHAPATVCGPKKSTNLVKNKCVNFNFNGLTGTGVLTESNKKFLPFQQFGRDIADTTDAVRDPQTLEILDITPCSFGGVSVITPGTNTSNQVAVLYQDVNCTEVPVAIHADQLTPTWRVYSTGSNVFQTRAGCLIGAEHVNNSYECDIPIGAGICASYQTQTNSPRRARSVASQSIIAYTMSLGAENSVAYSNNSIAIPTNFTISVTTEILPVSMTKTSVDCTMYICGDSTECSNLLLQYGSFCTQLNRALTGIAVEQDKNTQEVFAQVKQIYKTPPIKDFGGFNFSQILPDPSKPSKRSFIEDLLFNKVTLADAGFIKQYGDCLGDIAARDLICAQKFNGLTVLPPLLTDEMIAQYTSALLAGTITSGWTFCAGAALQIPFAMQMAYRFNGIGVTQNVLYENQKLIANQFNSAIGKIQDSLSSTASALGKLQDVVNQNAQALNTLVKQLSSNFGAISSVLNDILSRLDKVEAEVQIDRLITGRLQSLQTYVTQQLIRAAEIRASANLAATKMSECVCGQSKRVDFCGKGYHLMSFPQSAPHGVVFLHVTYVPAQEKNFTTAPAICHDGKAHFPREGVFVSNGTHWFVTQRNFYEPQIITTDNTFVSGNCDVVIGIVNNTVYDPLQPELDS

SEQ ID NO: 3196 - protein, 1147 aa, Artificial Sequence
  SARS-CoV-2/Iceland/192/2020__EPI_ISL_417819 spike protein (1-1147)(G889C_L1034C)
MFVFFVLLPLVSSQCVNLTTRTQLPPAYTNSFTRGVYYPDKVFRSSVLHSTQDLFLPFFSNVTWFHAIHVSGTNGTKRFDNPVLPFNDGVYFASTEKSNIIRGWIFGTTLDSKTQSLLIVNNATNVVIKVCEFQFCNDPFLGVYYHKNNKSWMESEFRVYSSANNCTFEYVSQPFLMDLEGKQGNFKNLREFVFKNIDGYFKIYSKHTPINLVRDLPQGFSALEPLVDLPIGINITRFQTLLALHRSYLTPGDSSSGWTAGAAAYYVGYLQPRTFLLKYNENGTITDAVDCALDPLSETKCTLKSFTVEKGIYQTSNFRVQPTESIVRFPNITNLCPFGEVFNATRFASVYAWNRKRISNCVADYSVLYNSASFSTFKCYGVSPTKLNDLCFTNVYADSFVIRGDEVRQIAPGQTGKIADYNYKLPDDFTGCVIAWNSNNLDSKVGGNYNYLYRLFRKSNLKPFERDISTEIYQAGSTPCNGVEGFNCYFPLQSYGFQPTNGVGYQPYRVVVLSFELLHAPATVCGPKKSTNLVKNKCVNFNFNGLTGTGVLTESNKKFLPFQQFGRDIADTTDAVRDPQTLEILDITPCSFGGVSVITPGTNTSNQVAVLYQGVNCTEVPVAIHADQLTPTWRVYSTGSNVFQTRAGCLIGAEHVNNSYECDIPIGAGICASYQTQTNSPRRARSVASQSIIAYTMSLGAENSVAYSNNSIAIPTNFTISVTTEILPVSMTKTSVDCTMYICGDSTECSNLLLQYGSFCTQLNRALTGIAVEQDKNTQEVFAQVKQIYKTPPIKDFGGFNFSQILPDPSKPSKRSFIEDLLFNKVTLADAGFIKQYGDCLGDIAARDLICAQKFNGLTVLPPLLTDEMIAQYTSALLAGTITSGWTFCAGAALQIPFAMQMAYRFNGIGVTQNVLYENQKLIANQFNSAIGKIQDSLSSTASALGKLQDVVNQNAQALNTLVKQLSSNFGAISSVLNDILSRLDKVEAEVQIDRLITGRLQSLQTYVTQQLIRAAEIRASANLAATKMSECVCGQSKRVDFCGKGYHLMSFPQSAPHGVVFLHVTYVPAQEKNFTTAPAICHDGKAHFPREGVFVSNGTHWFVTQRNFYEPQIITTDNTFVSGNCDVVIGIVNNTVYDPLQPELDS

SEQ ID NO: 3197 - protein, 1147 aa, Artificial Sequence
  SARS-CoV-2/Belgium/ULG-6939/2020__EPI_ISL_417020 spike protein (1-1147)(G889C_L1034C)
MFVFLVLLPLVSSQCVNLTTRTQLPPAYTNSFTRGVYYPDKVFRSSVLHSTQDLFLPFFSNVTWFHAIHVSGTNGTKRFDNPVLPFNDGVYFASTEKSNIIRGWIFGTTLDSKTQSLLIVNNATNVVIKVCEFQFCNDPFLGVYYHKNNKSWMESEFRVYSSANNCTFEYVSQPFLMDLEGKQGNFKNLREFVFKNIDGYFKIYSKHTPINLVRDLPQGFSALEPLVDLPIGINITRFQTLLALHRSYLTPGDSSSGWTAGAAAYYVGYLQPRTFLLKYNENGTITDAVDCALDPLSETKCTLKSFTVEKGIYQTSNFRVQPTESIVRFPNITNLCPFGEVFNATRFASVYAWNRKRISNCVADYSVLYNSASFSTFKCYGVSPTKLNDLCFTNVYADSFVIRGDEVRQIAPGQTGKIADYNYKLPDDFTGCVIAWNSNNLDSKVGGNYNYLYRLFRKSNLKPFERDISTEIYQAGSTPCNGVEGFNCYFPLQSYGFQPTNGVGYQPYRVVVLSFELLHAPATVCGPKKSTNLVKNKCVNFNFNGLTGTGVLTESNKKFLPFQQFGRDIADTTDAVRDPQTLEILDITPCSFGGVSVITPGTNTSNQVAVLYQGVNCTEVPVAIHADQLTPTWRVYSTGSNVFQTRAGCLIGAEHVNNSYECDIPIGAGICASYQTQTNSPRRARSVASQSIIAYTMSLGAENSVVYSNNSIAIPTNFTISVTTEILPVSMTKTSVDCTMYICGDSTECSNLLLQYGSFCTQLNRALTGIAVEQDKNTQEVFAQVKQIYKTPPIKDFGGFNFSQILPDPSKPSKRSFIEDLLFNKVTLADAGFIKQYGDCLGDIAARDLICAQKFNGLTVLPPLLTDEMIAQYTSALLAGTITSGWTFCAGAALQIPFAMQMAYRFNGIGVTQNVLYENQKLIANQFNSAIGKIQDSLSSTASALGKLQDVVNQNAQALNTLVKQLSSNFGAISSVLNDILSRLDKVEAEVQIDRLITGRLQSLQTYVTQQLIRAAEIRASANLAATKMSECVCGQSKRVDFCGKGYHLMSFPQSAPHGVVFLHVTYVPAQEKNFTTAPAICHDGKAHFPREGVFVSNGTHWFVTQRNFYEPQIITTDNTFVSGNCDVVIGIVNNTVYDPLQPELDS

SEQ ID NO: 3198 - protein, 1147 aa, Artificial Sequence
  SARS-CoV-2/France/HF2496/2020__EPI_ISL_418231 spike protein (1-1147)(G889C_L1034C)
MFVFLVLLPLVSSQCVNLTTRTQLPPAYTNSFTRGVYYPDKVFRSSVLHSTQDLFLPFFSNVTWFHAIHVSGTNGTKRFDNPVLPFNDGVYFASTEKSNIIRGWIFGTTLDSKTQSLLIVNNATNVVIKVCEFQFCNDPFLGVYYHKNNKSWMESEFRVYSSANNCTFEYVSQPFLMDLEGKQGNFKNLREFVFKNIDGYFKIYSKHTPINLVRDLPQGFSALEPLVDLPIGINITRFQTLLALHRSYLTPGDSSSGWTAGAAAYYVGYLQPRTFLLKYNENGTITDAVDCALDPLSETKCTLKSFTVEKGIYQTSNFRVQPTESIVRFPNITNLCPFGEVFNATRFASVYAWNRKRISNCVADYSVLYNSASFSTFKCYGVSPTKLNDLCFTNVYADSFVIRGDEVRQIAPGQTGKIADYNYKLPDDFTGCVIAWNSNNLDSKVGGNYNYLYRLFRKSNLKPFERDISTEIYQAGSTPCNGVEGFNCYFPLQSYGFQPTNGVGYQPYRVVVLSFELLHAPATVCGPKKSTNLVKNKCVNFNFNGLTGTGVLTESNKKFLPFQQFGRDIADTTDAVRDPQTLEILDITPCSFGGVSVITPGTNTSNQVAVLYQGVNCTEVPVAIHADQLTPTWRVYSTGSNVFQTRAGCLIGAEHVNNSYECDIPIGAGICASYQTQTNSPRRARSVASQSIIAYTMSLGAENSVAYSNNSIAIPTNFTISVTTEILPVSMTKTSVDCTMYICGDSTECSNLLLQYGSFCTQLNRALTGIAVEQDKNTQEVFAQVKQIYKTPPIKDFGGFNFSQILPDPSKPSKRSFIEDLLFNKVTLADAGFIKQYGDCLGDIVARDLICAQKFNGLTVLPPLLTDEMIAQYTSALLAGTITSGWTFCAGAALQIPFAMQMAYRFNGIGVTQNVLYENQKLIANQFNSAIGKIQDSLSSTASALGKLQDVVNQNAQALNTLVKQLSSNFGAISSVLNDILSRLDKVEAEVQIDRLITGRLQSLQTYVTQQLIRAAEIRASANLAATKMSECVCGQSKRVDFCGKGYHLMSFPQSAPHGVVFLHVTYVPAQEKNFTTAPAICHDGKAHFPREGVFVSNGTHWFVTQRNFYEPQIITTDNTFVSGNCDVVIGIVNNTVYDPLQPELDS

SEQ ID NO: 3199 - protein, 1147 aa, Artificial Sequence
  SARS-CoV-2/USA/WA-UW291/2020__EPI_ISL_418076 spike protein (1-1147)(G889C_L1034C)
MFVFLVLLPLVSSQCVNLTTRTQLPPAYTNSFTRGVYYPDKVFRSSVLHSTQDLFLPFFSNVTWFHAIHVSGTNGTKRFDNPVLPFNDGVYFASTEKSNIIRGWIFGTTLDSKTQSLLIVNNATNVVIKVCEFQFCNDPFLGVYYHKNNKSWMESEFRVYSSANNCTFEYVSQPFLMDLEGKQGNFKNLREFVFKNIDGYFKIYSKHTPINLVRDLPQGFSALEPLVDLPIGINITRFQTLLALHRSYLTPGDSSSGWTAGAAAYYVGYLQPRTFLLKYNENGTITDAVDCALDPLSETKCTLKSFTVEKGIYQTSNFRVQPTESIVRFPNITNLCPFGEVFNATRFASVYAWNRKRISNCVADYSVLYNSASFSTFKCYGVSPTKLNDLCFTNVYADSFVIRGDEVRQIAPGQTGKIADYNYKLPDDFTGCVIAWNSNNLDSKVGGNYNYLYRLFRKSNLKPFERDISTEIYQAGSTPCNGVEGFNCYFPLQSYGFQPTNGVGYQPYRVVVLSFELLHAPATVCGPKKSTNLVKNKCVNFNFNGLTGTGVLTESNKKFLPFQQFGRDIADTTDAVRDPQTLEILDITPCSFGGVSVITPGTNTSNQVAVLYQGVNCTEVPVAIHADQLTPTWRVYSTGSNVFQTRAGCLIGAEHVNNSYECDIPIGAGICASYQTQTNSPRRARSVASQSIIAYTMSLGAENSVAYSNNSIAIPTNFTISVTTEILPVSMTKTSVDCTMYICGDSTECSNLLLQYGSFCTQLNRALTGIAVEQDKNTQEVFAQVKQIYKTPPIKDFGGFNFSQILPDPSKPSKRSFIEDLLFNKVTLADAGFIKQYGDCLGDIAARDLICAQKFNGLTVLPPLLTDEMIAQYTSALLAGTITSGWTFCAGAALQIPFAMQMAYRFNGIGVTQNVLYENQKLIANQFNSAIGKIQYSLSSTASALGKLQDVVNQNAQALNTLVKQLSSNFGAISSVLNDILSRLDKVEAEVQIDRLITGRLQSLQTYVTQQLIRAAEIRASANLAATKMSECVCGQSKRVDFCGKGYHLMSFPQSAPHGVVFLHVTYVPAQEKNFTTAPAICHDGKAHFPREGVFVSNGTHWFVTQRNFYEPQIITTDNTFVSGNCDVVIGIVNNTVYDPLQPELDS

SEQ ID NO: 3200 - protein, 1147 aa, Artificial Sequence; identical to SEQ ID NO: 3163
  SARS-CoV-2/Portugal/PT0034/2020__EPI_ISL_418019 spike protein (1-1147)(G889C_L1034C)

SEQ ID NO: 3201 - protein, 1147 aa, Artificial Sequence; identical to SEQ ID NO: 3155
  SARS-CoV-2/Iceland/202/2020__EPI_ISL_417750 spike protein (1-1147)(G889C_L1034C)

SEQ ID NO: 3202 - protein, 1147 aa, Artificial Sequence
  SARS-CoV-2/USA/WA-UW261/2020__EPI_ISL_418046 spike protein (1-1147)(G889C_L1034C)
MFVFLVLLPLVSSQCVNLTTRTQLPPAYTNSFTRGVYYPDKVFRSSVLHSTQDLFLPFFSNVTWFHAIHVSGTNGTKRFDNPVLPFNDGVYFASTEKSNIIRGWIFGTTLDSKTQSLLIVNNATNVVIKVCEFQFCNDPFLGVYYHKNNKSWMESEFRVYSSANNCTFEYVSQPFLMDLEGKQGNFKNLREFVFKNIDGYFKIYSKHTPINLVRDLPQGFSALEPLVDLPIGINITRFQTLLALHRSYLTPGDSSSGWTAGAAAYYVGYLQPRTFLLKYNENGTITDAVDCALDPLSETKCTLKSFTVEKGIYQTSNFRVQPTESIVRFPNITNLCPFGEVFNATRFTSVYAWNRKRISNCVADYSVLYNSASFSTFKCYGVSPTKLNDLCFTNVYADSFVIRGDEVRQIAPGQTGKIADYNYKLPDDFTGCVIAWNSNNLDSKVGGNYNYLYRLFRKSNLKPFERDISTEIYQAGSTPCNGVEGFNCYFPLQSYGFQPTNGVGYQPYRVVVLSFELLHAPATVCGPKKSTNLVKNKCVNFNFNGLTGTGVLTESNKKFLPFQQFGRDIADTTDAVRDPQTLEILDITPCSFGGVSVITPGTNTSNQVAVLYQDVNCTEVPVAIHADQLTPTWRVYSTGSNVFQTRAGCLIGAEHVNNSYECDIPIGAGICASYQTQTNSPRRARSVASQSIIAYTMSLGAENSVAYSNNSIAIPTNFTISVTTEILPVSMTKTSVDCTMYICGDSTECSNLLLQYGSFCTQLNRALTGIAVEQDKNTQEVFAQVKQIYKTPPIKDFGGFNFSQILPDPSKPSKRSFIEDLLFNKVTLADAGFIKQYGDCLGDIAARDLICAQKFNGLTVLPPLLTDEMIAQYTSALLAGTITSGWTFCAGAALQIPFAMQMAYRFNGIGVTQNVLYENQKLIANQFNSAIGKIQDSLSSTASALGKLQDVVNQNAQALNTLVKQLSSNFGAISSVLNDILSRLDKVEAEVQIDRLITGRLQSLQTYVTQQLIRAAEIRASANLAATKMSECVCGQSKRVDFCGKGYHLMSFPQSAPHGVVFLHVTYVPAQEKNFTTAPAICHDGKAHFPREGVFVSNGTHWFVTQRNFYEPQIITTDNTFVSGNCDVVIGIVNNTVYDPLQPELDS

SEQ ID NO: 3203 - protein, 1147 aa, Artificial Sequence
  SARS-CoV-2/Portugal/PT0035/2020__EPI_ISL_418020 spike protein (1-1147)(G889C_L1034C)
MFVFLVLLPLVSSQCVNLTTRTQLPPAYTNSFTRGVYYPDKVFRSSVLHSTQDLFLPFFSNVTWFHAIHVSGTNGTKRFDNPVLPFNDGVYFASTEKSNIIRGWIFGTTLDSKTQSLLIVNNATNVVIKVCEFQFCNDPFLGVYYHKNNKSWMESEFRVYSSANNCTFEYVSQPFLMDLEGKQGNFKNLREFVFKNIDGYFKIYSKHTPINLVRDLPQGFSALEPLVDLPIGINITRFQTLLALHRSYLTPGDSSSGWTAGAAAYYVGYLQPRTFLLKYNENGTITDAVDCALDPLSETKCTLKSFTVEKGIYQTSNFRVQPTESIVRFPNITNLCPFGEVFNATRFASVYAWNRKRISNCVADYSVLYNSASFSTFKCYGVSPTKLNDLCFTNVYADSFVIRGDEVRQIAPGQTGKIADYNYKLPDDFTGCVIAWNSNNLDSKVGGNYNYLYRLFRKSNLKPFERDISTEIYQAGSTPCNGVEGFNCYFPLQSYGFQPTNGVGYQPYRVVVLSFELLHAPATVCGPKKSTNLVKNKCVNFNFNGLTGTGVLTESNKKFLPFQQFGRDIADTTDAVRDPQTLEILDITPCSFGGVSVITPGTNTSNQVAVLYQDVNCTEVPVAIHADQLTPTWRVYSTGSNVFQTRAGCLIGAEHVNNSYECDIPIGAGICASYQTQTNSPRRARSVASQSIIAYTMSLGAENSVAYSNNSIAIPTNFTISVTTEILPVSMTKTSVDCTMYICGDSTECSNLLLQYGSFCTQLNRALTGIAVEQDKNTQEVFAQVKQIYKTPPIKDFGGFNFSQILPDPSKPSKRSFIEDLLFNKVTLADAGFIKQYGDCLGDISARDLICAQKFNGLTVLPPLLTDEMIAQYTSALLAGTITSGWTFCAGAALQIPFAMQMAYRFNGIGVTQNVLYENQKLIANQFNSAIGKIQDSLSSTASALGKLQDVVNQNAQALNTLVKQLSSNFGAISSVLNDILSRLDKVEAEVQIDRLITGRLQSLQTYVTQQLIRAAEIRASANLAATKMSECVCGQSKRVDFCGKGYHLMSFPQSAPHGVVFLHVTYVPAQEKNFTTAPAICHDGKAHFPREGVFVSNGTHWFVTQRNFYEPQIITTDNTFVSGNCDVVIGIVNNTVYDPLQPELDS

SEQ ID NO: 3204 - protein, 1147 aa, Artificial Sequence
  SARS-CoV-2/USA/NY-NYUMC7/2020__EPI_ISL_418192 spike protein (1-1147)(G889C_L1034C)
MFVFLVLLPLVSSQCVNLTTRTQLPPAYTNSFTRGVYYPDKVFRSSVLHSTQDLFLPFFSNVTWFHAIHVSGTNGTKRFDNPVLPFNDGVYFASTEKSNIIRGWIFGTTLDSKTQSLLIVNNATNVVIKVCEFQFCNDPFLGVYHHKNNKSWMESEFRVYSSANNCTFEYVSQPFLMDLEGKQGNFKNLREFVFKNIDGYFKIYSKHTPINLVRDLPQGFSALEPLVDLPIGINITRFQTLLALHRSYLTPGDSSSGWTAGAAAYYVGYLQPRTFLLKYNENGTITDAVDCALDPLSETKCTLKSFTVEKGIYQTSNFRVQPTESIVRFPNITNLCPFGEVFNATRFASVYAWNRKRISNCVADYSVLYNSASFSTFKCYGVSPTKLNDLCFTNVYADSFVIRGDEVRQIAPGQTGKIADYNYKLPDDFTGCVIAWNSNNLDSKVGGNYNYLYRLFRKSNLKPFERDISTEIYQAGSTPCNGVEGFNCYFPLQSYGFQPTNGVGYQPYRVVVLSFELLHAPATVCGPKKSTNLVKNKCVNFNFNGLTGTGVLTESNKKFLPFQQFGRDIADTTDAVRDPQTLEILDITPCSFGGVSVITPGTNTSNQVAVLYQGVNCTEVPVAIHADQLTPTWRVYSTGSNVFQTRAGCLIGAEHVNNSYECDIPIGAGICASYQTQTNSPRRARSVASQSIIAYTMSLGAENSVAYSNNSIAIPTNFTISVTTEILPVSMTKTSVDCTMYICGDSTECSNLLLQYGSFCTQLNRALTGIAVEQDKNTQEVFAQVKQIYKTPPIKDFGGFNFSQILPDPSKPSKRSFIEDLLFNKVTLADAGFIKQYGDCLGDIAARDLICAQKFNGLTVLPPLLTDEMIAQYTSALLAGTITSGWTFCAGAALQIPFAMQMAYRFNGIGVTQNVLYENQKLIANQFNSAIGKIQDSLSSTASALGKLQDVVNQNAQALNTLVKQLSSNFGAISSVLNDILSRLDKVEAEVQIDRLITGRLQSLQTYVTQQLIRAAEIRASANLAATKMSECVCGQSKRVDFCGKGYHLMSFPQSAPHGVVFLHVTYVPAQEKNFTTAPAICHDGKAHFPREGVFVSNGTHWFVTQRNFYEPQIITTDNTFVSGNCDVVIGIVNNTVYDPLQPELDS

SEQ ID NO: 3205 - protein, 1147 aa, Artificial Sequence
  SARS-CoV-2/Iceland/189/2020__EPI_ISL_417709 spike protein (1-1147)(G889C_L1034C)
MFVFLVLLPLVSSQCVNLTTRTQLPPAYTNSFTRGVYYPDKVFRSSVLHSTQDLFLPFFSNVTWFHAIHVSGTNGTKRFDNPVLPFNDGVYFASTEKSNIIRGWIFGTTLDSKTQSLLIVNNATNVVIKVCEFQFCNDPFLGVYYHKNNKSWMESEFRVYSSANNCTFEYVSQPFLMDLEGKQGNFKNLREFVFKNIDGYFKIYSKHTPINLVRDLPQGFSALEPLVDLPIGINITRFQTLLALHRSYLTPGDSSSGWTAGAAAYYVGYLQPRTFLLKYNENGTITDAVDCALDPLSETKCTLKSFTVEKGIYQTSNFRVQPTESIVRFPNITNLCPFGEVFNATRFASVYAWNRKRISNCVADYSVLYNSASFSTFKCYGVSPTKLNDLCFTNVYADSFVIRGDEVRQIAPGQTGKIADYNYKLPDDFTGCVIAWNSNNLDSKVGGNYNYLYRLFRKSNLKPFERDISTEIYQAGSTPCNGVEGFNCYFPLQSYGFQPTNGVGYQPYRVVVLSFELLHAPATVCGPKKSTNLVKNKCVNFNFNGLTGTGVLTESNKKFLPFQQFGRDIADTTDAVRDPQTLEILDITPCSFGGVSVITPGTNTSNQVAVLYQGVNCTEVPVAIHADQLTPTWRVYSTGSNVFQTRAGCLIGAEHVNNSYECDIPIGAGICASYQTQTNSPRRARSVASQSIIAYTMSLGAENSVAYSNNSIAIPTNFTISVTTEILPVSMTKTSVDCTMYICGDSTECSNLLLQYGSFCTQLNRALTGIAVEQDKNTQEVFAQVKQIYKTPPIKDFGGFNFSQILPDPSKPSKRSFIEDLLFNKVTLADAGFTKQYGDCLGDIAARDLICAQKFNGLTVLPPLLTDEMIAQYTSALLAGTITSGWTFCAGAALQIPFAMQMAYRFNGIGVTQNVLYENQKLIANQFNSAIGKIQDSLSSTASALGKLQDVVNQNAQALNTLVKQLSSNFGAISSVLNDILSRLDKVEAEVQIDRLITGRLQSLQTYVTQQLIRAAEIRASANLAATKMSECVCGQSKRVDFCGKGYHLMSFPQSAPHGVVFLHVTYVPAQEKNFTTAPAICHDGKAHFPREGVFVSNGTHWFVTQRNFYEPQIITTDNTFVSGNCDVVIGIVNNTVYDPLQPELDS

SEQ ID NO: 3206 - protein, 1147 aa, Artificial Sequence
  SARS-CoV-2/Australia/NSW56/2020__EPI_ISL_417408 spike protein (1-1147)(G889C_L1034C)
MFVFLVLLPLVSSQCVNLTTRTQLPPAYTNSFTRGVYYPDKVFRSSVLHSTQDLFLPFFSNVTWFHAIHVSGTNGTKRFDNPVLPFNDGVYFASTEKSNIIRGWIFGTTLDSKTQSLLIVNNATNVVIKVCEFQFCNDPFLGVYYHKNNKSWMESEFRVYSSANNCTFEYVSQPFLMDLEGKQGNFKNLREFVFKNIDGYFKIYSKHTPINLVRDLPQGFSALEPLVDLPIGINITRFQTLLALHRSYLTPGDSSSGWTAGAAAYYVGYLQPRTFLLKYNENGTITDAVDCALDPLSETKCTLKSFTVEKGIYQTSNFRVQPTESIVRFPNITNLCPFGEVFNATRFASVYAWNRKRISNCVADYSVLYNSASFSTFKCYGVSPTKLNDLCFTNVYADSFVIRGDEVRQIAPGQTGKIADYNYKLPDDFTGCVIAWNSNNLDSKVGGNYNYLYRLFRKSNLKPFERDISTEIYQAGSTPCNGVEGFNCYFPLQSYGFQPTNGVGYQPYRVVVLSFELLHAPATVCGPKKSTNLVKNKCVNFNFNGLTGTGVLTESNKKFLPFQQFGRDIADTTDAVRDPQTLEILDITPCSFGGVSVITPGTNTSNQVAVLYQDVNCTEVPVAIHADQLTPTWRVYSTGSNVFQTRAGCLIGAEHVNNSYECDIPIGAGICASYQTQTNSPRRARSVASQSIIAYTMSLGAENSVAYSNNSIAIPTNFTISVTTEILPVSMTKTSVDCTMYICGDSTECSNLLLQYGSFCTQLNRALTGIAVEQDKNTQEVFAQVKQIYKTPPIKDFGGFNFSQILPDSSKPSKRSFIEDLLFNKVTLADAGFIKQYGDCLGDIAARDLICAQKFNGLTVLPPLLTDEMIAQYTSALLAGTITSGWTFCAGAALQIPFAMQMAYRFNGIGVTQNVLYENQKLIANQFNSAIGKIQDSLSSTASALGKLQDVVNQNAQALNTLVKQLSSNFGAISSVLNDILSRLDKVEAEVQIDRLITGRLQSLQTYVTQQLIRAAEIRASANLAATKMSECVCGQSKRVDFCGKGYHLMSFPQSAPHGVVFLHVTYVPAQEKNFTTAPAICHDGKAHFPREGVFVSNGTHWFVTQRNFYEPQIITTDNTFVSGNCDVVIGIVNNTVYDPLQPELDS

SEQ ID NO: 3207 - protein, 1147 aa, Artificial Sequence
  SARS-CoV-2/Iceland/280/2020__EPI_ISL_417608 spike protein (1-1147)(G889C_L1034C)
MFVFLVLLPLVSSQCVNLTTRTQLPPAYTNSFTRGVYYPDKVFRSSVLHSTQDLFLPFFSNVTWFHAIHVSGTNGTKRFDNPVLPFNDGVYFASTEKSNIIRGWIFGTTLDSKTQSLLIVNNATNVVIKVCEFQFCNDPFLGVYYHKNNKSWMESEFRVYSSANNCTFEYVSQPFLMDLEGKQGNFKNLREFVFKNIDGYFKIYSKHTPINLVRDLPQGFSALEPLVDLPIGINITRFQTLLALHRSYLTPGDSSSGWTAGAAAYYVGYLQPRTFLLKYNENGTITDAVDCALDPLSETKCTLKSFTVEKGIYQTSNFRVQPTESIVRFPNITNLCPFGEVFNATRFASVYAWNRKRISNCVADYSVLYNSASFSTFKCYGVSPTKLNDLCFTNVYADSFVIRGDEVRQIAPGQTGKIADYNYKLPDDFTGCVIAWNSNNLDSKVGGNYNYLYRLFRKSNLKPFERDISTEIYQAGSTPCNGVEGFNCYFPLQSYGFQPTNGVGYQPYRVVVLSFELLHAPATVCGPKKSTNLVKNKCVNFNFNGLTGTGVLTESNKKFLPFQQFGRDIADTTDAVRDPQTLEILDITPCSFGGVSVITPGTNTSNQVAVLYQGVNCTEVPVAIHADQLTPTWRVYSTGSNVFQTRAGCLIGAEHVNNSYECDIPIGAGICASYHTQTNSPRRARSVASQSIIAYTMSLGAENSVAYSNNSIAIPTNFTISVTTEILPVSMTKTSVDCTMYICGDSTECSNLLLQYGSFCTQLNRALTGIAVEQDKNTQEVFAQVKQIYKTPPIKDFGGFNFSQILPDPSKPSKRSFIEDLLFNKVTLADAGFIKQYGDCLGDIAARDLICAQKFNGLTVLPPLLTDEMIAQYTSALLAGTITSGWTFCAGAALQIPFAMQMAYRFNGIGVTQNVLYENQKLIANQFNSAIGKIQDSLSSTASALGKLQDVVNQNAQALNTLVKQLSSNFGAISSVLNDILSRLDKVEAEVQIDRLITGRLQSLQTYVTQQLIRAAEIRASANLAATKMSECVCGQSKRVDFCGKGYHLMSFPQSAPHGVVFLHVTYVPAQEKNFTTAPAICHDGKAHFPREGVFVSNGTHWFVTQRNFYEPQIITTDNTFVSGNCDVVIGIVNNTVYDPLQPELDS

SEQ ID NO: 3208 - protein, 1147 aa, Artificial Sequence; identical to SEQ ID NO: 3163
  SARS-CoV-2/Iceland/247/2020__EPI_ISL_417575 spike protein (1-1147)(G889C_L1034C)

SEQ ID NO: 3209 - protein, 1147 aa, Artificial Sequence
  SARS-CoV-2/Iceland/238/2020__EPI_ISL_417566 spike protein (1-1147)(G889C_L1034C)
MFVFLVLLPLVSSQCVNLTTRTQLPPAYTNSFTRGVYYPDKVFRSSVLHSTQDLFLPFFSNVTWFHAIHVSGTNGTKRFDNPVLPFNDGVYFASTEKSNIIRGWIFGTTLDSKTQSLLIVNNATNVVIKVCEFQFCNDPFLGVYYHKNNKSWMESEFRVYSSANNCTFEYVSQPFLMDLEGKQGNFKNLREFVFKNIDGYFKIYSKHTPINLVRDLPQGFSALEPLVDLPIGINITRFQTLLALHRSYLTPGDSSSGWTAGAAAYYVGYLQPRTFLLKYNENGTITDAVDCALDPLSETKCTLKSFTVEKGIYQTSNFRVQPTESIVRFPNITNLCPFGEVFNATRFASVYAWNRKRISNCVADYSVLYNSASFSTFKCYGVSPTKLNDLCFTNVYADSFVIRGDEVRQIAPGQTGKIADYNYKLPDDFTGCVIAWNSNNLDSKVGGNYNYLYRLFRKSNLKPFERDISTEIYQAGSTPCNGVEGFNCYFPLQSYGFQPTNGVGYQPYRVVVLSFELLHAPATVCGPKKSTNLVKNKCVNFNFNGLTGTGVLTESNKKFLPFQQFGRDIADTTDAVRDPQTLEILDITPCSFGGVSVITPGTNTSNQVAVLYQGVNCTEVPVAIHADQLTPTWRVYSTGSNVFQTRAGCLIGAEHVNNSYECDIPIGAGICASYQTQTNSPRRARSVASQSIIAYTMSLGAENSVAYSNNSIAIPTNFTISVTTEILPVSMTKTSVDCTMYICGDSTECSNLLLQYGSFCTQLNRALTGIAVEQDKNTQEVFAQVKQIYKTPPIKDFGGFNFSQILPDPSKPSKRSFIEDLLFNKVTLADVGFIKQYGDCLGDIAARDLICAQKFNGLTVLPPLLTDEMIAQYTSALLAGTITSGWTFCAGAALQIPFAMQMAYRFNGIGVTQNVLYENQKLIANQFNSAIGKIQDSLSSTASALGKLQDVVNQNAQALNTLVKQLSSNFGAISSVLNDILSRLDKVEAEVQIDRLITGRLQSLQTYVTQQLIRAAEIRASANLAATKMSECVCGQSKRVDFCGKGYHLMSFPQSAPHGVVFLHVTYVPAQEKNFTTAPAICHDGKAHFPREGVFVSNGTHWFVTQRNFYEPQIITTDNTFVSGNCDVVIGIVNNTVYDPLQPELDS

SEQ ID NO: 3210 - protein, 1147 aa, Artificial Sequence
  SARS-CoV-2/Greece/16/2020__EPI_ISL_418265 spike protein (1-1147)(G889C_L1034C)
MFVFLVLLPLVSSQCVNLTTRTQLPPAYTNSFTRGVYYPDKVFRSSVLHSTQDLFLPFFSNVTWFHAIHVSGTNGTKRFDNPVLPFNDGVYFASTEKSNIIRGWIFGTTLDSKTQSLLIVNNATNVVIKVCEFQFCNDPFLGVYYHKNNKSWMESEFRVYSSANNCTFEYVSQPFLMDLEGKQGNFKNLREFVFKNVDGYFKIYSKHTPINLVRDLPQGFSALEPLVDLPIGINITRFQTLLALHRSYLTPGDSSSGWTAGAAAYYVGYLQPRTFLLKYNENGTITDAVDCALDPLSETKCTLKSFTVEKGIYQTSNFRVQPTESIVRFPNITNLCPFGEVFNATRFASVYAWNRKRISNCVADYSVLYNSASFSTFKCYGVSPTKLNDLCFTNVYADSFVIRGDEVRQIAPGQTGKIADYNYKLPDDFTGCVIAWNSNNLDSKVGGNYNYLYRLFRKSNLKPFERDISTEIYQAGSTPCNGVEGFNCYFPLQSYGFQPTNGVGYQPYRVVVLSFELLHAPATVCGPKKSTNLVKNKCVNFNFNGLTGTGVLTESNKKFLPFQQFGRDIADTTDAVRDPQTLEILDITPCSFGGVSVITPGTNTSNQVAVLYQDVNCTEVPVAIHADQLTPTWRVYSTGSNVFQTRAGCLIGAEHVNNSYECDIPIGAGICASYQTQTNSPRRARSVASQSIIAYTMSLGAENSVAYSNNSIAIPTNFTISVTTEILPVSMTKTSVDCTMYICGDSTECSNLLLQYGSFCTQLNRALTGIAVEQDKNTQEVFAQVKQIYKTPPIKDFGGFNFSQILPDPSKPSKRSFIEDLLFNKVTLADAGFIKQYGDCLGDIAARDLICAQKFNGLTVLPPLLTDEMIAQYTSALLAGTITSGWTFCAGAALQIPFAMQMAYRFNGIGVTQNVLYENQKLIANQFNSAIGKIQDSLSSTASALGKLQDVVNQNAQALNTLVKQLSSNFGAISSVLNDILSRLDKVEAEVQIDRLITGRLQSLQTYVTQQLIRAAEIRASANLAATKMSECVCGQSKRVDFCGKGYHLMSFPQSAPHGVVFLHVTYVPAQEKNFTTAPAICHDGKAHFPREGVFVSNGTHWFVTQRNFYEPQIITTDNTFVSGNCDVVIGIVNNTVYDPLQPELDS

SEQ ID NO: 3211 - protein, 1147 aa, Artificial Sequence
  SARS-CoV-2/Iceland/319/2020__EPI_ISL_417648 spike protein (1-1147)(G889C_L1034C)
MFVFLVLLPLVSSQCVNLTTRTQLPPAYTNSFTRGVYYPDKVFRSSVLHSTQDLFLPFFSNVTWFHAIHVSGTNGTKRFDNPVLPFNDGVYFASTEKSNIIRGWIFGTTLDSKTQSLLIVNNATNVVIKVCEFQFCNDPFLGVYYHKNNKSWMESEFRVYSSANNCTFEYVSQPFLIDLEGKQGNFKNLREFVFKNIDGYFKIYSKHTPINLVRDLPQGFSALEPLVDLPIGINITRFQTLLALHRSYLTPGDSSSGWTAGAAAYYVGYLQPRTFLLKYNENGTITDAVDCALDPLSETKCTLKSFTVEKGIYQTSNFRVQPTESIVRFPNITNLCPFGEVFNATRFASVYAWNRKRISNCVADYSVLYNSASFSTFKCYGVSPTKLNDLCFTNVYADSFVIRGDEVRQIAPGQTGKIADYNYKLPDDFTGCVIAWNSNNLDSKVGGNYNYLYRLFRKSNLKPFERDISTEIYQAGSTPCNGVEGFNCYFPLQSYGFQPTNGVGYQPYRVVVLSFELLHAPATVCGPKKSTNLVKNKCVNFNFNGLTGTGVLTESNKKFLPFQQFGRDIADTTDAVRDPQTLEILDITPCSFGGVSVITPGTNTSNQVAVLYQGVNCTEVPVAIHADQLTPTWRVYSTGSNVFQTRAGCLIGAEHVNNSYECDIPIGAGICASYQTQTNSPRRARSVASQSIIAYTMSLGAENSVAYSNNSIAIPTNFTISVTTEILPVSMTKTSVDCTMYICGDSTECSNLLLQYGSFCTQLNRALTGIAVEQDKNTQEVFAQVKQIYKTPPIKDFGGFNFSQILPDPSKPSKRSFIEDLLFNKVTLADAGFIKQYGDCLGDIAARDLICAQKFNGLTVLPPLLTDEMIAQYTSALLAGTITSGWTFCAGAALQIPFAMQMAYRFNGIGVTQNVLYENQKLIANQFNSAIGKIQDSLSSTASALGKLQDVVNQNAQALNTLVKQLSSNFGAISSVLNDILSRLDKVEAEVQIDRLITGRLQSLQTYVTQQLIRAAEIRASANLAATKMSECVCGQSKRVDFCGKGYHLMSFPQSAPHGVVFLHVTYVPAQEKNFTTAPAICHDGKAHFPREGVFVSNGTHWFVTQRNFYEPQIITTDNTFVSGNCDVVIGIVNNTVYDPLQPELDS

SEQ ID NO: 3212 - protein, 1147 aa, Artificial Sequence
  SARS-CoV-2/Congo/94/2020__EPI_ISL_417947 spike protein (1-1147)(G889C_L1034C)
MFVFLVLLPLVSSQCVNLTTRTQLPPAYTNSFTRGVYYPDKVFRSSVLHSTQDLFLPFFSNVTWFHAIHVSGTNGTKRFDNPVLPFNDGVYFASTEKSNIIRGWIFGTTLDSKTQSLLIVNNATNVVIKVCEFQFCNDPFLGVYYHKNNKSWMESEFRVYSSANNCTFEYVSQPFLMDLEGKQGNFKNLREFVFKNIDGYFKIYSKHTPINLVRDLPQGFSALEPLVDLPIGINITRFQTLLALHRSYLTPGDSSSGWTAGAAAYYVGYLQPRTFLLKYNENGTITDAVDCALDPLSETKCTLKSFTVEKGIYQTSNFRVQPTESIVRFPNITNLCPFGEVFNATRFASVYAWNRKRISNCVADYSVLYNSASFSTFKCYGVSPTKLNDLCFTNVYADSFVIRGDEVRQIAPGQTGKIADYNYKLPDDFTGCVIAWNSNNLDSKVGGNYNYLYRLFRKSNLKPFERDISTEIYQAGSTPCNGVEGFNCYFPLQSYGFQPTNGVGYQPYRVVVLSFELLHAPATVCGPKKSTNLVKNKCVNFNFNGLTGTGVLTESNKKFLPFQQFGRDIADTTDAVRDPQTLEILDITPCSFGGVSVITPGTNTSNQVAVLYQGVNCTEVPVAIHADQLTPTWRVYSTGSNVFQTRAGCLIGAEHVNNSYECDIPIGAGICASYQTQTNSPRRARSVASQSIIAYTMSLGAENSVAYSNNSIAIPTNFTISVTTEILPVSMTKTSVDCTMYICGDSTECSNLLLQYGSFCTQLNRALTGIAVEQDKNTQEVFAQVKQIYKTPPIKDFGGFNFSQILPDPSKPSKRSFIEDILFNKVTLADAGFIKQYGDCLGDIAARDLICAQKFNGLTVLPPLLTDEMIAQYTSALLAGTITSGWTFCAGAALQIPFAMQMAYRFNGIGVTQNVLYENQKLIANQFNSAIGKIQDSLSSTASALGKLQDVVNQNAQALNTLVKQLSSNFGAISSVLNDILSRLDKVEAEVQIDRLITGRLQSLQTYVTQQLIRAAEIRASANLAATKMSECVCGQSKRVDFCGKGYHLMSFPQSAPHGVVFLHVTYVPAQEKNFTTAPAICHDGKAHFPREGVFVSNGTHWFVTQRNFYEPQIITTDNTFVSGNCDVVIGIVNNTVYDPLQPELDS

SEQ ID NO: 3213 - protein, 1147 aa, Artificial Sequence
  SARS-CoV-2/Congo/158/2020__EPI_ISL_417950 spike protein (1-1147)(G889C_L1034C)
MFVFLVLLPLVSSQCVNLTTRTQLPPAYTNSFTRGVYYPDKVFRSSVLHSTQDLFLPFFSNVTWFHAIHVSGTNGTKRFDNPVLPFNDGVYFASTEKSNIIRGWIFGTTLDSKTQSLLIVNNATNVVIKVCEFQFCNDPFLGVYYHKNNKSWMESEFRVYSSANNCTFEYVSQPFLMDLEGKQGNFKNLREFVFKNIDGYFKIYSKHTPINLVRDLPQGFSALEPLVDLPIGINITRFQTLLALHRSYLTPGDSSSGWTAGAAAYYVGYLQPRTFLLKYNENGTITDAVDCALDPLSETKCTLKSFTVEKGIYQTSNFRVQPTESIVRFPNITNLCPFGEVFNATRFASVYAWNRKRISNCVADYSVLYNSASFSTFKCYGVSPTKLNDLCFTNVYADSFVIRGDEVRQIAPGQTGKIADYNYKLPDDFTGCVIAWNSNNLDSKVGGNYNYLYRLFRKSNLKPFERDISTEIYQAGSTPCNGVEGFNCYFPLQSYGFQPTNGVGYQPYRVVVLSFELLHAPATVCGPKKSTNLVKNKCVNFNFNGLTGTGVLTESNKKFLPFQQFGRDIADTTDAVRDPQTLEILDITPCSFGGVSVITPGTNTSNQVAVLYQDVNCTEVPVAIHADQLTPTWRVYSTGSNVFQTRAGCLIGAEHVNNSYECDIPIGAGICASYQTQTNSPRRARSVASQSIIAYTMSLGAENSVAYSNNSIAIPTNFTISVTTEILPVSMTKTSVDCTMYICGDSTECSNLLLQYGSFCTQLNRALTGIAVEQDKNTQEVFAQVKQIYKTPPIKDFGGFNFSQILPDPSKPSKRSFIEDLLFNKVTLADAGFIKQYGDCLGDIAARDLICAQKFNGLTVLPPLLTDEMIAQYTSALLAGTITSGWTFCAGAALQIPFAMQMAYRFNGIGVTQNVLYENQKLIANQFNSAIGKIQDSLSSTASALGKLQDVVNQNAQALNTLVKQLSSNFGAISSVLNDILSRLDKVEAEVQIDRLITGRLQSLQTYVTQQLIRAAEIRASANLAATKMSECVCGQSKRVDFCGKGYHLMSFPQSAPHGVVFLHVTYVPAQEKNFTTAPAICHDGKAHFPREGVFVSNGTHWFVTQRNFYEPQIITTDNTFLSGNCDVVIGIVNNTVYDPLQPELDS

SEQ ID NO: 3214 - protein, 1147 aa, Artificial Sequence
  SARS-CoV-2/USA/UT-00034/2020__EPI_ISL_417977 spike protein (1-1147)(G889C_L1034C)
MFVFLVLLPLVSSQCVNLTTRTQLPPAYTNSFTRGVYYPDKVFRSSVLHSTQDLFLPFFSNVTWFHAIHVSGTNGTKRFDNPVLPFNDGVYFASTEKSNIIRGWIFGTTLDSKTQSLLIVNNATNVVIKVCEFQFCNDPFLGVYYYKNNKSWMESEFRVYSSANNCTFEYVSQPFLMDLEGKQGNFKNLREFVFKNIDGYFKIYSKHTPINLVRDLPQGFSALEPLVDLPIGINITRFQTLLALHRSYLTPGDSSSGWTAGAAAYYVGYLQPRTFLLKYNENGTITDAVDCALDPLSETKCTLKSFTVEKGIYQTSNFRVQPTESIVRFPNITNLCPFGEVFNATRFASVYAWNRKRISNCVADYSVLYNSASFSTFKCYGVSPTKLNDLCFTNVYADSFVIRGDEVRQIAPGQTGKIADYNYKLPDDFTGCVIAWNSNNLDSKVGGNYNYLYRLFRKSNLKPFERDISTEIYQAGSTPCNGVEGFNCYFPLQSYGFQPTNGVGYQPYRVVVLSFELLHAPATVCGPKKSTNLVKNKCVNFNFNGLTGTGVLTESNKKFLPFQQFGRDIADTTDAVRDPQTLEILDITPCSFGGVSVITPGTNTSNQVAVLYQGVNCTEVPVAIHADQLTPTWRVYSTGSNVFQTRAGCLIGAEHVNNSYECDIPIGAGICASYQTQTNSPRRARSVASQSIIAYTMSLGAENSVAYSNNSIAIPTNFTISVTTEILPVSMTKTSVDCTMYICGDSTECSNLLLQYGSFCTQLNRALTGIAVEQDKNTQEVFAQVKQIYKTPPIKDFGGFNFSQILPDPSKPSKRSFIEDLLFNKVTLADAGFIKQYGDCLGDIAARDLICAQKFNGLTVLPPLLTDEMIAQYTSALLAGTITSGWTFCAGAALQIPFAMQMAYRFNGIGVTQNVLYENQKLIANQFNSAIGKIQDSLSSTASALGKLQDVVNQNAQALNTLVKQLSSNFGAISSVLNDILSRLDKVEAEVQIDRLITGRLQSLQTYVTQQLIRAAEIRASANLAATKMSECVCGQSKRVDFCGKGYHLMSFPQSAPHGVVFLHVTYVPAQEKNFTTAPAICHDGKAHFPREGVFVSNGTHWFVTQRNFYEPQIITTDNTFVSGNCDVVIGIVNNTVYDPLQPELDS

SEQ ID NO: 3215 - protein, 1147 aa, Artificial Sequence
  SARS-CoV-2/USA/UT-00033/2020__EPI_ISL_417976 spike protein (1-1147)(G889C_L1034C)
MFVFLVLLPLVSSQCVNLTTRTQLPPAYTNSFTRGVYYPDKVFRSSVLHSTQDLFLPFFSNVTWFHAIHVSGTNGTKRFDNPVLPFNDGVYFASTEKSNIIRGWIFGTTLDSKTQSLLIVNNATNVVIKVCEFQFCNDPFLGVYYHKNNKSWMESEFRVYSSANNCTFEYVSQPFLMDLEGKQGNFKNLREFVFKNIDGYFKIYSKHTPINLVRDLPQGFSALEPLVDLPIGINITRFQTLLALHRSYLTPGDSSSGLTAGAAAYYVGYLQPRTFLLKYNENGTITDAVDCALDPLSETKCTLKSFTVEKGIYQTSNFRVQPTESIVRFPNITNLCPFGEVFNATRFASVYAWNRKRISNCVADYSVLYNSASFSTFKCYGVSPTKLNDLCFTNVYADSFVIRGDEVRQIAPGQTGKIADYNYKLPDDFTGCVIAWNSNNLDSKVGGNYNYLYRLFRKSNLKPFERDISTEIYQAGSTPCNGVEGFNCYFPLQSYGFQPTNGVGYQPYRVVVLSFELLHAPATVCGPKKSTNLVKNKCVNFNFNGLTGTGVLTESNKKFLPFQQFGRDIADTTDAVRDPQTLEILDITPCSFGGVSVITPGTNTSNQVAVLYQGVNCTEVPVAIHADQLTPTWRVYSTGSNVFQTRAGCLIGAEHVNNSYECDIPIGAGICASYQTQTNSPRRARSVASQSIIAYTMSLGAENSVAYSNNSIAIPTNFTISVTTEILPVSMTKTSVDCTMYICGDSTECSNLLLQYGSFCTQLNRALTGIAVEQDKNTQEVFAQVKQIYKTPPIKDFGGFNFSQILPDPSKPSKRSFIEDLLFNKVTLADAGFIKQYGDCLGDIAARDLICAQKFNGLTVLPPLLTDEMIAQYTSALLAGTITSGWTFCAGAALQIPFAMQMAYRFNGIGVTQNVLYENQKLIANQFNSAIGKIQDSLSSTASALGKLQDVVNQNAQALNTLVKQLSSNFGAISSVLNDILSRLDKVEAEVQIDRLITGRLQSLQTYVTQQLIRAAEIRASANLAATKMSECVCGQSKRVDFCGKGYHLMSFPQSAPHGVVFLHVTYVPAQEKNFTTAPAICHDGKAHFPREGVFVSNGTHWFVTQRNFYEPQIITTDNTFVSGNCDVVIGIVNNTVYDPLQPELDS

SEQ ID NO: 3216 - protein, 1147 aa, Artificial Sequence
  SARS-CoV-2/USA/WI-13/2020__EPI_ISL_417516 spike protein (1-1147)(G889C_L1034C)
MFVFLVLLPLVSSQCVNLTTRTQLPPAYTNSFTRGVYYPDKVFRSSVLHSTQDLFLPFFSNVTWFHAIHVSGTNGTKRFDNPVLPFNDGVYFASTEKSNIIRGWIFGTTLDSKTQSLLIVNNATNVVIKVCEFQFCNDPFLGVYYHKNNKSWMESEFRVYSSANNCTFEYVSQPFLMDLEGKQGNFKNLREFVFKNIDGYFKIYSKHTPINLVRDLPQGFSALEPLVDLPIGINITRFQTLLALHRSYLTPGDSSSGWTAGAAAYYVGYLQPRTFLLKYNENGTITDAVDCALDPLSETKCTLKSFTVEKGIYQTSNFRVLPTESIVRFPNITNLCPFGEVFNATRFASVYAWNRKRISNCVADYSVLYNSASFSTFKCYGVSPTKLNDLCFTNVYADSFVIRGDEVRQIAPGQTGKIADYNYKLPDDFTGCVIAWNSNNLDSKVGGNYNYLYRLFRKSNLKPFERDISTEIYQAGSTPCNGVEGFNCYFPLQSYGFQPTNGVGYQPYRVVVLSFELLHAPATVCGPKKSTNLVKNKCVNFNFNGLTGTGVLTESNKKFLPFQQFGRDIADTTDAVRDPQTLEILDITPCSFGGVSVITPGTNTSNQVAVLYQGVNCTEVPVAIHADQLTPTWRVYSTGSNVFQTRAGCLIGAEHVNNSYECDIPIGAGICASYQTQTNSPRRARSVASQSIIAYTMSLGAENSVAYSNNSIAIPTNFTISVTTEILPVSMTKTSVDCTMYICGDSTECSNLLLQYGSFCTQLNRALTGIAVEQDKNTQEVFAQVKQIYKTPPIKDFGGFNFSQILPDPSKPSKRSFIEDLLFNKVTLADAGFIKQYGDCLGDIAARDLICAQKFNGLTVLPPLLTDEMIAQYTSALLAGTITSGWTFCAGAALQIPFAMQMAYRFNGIGVTQNVLYENQKLIANQFNSAIGKIQDSLSSTASALGKLQDVVNQNAQALNTLVKQLSSNFGAISSVLNDILSRLDKVEAEVQIDRLITGRLQSLQTYVTQQLIRAAEIRASANLAATKMSECVCGQSKRVDFCGKGYHLMSFPQSAPHGVVFLHVTYVPAQEKNFTTAPAICHDGKAHFPREGVFVSNGTHWFVTQRNFYEPQIITTDNTFVSGNCDVVIGIVNNTVYDPLQPELDS

SEQ ID NO: 3217 - protein, 1146 aa, Artificial Sequence
  SARS-CoV-2/India/1-27/2020__EPI_ISL_413522 spike protein (1-1146)(G888C_L1033C)
MFVFLVLLPLVSSQCVNLTTRTQLPPAYTNSFTRGVYYPDKVFRSSVLHSTQDLFLPFFSNVTWFHAIHVSGTNGTKRFDNPVLPFNDGVYFASTEKSNIIRGWIFGTTLDSKTQSLLIVNNATNVVIKVCEFQFCNDPFLGVYHKNNKSWMESEFRVYSSANNCTFEYVSQPFLMDLEGKQGNFKNLREFVFKNIDGYFKIYSKHTPINLVRDLPQGFSALEPLVDLPIGINITRFQTLLALHRSYLTPGDSSSGWTAGAAAYYVGYLQPRTFLLKYNENGTITDAVDCALDPLSETKCTLKSFTVEKGIYQTSNFRVQPTESIVRFPNITNLCPFGEVFNATRFASVYAWNRKRISNCVADYSVLYNSASFSTFKCYGVSPTKLNDLCFTNVYADSFVIRGDEVIQIAPGQTGKIADYNYKLPDDFTGCVIAWNSNNLDSKVGGNYNYLYRLFRKSNLKPFERDISTEIYQAGSTPCNGVEGFNCYFPLQSYGFQPTNGVGYQPYRVVVLSFELLHAPATVCGPKKSTNLVKNKCVNFNFNGLTGTGVLTESNKKFLPFQQFGRDIADTTDAVRDPQTLEILDITPCSFGGVSVITPGTNTSNQVAVLYQDVNCTEVPVAIHADQLTPTWRVYSTGSNVFQTRAGCLIGAEHVNNSYECDIPIGAGICASYQTQTNSPRRARSVASQSIIAYTMSLGAENSVAYSNNSIAIPTNFTISVTTEILPVSMTKTSVDCTMYICGDSTECSNLLLQYGSFCTQLNRALTGIAVEQDKNTQEVFAQVKQIYKTPPIKDFGGFNFSQILPDPSKPSKRSFIEDLLFNKVTLADAGFIKQYGDCLGDIAARDLICAQKFNGLTVLPPLLTDEMIAQYTSALLAGTITSGWTFCAGAALQIPFAMQMAYRFNGIGVTQNVLYENQKLIANQFNSAIGKIQDSLSSTASALGKLQDVVNQNAQALNTLVKQLSSNFGAISSVLNDILSRLDKVEAEVQIDRLITGRLQSLQTYVTQQLIRAAEIRASANLAATKMSECVCGQSKRVDFCGKGYHLMSFPQSAPHGVVFLHVTYVPAQEKNFTTAPAICHDGKAHFPREGVFVSNGTHWFVTQRNFYEPQIITTDNTFVSGNCDVVIGIVNNTVYDPLQPELDS

SEQ ID NO: 3218 - protein, 1141 aa, Artificial Sequence
  SARS-CoV-2/pangolin/Guangxi/P4L/2017__EPI_ISL_410538 spike protein (1-1141)(G883C_L1028C)
MFVFLFVLPLVSSQCVNLTTRTGIPPGYTNSSTRGVYYPDKVFRSSILHLTQDLFLPFFSNVTWFNTINYQGGFKKFDNPVLPFNDGVYFASTEKSNIIRGWIFGTTLDARTQSLLIVNNATNVVIKVCEFQFCTDPFLGVYYHNNNKTWVENEFRVYSSANNCTFEYISQPFLMDLEGKQGNFKNLREFVFKNVDGYFKIYSKHTPIDLVRDLPRGFAALEPLVDLPIGINITRFQTLLALHRSYLTPGNLESGWTTGAAAYYVGYLQQRTFLLSYNQNGTITDAVDCSLDPLSETKCTLKSLTVEKGIYQTSNFRVQPTISIVRFPNITNLCPFGEVFNASKFASVYAWNRKRISNCVADYSVLYNSTSFSTFKCYGVSPTKLNDLCFTNVYADSFVVKGDEVRQIAPGQTGVIADYNYKLPDDFTGCVIAWNSVKQDALTGGNYGYLYRLFRKSKLKPFERDISTEIYQAGSTPCNGQVGLNCYYPLERYGFHPTTGVNYQPFRVVVLSFELLNGPATVCGPKLSTTLVKDKCVNFNFNGLTGTGVLTTSKKQFLPFQQFGRDISDTTDAVRDPQTLEILDITPCSFGGVSVITPGTNTSNQVAVLYQDVNCTEVPMAIHAEQLTPAWRVYSAGANVFQTRAGCLVGAEHVNNSYECDIPVGAGICASYHSMSSLRSVNQRSIIAYTMSLGAENSVAYSNNSIAIPTNFTISVTTEILPVSMTKTSVDCTMYICGDSIECSNLLLQYGSFCTQLNRALTGIAVEQDKNTQEVFAQVKQIYKTPPIKDFGGFNFSQILPDPSKPSKRSFIEDLLFNKVTLADAGFIKQYGDCLGDIAARDLICAQKFNGLTVLPPLLTDEMIAQYTSALLAGTITSGWTFCAGAALQIPFAMQMAYRFNGIGVTQNVLYENQKLIANQFNSAIGKIQDSLSSTASALGKLQDVVNQNAQALNTLVKQLSSNFGAISSVLNDILSRLDKVEAEVQIDRLITGRLQSLQTYVTQQLIRAAEIRASANLAATKMSECVCGQSKRVDFCGKGYHLMSFPQSAPHGVVFLHVTYVPAQEKNFTTAPAICHEGKAHFPREGVFVSNGTHWFITQRNFYEPQIITTDNTFVSGSCDVVIGIVNNTVYDPLQPELDS

SEQ ID NO: 3219 - protein, 1141 aa, Artificial Sequence
  SARS-CoV-2/pangolin/Guangxi/P5L/2017__EPI_ISL_410540 spike protein (1-1141)(G883C_L1028C)
MFVFLFVLPLVSSQCVNLTTRTGIPPGYTNSSTRGVYYPDKVFRSSILHLTQDLFLPFFSNVTWFNTINYQGGFKKFDNPVLPFNDGVYFASTEKSNIIRGWIFGTTLDARTQSLLIVNNATNVVIKVCEFQFCTDPFLGVYYHNNNKTWVENEFRVYSSANNCTFEYISQPFLMDLEGKQGNFKNLREFVFKNVDGYFKIYSKHTPIDLVRDLPRGFAALEPLVDLPIGINITRFQTLLALHRSYLTPGKLESGWTTGAAAYYVGYLQQRTFLLSYNQNGTITDAVDCSLDPLSETKCTLKSLTVEKGIYQTSNFRVQPTISIVRFPNITNLCPFGEVFNASKFASVYAWNRKRISNCVADYSVLYNSTSFSTFKCYGVSPTKLNDLCFTNVYADSFVVKGDEVRQIAPGQTGVIADYNYKLPDDFTGCVIAWNSVKQDALTGGNYGYLYRLFRKSKLKPFERDISTEIYQAGSTPCNGQVGLNCYYPLERYGFHPTTGVNYQPFRVVVLSFELLNGPATVCGPKLSTTLVKDKCVNFNFNGLTGTGVLTTSKKQFLPFQQFGRDISDTTDAVRDPQTLEILDITPCSFGGVSVITPGTNTSNQVAVLYQDVNCTEVPMAIHAEQLTPAWRVYSAGANVFQTRAGCLVGAEHVNNSYECDIPVGAGICASYHSMSSFRSVNQRSIIAYTMSLGAENSVAYSNNSIAIPTNFTISVTTEILPVSMTKTSVDCTMYICGDSIECSNLLLQYGSFCTQLNRALTGIAVEQDKNTQEVFAQVKQIYKTPPIKDFGGFNFSQILPDPSKPSKRSFIEDLLFNKVTLADAGFIKQYGDCLGDIAARDLICAQKFNGLTVLPPLLTDEMIAQYTSALLAGTITSGWTFCAGAALQIPFAMQMAYRFNGIGVTQNVLYENQKLIANQFNSAIGKIQDSLSSTASALGKLQDVVNQNAQALNTLVKQLSSNFGAISSVLNDILSRLDKVEAEVQIDRLITGRLQSLQTYVTQQLIRAAEIRASANLAATKMSECVCGQSKRVDFCGKGYHLMSFPQSAPHGVVFLHVTYVPAQEKNFTTAPAICHEGKAHFPREGVFVSNGTHWFITQRNFYEPQIITTDNTFVSGSCDVVIGIVNNTVYDPLQPELDS

SEQ ID NO: 3220 - protein, 1141 aa, Artificial Sequence
  SARS-CoV-2/pangolin/Guangxi/P5E/2017__EPI_ISL_410541 spike protein (1-1141)(G883C_L1028C)
MFVFLFVLPLVSSQCVNLTTRTGIPPGYTNSSTRGVYYPDKVFRSSILHLTQDLFLPFFSNVTWFNTITYQGGSKKFDNPVLPFNDGVYFASTEKSNIIRGWIFGTTLDARTQSLLIVNNATNVVIKVCEFQFCTDPFLGVYYHNNNKTWVENEFRVYSSANNCTFEYISQPFLMDLEGKQGNFKNLREFVFKNVDGYFKIYSKHTPIDLVRDLPRGFAALEPLVDLPIGINITRFQTLLALHRSYLTPGKLESGWTTGAAAYYVGYLQQRTFLLSYNQNGTITDAVDCSLDPLSETKCTLKSLTVEKGIYQTSNFRVQPTISIVRFPNITNLCPFGEVFNASKFASVYAWNRKRISNCVADYSVLYNSTSFSTFKCYGVSPTKLNDLCFTNVYADSFVVKGDEVRQIAPGQTGVIADYNYKLPDDFTGCVIAWNSVKQDALTGDNYGYLYRLFRKSKLKPFERDISTEIYQAGSTPCNGQVGLNCYYPLERYGFHPTTGVNYQPFRVVVLSFELLNGPATVCGPKLSTTLVKDKCVNFNFNGLTGTGVLTTSKKQFLPFQQFGRDISDTTDAVRDPQTLEILDITPCSFGGVSVITPGTNTSNQVAVLYQDVNCTEVPMAIHAEQLTPAWRVYSAGANVFQTRAGCLVGAEHVNNSYECDIPVGAGICASYHSMSSFRSVNQRSIIAYTMSLGAENSVAYSNNSIAIPTNFTISVTTEILPVSMTKTSVDCTMYICGDSIECSNLLLQYGSFCTQLNRALTGIAVEQDKNTQEVFAQVKQIYKTPPIKDFGGFNFSQILPDPSKPSKRSFIEDLLFNKVTLADAGFIKQYGDCLGDIAARDLICAQKFNGLTVLPPLLTDEMIAQYTSALLAGTITSGWTFCAGAALQIPFAMQMAYRFNGIGVTQNVLYENQKLIANQFNSAIGKIQDSLSSTASALGKLQDVVNQNAQALNTLVKQLSSNFGAISSVLNDILSRLDKVEAEVQIDRLITGRLQSLQTYVTQQLIRAAEIRASANLAATKMSECVCGQSKRVDFCGKGYHLMSFPQSAPHGVVFLHVTYVPAQEKNFTTAPAICHEGKAHFPREGVFVSNGTHWFITQRNFYEPQIITTDNTFVSGSCDVVIGIVNNTVYDPLQPELDS

SEQ ID NO: 3221 - protein, 1139 aa, Artificial Sequence
  SARS-CoV-2/pangolin/Guangxi/P1E/2017__EPI_ISL_410539 spike protein (1-1139)(G881C_L1026C)
MFVFLFVLPLVSSQCVNLTTRTGIQPGYTNSSTRGVYYPDKVFRSSILHLTQDLFLPFFSNVTWFNTINYQGGFKKFDNPVLPFNDGVYFASTEKSNIIRGWIFGTTLDARTQSLLIVNNATNVVIKVCEFQFCTDPFLGVYYHNNNKTWVENEFRVYSSANNCTFEYISQPFLMDLEGKQGNFKNLREFVFKNVDGYFKIYSKHTPIDLVRDLPRGFAALEPLVDLPIGINITRFQTLLALHRSYLTPGKLESGWTTGAAAYYVGYLQQRTFLLSYNQNGTITDAVDCSLDPLSETKCTLKSLTVEKGIYQTSNFRVQPTISIVRFPNITNLCPFGEVFNASKFASVYAWNRKRISNCVADYSVLYNSTSFSTFKCYGVSPTKLNDLCFTNVYADSFVVKGDEVRQIAPGQTGVIADYNYKLPDDFTGCVIAWNSVKQDALTGGNYLYRLFRKSKLKPFERDISTEIYQAGSTPCNGQVGLNCYYPLERYGFHPTTGVNYQPFRVVVLSFELLNGPATVCGPKLSTTLVKDKCVNFNFNGLTGTGVLTTSKKQFLPFQQFGRDISDTTDAVRDPQTLEILDITPCSFGGVSVITPGTNTSNQVAVLYQDVNCTEVPMAIHAEQLTPAWRVYSAGANVFQTRAGCLVGAEHVNNSYECDIPVGAGICASYHSMSSLRSVNQRSIIAYTMSLGAENSVAYSNNSIAIPTNFTISVTTEILPVSMTKTSVDCTMYICGDSIECSNLLLQYGSFCTQLNRALTGIAVEQDKNTQEVFAQVKQIYKTPPIKDFGGFNFSQILPDPSKPSKRSFIEDLLFNKVTLADAGFIKQYGDCLGDIAARDLICAQKFNGLTVLPPLLTDEMIAQYTSALLAGTITSGWTFCAGAALQIPFAMQMAYRFNGIGVTQNVLYENQKLIANQFNSAIGKIQDSLSSTASALGKLQDVVNQNAQALNTLVKQLSSNFGAISSVLNDILSRLDKVEAEVQIDRLITGRLQSLQTYVTQQLIRAAEIRASANLAATKMSECVCGQSKRVDFCGKGYHLMSFPQSAPHGVVFLHVTYVPAQEKNFTTAPAICHEGKAHFPREGVFVSNGTHWFITQRNFYEPQIITTDNTFVSGSCDVVIGIVNNTVYDPLQPELDS

SEQ ID NO: 3222 - protein, 1147 aa, Artificial Sequence
  SARS-CoV-2/Wuhan/WIV05/2019__EPI_ISL_402128 spike protein (1-1147)(I909C_Y1047C)
MFVFLVLLPLVSSQCVNLTTRTQLPPAYTNSFTRGVYYPDKVFRSSVLHSTQDLFLPFFSNVTWFHAIHVSGTNGTKRFDNPVLPFNDGVYFASTEKSNIIRGWIFGTTLDSKTQSLLIVNNATNVVIKVCEFQFCNDPFLGVYYHKNNKSWMESEFRVYSSANNCTFEYVSQPFLMDLEGKQGNFKNLREFVFKNIDGYFKIYSKHTPINLVRDLPQGFSALEPLVDLPIGINITRFQTLLALHRSYLTPGDSSSGWTAGAAAYYVGYLQPRTFLLKYNENGTITDAVDCALDPLSETKCTLKSFTVEKGIYQTSNFRVQPTESIVRFPNITNLCPFGEVFNATRFASVYAWNRKRISNCVADYSVLYNSASFSTFKCYGVSPTKLNDLCFTNVYADSFVIRGDEVRQIAPGQTGKIADYNYKLPDDFTGCVIAWNSNNLDSKVGGNYNYLYRLFRKSNLKPFERDISTEIYQAGSTPCNGVEGFNCYFPLQSYGFQPTNGVGYQPYRVVVLSFELLHAPATVCGPKKSTNLVKNKCVNFNFNGLTGTGVLTESNKKFLPFQQFGRDIADTTDAVRDPQTLEILDITPCSFGGVSVITPGTNTSNQVAVLYQDVNCTEVPVAIHADQLTPTWRVYSTGSNVFQTRAGCLIGAEHVNNSYECDIPIGAGICASYQTQTNSPRRARSVASQSIIAYTMSLGAENSVAYSNNSIAIPTNFTISVTTEILPVSMTKTSVDCTMYICGDSTECSNLLLQYGSFCTQLNRALTGIAVEQDKNTQEVFAQVKQIYKTPPIKDFGGFNFSQILPDPSKPSKRSFIEDLLFNKVTLADAGFIKQYGDCLGDIAARDLICAQKFNGLTVLPPLLTDEMIAQYTSALLAGTITSGWTFGAGAALQIPFAMQMAYRFNGCGVTQNVLYENQKLIANQFNSAIGKIQDSLSSTASALGKLQDVVNQNAQALNTLVKQLSSNFGAISSVLNDILSRLDKVEAEVQIDRLITGRLQSLQTYVTQQLIRAAEIRASANLAATKMSECVLGQSKRVDFCGKGCHLMSFPQSAPHGVVFLHVTYVPAQEKNFTTAPAICHDGKAHFPREGVFVSNGTHWFVTQRNFYEPQIITTDNTFVSGNCDVVIGIVNNTVYDPLQPELDS

SEQ ID NO: 3223 - protein, 1143 aa, Artificial Sequence
  SARS-CoV-2/bat/Yunnan/RaTG13/2013__EPI_ISL_402131 spike protein (1-1143)(I905C_Y1043C)
MFVFLVLLPLVSSQCVNLTTRTQLPPAYTNSSTRGVYYPDKVFRSSVLHLTQDLFLPFFSNVTWFHAIHVSGTNGIKRFDNPVLPFNDGVYFASTEKSNIIRGWIFGTTLDSKTQSLLIVNNATNVVIKVCEFQFCNDPFLGVYYHKNNKSWMESEFRVYSSANNCTFEYVSQPFLMDLEGKQGNFKNLREFVFKNIDGYFKIYSKHTPINLVRDLPPGFSALEPLVDLPIGINITRFQTLLALHRSYLTPGDSSSGWTAGAAAYYVGYLQPRTFLLKYNENGTITDAVDCALDPLSETKCTLKSFTVEKGIYQTSNFRVQPTDSIVRFPNITNLCPFGEVFNATTFASVYAWNRKRISNCVADYSVLYNSTSFSTFKCYGVSPTKLNDLCFTNVYADSFVITGDEVRQIAPGQTGKIADYNYKLPDDFTGCVIAWNSKHIDAKEGGNFNYLYRLFRKANLKPFERDISTEIYQAGSKPCNGQTGLNCYYPLYRYGFYPTDGVGHQPYRVVVLSFELLNAPATVCGPKKSTNLVKNKCVNFNFNGLTGTGVLTESNKKFLPFQQFGRDIADTTDAVRDPQTLEILDITPCSFGGVSVITPGTNASNQVAVLYQDVNCTEVPVAIHADQLTPTWRVYSTGSNVFQTRAGCLIGAEHVNNSYECDIPIGAGICASYQTQTNSRSVASQSIIAYTMSLGAENSVAYSNNSIAIPTNFTISVTTEILPVSMTKTSVDCTMYICGDSTECSNLLLQYGSFCTQLNRALTGIAVEQDKNTQEVFAQVKQIYKTPPIKDFGGFNFSQILPDPSKPSKRSFIEDLLFNKVTLADAGFIKQYGDCLGDIAARDLICAQKFNGLTVLPPLLTDEMIAQYTSALLAGTITSGWTFGAGAALQIPFAMQMAYRFNGCGVTQNVLYENQKLIANQFNSAIGKIQDSLSSTASALGKLQDVVNQNAQALNTLVKQLSSNFGAISSVLNDILSRLDKVEAEVQIDRLITGRLQSLQTYVTQQLIRAAEIRASANLAATKMSECVLGQSKRVDFCGKGCHLMSFPQSAPHGVVFLHVTYVPAQEKNFTTAPAICHDGKAHFPREGVFVSNGTHWFVTQRNFYEPQIITTDNTFVSGSCDVVIGIVNNTVYDPLQPELDS

SEQ ID NO: 3224 - protein, 1147 aa, Artificial Sequence
  SARS-CoV-2/Wuhan/HBCDC-HB-01/2019__EPI_ISL_402132 spike protein (1-1147)(I909C_Y1047C)
MFVFLVLLPLVSSQCVNLTTRTQLPPAYTNSITRGVYYPDKVFRSSVLHSTQDLFLPFFSNVTWFHAIHVSGTNGTKRFDNPVLPFNDGVYFASTEKSNIIRGWIFGTTLDSKTQSLLIVNNATNVVIKVCEFQFCNDPFLGVYYHKNNKSWMESEFRVYSSANNCTFEYVSQPFLMDLEGKQGNFKNLREFVFKNIDGYFKIYSKHTPINLVRDLPQGFSALEPLVDLPIGINITRFQTLLALHRSYLTPGDSSSGWTAGAAAYYVGYLQPRTFLLKYNENGTITDAVDCALDPLSETKCTLKSFTVEKGIYQTSNFRVQPTESIVRFPNITNLCPFGEVFNATRFASVYAWNRKRISNCVADYSVLYNSASFSTFKCYGVSPTKLNDLCFTNVYADSFVIRGDEVRQIAPGQTGKIADYNYKLPDDFTGCVIAWNSNNLDSKVGGNYNYLYRLFRKSNLKPFERDISTEIYQAGSTPCNGVEGFNCYFPLQSYGFQPTNGVGYQPYRVVVLSFELLHAPATVCGPKKSTNLVKNKCVNFNFNGLTGTGVLTESNKKFLPFQQFGRDIADTTDAVRDPQTLEILDITPCSFGGVSVITPGTNTSNQVAVLYQDVNCTEVPVAIHADQLTPTWRVYSTGSNVFQTRAGCLIGAEHVNNSYECDIPIGAGICASYQTQTNSPRRARSVASQSIIAYTMSLGAENSVAYSNNSIAIPTNFTISVTTEILPVSMTKTSVDCTMYICGDSTECSNLLLQYGSFCTQLNRALTGIAVEQDKNTQEVFAQVKQIYKTPPIKDFGGFNFSQILPDPSKPSKRSFIEDLLFNKVTLADAGFIKQYGDCLGDIAARDLICAQKFNGLTVLPPLLTDEMIAQYTSALLAGTITSGWTFGAGAALQIPFAMQMAYRFNGCGVTQNVLYENQKLIANQFNSAIGKIQDSLSSTASALGKLQDVVNQNAQALNTLVKQLSSNFGAISSVLNDILSRLDKVEAEVQIDRLITGRLQSLQTYVTQQLIRAAEIRASANLAATKMSECVLGQSKRVDFCGKGCHLMSFPQSAPHGVVFLHVTYVPAQEKNFTTAPAICHDGKAHFPREGVFVSNGTHWFVTQRNFYEPQIITTDNTFVSGNCDVVIGIVNNTVYDPLQPELDS

SEQ ID NO: 3225 - protein, 1147 aa, Artificial Sequence
  SARS-CoV-2/Guangdong/20SF028/2020__EPI_ISL_403936 spike protein (1-1147)(I909C_Y1047C)
MFVFLVLLPLVSSQCVNLTTRTQLPPAYTNSFTRGVYYPDKVFRSSVLYSTQDLFLPFFSNVTWFHAIHVSGTNGTKRFDNPVLPFNDGVYFASTEKSNIIRGWIFGTTLDSKTQSLLIVNNATNVVIKVCEFQFCNDPFLGVYYHKNNKSWMESEFRVYSSANNCTFEYVSQPFLMDLEGKQGNFKNLREFVFKNIDGYFKIYSKHTPINLVRDLPQGFSALEPLVDLPIGINITRFQTLLALHRSYLTPGDSSSGWTAGAAAYYVGYLQPRTFLLKYNENGTITDAVDCALDPLSETKCTLKSFTVEKGIYQTSNFRVQPTESIVRFPNITNLCPFGEVFNATRFASVYAWNRKRISNCVADYSVLYNSASFSTFKCYGVSPTKLNDLCFTNVYADSFVIRGDEVRQIAPGQTGKIADYNYKLPDDFTGCVIAWNSNNLDSKVGGNYNYLYRLFRKSNLKPFERDISTEIYQAGSTPCNGVEGFNCYFPLQSYGFQPTNGVGYQPYRVVVLSFELLHAPATVCGPKKSTNLVKNKCVNFNFNGLTGTGVLTESNKKFLPFQQFGRDIADTTDAVRDPQTLEILDITPCSFGGVSVITPGTNTSNQVAVLYQDVNCTEVPVAIHADQLTPTWRVYSTGSNVFQTRAGCLIGAEHVNNSYECDIPIGAGICASYQTQTNSPRRARSVASQSIIAYTMSLGAENSVAYSNNSIAIPTNFTISVTTEILPVSMTKTSVDCTMYICGDSTECSNLLLQYGSFCTQLNRALTGIAVEQDKNTQEVFAQVKQIYKTPPIKDFGGFNFSQILPDPSKPSKRSFIEDLLFNKVTLADAGFIKQYGDCLGDIAARDLICAQKFNGLTVLPPLLTDEMIAQYTSALLAGTITSGWTFGAGAALQIPFAMQMAYRFNGCGVTQNVLYENQKLIANQFNSAIGKIQDSLSSTASALGKLQDVVNQNAQALNTLVKQLSSNFGAISSVLNDILSRLDKVEAEVQIDRLITGRLQSLQTYVTQQLIRAAEIRASANLAATKMSECVLGQSKRVDFCGKGCHLMSFPQSAPHGVVFLHVTYVPAQEKNFTTAPAICHDGKAHFPREGVFVSNGTHWFVTQRNFYEPQIITTDNTFVSGNCDVVIGIVNNTVYDPLQPELDS

SEQ ID NO: 3226 - protein, 1147 aa, Artificial Sequence
  SARS-CoV-2/Shenzhen/SZTH-001/2020__EPI_ISL_406592 spike protein (1-1147)(I909C_Y1047C)
MFVFLVLLPLVSSQCVNLTTRTQLPPAYTNSFTRGVYYPDKVFRSSVLHSTQDLFLPFFSNVTWFHAIHVSGTNGTKRFDNPVLPFNDGVYFASTEKSNIIRGWIFGTTLDSKTQSLLIVNNATNVVIKVCEFQFCNDPFLGVYYHKNNKSWMESEFRVYSSANNCTFEYVSQPFLMDLEGKQGNFKNLREFVFKNIDGYFKIYSKHTPINLVRDLPQGFSALEPLVDLPIGINITRFQTLLALHRSYLTPGDSSSGWTAGAAAYYVGYLQPRTFLLKYNENGTITDAVDCALDPLSETKCTLKSFTVEKGIYQTSNFRVQPTESIVRFPNITNLCPFGEVFNATRFASVYAWNRKRISNCVADYSVLYNSASFSTFKCYGVSPTKLNDLCFTNVYADSFVIRGDEVRQIAPGQTGKIADYNYKLPDDFTGCVIAWNSNNLDSKVGGNYNYLYRLFRKSNLKPFERDISTEIYQAGSTPCNGVEGFNCYFPLQSYGFQPTNGVGYQPYRVVVLSFELLHAPATVCGPKKSTNLVKNKCVNFNFNGLTGTGVLTESNKKFLPFQQFGRDIADTTDAVRDPQTLEILDITPCSFGGVSVITPGTNTSNQVAVLYQDVNCTEVPVAIHADQLTPTWRVYSTGSNVFQTRAGCLIGAEHVNNSYECDIPIGAGICASYQTQTNSPRRARSVASQSIIAYTMSLGAENSVAYSNNSIAIPTNFTISVTTEILPVSMTKTSVDCTMYICGDSTECSNLLLQYGSFCTQLNRALTGIAVEQDKNTQEVFAQVKQIYKTPPIKDFGGFNFSQILPDPSKPSKRSFIEDLLFNKVTLADAGFIKQYGDCLGDIAARDLICAQKFNGLTVLPPLLTDEMIAQYTSALLAGTITSGWTFGAGAALQIPFAMQMAYRFNGCGVTQNVLYENQKLIANQFNSAIGKIQDSLSSTASALGKLQDVVNQNAQALNTLVKQLSSNFGAISSVLNDILSRLDKVEAEVQIDRLITGRLQSLQTYVTQQLIRAAEIRASANLAATKMSECVLGQSKRVDFCGKGCHLMSFPQSAPHGVVFLHVTYVPAQEKNFTTAPAICHDGKAHFPREGVFVSNGTHWFVTQRNFYEPQIITTDNTFVSGNCDVLIGIVNNTVYDPLQPELDS

SEQ ID NO: 3227 - protein, 1147 aa, Artificial Sequence
  SARS-CoV-2/Shenzhen/SZTH-004/2020__EPI_ISL_406595 spike protein (1-1147)(I909C_Y1047C)
MFVFLVLLPLVSSQCVNLTTRTQLPPAYTNSFTRGVYYPDKVFRSSVLHSTQDLFLPFFSNVTWFHAIHVSGTNGTKRFDNPVLPFNDGVYFASTEKSNIIRGWIFGTTLDSKTQSLLIVNNATNVVIKVCEFQFCNDPFLGVYYHKNNKSWMESEFRVYSSANNCTFEYVSQPFLMDLEGKQGNFKNLREFVFKNIDGYFKIYSKHTPINLVRDLPQGFSALEPLVDLPIGINITRFQTLLALHRSYLTPGDSSSGWTAGAAAYYVGYLQPRTFLLKYNENGTITDAVDCALDPLSETKCTLKSFTVEKGIYQTSNFRVQPTESIVRFPNITNLCPFGEVFNATRFASVYAWDRKRISNCVAYYSVLYNSASFSTFKCYGVSPTKLNDLCFTNVYADSFVIRGDEVRQIAPGQTGKIADYNYKLPDDFTGCVIAWNSNNLDSKVGGNYNYLYRLFRKSNLKPFERDISTEIYQAGSTPCNGVEGFNCYFPLQSYGFQPTNGVGYQPYRVVVLSFELLHAPATVCGPKKSTNLVKNKCVNFNFNGLTGTGVLTESNKKFLPFQQFGRDIADTTDAVRDPQTLEILDITPCSFGGVSVITPGTNTSNQVAVLYQDVNCTEVPVAIHADQLTPTWRVYSTGSNVFQTRAGCLIGAEHVNNSYECDIPIGAGICASYQTQTNSPRRARSVASQSIIAYTMSLGAENSVAYSNNSIAIPTNFTISVTTEILPVSMTKTSVDCTMYICGDSTECSNLLLQYGSFCTQLNRALTGIAVEQDKNTQEVFAQVKQIYKTPPIKDFGGFNFSQILPDPSKPSKRSFIEDLLFNKVTLADAGFIKQYGDCLGDIAARDLICAQKFNGLTVLPPLLTDEMIAQYTSALLAGTITSGWTFGAGAALQIPFAMQMAYRFNGCGVTQNVLYENQKLIANQFNSAIGKIQDSLSSTASALGKLQDVVNQNAQALNTLVKQLSSNFGAISSVLNDILSRLDKVEAEVQIDRLITGRLQSLQTYVTQQLIRAAEIRASANLAATKMSECVLGQSKRVDFCGKGCHLMSFPQSAPHGVVFLHVTYVPAQEKNFTTAPAICHDGKAHFPREGVFVSNGTHWFVTQRNFYEPQIITTDNTFVSGNCDVVIGIVNNTVYDPLQPELDS

SEQ ID NO: 3228 - protein, 1147 aa, Artificial Sequence
  SARS-CoV-2/France/IDF0372/2020__EPI_ISL_406596 spike protein (1-1147)(I909C_Y1047C)
MFVFLVLLPLVSSQCVNLTTRTQLPPAYTNSFTRGVYYPDKVFRSSVLHSTQDLFLPFFSNVTWFHAIHVSGTNGTKRFDNPVLPFNDGVYFASTEKSNIIRGWIFGTTLDSKTQSLLIVNNATNVVIKVCEFQFCNDPFLGVYYHKNNKSWMESEFRVYSSANNCTFEYVSQPFLMDLEGKQGNFKNLREFVFKNIDGYFKIYSKHTPINLVRDLPQGFSALEPLVDLPIGINITRFQTLLALHRSYLTPGDSSSGWTAGAAAYYVGYLQPRTFLLKYNENGTITDAVDCALDPLSETKCTLKSFTVEKGIYQTSNFRVQPTESIVRFPNITNLCPFGEVFNATRFASVYAWNRKRISNCVADYSFLYNSASFSTFKCYGVSPTKLNDLCFTNVYADSFVIRGDEVRQIAPGQTGKIADYNYKLPDDFTGCVIAWNSNNLDSKVGGNYNYLYRLFRKSNLKPFERDISTEIYQAGSTPCNGVEGFNCYFPLQSYGFQPTNGVGYQPYRVVVLSFELLHAPATVCGPKKSTNLVKNKCVNFNFNGLTGTGVLTESNKKFLPFQQFGRDIADTTDAVRDPQTLEILDITPCSFGGVSVITPGTNTSNQVAVLYQDVNCTEVPVAIHADQLTPTWRVYSTGSNVFQTRAGCLIGAEHVNNSYECDIPIGAGICASYQTQTNSPRRARSVASQSIIAYTMSLGAENSVAYSNNSIAIPTNFTISVTTEILPVSMTKTSVDCTMYICGDSTECSNLLLQYGSFCTQLNRALTGIAVEQDKNTQEVFAQVKQIYKTPPIKDFGGFNFSQILPDPSKPSKRSFIEDLLFNKVTLADAGFIKQYGDCLGDIAARDLICAQKFNGLTVLPPLLTDEMIAQYTSALLAGTITSGWTFGAGAALQIPFAMQMAYRFNGCGVTQNVLYENQKLIANQFNSAIGKIQDSLSSTASALGKLQDVVNQNAQALNTLVKQLSSNFGAISSVLNDILSRLDKVEAEVQIDRLITGRLQSLQTYVTQQLIRAAEIRASANLAATKMSECVLGQSKRVDFCGKGCHLMSFPQSAPHGVVFLHVTYVPAQEKNFTTAPAICHDGKAHFPREGVFVSNGTHWFVTQRNFYEPQIITTDNTFVSGNCDVVIGIVNNTVYDPLQPELDS

SEQ ID NO: 3229 - protein, 1147 aa, Artificial Sequence
  SARS-CoV-2/Australia/VIC01/2020__EPI_ISL_406844 spike protein (1-1147)(I909C_Y1047C)
MFVFLVLLPLVSSQCVNLTTRTQLPPAYTNSFTRGVYYPDKVFRSSVLHSTQDLFLPFFSNVTWFHAIHVSGTNGTKRFDNPVLPFNDGVYFASTEKSNIIRGWIFGTTLDSKTQSLLIVNNATNVVIKVCEFQFCNDPFLGVYYHKNNKSWMESEFRVYSSANNCTFEYVSQPFLMDLEGKQGNFKNLREFVFKNIDGYFKIYSKHTPINLVRDLPQGFSALEPLVDLPIGINITRFQTLLALHRRYLTPGDSSSGWTAGAAAYYVGYLQPRTFLLKYNENGTITDAVDCALDPLSETKCTLKSFTVEKGIYQTSNFRVQPTESIVRFPNITNLCPFGEVFNATRFASVYAWNRKRISNCVADYSVLYNSASFSTFKCYGVSPTKLNDLCFTNVYADSFVIRGDEVRQIAPGQTGKIADYNYKLPDDFTGCVIAWNSNNLDSKVGGNYNYLYRLFRKSNLKPFERDISTEIYQAGSTPCNGVEGFNCYFPLQSYGFQPTNGVGYQPYRVVVLSFELLHAPATVCGPKKSTNLVKNKCVNFNFNGLTGTGVLTESNKKFLPFQQFGRDIADTTDAVRDPQTLEILDITPCSFGGVSVITPGTNTSNQVAVLYQDVNCTEVPVAIHADQLTPTWRVYSTGSNVFQTRAGCLIGAEHVNNSYECDIPIGAGICASYQTQTNSPRRARSVASQSIIAYTMSLGAENSVAYSNNSIAIPTNFTISVTTEILPVSMTKTSVDCTMYICGDSTECSNLLLQYGSFCTQLNRALTGIAVEQDKNTQEVFAQVKQIYKTPPIKDFGGFNFSQILPDPSKPSKRSFIEDLLFNKVTLADAGFIKQYGDCLGDIAARDLICAQKFNGLTVLPPLLTDEMIAQYTSALLAGTITSGWTFGAGAALQIPFAMQMAYRFNGCGVTQNVLYENQKLIANQFNSAIGKIQDSLSSTASALGKLQDVVNQNAQALNTLVKQLSSNFGAISSVLNDILSRLDKVEAEVQIDRLITGRLQSLQTYVTQQLIRAAEIRASANLAATKMSECVLGQSKRVDFCGKGCHLMSFPQSAPHGVVFLHVTYVPAQEKNFTTAPAICHDGKAHFPREGVFVSNGTHWFVTQRNFYEPQIITTDNTFVSGNCDVVIGIVNNTVYDPLQPELDS

SEQ ID NO: 3230 - protein, 1147 aa, Artificial Sequence
  SARS-CoV-2/Germany/BavPat1/2020__EPI_ISL_406862 spike protein (1-1147)(I909C_Y1047C)
MFVFLVLLPLVSSQCVNLTTRTQLPPAYTNSFTRGVYYPDKVFRSSVLHSTQDLFLPFFSNVTWFHAIHVSGTNGTKRFDNPVLPFNDGVYFASTEKSNIIRGWIFGTTLDSKTQSLLIVNNATNVVIKVCEFQFCNDPFLGVYYHKNNKSWMESEFRVYSSANNCTFEYVSQPFLMDLEGKQGNFKNLREFVFKNIDGYFKIYSKHTPINLVRDLPQGFSALEPLVDLPIGINITRFQTLLALHRSYLTPGDSSSGWTAGAAAYYVGYLQPRTFLLKYNENGTITDAVDCALDPLSETKCTLKSFTVEKGIYQTSNFRVQPTESIVRFPNITNLCPFGEVFNATRFASVYAWNRKRISNCVADYSVLYNSASFSTFKCYGVSPTKLNDLCFTNVYADSFVIRGDEVRQIAPGQTGKIADYNYKLPDDFTGCVIAWNSNNLDSKVGGNYNYLYRLFRKSNLKPFERDISTEIYQAGSTPCNGVEGFNCYFPLQSYGFQPTNGVGYQPYRVVVLSFELLHAPATVCGPKKSTNLVKNKCVNFNFNGLTGTGVLTESNKKFLPFQQFGRDIADTTDAVRDPQTLEILDITPCSFGGVSVITPGTNTSNQVAVLYQGVNCTEVPVAIHADQLTPTWRVYSTGSNVFQTRAGCLIGAEHVNNSYECDIPIGAGICASYQTQTNSPRRARSVASQSIIAYTMSLGAENSVAYSNNSIAIPTNFTISVTTEILPVSMTKTSVDCTMYICGDSTECSNLLLQYGSFCTQLNRALTGIAVEQDKNTQEVFAQVKQIYKTPPIKDFGGFNFSQILPDPSKPSKRSFIEDLLFNKVTLADAGFIKQYGDCLGDIAARDLICAQKFNGLTVLPPLLTDEMIAQYTSALLAGTITSGWTFGAGAALQIPFAMQMAYRFNGCGVTQNVLYENQKLIANQFNSAIGKIQDSLSSTASALGKLQDVVNQNAQALNTLVKQLSSNFGAISSVLNDILSRLDKVEAEVQIDRLITGRLQSLQTYVTQQLIRAAEIRASANLAATKMSECVLGQSKRVDFCGKGCHLMSFPQSAPHGVVFLHVTYVPAQEKNFTTAPAICHDGKAHFPREGVFVSNGTHWFVTQRNFYEPQIITTDNTFVSGNCDVVIGIVNNTVYDPLQPELDS

SEQ ID NO: 3231 - protein, 1147 aa, Artificial Sequence
  SARS-CoV-2/Wuhan/HBCDC-HB-02/2020__EPI_ISL_412978 spike protein (1-1147)(I909C_Y1047C)
MFVFLVLLPLVSSQCVNLTTRTQLPPAYTNSFTRGVYYPDKVFRSSVLHSTQDLFLPFFSNVTWFHAIHVSGTNGTKRFDNPVLPFNDGVYFASTEKSNIIRGWIFGTTLDSKTQSLLIVNNATNVVIKVCEFQFCNDPFLGVYYHKNNKSWMESEFRVYSSANNCTFEYVSQPFLMDLEGKQGNFKNLREFVFKNIDGYFKIYSKHTPINLVRDLPQGFSALEPLVDLPIGINITRFQTLLALHRSYLTPGDSSSGWTAGAAAYYVGYLQPRTFLLKYNENGTITDAVDCALDPLSETKCTLKSFTVEKGIYQTSNFRVQPTESIVRFPNITNLCPFGEVFNATRFASVYAWNRKRISNCVADYSVLYNSASFSTFKCYGVSPTKLNDLCFTNVYADSFVIRGDEVRQIAPGQTGKIADYNYKLPDDFTGCVIAWNSNNLDSKVGGNYNYLYRLFRKSNLKPFERDISTEIYQAGSTPCNGVEGFNCYFPLQSYGFQPTNGVGYQPYRVVVLSFELLHAPATVCGPKKSTNLVKNKCVNFNFNGLTGTGVLTESNKKFLPFQQFGRDIADTTDAVRDPQTLEILDITPCSFGGVSVITPGTNTSNQVAVLYQDVNCTEVPVAIHADQLTPTWRVYSTGSNVFQTRAGCLIGAEHVNNSYECDIPIGAGICASYQTQTNSPRRARSVASQSIIAYTMSLGAENSVAYSNNSIAIPTNFTISVTTEILPVSMTKTSVDCTMYICGDSTECSNFLLQYGSFCTQLNRALTGIAVEQDKNTQEVFAQVKQIYKTPPIKDFGGFNFSQILPDPSKPSKRSFIEDLLFNKVTLADAGFIKQYGDCLGDIAARDLICAQKFNGLTVLPPLLTDEMIAQYTSALLAGTITSGWTFGAGAALQIPFAMQMAYRFNGCGVTQNVLYENQKLIANQFNSAIGKIQDSLSSTASALGKLQDVVNQNAQALNTLVKQLSSNFGAISSVLNDILSRLDKVEAEVQIDRLITGRLQSLQTYVTQQLIRAAEIRASANLAATKMSECVLGQSKRVDFCGKGCHLMSFPQSAPHGVVFLHVTYVPAQEKNFTTAPAICHDGKAHFPREGVFVSNGTHWFVTQRNFYEPQIITTDNTFVSGNCDVVIGIVNNTVYDPLQPELDS

SEQ ID NO: 3232 - protein, 1147 aa, Artificial Sequence
  SARS-CoV-2/Australia/QLD02/2020__EPI_ISL_407896 spike protein (1-1147)(I909C_Y1047C)
MFVFLVLLPLVSSQCVNLTTRTQLPPAYTNSFTRGVYYPDKVFRSSVLHSTQDLFLPFFSNVTWFHAIHVSGTNGTKRFDNPVLPFNDGVYFASTEKSNIIRGWIFGTTLDSKTQSLLIVNNATNVVIKVCEFQFCNDPFLGVYYHKNNKSWMESEFRVYSSANNCTFEYVSQPFLMDLEGKQGNFKNLREFVFKNIDGYFKIYSKHTPINLVRDLPQGFSALEPLVDLPIGINITRFQTLLALHRSYLTPGDSSSGWTAGAAAYYVGYLQPRTFLLKYNENGTITDAVDCALDPLSETKCTLKSFTVEKGIYQTSNFRVQPTESIVRFPNITNLCPFGEVFNATRFASVYAWNRKRISNCVADYSVLYNSASFSTFKCYGVSPTKLNDLCFTNVYADSFVIRGDEVRQIAPGQTGKIADYNYKLPDDFTGCVIAWNSNNLDSKVGGNYNYLYRLFRKSNLKPFERDISTEIYQAGSTPCNGVEGFNCYFPLQSYGFQPTNGVGYQPYRVVVLSFELLHAPATVCGPKKSTNLVKNKCVNFNFNGLTGTGVLTESNKKFLPFQQFGRDIADTTDAVRDPQTLEILDITPCSFGGVSVITPGTNTSNQVAVLYQDVNCTEVPVAIHADQLTPTWRVYSTGSNVFQTRAGCLIGAEHVNNSYECDIPIGAGICASYQTQTNSPRRARSVASQSIIAYTMSLGAENSVAYSNNSIAIPTNFTISVTTEILPVSMTKTSVDCTMYICGDSTECSNLLLQYGSFCTQLNRALTGIAVEQDKNTQEVFAQVKQIYKTPPIKDFGGFNFSQILPDPSKPSKRSFIEDLLFNKVTLADAGFIKQYGDCLGDIAARDLICAQKFNGLTVLPPLLTDEMIAQYTSALLAGTITSGWTFGAGAALQIPFAMQMAYRFNGCGVTQNVLYENQKLIANQFNSAIGKIQDSLSSTASALGKLQDVVNQNAQALNTLVKQLSSNFGAISSVLNDILSRLDKVEAEVQIDRLITGRLQSLQTYVTQQLIRAAEIRASANLAATKMSECVLGQSKRVDFCGKGCHLMSFPQSAPHGVVFLHVTYVPAQEKNFTTAPAICHDGKAHFPREGVFVSNGTHWFVTQRNFYEPQIITTDNTFVSGNCDVVIGIVNNTVYDPLQLELDS

SEQ ID NO: 3233 - protein, 1147 aa, Artificial Sequence
  SARS-CoV-2/India/1-31/2020__EPI_ISL_413523 spike protein (1-1147)(I909C_Y1047C)
MFVFLVLLPLVSSQCVNLTTRTQLPPAYTNSFTRGVYYPDKVFRSSVLHSTQDLFLPFFSNVTWFHAIHVSGTNGTKRFDNPVLPFNDGVYFASTEKSNIIRGWIFGTTLDSKTQSLLIVNNATNVVIKVCEFQFCNDPFLGVYYHKNNKSWMESEFRVYSSANNCTFEYVSQPFLMDLEGKQGNFKNLREFVFKNIDGYFKIYSKHTPINLVRDLPQGFSALEPLVDLPIGINITRFQTLLALHRSYLTPGDSSSGWTAGAAAYYVGYLQPRTFLLKYNENGTITDAVDCALDPLSETKCTLKSFTVEKGIYQTSNFRVQPTESIVRFPNITNLCPFGEVFNATRFASVYAWNRKRISNCVADYSVLYNSASFSTFKCYGVSPTKLNDLCFTNVYADSFVIRGDEVRQIAPGQTGKIADYNYKLPDDFTGCVIAWNSNNLDSKVGGNYNYLYRLFRKSNLKPFERDISTEIYQAGSTPCNGVEGFNCYFPLQSYGFQPTNGVGYQPYRVVVLSFELLHAPATVCGPKKSTNLVKNKCVNFNFNGLTGTGVLTESNKKFLPFQQFGRDIADTTDAVRDPQTLEILDITPCSFGGVSVITPGTNTSNQVAVLYQDVNCTEVPVAIHADQLTPTWRVYSTGSNVFQTRAGCLIGAEHVNNSYECDIPIGAGICASYQTQTNSPRRARSVASQSIIAYTMSLGAENSVAYSNNSIAIPTNFTISVTTEILPVSMTKTSVDCTMYICGDSTECSNLLLQYGSFCTQLNRALTGIAVEQDKNTQEVFAQVKQIYKTPPIKDFGGFNFSQILPDPSKPSKRSFIEDLLFNKVTLADAGFIKQYGDCLGDIAARDLICAQKFNGLTVLPPLLTDEMIAQYTSALLAGTITSGWTFGAGAALQIPFAMQMAYRFNGCGVTQNVLYENQKLIANQFNSVIGKIQDSLSSTASALGKLQDVVNQNAQALNTLVKQLSSNFGAISSVLNDILSRLDKVEAEVQIDRLITGRLQSLQTYVTQQLIRAAEIRASANLAATKMSECVLGQSKRVDFCGKGCHLMSFPQSAPHGVVFLHVTYVPAQEKNFTTAPAICHDGKAHFPREGVFVSNGTHWFVTQRNFYEPQIITTDNTFVSGNCDVVIGIVNNTVYDPLQPELDS

SEQ ID NO: 3234 - protein, 1147 aa, Artificial Sequence
  SARS-CoV-2/Guangdong/GD2020087-P0008/2020__EPI_ISL_413863 spike protein (1-1147)(I909C_Y1047C)
MFVFLVLLPLVSSQCVNLTTRTQLPPAYTNSFTRGVYYPDKVFRSSVLHSTQDLFLPFFSNVTWFHAIHVSGTNGTKRFDNPVLPFNDGVYFASTEKSNIIRGWIFGTTLDSKTQSLLIVNNATNVVIKVCEFQFCNDPFLGVYYHKNNKSWMESEFRVYSSANNCTFEYVSQPFLMDLEGKQGNFKNLREFVFKNIDGYFKIYSKHTPINLVRDLPQGFSALEPLVDLPIGINITRFQTLLALHRSYLTPGDSSSGWTAGAAAYYVGYLQPRTFLLKYNENGTITDAVDCALDPLSETKCTLKSFTVEKGIYQTSNFRVQPTESIVRFPNITNLCPFGEVFNATRFASVYAWNRKRISNCVADYSVLYNSASFSTFKCYGVSPTKLNDLCFTNVYADSFVIRGDEVREIAPGQTGKIADYNYKLPDDFTGCVIAWNSNNLDSKVGGNYNYLYRLFRKSNLKPFERDISTEIYQAGSTPCNGVEGFNCYFPLQSYGFQPTNGVGYQPYRVVVLSFELLHAPATVCGPKKSTNLVKNKCVNFNFNGLTGTGVLTESNKKFLPFQQFGRDIADTTDAVRDPQTLEILDITPCSFGGVSVITPGTNTSNQVAVLYQDVNCTEVPVAIHADQLTPTWRVYSTGSNVFQTRAGCLIGAEHVNNSYECDIPIGAGICASYQTQTNSPRRARSVASQSIIAYTMSLGAENSVAYSNNSIAIPTNFTISVTTEILPVSMTKTSVDCTMYICGDSTECSNLLLQYGSFCTQLNRALTGIAVEQDKNTQEVFAQVKQIYKTPPIKDFGGFNFSQILPDPSKPSKRSFIEDLLFNKVTLADAGFIKQYGDCLGDIAARDLICAQKFNGLTVLPPLLTDEMIAQYTSALLAGTITSGWTFGAGAALQIPFAMQMAYRFNGCGVTQNVLYENQKLIANQFNSAIGKIQDSLSSTASALGKLQDVVNQNAQALNTLVKQLSSNFGAISSVLNDILSRLDKVEAEVQIDRLITGRLQSLQTYVTQQLIRAAEIRASANLAATKMSECVLGQSKRVDFCGKGCHLMSFPQSAPHGVVFLHVTYVPAQEKNFTTAPAICHDGKAHFPREGVFVSNGTHWFVTQRNFYEPQIITTDNTFVSGNCDVVIGIVNNTVYDPLQPELDS

SEQ ID NO: 3235 - protein, 1147 aa, Artificial Sequence
  SARS-CoV-2/Sweden/01/2020__EPI_ISL_411951 spike protein (1-1147)(I909C_Y1047C)
MFVFLVLLPLVSSQCVNLTTRTQLPPAYTNSFTRGVYYPDKVFRSSVLHSTQDLFLPFFSNVTWFHAIHVSGTNGTKRFDNPVLPFNDGVYFASTEKSNIIRGWIFGTTLDSKTQSLLIVNNATNVVIKVCEFQFCNDPFLGVYYHKNNKSWMESEFRVYSSANNCTFEYVSQPFLMDLEGKQGNFKNLREFVFKNIDGYFKIYSKHTPINLVRDLPQGFSALEPLVDLPIGINITRFQTLLALHRSYLTPGDSSSGWTAGAAAYYVGYLQPRTFLLKYNENGTITDAVDCALDPLSETKCTLKSFTVEKGIYQTSNFRVQPTESIVRFPNITNLCPFGEVFNATRFASVYAWNRKRISNCVADYSVLYNSASFSTFKCYGVSPTKLNDLCFTNVYADSFVIRGDEVRQIAPGQTGKIADYNYKLPDDFTGCVIAWNSNNLDSKVGGNYNYLYRLFRKSNLKPFERDISTEIYQAGSTPCNGVEGFNCYFPLQSYGFQPTNGVGYQPYRVVVLSFELLHAPATVCGPKKSTNLVKNKCVNFNFNGLTGTGVLTESNKKFLPFQQFGRDIADTTDAVRDPQTLEILDITPCSFGGVSVITPGTNTSNQVAVLYQDVNCTEVPVAIHADQLTPTWRVYSTGSNVFQTRAGCLIGAEHVNNSYECDIPIGAGICASYQTQTNSPRRARSVASQSIIAYTMSLGAENSVAYSNNSIAIPTNFTISVTTEILPVSMTKTSVDCTMYICGDSTECSNLLLQYGSFCTQLNRALTGIAVEQDKNTQEVFAQVKQIYKTPPIKDCGGFNFSQILPDPSKPSKRSFIEDLLFNKVTLADAGFIKQYGDCLGDIAARDLICAQKFNGLTVLPPLLTDEMIAQYTSALLAGTITSGWTFGAGAALQIPFAMQMAYRFNGCGVTQNVLYENQKLIANQFNSAIGKIQDSLSSTASALGKLQDVVNQNAQALNTLVKQLSSNFGAISSVLNDILSRLDKVEAEVQIDRLITGRLQSLQTYVTQQLIRAAEIRASANLAATKMSECVLGQSKRVDFCGKGCHLMSFPQSAPHGVVFLHVTYVPAQEKNFTTAPAICHDGKAHFPREGVFVSNGTHWFVTQRNFYEPQIITTDNTFVSGNCDVVIGIVNNTVYDPLQPELDS

SEQ ID NO: 3236 - protein, 1147 aa, Artificial Sequence
  SARS-CoV-2/Tianmen/HBCDC-HB-07/2020__EPI_ISL_412983 spike protein (1-1147)(I909C_Y1047C)
MFVFLVLLPLVSSQCVNLTTRTQLPPAYTNSFTRGVYYPDKVFRSSVLHSTQDLFLPFFSNVTWFHAIHVSGTNGTKRFDNPVLPFNDGVYFASTEKSNIIRGWIFGTTLDSKTQSLLIVNNATNVVIKVCEFQFCNDPFLGVYYHKNNKSWMESEFRVYSSANNCTFEYVSQPFLMDLEGKQGNFKNLREFVFKNIDGYFKIYSKHTPINLVRDLPQGFSALEPLVDLPIGINITRFQTLLALHRSYLTPGDSSSGWTAGAAAYYVGYLQPRTFLLKYNENGTITDAVDCALDPLSETKCTLKSFTVEKGIYQTSNFRVQPTESIVRFPNITNLCPFGEVFNATRFASVYAWNRKRISNCVADYSVLYNSASFSTFKCYGVSPTKLNDLCFTNVYADSFVIRGDEVRQIAPGQTGKIADYNYKLPDDFTGCVIAWNSNNLDSKVGGNYNYLYRLFRKSNLKPFERDISTEIYQAGSTPCNGVEGFNCYFPLQSYGFQPTNGVGYQPYRVVVLSFELLHAPATVCGPKKSTNLVKNKCVNFNFNGLTGTGVLTESNKKFLPFQQFGRDIADTTDAVRDPQTLEILDITPCSFGGVSVITPGTNTSNQVAVLYQDLNCTEVPVAIHADQLTPTWRVYSTGSNVFQTRAGCLIGAEHVNNSYECDIPIGAGICASYQTQTNSPRRARSVASQSIIAYTMSLGAENSVAYSNNSIAIPTNFTISVTTEILPVSMTKTSVDCTMYICGDSTECSNLLLQYGSFCTQLNRALTGIAVEQDKNTQEVFAQVKQIYKTPPIKDFGGFNFSQILPDPSKPSKRSFIEDLLFNKVTLADAGFIKQYGDCLGDIAARDLICAQKFNGLTVLPPLLTDEMIAQYTSALLAGTITSGWTFGAGAALQIPFAMQMAYRFNGCGVTQNVLYENQKLIANQFNSAIGKIQDSLSSTASALGKLQDVVNQNAQALNTLVKQLSSNFGAISSVLNDILSRLDKVEAEVQIDRLITGRLQSLQTYVTQQLIRAAEIRASANLAATKMSECVLGQSKRVDFCGKGCHLMSFPQSAPHGVVFLHVTYVPAQEKNFTTAPAICHDGKAHFPREGVFVSNGTHWFVTQRNFYEPQIITTDNTFVSGNCDVVIGIVNNTVYDPLQPELDS

SEQ ID NO: 3237 - protein, 1147 aa, Artificial Sequence
  SARS-CoV-2/Hong Kong/case42_VM20002493/2020__EPI_ISL_414527 spike protein (1-1147)(I909C_Y1047C)
MFVFLVLLPLVSSQCVNLTTRTQLPPAYTNSFTRGVYYPDKVFRSSVLHSTQDLFLPFFSNVTWFHAIHVSGTNGTKRFDNPVLPFNDGVYFASTEKSNIIRGWIFGTTLDSKTQSLLIVNNATNVVIKVCEFQFCNDPFLGVYYHKNNKSWMESEFRVYSSANNCTFEYVSQPFLMDLEGKQGNFKNLREFVFKNIDGYFKIYSKHTPINLVRDLPQGFSALEPLVDLPIGINITRFQTLLALHRSYLTPGDSSSGWTAGAAAYYVGYLQPRTFLLKYNENGTITDAVDCALDPLSETKCTLKSFTVEKGIYQTSNFRVQPTESIVRFPNITNLCPFGEVFNATRFASVYAWNRKRISNCVADYSVLYNSASFSTFKCYGVSPTKLNDLCFTNVYADSFVIRGDEVRQIAPGQTGKIADYNYKLPDDFTGCVIAWNSNNLDSKVGGNYNYLYRLFRKSNLKPFERDISTEIYQAGSTPCNGVEGFNCYFPLQSYGFQPTNGVGYQPYRVVVLSFELLHAPATVCGPKKSTNLVKNKCVNFNFNGLTGTGVLTESNKKFLPFQQFGRDIADTTDAVRDPQTLEILDITPCSFGGVSVITPGTNTSNQVAVLYQDVNCTEVPVAIHADQLTPTWRVYSTGSNVFQTRAGCLIGAEHVNNSYECDIPIGAGICASYQTQTNSPRRARSVASQSIIAYTMSLGAENSVAYSNNSIAIPTNFAISVTTEILPVSMTKTSVDCTMYICGDSTECSNLLLQYGSFCTQLNRALTGIAVEQDKNTQEVFAQVKQIYKTPPIKDFGGFNFSQILPDPSKPSKRSFIEDLLFNKVTLADAGFIKQYGDCLGDIAARDLICAQKFNGLTVLPPLLTDEMIAQYTSALLAGTITSGWTFGAGAALQIPFAMQMAYRFNGCGVTQNVLYENQKLIANQFNSAIGKIQDSLSSTASALGKLQDVVNQNAQALNTLVKQLSSNFGAISSVLNDILSRLDKVEAEVQIDRLITGRLQSLQTYVTQQLIRAAEIRASANLAATKMSECVLGQSKRVDFCGKGCHLMSFPQSAPHGVVFLHVTYVPAQEKNFTTAPAICHDGKAHFPREGVFVSNGTHWFVTQRNFYEPQIITTDNTFVSGNCDVVIGIVNNTVYDPLQPELDS

SEQ ID NO: 3238 - protein, 1147 aa, Artificial Sequence
  SARS-CoV-2/USA/CruiseA-23/2020__EPI_ISL_414482 spike protein (1-1147)(I909C_Y1047C)
MFVFLVLLPLVSSQCVNLTTRTQLPPAYTNSFTRGVYYPDKVFRSSVLHSTQDLFLPFFSNVTWFHAIHVSGTNGTKRFDNPVLPFNDGVYFASTEKSNIIRGWIFGTTLDSKTQSLLIVNNATNVVIKVCEFQFCNDPFLGVYYHKNNKSWMESEFRVYSSANNCTFEYVSQPFLMDLEVKQGNFKNLREFVFKNIDGYFKIYSKHTPINLVRDLPQGFSALEPLVDLPIGINITRFQTLLALHRSYLTPGDSSSGWTAGAAAYYVGYLQPRTFLLKYNENGTITDAVDCALDPLSETKCTLKSFTVEKGIYQTSNFRVQPTESIVRFPNITNLCPFGEVFNATRFASVYAWNRKRISNCVADYSVLYNSASFSTFKCYGVSPTKLNDLCFTNVYADSFVIRGDEVRQIAPGQTGKIADYNYKLPDDFTGCVIAWNSNNLDSKVGGNYNYLYRLFRKSNLKPFERDISTEIYQAGSTPCNGVEGFNCYFPLQSYGFQPTNGVGYQPYRVVVLSFELLHAPATVCGPKKSTNLVKNKCVNFNFNGLTGTGVLTESNKKFLPFQQFGRDIADTTDAVRDPQTLEILDITPCSFGGVSVITPGTNTSNQVAVLYQDVNCTEVPVAIHADQLTPTWRVYSTGSNVFQTRAGCLIGAEHVNNSYECDIPIGAGICASYQTQTNSPRRARSVASQSIIAYTMSLGAENSVAYSNNSIAIPTNFTISVTTEILPVSMTKTSVDCTMYICGDSTECSNLLLQYGSFCTQLNRALTGIAVEQDKNTQEVFAQVKQIYKTPPIKDFGGFNFSQILPDPSKPSKRSFIEDLLFNKVTLADAGFIKQYGDCLGDIAARDLICAQKFNGLTVLPPLLTDEMIAQYTSALLAGTITSGWTFGAGAALQIPFAMQMAYRFNGCGVTQNVLYENQKLIANQFNSAIGKIQDSLSSTASALGKLQDVVNQNAQALNTLVKQLSSNFGAISSVLNDILSRLDKVEAEVQIDRLITGRLQSLQTYVTQQLIRAAEIRASANLAATKMSECVLGQSKRVDFCGKGCHLMSFPQSAPHGVVFLHVTYVPAQEKNFTTAPAICHDGKAHFPREGVFVSNGTHWFVTQRNFYEPQIITTDNTFVSGNCDVVIGIVNNTVYDPLQPELDS

SEQ ID NO: 3239 - protein, 1147 aa, Artificial Sequence
  SARS-CoV-2/Hong Kong/case85_VM20002868/2020__EPI_ISL_414519 spike protein (1-1147)(I909C_Y1047C)
MFVFLVLVPLVSSQCVNLTTRTQLPPAYTNSFTRGVYYPDKVFRSSVLHSTQDLFLPFFSNVTWFHAIHVSGTNGTKRFDNPVLPFNDGVYFASTEKSNIIRGWIFGTTLDSKTQSLLIVNNATNVVIKVCEFQFCNDPFLGVYYHKNNKSWMESEFRVYSSANNCTFEYVSQPFLMDLEGKQGNFKNLREFVFKNIDGYFKIYSKHTPINLVRDLPQGFSALEPLVDLPIGINITRFQTLLALHRSYLTPGDSSSGWTAGAAAYYVGYLQPRTFLLKYNENGTITDAVDCALDPLSETKCTLKSFTVEKGIYQTSNFRVQPTESIVRFPNITNLCPFGEVFNATRFASVYAWNRKRISNCVADYSVLYNSASFSTFKCYGVSPTKLNDLCFTNVYADSFVIRGDEVRQIAPGQTGKIADYNYKLPDDFTGCVIAWNSNNLDSKVGGNYNYLYRLFRKSNLKPFERDISTEIYQAGSTPCNGVEGFNCYFPLQSYGFQPTNGVGYQPYRVVVLSFELLHAPATVCGPKKSTNLVKNKCVNFNFNGLTGTGVLTESNKKFLPFQQFGRDIADTTDAVRDPQTLEILDITPCSFGGVSVITPGTNTSNQVAVLYQDVNCTEVPVAIHADQLTPTWRVYSTGSNVFQTRAGCLIGAEHVNNSYECDIPIGAGICASYQTQTNSPRRARSVASQSIIAYTMSLGAENSVAYSNNSIAIPTNFTISVTTEILPVSMTKTSVDCTMYICGDSTECSNLLLQYGSFCTQLNRALTGIAVEQDKNTQEVFAQVKQIYKTPPIKDFGGFNFSQILPDPSKPSKRSFIEDLLFNKVTLADAGFIKQYGDCLGDIAARDLICAQKFNGLTVLPPLLTDEMIAQYTSALLAGTITSGWTFGAGAALQIPFAMQMAYRFNGCGVTQNVLYENQKLIANQFNSAIGKIQDSLSSTASALGKLQDVVNQNAQALNTLVKQLSSNFGAISSVLNDILSRLDKVEAEVQIDRLITGRLQSLQTYVTQQLIRAAEIRASANLAATKMSECVLGQSKRVDFCGKGCHLMSFPQSAPHGVVFLHVTYVPAQEKNFTTAPAICHDGKAHFPREGVFVSNGTHWFVTQRNFYEPQIITTDNTFVSGNCDVVIGIVNNTVYDPLQPELDS

SEQ ID NO: 3240 - protein, 1147 aa, Artificial Sequence; identical to SEQ ID NO: 3230
  SARS-CoV-2/England/200990660/2020__EPI_ISL_414523 spike protein (1-1147)(I909C_Y1047C)

SEQ ID NO: 3241 - protein, 1147 aa, Artificial Sequence
  SARS-CoV-2/Australia/NSW09/2020__EPI_ISL_413595 spike protein (1-1147)(I909C_Y1047C)
MFVFLVLLPLVSSQCVNLTTRTQLPPAYTNSFTRGVYYPDKVFRSSVLHSTQDLFLPFFSNVTWFHAIHVSGTNGTKRFDNPVLPFNDGVYFASTEKSNIIRGWIFGTTLDSKTQSLLIVNNATNVVIKVCEFQFCNDPFLGVYYHKNNKSWMESEFRVYSSANNCTFEYVSQPFLMDLEGKQGNFKNLREFVFKNIDGYFKIYSKHTPINLVRDLPQGFSALEPLVDLPIGINITRFQTLLALHRSYLTPGDSSSGWTAGAAAYYVGYLQPRTFLLKYNENGTITDAVDCALDPLSETKCTLKSFTVEKGIYQTSNFRVQPTESIVRFPNITNLCPFGEVFNATRFASVYAWNRKRISNCVADYSVLYNSASFSTFKCYGVSPTKLNDLCFTNVYADSFVIRGDEVRQIAPGQTGKIADYNYKLPDDFTGCVIAWNSNNLDSKVGGNYNYLYRLFRKSNLKPFERDISTEIYQAGSTPCNGVEGFNCYFPLQSYGFQPTNGVGYQPYRVVVLSFELLHAPATVCGPKKSTNLVKNKCVNFNFNGLTGTGVLTESNKKFLPFQQFGRDIADTTDAVRDPQTLEILDITPCSFGGVSVITPGTNTSNQVAVLYQDVNCTEVPVAIHADQLTPTWRVYSTGSNVFQTRAGCLIGAEHVNNSYECDIPIGAGICASYQTQTNSPRRARSVASQSIIAYTMSLGAENSVAYSNNSIAIPTNFTISVTTEILPVSMTKTSVDCTMYICGDSTECSNLLLQYGSFCTQLNRALTGIAVEQDKNTQEVFAQVKQIYKTPPIKDFGGFNFSQILPDPSKPSKRSFIEDLLFNKVTLADAGFIKQYGDCLGDIAARDLICAQKFNGLTVLPPLLTDEMIAQYTSALLAGTITSGWTFGAGAALQIPFAMQMAYRFNGCGVTQNVLYENQKLIANQFNSAIGKIQDSLSFTASALGKLQDVVNQNAQALNTLVKQLSSNFGAISSVLNDILSRLDKVEAEVQIDRLITGRLQSLQTYVTQQLIRAAEIRASANLAATKMSECVLGQSKRVDFCGKGCHLMSFPQSAPHGVVFLHVTYVPAQEKNFTTAPAICHDGKAHFPREGVFVSNGTHWFVTQRNFYEPQIITTDNTFVSGNCDVVIGIVNNTVYDPLQPELDS

SEQ ID NO: 3242 - protein, 1147 aa, Artificial Sequence; identical to SEQ ID NO: 3222
  SARS-CoV-2/Australia/NSW10/2020__EPI_ISL_413596 spike protein (1-1147)(I909C_Y1047C)

SEQ ID NO: 3243 - protein, 1147 aa, Artificial Sequence
  SARS-CoV-2/Switzerland/1000477797/2020__EPI_ISL_413023 spike protein (1-1147)(I909C_Y1047C)
MFVFLVLLPLVSSQCVNLTTRTQLPPAYTNSFTRGVYYPDKVFRSSVLHSTQDLFLPFFSNVTWFHAIHVSGTNGTKRFDNPVLPFNDGVYFASTEKSNIIRGWIFGTTLDSKTQSLLIVNNATNVVIKVCEFQFCNDPFLGVYYHKNNKSWMESEFRVYSSANNCTFEYVSQPFLMDLEGKQGNFKNLREFVFKNIDGYFNIYSKHTPINLVRDLPQGFSALEPLVDLPIGINITRFQTLLALHRSYLTPGDSSSGWTAGAAAYYVGYLQPRTFLLKYNENGTITDAVDCALDPLSETKCTLKSFTVEKGIYQTSNFRVQPTESIVRFPNITNLCPFGEVFNATRFASVYAWNRKRISNCVADYSVLYNSASFSTFKCYGVSPTKLNDLCFTNVYADSFVIRGDEVRQIAPGQTGKIADYNYKLPDDFTGCVIAWNSNNLDSKVGGNYNYLYRLFRKSNLKPFERDISTEIYQAGSTPCNGVEGFNCYFPLQSYGFQPTNGVGYQPYRVVVLSFELLHAPATVCGPKKSTNLVKNKCVNFNFNGLTGTGVLTESNKKFLPFQQFGRDIADTTDAVRDPQTLEILDITPCSFGGVSVITPGTNTSNQVAVLYQGVNCTEVPVAIHADQLTPTWRVYSTGSNVFQTRAGCLIGAEHVNNSYECDIPIGAGICASYQTQTNSPRRARSVASQSIIAYTMSLGAENSVAYSNNSIAIPTNFTISVTTEILPVSMTKTSVDCTMYICGDSTECSNLLLQYGSFCTQLNRALTGIAVEQDKNTQEVFAQVKQIYKTPPIKDFGGFNFSQILPDPSKPSKRSFIEDLLFNKVTLADAGFIKQYGDCLGDIAARDLICAQKFNGLTVLPPLLTDEMIAQYTSALLAGTITSGWTFGAGAALQIPFAMQMAYRFNGCGVTQNVLYENQKLIANQFNSAIGKIQDSLSSTASALGKLQDVVNQNAQALNTLVKQLSSNFGAISSVLNDILSRLDKVEAEVQIDRLITGRLQSLQTYVTQQLIRAAEIRASANLAATKMSECVLGQSKRVDFCGKGCHLMSFPQSAPHGVVFLHVTYVPAQEKNFTTAPAICHDGKAHFPREGVFVSNGTHWFVTQRNFYEPQIITTDNTFVSGNCDVVIGIVNNTVYDPLQPELDS

SEQ ID NO: 3244 - protein, 1147 aa, Artificial Sequence
  SARS-CoV-2/Belgium/BA-02291/2020__EPI_ISL_415159 spike protein (1-1147)(I909C_Y1047C)
MFVFLVLLPLVSSQCVNLTTRTQLPPAYTNSFTRGVYYPDKVFRSSVLHSTQDLFLPFFSNVTWFHAIHVSGTNGTKRFDNPVLPFNDGVYFASTEKSNIIRGWIFGTTLDSKTQSLLIVNNATNVVIKVCEFQFCNDPFLGVYYHKNNKSWMESEFRVYSSANNCTFEYVSQPFLMDLEGKQGNFKNLREFVFKNIDGYFKIYSKHTPINLVRDLPQGFSALEPLVDLPIGINITRFQTLLALHRSYLTPGDSSSGWTAGAAAYYVGYLQPRTFLLKYNENGTITDAVDCALDPLSETKCTLKSFTVEKGIYQTSNFRVQPTESIVRFPNITNLCPFGEVFNATRFASVYAWNRKRISNCVADYSVLYNSASFSTFKCYGVSPTKLNDLCFTNVYADSFVIRGDEVRQIAPGQTGKIADYNYKLPDDFTGCVIAWNSNNLDSKVGGNYNYLYRLFRRSNLKPFERDISTEIYQAGSTPCNGVEGFNCYFPLQSYGFQPTNGVGYQPYRVVVLSFELLPAPATVCGPKKSTNLVKNKCVNFNFNGLTGTGVLTESNKKFLPFQQFGRDIADTTDAVRDPQTLEILDITPCSFGGVSVITPGTNTSNQVAVLYQGVNCTEVPVAIHADQLTPTWRVYSTGSNVFQTRAGCLIGAEHVNNSYECDIPIGAGICASYQTQTNSPRRARSVASQSIIAYTMSLGAENSVAYSNNSIAIPTNFTISVTTEILPVSMTKTSVDCTMYICGDSTECSNLLLQYGSFCTQLNRALTGIAVEQDKNTQEVFAQVKQIYKTPPIKDFGGFNFSQILPDPSKPSKRSFIEDLLFNKVTLADAGFIKQYGDCLGDIAARDLICAQKFNGLTVLPPLLTDEMIAQYTSALLAGTITSGWTFGAGAALQIPFAMQMAYRFNGCGVTQNVLYENQKLIANQFNSAIGKIQDSLSSAAPALGKLQDVVNQNAQALNTLVKQLSSNFGAISSVLNDILSRLDKVEAEVQIDRLITGRLQSLQTYVTQQLIRAAEIRASANLAATKMSECVLGQSKRVDFCGKGCHLMSFPQSAPHGVVFLHVTYVPAQEKNFTTAPAICHDGKAHFPREGVFVSNGTHWFVTQRNFYEPQIITTDNTFVSGNCDVVIGIVNNTVYDPLQPELDS

SEQ ID NO: 3245 - protein, 1147 aa, Artificial Sequence
  SARS-CoV-2/USA/WA8-UW5/2020__EPI_ISL_413486 spike protein (1-1147)(I909C_Y1047C)
MFVFLVLLPLVSSQCVNLTTRTQLPPAYTNSFTRGVYYPDKVFRSSVLHSTQDLFLPFFSNVTWFHAIHVSGTNGTKRFDNPVLPFNDGVYFASTEKSNIIRGWIFGTTLDSKTQSLLIVNNATNVVIKVCEFQFCNDPFLGVYYHKNNKSWMESEFRVYSSANNCTFEYVSQPFLMDLEGKQGNFKNLREFVFKNIDGYFKIYSKHTPINLVRDLPQGFSALEPLVDLPIGINITRFQTLLALHRSYLTPGDSSSGWTAGAAAYYVGYLQPRTFLLKYNENGTITDAVDCALDPLSETKCTLKSFTVEKGIYQTSNFRVQPTESIVRFPNITNLCPFGEVFNATRFASVYAWNRKRISNCVADYSVLYNSASFSTFKCYGVSPTKLNDLCFTNVYADSFVIRGDEVRQIAPGQTGKIADYNYKLPDDFTGCVIAWNSNNLDSKVGGNYNYLYRLFRKSNLKPFERDISTEIYQAGSTPCNGVEGFNCYFPLQSYGFQPTNGVGYQPYRVVVLSFELLHAPATVCGPKKSTNLVKNKCVNFNFNGLTGTGVLTESNKKFLPFQQFGRDIADTTDAVRDPQTLEILDITPCSFGGVSVITPGTNTSNQVAVLYQDVNCTEVPVAIHADQLTPTWRVYSTGSNVFQTRAGCLIGAEYVNNSYECDIPIGAGICASYQTQTNSPRRARSVASQSIIAYTMSLGAENSVAYSNNSIAIPTNFTISVTTEILPVSMTKTSVDCTMYICGDSTECSNLLLQYGSFCTQLNRALTGIAVEQDKNTQEVFAQVKQIYKTPPIKDFGGFNFSQILPDPSKPSKRSFIEDLLFNKVTLADAGFIKQYGDCLGDIAARDLICAQKFNGLTVLPPLLTDEMIAQYTSALLAGTITSGWTFGAGAALQIPFAMQMAYRFNGCGVTQNVLYENQKLIANQFNSAIGKIQDSLSSTASALGKLQDVVNQNAQALNTLVKQLSSNFGAISSVLNDILSRLDKVEAEVQIDRLITGRLQSLQTYVTQQLIRAAEIRASANLAATKMSECVLGQSKRVDFCGKGCHLMSFPQSAPHGVVFLHVTYVPAQEKNFTTAPAICHDGKAHFPREGVFVSNGTHWFVTQRNFYEPQIITTDNTFVSGNCDVVIGIVNNTVYDPLQPELDS

SEQ ID NO: 3246 - protein, 1147 aa, Artificial Sequence
  SARS-CoV-2/England/20102000506/2020__EPI_ISL_415147 spike protein (1-1147)(I909C_Y1047C)
MFVFLVLLPLVSSQCVNLTTRTQLPPAYTNSFTRGVYYPDKVFRSSVLHSTQDLFLPFFSNVTWFHAIHVSGTNGTKRFDNPVLPFNDGVYFASTEKSNIIRGWIFGTTLDSKTQSLLIVNNATNVVIKVCEFQFCNDPFLGVYYHKNNKSWMESEFRVYSSANNCTFEYVSQPFLMDLEGKQGNFKNLREFVFKNIDGYFKIYSKHTPINLVRDLPQGFSALEPLVDLPIGINITRFQTLLALHRSYLTPGDSSSGWTAGAAAYYVGYLQPRTFLLKYNENGTITDAVDCALDPLSETKCTLKSFTVEKGIYQTSNFRVQPTESIVRFPNITNLCPFGEVFNATRFASVYAWNRKRISNCVADYSVLYNSASFSTFKCYGVSPTKLNDLCFTNVYADSFVIRGDEVRQIAPGQTGKIADYNYKLPDDFTGCVIAWNSNNLDSKVGGNYNYLYRLFRKSNLKPFERDISTEIYQAGSTPCNGVEGFNCYFPLQSYGFQPTNGVGYQPYRVVVLSFELLHAPATVCGPKKSTNLVKNKCVNFNFNGLTGTGVLTESNKKFLPFQQFGRDIADTTDAVRDPQTLEILDITPCSFGGVSVITPGTNTSNQVAVLYQGVNCTEVPVAIHADQLTPTWRVYSTGSNVFQTRAGCLIGAEHVNNSYECDIPIGAGICASYQTQTNSPRRARSVASQSIIAYTMSLGAENSVAYSNNSIAIPTNFTISVTTEILPVSMTKTSVDCTMYICGDSTECSNLLLQYGSFCTQLNRALTGIAVEQDKNTQEVFAQVKQIYKTPPIKDFGGFNFSQILPDPSKPSKRSFIEDLLFNKVTLADAGFIKQYGYCLGDIAARDLICAQKFNGLTVLPPLLTDEMIAQYTSALLAGTITSGWTFGAGAALQIPFAMQMAYRFNGCGVTQNVLYENQKLIANQFNSAIGKIQDSLSSTASALGKLQDVVNQNAQALNTLVKQLSSNFGAISSVLNDILSRLDKVEAEVQIDRLITGRLQSLQTYVTQQLIRAAEIRASANLAATKMSECVLGQSKRVDFCGKGCHLMSFPQSAPHGVVFLHVTYVPAQEKNFTTAPAICHDGKAHFPREGVFVSNGTHWFVTQRNFYEPQIITTDNTFVSGNCDVVIGIVNNTVYDPLQPELDS

SEQ ID NO: 3247 - protein, 1147 aa, Artificial Sequence
  SARS-CoV-2/Belgium/VAG-03013/2020__EPI_ISL_415155 spike protein (1-1147)(I909C_Y1047C)
MFVFLVLLPLVSSQCVNLTTRTQLPPAYTNSFTRGVYYPDKVFRSSVLHSTQDLFLPFFSNVTWFHAIHVSGTNGTKRFDNPVLPFNDGVYFASTEKSNIIRGWIFGTTLDSKTQSLLIVNNATNVVIKVCEFQFCNDPFLGVYYHKNNKSWMESEFRVYSSANNCTFEYVSQPFLMDLEGKQGNFKNLREFVFKNIDGYFKIYSKHTPINLVRDLPQGFSALEPLVDLPIGINITRFQTLLALHRSYLTPGDSSSGWTAGAAAYYVGYLQPRTFLLKYNENGTITDAVDCALDPLSETKCTLKSFTVEKGIYQTSNFRVQPTESIVRFPNITNLCPFGEVFNATRFASVYAWNRKRISNCVADYSVLYNSASFSTFKCYGVSPTKLNDLCFTNVYADSFVIRGDEVRQIAPGQTGKIADYNYKLPDDFTGCVIAWNSNNLDSKVGGNYNYLYRLFRKSNLKPFERDISTEIYQAGSTPCNGVEGFNCYFPLQSYGFQPTNGVGYQPYRVVVLSFELLHAPATVCGPKKSTNLVKNKCVNFNFNGLTGTGVLTESNKKFLPFQQFGRDIADTTDAVRDPQTLEILDITPCSFGGVSVITPGTNTSNQVAVLYQGVNCTEVPVAIHADQLTPTWRVYSTGSNVFQTRAGCLIGAEHVNNSYECDIPIGAGICASYQTQTNSPRRARSVASQSIIAYTMSLGAENSVAYSNNSIAIPTNFTISVTTEILPVSMTKTSVDCTMYICGDSTECSNLLLQYGSFCTQLNRALTGIAVEQDKNTQEVFAQVKQIYKTPPIKDFGGFNFSQILPDPSKPSKRSFIEDLLFNKVTLADAGFIKQYGDCLGDIAARDLICAQKFNGLTVLPPLLTDEMIAQYTSALLAGTITSGWTFGAGAALQIPFAMQMAYRFNGCGVTQNVLYENQKLIANQFNSAIGKIQDSLSSTATALGKLQDVVNQNAQALNTLVKQLSSNFGAISSVLNDILSRLDKVEAEVQIDRLITGRLQSLQTYVTQQLIRAAEIRASANLAATKMSECVLGQSKRVDFCGKGCHLMSFPQSAPHGVVFLHVTYVPAQEKNFTTAPAICHDGKAHFPREGVFVSNGTHWFVTQRNFYEPQIITTDNTFVSGNCDVVIGIVNNTVYDPLQPELDS

SEQ ID NO: 3248 - protein, 1147 aa, Artificial Sequence
  SARS-CoV-2/Belgium/BC-03016/2020__EPI_ISL_415157 spike protein (1-1147)(I909C_Y1047C)
MFVFLVLLPLVSSQCVNLTTRTQLPPAYTNSFTRGVYYPDKVFRSSVLHSTQDLFLPFFSNVTWFHAIHVSGTNGTKRFDNPVLPFNDGVYFASTEKSNIIRGWIFGTTLDSKTQSLLIVNNATNVVIKVCEFQFCNDPFLGVYYHKNNKSWMESEFRVYSSANNCTFEYVSQPFLMDLEGKQGNFKNLREFVFKNIDGYFKIYSKHTPINLVRDLPQGFSALEPLVDLPIGINITRFQTLLALHRSYLTPGDSSSGWTAGAAAYYVGYLQPRTFLLKYNENGTITDAVDCALDPLSETKCTLKSFTVEKGIYQTSNFRVQPTESIVRFPNITNLCPFGEVFNATRFASVYAWNRKRISNCVADYSVLYNSASFSTFKCYGVSPTKLNDLCFTNVYADSFVIRGDEVRQIAPGQTGKIADYNYKLPDDFTGCVIAWNSNNLDSKVGGNYNYLYRLFRKSNLKPFERDISTEIYQAGSTPCNGVEGFNCYFPLQSYGFQPTNGVGYQPYRVVVLSFELLHAPATVCGPKKSTNLVKNKCVNFNFNGLTGTGVLTESNKKFLPFQQFGRDIADTTDAVRDPQTLEILDITPCSFGGVSVITPGTNTSNQVAVLYQGVNCTEVPVAIHADQLTPTWRVYSTGSNVFQTRAGCLIGAEHVNNSYECDIPIGAGICASYQTQTNSPRRARSVASQSIIAYTMSLGAENSVAYSNNSIAIPTNFTISVTTEILPVSMTKTSVDCTMYICGDSTECSNLLLQYGSFCTQLNRALTGIAVEQDKNTQEVFAQVKQIYKTPPIKDFGGFNFSQILPDPSKPSKRSFIEDLLFNKVTLADAGFIKQYGDCLGDIAARDLICAQKFNGLTVLPPLLTDEMIAQYTSALLAGTITSGWTFGAGAALQIPFAMQMAYRFNGCGVTQNVLYENQKLIANQFNSAIGKIQDSLSSTAPALGKLQDVVNQNAQALNTLVKQLSSNFGAISSVLNDILSRLDKVEAEVQIDRLITGRLQSLQTYVTQQLIRAAEIRASANLAATKMSECVLGQSKRVDFCGKGCHLMSFPQSAPHGVVFLHVTYVPAQEKNFTTAPAICHDGKAHFPREGVFVSNGTHWFVTQRNFYEPQIITTDNTFVSGNCDVVIGIVNNTVYDPLQPELDS

SEQ ID NO: 3249 - protein, 1147 aa, Artificial Sequence
  SARS-CoV-2/Germany/BavPat3/2020__EPI_ISL_414521 spike protein (1-1147)(I909C_Y1047C)
MFVFLVLLPLVSSQCVNLTTRTQLPPAYTNSFTRGVYYPDKVFRSSVLHSTQDLFLPFFSNVTWFHAIHVSGTNGTKRFDNPVLPFNDGVYFASTEKSNIIRGWIFGTTLDSKTQSLLIVNNATNVVIKVCEFQFCNDPFLGVYYHKNNKSWMESEFRVYSSANNCTFEYVSQPFLMDLEGKQGNFKNLREFVFKNIDGYFKIYSKHTPINLVRDLPQGFSALEPLVDLPIGINITRFQTLLALHRSYLTPGDSSSGWTAGAAAYYVGYLQPRTFLLKYNENGTITDAVDCALDPLSETKCTLKSFTVEKGIYQTSNFRVQPTESIVRFPNITNLCPFGEVFNATRFASVYAWNRKRISNCVADYSVLYNSASFSTFKCYGVSPTKLNDLCFTNVYADSFVIRGDEVRQIAPGQTGKIADYNYKLPDDFTGCVIAWNSNNLDSKVGGNYNYLYRLFRKSNLKPFERDISTEIYQAGSTPCNGVEGFNCYFPLQSYGFQPTNGVGYQPYRVVVLSFELLHAPATVCGPKKSTNLVKNKCVNFNFNGLTGTGVLTESNKKFLPFQQFGRDIADTTDAVRDPQTLEILDITPCSFGGVSVITPGTNTSNQVAVLYQDVNCTEVPVAIHADQLTPTWRVYSTGSNVFQTRAGCLIGAEHVNNSYECDIPIGAGICASYQTQTNSPRRARSVASQSIIAYTMSLGAENSVAYSNNSIAIPTNFTISVTTEILPVSMTKTSVDCTMYICGDSTECSNLLLQYGSFCTQLNRALTGIAVEQDKNTQQVFAQVKQIYKTPPIKDFGGFNFSQILPDPSKPSKRSFIEDLLFNKVTLADAGFIKQYGDCLGDIAARDLICAQKFNGLTVLPPLLTDEMIAQYTSALLAGTITSGWTFGAGAALQIPFAMQMAYRFNGCGVTQNVLYENQKLIANQFNSAIGKIQDSLSSTASALGKLQDVVNQNAQALNTLVKQLSSNFGAISSVLNDILSRLDKVEAEVQIDRLITGRLQSLQTYVTQQLIRAAEIRASANLAATKMSECVLGQSKRVDFCGKGCHLMSFPQSAPHGVVFLHVTYVPAQEKNFTTAPAICHDGKAHFPREGVFVSNGTHWFVTQRNFYEPQIITTDNTFVSGNCDVVIGIVNNTVYDPLQPELDS

SEQ ID NO: 3250 - protein, 1147 aa, Artificial Sequence
  SARS-CoV-2/France/HF1805/2020__EPI_ISL_414628 spike protein (1-1147)(I909C_Y1047C)
MFVFLVLLPLVSSQCVNLTTRTQLPPAYTNSFTRGVYYPDKVFRSSVLHSTQDLFLPFFSNVTWFHAIHVSGTNGTKRFDNPVLPFNDGVYFASTEKSNIIRGWIFGTTLDSKTQSLLIVNNATNVVIKVCEFQFCNDPFLGVYYHKNNKSWMESEFRVYSSANNCTFEYVSQPFLMDLEGKQGNFKNLREFVFKNIDGYFKIYSKHTPINLVRDLPQGFSALEPLVDLPIGINITRFQTLLALHRSYLTPGDSSSGWTAGAAAYYVGYLQPRTFLLKYNENGTITDAVDCALDPLSETKCTLKSFTVEKGIYQTSNFRVQPTESIVRFPNITNLCPFGEVFNATRFASVYAWNRKRISNCVADYSVLYNSASFSTFKCYGVSPTKLNDLCFTNVYADSFVIRGDEVRQIAPGQTGKIADYNYKLPDDFTGCVIAWNSNNLDSKVGGNYNYLYRLFRKSNLKPFERDISTEIYQAGSTPCNGVEGFNCYFPLQSYGFQPTNGVGYQPYRVVVLSFELLHAPATVCGPKKSTNLVKNKCVNFNFNGLTGTGVLTESNKKFLPFQQFGRDIADTTDAVRDPQTLEILDITPCSFGGVSVITPGTNTSNQVAVLYQGVNCTEVPVAIHADQLTPTWRVYSTGSNVFQTRAGCLIGAEHVNNSYECDIPIGAGICASYQTQTNSPRRARSVASQSIIAYTMSLGAENSVAYSNNSIAIPTNFTISVTTEILPVSMTKTSVDCTMYICGDSTECSNLLLQYGSFCTQLNRALTGIAVEQDKNTQEVFAQVKQIYKTPPIKDFGGFNFSQILPDPSKPSKRSFIEDLLFNKVTLADAGFIKQYGDCLGDIAARDLICAQKFNGLTVLPPLLTDEMIAQYTSALLAGTITSGWTFGAGAALQIPFAMQMAYRFNGCGVTQNVLYENQKLIANQFNSAIGKIQDSLSSTASALGKLQDVVNQNAQALNTLVKQLSSNFGAISSVLNDILSRLDKVEAEVQIDRLITGRLQSLQTYVTQQLIRAAEIRASANLAATKMSECVLGQSKRVDFCGKGCHLMSFPQSAPHGVVFLHVTYVPAQEKNFTTAPAICHDGKAHFPREGVFVSNGTHWFVTQRNFYEPQIITTDNTFVSGNCDVVIGVVNNTVYDPLQPELDS

SEQ ID NO: 3251 - protein, 1147 aa, Artificial Sequence
  SARS-CoV-2/Netherlands/ZuidHolland_9/2020__EPI_ISL_414445 spike protein (1-1147)(I909C_Y1047C)
MFVFLVLLPLVSSQCVNLTTRTQLPPAYTNSFTRGVYYPDKVFRSSVLHSTQDLFLPFFSNVTWFHAIHVSGTNGTKRFDNPVLPFNDGVYFASTEKSNIIRGWIFGTTLDSKTQSLLIVNNATNVVIKVCEFQFCNDPFLGVYYHKNNKSWMESEFRVYSSANNCTFEYVSQPFLMDLEGKQGNFKNLREFVFKNIDGYFKIYSKHTPINLVRDLPQGFSALEPLVDLPIGINITRFQTLLALHRSYLTPGDSSSGWTAGAAAYYVGYLQPRTFLLKYNENGTITDAVDCALDPLSETKCTLKSFTVEKGIYQTSNFRVQPTESIVRFPNITNLCPFGEVFNATRFASVYAWNRKRISNCVADYSVLYNSASFSTFKCYGVSPTKLNDLCFTNVYADSFVIRGDEVRQIAPGQTGKIADYNYKLPDDFTGCVIAWNSNNLDSKVGGNYNYLYRLFRKSNLKPFERDISTEIYQAGSTPCNGVEGFNCYFPLQSYGFQPTNGVGYQPYRVVVLSFELLHAPATVCGPKKSTNLVKNKCVNFNFNGLTGTGVLTESNKKFLPFQQFGRDIADTTDAVRDPQTLEILDITPCSFGGVSVITPGTNTSNQVAVLYQGVNCTEVPVAIHADQLTPTWRVYSTGSNVFQTRAGCLIGAEHVNNSYECDIPIGAGICASYQTQTNSPRRARSVASQSIIAYTMSLGAENSVAYSNNSIAIPTNFTISVTTEILPVSMTKTSVDCTMYICGDSTECSNLLLQYGSFCTQLNRALTGIAVEQDKNTQEVFAQVKQIYKTPPIKDFGGFNFSQILPDPSKPSKRSFIEDLLFNKVTLADAGFIKQYGDCLGDIAARDLICVQKFNGLTVLPPLLTDEMIAQYTSALLAGTITSGWTFGAGAALQIPFAMQMAYRFNGCGVTQNVLYENQKLIANQFNSAIGKIQDSLSSTASALGKLQDVVNQNAQALNTLVKQLSSNFGAISSVLNDILSRLDKVEAEVQIDRLITGRLQSLQTYVTQQLIRAAEIRASANLAATKMSECVLGQSKRVDFCGKGCHLMSFPQSAPHGVVFLHVTYVPAQEKNFTTAPAICHDGKAHFPREGVFVSNGTHWFVTQRNFYEPQIITTDNTFVSGNCDVVIGIVNNTVYDPLQPELDS

SEQ ID NO: 3252 - protein, 1147 aa, Artificial Sequence
  SARS-CoV-2/Finland/FIN03032020A/2020__EPI_ISL_413602 spike protein (1-1147)(I909C_Y1047C)
MFVFLVLLPLVSSQCVNLTTRTQLPPAYTNSFTRGVYYPDKVFRSSVLHSTQDLFLPFFSNVTWFHAIHVSGTNGTKRFDNPVLPFNDGVYFASTEKSNIIRGWIFGTTLDSKTQSLLIVNNATNVVIKVCEFQFCNDPFLGVYYHKNNKSWMESEFRVYSSANNCTFEYVSQPFLMDLEGKQGNFKNLREFVFKNIDGYFKIYSKHTPINLVRDLPQGFSALEPLVDLPIGINITRFQTLLALHRSYLTPGDSSSGWTAGAAAYYVGYLQPRTFLLKYNENGTITDAVDCALDPLSETKCTLKSFTVEKGIYQTSNFRVQPTESIVRFPNITNLCPFGEVFNATRFASVYAWNRKRISNCVADYSVLYNSASFSTFKCYGVSPTKLNDLCFTNVYADSFVIRGDEVRQIAPGQTGKIADYNYKLPDDFTGCVISWNSNNLDSKVGGNYNYLYRLFRKSNLKPFERDISTEIYQAGSTPCNGVEGFNCYFPLQSYGFQPTNGVGYQPYRVVVLSFELLHAPATVCGPKKSTNLVKNKCVNFNFNGLTGTGVLTESNKKFLPFQQFGRDIADTTDAVRDPQTLEILDITPCSFGGVSVITPGTNTSNQVAVLYQGVNCTEVPVAIHADQLTPTWRVYSTGSNVFQTRAGCLIGAEHVNNSYECDIPIGAGICASYQTQTNSPRRARSVASQSIIAYTMSLGAENSVAYSNNSIAIPTNFTISVTTEILPVSMTKTSVDCTMYICGDSTECSNLLLQYGSFCTQLNRALTGIAVEQDKNTQEVFAQVKQIYKTPPIKDFGGFNFSQILPDPSKPSKRSFIEDLLFNKVTLADAGFIKQYGDCLGDIAARDLICAQKFNGLTVLPPLLTDEMIAQYTSALLAGTITSGWTFGAGAALQIPFAMQMAYRFNGCGVTQNVLYENQKLIANQFNSAIGKIQDSLSSTASALGKLQDVVNQNAQALNTLVKQLSSNFGAISSVLNDILSRLDKVEAEVQIDRLITGRLQSLQTYVTQQLIRAAEIRASANLAATKMSECVLGQSKRVDFCGKGCHLMSFPQSAPHGVVFLHVTYVPAQEKNFTTAPAICHDGKAHFPREGVFVSNGTHWFVTQRNFYEPQIITTDNTFVSGNCDVVIGIVNNTVYDPLQPELDS

SEQ ID NO: 3253 - protein, 1147 aa, Artificial Sequence
  SARS-CoV-2/France/GE1977/2020__EPI_ISL_414632 spike protein (1-1147)(I909C_Y1047C)
MFVFLVLLPLVSSQCVNLTTRTQLPPAYTNSFTRGVYYPDKVFRSSVLHSTQDLFLPFFSNVTWFHAIHVSGTNGTKRFDNPVLPFNDGVYFASTEKSNIIRGWIFGTTLDSKTQSLLIVNNATNVVIKVCEFQFCNDPFLGVYYHKNNKSWMESEFRVYSSANNCTFEYVSQPFLMDLEGKQGNFKNLREFVFKNIDGYFKIYSKHTPINLVRDLPQGFSALEPLVDLPIGINITRFQTLLALHRSYLTPGDSSSGWTAGAAAYYVGYLQPRTFLLKYNENGTITDAVDCALDPLSETKCTLKSFTVEKGIYQTSNFRVQPTESIVRFPNITNLCPFGEVFNATRFASVYAWNRKRISNCVADYSVLYNSASFSTFKCYGVSPTKLNDLCFTNVYADSFVIRGDEVRQIAPGQTGKIADYNYKLPDDFTGCVIAWNSNNLDSKVGGNYNYLYRLFRKSNLKPFERDISTEIYQAGSTPCNGVEGFNCYFPLQSYGFQPTNGVGYQPYRVVVLSFELLHAPATVCGPKKSTNLVKNKCVNFNFNGLTGTGVLTESNKKFLPFQQFGRDIADTTDAVRDPQTLEILDITPCSFGGVSVITPGTNTSNQVAVLYQGVNCTEVPVAIHADQLTPTWRVYSTGSNVFQTRAGCLIGAEHVNNSYECDIPIGAGICASYQTQTNSPRRARSVASQSIIAYTMSLGAENSVAYSNNSIAIPTNFTISVTTEILPVSMTKTSVDCTMYICGDSTECSNLLLQYGSFCTQLNRALTGIAVEQDKNTQEVFAQVKQIYKTPPIKDFGGFNFSQILPDPSKPSKRSFIEDLLFNKVTLADAGFIKQYGDCLGDIAARDLICAQKFNGLTVLPPLLTDEMIAQYTSALLAGTITSGWTFGAGAALQIPFAMQMAYRFNGCGVTQNVLYENQKLIANQFNSAIGKIQDSLFSTASALGKLQDVVNQNAQALNTLVKQLSSNFGAISSVLNDILSRLDKVEAEVQIDRLITGRLQSLQTYVTQQLIRAAEIRASANLAATKMSECVLGQSKRVDFCGKGCHLMSFPQSAPHGVVFLHVTYVPAQEKNFTTAPAICHDGKAHFPREGVFVSNGTHWFVTQRNFYEPQIITTDNTFVSGNCDVVIGIVNNTVYDPLQPELDS

SEQ ID NO: 3254 - protein, 1147 aa, Artificial Sequence
  SARS-CoV-2/Finland/FIN-313/2020__EPI_ISL_414641 spike protein (1-1147)(I909C_Y1047C)
MFVFLVLLPLVSSQCVNLTTRTQLPPAYTNSFTRGVYYPDKVFRSSVLHSTQDLFLPFFSNVTWFHAIHVSGTNGTKRFDNPVLPFNDGVYFASTEKSNIIRGWIFGTTLDSKTQSLLIVNNATNVVIKVCEFQFCNDPFLGVYYHKNNKSWMESEFRVYSSANNCTFEYVSQPFLMDLEGKQGNFKNLREFVFKNIDGYFKIYSKHTPINLVRDLPQGFSALEPLVDLPIGINITRFKTLLALHRSYLTPGDSSSGWTAGAAAYYVGYLQPRTFLLKYNENGTITDAVDCALDPLSETKCTLKSFTVEKGIYQTSNFRVQPTESIVRFPNITNLCPFGEVFNATRFASVYAWNRKRISNCVADYSVLYNSASFSTFKCYGVSPTKLNDLCFTNVYADSFVIRGDEVRQIAPGQTGKIADYNYKLPDDFTGCVIAWNSNNLDSKVGGNYNYLYRLFRKSNLKPFERDISTEIYQAGSTPCNGVEGFNCYFPLQSYGFQPTNGVGYQPYRVVVLSFELLHAPATVCGPKKSTNLVKNKCVNFNFNGLTGTGVLTESNKKFLPFQQFGRDIADTTDAVRDPQTLEILDITPCSFGGVSVITPGTNTSNQVAVLYQGVNCTEVPVAIHADQLTPTWRVYSTGSNVFQTRAGCLIGAEHVNNSYECDIPIGAGICASYQTQTNSPRRARSVASQSIIAYTMSLGAENSVAYSNNSIAIPTNFTISVTTEILPVSMTKTSVDCTMYICGDSTECSNLLLQYGSFCTQLNRALTGIAVEQDKNTQEVFAQVKQIYKTPPIKDFGGFNFSQILPDPSKPSKRSFIEDLLFNKVTLADAGFIKQYGDCLGDIAARDLICAQKFNGLTVLPPLLTDEMIAQYTSALLAGTITSGWTFGAGAALQIPFAMQMAYRFNGCGVTQNVLYENQKLIANQFNSAIGKIQDSLSSTASALGKLQDVVNQNAQALNTLVKQLSSNFGAISSVLNDILSRLDKVEAEVQIDRLITGRLQSLQTYVTQQLIRAAEIRASANLAATKMSECVLGQSKRVDFCGKGCHLMSFPQSAPHGVVFLHVTYVPAQEKNFTTAPAICHDGKAHFPREGVFVSNGTHWFVTQRNFYEPQIITTDNTFVSGNCDVVIGIVNNTVYDPLQPELDS

SEQ ID NO: 3255 - protein, 1147 aa, Artificial Sequence
  SARS-CoV-2/Netherlands/ZuidHolland_2/2020__EPI_ISL_414556 spike protein (1-1147)(I909C_Y1047C)
MFVFLVLLPLVSSQCVNLTTRTQLPPAYTNSFTRGVYYPDKVFRSSVLHSTQDLFLPFFSNVTWFHAIHVSGTNGTKRFDNPVLPFNDGVYFASTEKSNIIRGWIFGTTLDSKTQSLLIVNNATNVVIKVCEFQFCNDPFLGVYYHKNNKSWMESEFRVYSSANNCTFEYVSQPFLMDLEGKQGNFKNLREFVFKNIDGYFKIYSKHTPINLVRDLPQGFSALEPLVDLPIGINITRFQTLLALHRSYLTPGDSSSGWTAGAAAYYVGYLQPRTFLLKYNENGTITDAVDCALDPLSETKCTLKSFTVEKGIYQTSNFRVQPTESIVRFPNITNLCPFGEVFNATRFASVYAWNRKRISNCVADYSVLYNSASFSTFKCYGVSPTKLNDLCFTNVYADSFVIRGDEVRQIAPGQTGKIADYNYKLPDDFTGCVIAWNSNNLDSKVGGNYNYLYRLFRKSNLKPFERDISTEIYQAGSTPCNGVEGFNCYFPLQSYGFQPTNGVGYQPYRVVVLSFELLHAPATVCGPKKSTNLVKNKCVNFNFNGLTGTGVLTESNKKFLPFQQFGRDIADTTDAVRDPQTLEILDITPCSFGGVSVITPGTNTSNQVAVLYQGVNCTEVPVAIHADQLTPTWRVYSTGSNVFQTRAGCLIGAEHVNNSYECDIPIGAGICASYQTQTNSPRRARSVASQSIIAYTMSLGAENSVAYSNNSIAIPTNFTISVTTEILPVSMTKTSVDCTMYICGDSTECSNLLLQYGSFCTQLNRALTGIALEQDKNTQEVFAQVKQIYKTPPIKDFGGFNFSQILPDPSKPSKRSFIEDLLFNKVTLADAGFIKQYGDCLGDIAARDLICAQKFNGLTVLPPLLTDEMIAQYTSALLAGTITSGWTFGAGAALQIPFAMQMAYRFNGCGVTQNVLYENQKLIANQFNSAIGKIQDSLSSTASALGKLQDVVNQNAQALNTLVKQLSSNFGAISSVLNDILSRLDKVEAEVQIDRLITGRLQSLQTYVTQQLIRAAEIRASANLAATKMSECVLGQSKRVDFCGKGCHLMSFPQSAPHGVVFLHVTYVPAQEKNFTTAPAICHDGKAHFPREGVFVSNGTHWFVTQRNFYEPQIITTDNTFVSGNCDVVIGIVNNTVYDPLQPELDS

SEQ ID NO: 3256 - protein, 1147 aa, Artificial Sequence
  SARS-CoV-2/USA/WA-UW31/2020__EPI_ISL_414618 spike protein (1-1147)(I909C_Y1047C)
MFVFLVLLPLVSSQCVNLTTRTQLPPAYTNSFTRGVYYPDKVFRSSVLHSTQDLFLPFFSNVTWFHAIHVSGTNGTKRFDNPVLPFNDGVYFASTEKSNIIRGWIFGTTLDSKTQSLLIVNNATNVVIKVCEFQFCNDPFLGVYYHKNNKSWMESEFRVYSSANNCTFEYVSQPFLMDLEGKQGNFKNLREFVFKNIDGYFKIYSKHTPINLVRDLPQGFSALEPLVDLPIGINITRFQTLLALHRSYLTPGDSSSGWTAGAAAYYVGYLQPRTFLLKYNENGTITDAVDCALDPLSETKCTLKSFTVEKGIYQTSNFRVQPTESIVRFPNITNLCPFGEVFNATRFASVYAWNRKRISNCVADYSVLYNSASFSTFKCYGVSPTKLNDLCFTNVYADSFVIRGDEVRQIAPGQTGKIADYNYKLPDDFTGCVIAWNSNNLDSKVGGNYNYLYRLFRKSNLKPFERDISTEIYQAGSTPCNGAEGFNCYFPLQSYGFQPTNGVGYQPYRVVVLSFELLHAPATVCGPKKSTNLVKNKCVNFNFNGLTGTGVLTESNKKFLPFQQFGRDIADTTDAVRDPQTLEILDITPCSFGGVSVITPGTNTSNQVAVLYQDVNCTEVPVAIHADQLTPTWRVYSTGSNVFQTRAGCLIGAEHVNNSYECDIPIGAGICASYQTQTNSPRRARSVASQSIIAYTMSLGAENSVAYSNNSIAIPTNFTISVTTEILPVSMTKTSVDCTMYICGDSTECSNLLLQYGSFCTQLNRALTGIAVEQDKNTQEVFAQVKQIYKTPPIKDFGGFNFSQILPDPSKPSKRSFIEDLLFNKVTLADAGFIKQYGDCLGDIAARDLICAQKFNGLTVLPPLLTDEMIAQYTSALLAGTITSGWTFGAGAALQIPFAMQMAYRFNGCGVTQNVLYENQKLIANQFNSAIGKIQDSLSSTASALGKLQDVVNQNAQALNTLVKQLSSNFGAISSVLNDILSRLDKVEAEVQIDRLITGRLQSLQTYVTQQLIRAAEIRASANLAATKMSECVLGQSKRVDFCGKGCHLMSFPQSAPHGVVFLHVTYVPAQEKNFTTAPAICHDGKAHFPREGVFVSNGTHWFVTQRNFYEPQIITTDNTFVSGNCDVVIGIVNNTVYDPLQPELDS

SEQ ID NO: 3257 - protein, 1147 aa, Artificial Sequence
  SARS-CoV-2/South Korea/SNU01/2020__EPI_ISL_411929 spike protein (1-1147)(I909C_Y1047C)
MFVFLVLLPLVSSQCVNLTTRTQLPPAYTNSFTRGVYYPDKVFRSSVLHSTQDLFLPFFSNVTWFHAIHVSGTNGTKRFDNPVLPFNDGVYFASTEKSNIIRGWIFGTTLDSKTQSLLIVNNATNVVIKVCEFQFCNDPFLGVYYHKNNKSWMESEFRVYSSANNCTFEYVSQPFLMDLEGKQGNFKNLREFVFKNIDGYFKIYSKHTPINLVRDLPQGFWALEPLVDLPIGINITRFQTLLALHRSYLTPGDSSSGWTAGAAAYYVGYLQPRTFLLKYNENGTITDAVDCALDPLSETKCTLKSFTVEKGIYQTSNFRVQPTESIVRFPNITNLCPFGEVFNATRFASVYAWNRKRISNCVADYSVLYNSASFSTFKCYGVSPTKLNDLCFTNVYADSFVIRGDEVRQIAPGQTGKIADYNYKLPDDFTGCVIAWNSNNLDSKVGGNYNYLYRLFRKSNLKPFERDISTEIYQAGSTPCNGVEGFNCYFPLQSYGFQPTNGVGYQPYRVVVLSFELLHAPATVCGPKKSTNLVKNKCVNFNFNGLTGTGVLTESNKKFLPFQQFGRDIADTTDAVRDPQTLEILDITPCSFGGVSVITPGTNTSNQVAVLYQDVNCTEVPVAIHADQLTPTWRVYSTGSNVFQTRAGCLIGAEHVNNSYECDIPIGAGICASYQTQTNSPRRARSVASQSIIAYTMSLGAENSVAYSNNSIAIPTNFTISVTTEILPVSMTKTSVDCTMYICGDSTECSNLLLQYGSFCTQLNRALTGIAVEQDKNTQEVFAQVKQIYKTPPIKDFGGFNFSQILPDPSKPSKRSFIEDLLFNKVTLADAGFIKQYGDCLGDIAARDLICAQKFNGLTVLPPLLTDEMIAQYTSALLAGTITSGWTFGAGAALQIPFAMQMAYRFNGCGVTQNVLYENQKLIANQFNSAIGKIQDSLSSTASALGKLQDVVNQNAQALNTLVKQLSSNFGAISSVLNDILSRLDKVEAEVQIDRLITGRLQSLQTYVTQQLIRAAEIRASANLAATKMSECVLGQSKRVDFCGKGCHLMSFPQSAPHGVVFLHVTYVPAQEKNFTTAPAICHDGKAHFPREGVFVSNGTHWFVTQRNFYEPQIITTDNTFVSGNCDVVIGIVNNTVYDPLQPELDS

SEQ ID NO: 3258 - protein, 1147 aa, Artificial Sequence
  SARS-CoV-2/China/WF0004/2020__EPI_ISL_413694 spike protein (1-1147)(I909C_Y1047C)
MFVFLVLLPLVSSQCVNLTTRTQLPPAYTNSFTRGVYYPDKVFRSSVLHSTQDLFLPFFSNVTWFHAIHVSGTNGTKRFDNPVLPFNDGVYFASTEKSNIIRGWIFGTTLDSKTQSLLIVNNATNVVIKVCEFQFCNDPFLGVYYHKNNKSWTESEFRVYSSANNCTFEYVSQPFLMDLEGKQGNFKNLREFVFKNIDGYFKIYSKHTPINLVRDLPQGFSALEPLVDLPIGINITRFQTLLALHRSYLTPGDSSSGWTAGAAAYYVGYLQPRTFLLKYNENGTITDAVDCALDPLSETKCTLKSFTVEKGIYQTSNFRVQPTESIVRFPNITNLCPFGEVFNATRFASVYAWNRKRISNCVADYSVLYNSASFSTFKCYGVSPTKLNDLCFTNVYADSFVIRGDEVRQIAPGQTGKIADYNYKLPDDFTGCVIAWNSNNLDSKVGGNYNYLYRLFRKSNLKPFERDISTEIYQAGSTPCNGVEGFNCYFPLQSYGFQPTNGVGYQPYRVVVLSFELLHAPATVCGPKKSTNLVKNKCVNFNFNGLTGTGVLTESNKKFLPFQQFGRDIADTTDAVRDPQTLEILDITPCSFGGVSVITPGTNTSNQVAVLYQDVNCTEVPVAIHADQLTPTWRVYSTGSNVFQTRAGCLIGAEHVNNSYECDIPIGAGICASYQTQTNSPRRARSVASQSIIAYTMSLGAENSVAYSNNSIAIPTNFTISVTTEILPVSMTKTSVDCTMYICGDSTECSNLLLQYGSFCTQLNRALTGIAVEQDKNTQEVFAQVKQIYKTPPIKDFGGFNFSQILPDPSKPSKRSFIEDLLFNKVTLADAGFIKQYGDCLGDIAARDLICAQKFNGLTVLPPLLTDEMIAQYTSALLAGTITSGWTFGAGAALQIPFAMQMAYRFNGCGVTQNVLYENQKLIANQFNSAIGKIQDSLSSTASALGKLQDVVNQNAQALNTLVKQLSSNFGAISSVLNDILSRLDKVEAEVQIDRLITGRLQSLQTYVTQQLIRAAEIRASANLAATKMSECVLGQSKRFDFCGKGCHLMSFPQSAPHGVVFLHVTYVPAQEKNFTTAPAICHDGKAHFPREGVFVSNGTHWFVTQRNFYEPQIITTDNTFVSGNCDVVIGIVNNTVYDPLQPELDS

SEQ ID NO: 3259 - protein, 1147 aa, Artificial Sequence
  SARS-CoV-2/China/WF0028/2020__EPI_ISL_413791 spike protein (1-1147)(I909C_Y1047C)
MFVFLVLLPLVSSQCVNLTTRTQLPPAYTNSFTRGVYYPDKVFRSSVLHSTQDLFLPFFSNVTWFHAIHVSGTNGTKRFDNPVLPFNDGVYFASTEKSNIIRGWIFGTTLDSKTQSLLIVNNATNVVIKVCEFQFCNDPFLGVYYHKNNKSWMESEFRVYSSANNCTFEYVSQPFLMDLEGKQGNFKNLREFVFKNIDGYFKIYSKHTPINLVRDLPQGFSALEPLVDLPIGINITRFQTLLALHRSYLTPGDSSSGWTAGAAAYYVGYLQPRTFLLKYNENGTITDAVDCALDPLSETKCTLKSFTVEKGIYQTSNFRVQPTESIVRFPNITNLCPFGEVFNATRFASVYAWNRKRISNCVADYSVLYNSASFSTFKCYGVSPTKLNDLCFTNVYADSFVIRGDEVRQIAPGQTGKIADYNYKLPDDFTGCVIAWNSNNLDSKVGGNYNYLYRLFRKSNLKPFERDISTEIYQAGSTPCNGVEGFNCYFPLQSYGFQPTNGVGYQPYRVVVLSFELLHAPATVCGPKKSTNLVKNKCVNFNFNGLTGTGVLTESNKKFLPFQQFGRDIADTTDAVRDPQTLEILDITPCSFGGVSVITPGTNTSNQVAVLYQDVNCTEVPVAIHADQLTPTWRVYSTGSNVFQTRAGCLIGAEHVNNSYECDIPIGAGICASYQTQTNSPRRARSVASQSIIAYTMSLGAENSVAYSNNSIAIPTNFTISVTTEILPVSMTKTSVDCTMYICGDSTECSNLLLQYGSFCTQLNRALTGIAVEQDKNTQEVFAQVKQIYKTPPIKDFGGFNFSQILPDPSKPSKRSFIEDLLFNKVTLADAGFIKQYGDCLGDIAARDLICAQKFNGLTVLPPLLTDEMIAQYTSALLAGTITSGWTFGAGAALQIPFAMQMAYRFNGCGVTQNVLYENQKLIANQFNSAIGKIQDSLSSTASALGKLQDVVNQNAQALNTLVKQLSSNFGAISSVLNDILSRLDKVEAEVQIDRLITGRLQSLQTYVTQQLIRAAEIRASANLAATKMSECVLGQSKRVDFCGKGCHLMSFPQSAPHGVVFLHVTYVPAQEKNFTTAPAICHDGKAHFPREGVFVSNGTHWFVTQRNFYEPQIITTDNTFVSGNCDVVIGIVNNTVYDPLQPELES

SEQ ID NO: 3260 - protein, 1147 aa, Artificial Sequence
  SARS-CoV-2/2019-nCoV/USA-CruiseA-18/2020__MT159716.1 spike protein (1-1147)(I909C_Y1047C)
MFVFLVLLPLVSSQCVNLTTRTQLPPAYTNSFTRGVYYPDKVFRSSVLHSTQDLFLPFFSNVTWFHAIHVSGTNGTKRFDNPVLPFNDGVYFASTEKSNIIRGWIFGTTLDSKTQSLLIVNNATNVVIKVCEFQFCNDPFLGVYYHKNNKSWMESELRVYSSANNCTFEYVSQPFLMDLEGKQGNFKNLREFVFKNIDGYFKIYSKHTPINLVRDLPQGFSALEPLVDLPIGINITRFQTLLALHRSYLTPGDSSSGWTAGAAAYYVGYLQPRTFLLKYNENGTITDAVDCALDPLSETKCTLKSFTVEKGIYQTSNFRVQPTESIVRFPNITNLCPFGEVFNATRFASVYAWNRKRISNCVADYSVLYNSASFSTFKCYGVSPTKLNDLCFTNVYADSFVIRGDEVRQIAPGQTGKIADYNYKLPDDFTGCVIAWNSNNLDSKVGGNYNYLYRLFRKSNLKPFERDISTEIYQAGSTPCNGVEGFNCYFPLQSYGFQPTNGVGYQPYRVVVLSFELLHAPATVCGPKKSTNLVKNKCVNFNFNGLTGTGVLTESNKKFLPFQQFGRDIADTTDAVRDPQTLEILDITPCSFGGVSVITPGTNTSNQVAVLYQDVNCTEVPVAIHADQLTPTWRVYSTGSNVFQTRAGCLIGAEHVNNSYECDIPIGAGICASYQTQTNSPRRARSVASQSIIAYTMSLGAENSVAYSNNSIAIPTNFTISVTTEILPVSMTKTSVDCTMYICGDSTECSNLLLQYGSFCTQLNRALTGIAVEQDKNTQEVFAQVKQIYKTPPIKDFGGFNFSQILPDPSKPSKRSFIEDLLFNKVTLADAGFIKQYGDCLGDIAARDLICAQKFNGLTVLPPLLTDEMIAQYTSALLAGTITSGWTFGAGAALQIPFAMQMAYRFNGCGVTQNVLYENQKLIANQFNSAIGKIQDSLSSTASALGKLQDVVNQNAQALNTLVKQLSSNFGAISSVLNDILSRLDKVEAEVQIDRLITGRLQSLQTYVTQQLIRAAEIRASANLAATKMSECVLGQSKRVDFCGKGCHLMSFPQSAPHGVVFLHVTYVPAQEKNFTTAPAICHDGKAHFPREGVFVSNGTHWFVTQRNFYEPQIITTDNTFVSGNCDVVIGIVNNTVYDPLQPELDS

SEQ ID NO: 3261 - protein, 1147 aa, Artificial Sequence
  SARS-CoV-2/SARS-CoV-2/Yunnan-01/human/2020/CHN__MT049951.1 spike protein (1-1147)(I909C_Y1047C)
MFVFLVLLPLVSSQCVNLTTRTQLPPANTNSFTRGVYYPDKVFRSSVLHSTQDLFLPFFSNVTWFHAIHVSGTNGTKRFDNPVLPFNDGVYFASTEKSNIIRGWIFGTTLDSKTQSLLIVNNATNVVIKVCEFQFCNDPFLGVYYHKNNKSWMESEFRVYSSANNCTFEYVSQPFLMDLEGKQGNFKNLREFVFKNIDGYFKIYSKHTPINLVRDLPQGFSALEPLVDLPIGINITRFQTLLALHRSYLTPGDSSSGWTAGAAAYYVGYLQPRTFLLKYNENGTITDAVDCALDPLSETKCTLKSFTVEKGIYQTSNFRVQPTESIVRFPNITNLCPFGEVFNATRFASVYAWNRKRISNCVADYSVLYNSASFSTFKCYGVSPTKLNDLCFTNVYADSFVIRGDEVRQIAPGQTGKIADYNYKLPDDFTGCVIAWNSNNLDSKVGGNYNYLYRLFRKSNLKPFERDISTEIYQAGSTPCNGVEGFNCYFPLQSYGFQPTNGVGYQPYRVVVLSFELLHAPATVCGPKKSTNLVKNKCVNFNFNGLTGTGVLTESNKKFLPFQQFGRDIADTTDAVRDPQTLEILDITPCSFGGVSVITPGTNTSNQVAVLYQDVNCTEVPVAIHADQLTPTWRVYSTGSNVFQTRAGCLIGAEHVNNSYECDIPIGAGICASYQTQTNSPRRARSVASQSIIAYTMSLGAENSVAYSNNSIAIPTNFTISVTTEILPVSMTKTSVDCTMYICGDSTECSNLLLQYGSFCTQLNRALTGIAVEQDKNTQEVFAQVKQIYKTPPIKDFGGFNFSQILPDPSKPSKRSFIEDLLFNKVTLADAGFIKQYGDCLGDIAARDLICAQKFNGLTVLPPLLTDEMIAQYTSALLAGTITSGWTFGAGAALQIPFAMQMAYRFNGCGVTQNVLYENQKLIANQFNSAIGKIQDSLSSTASALGKLQDVVNQNAQALNTLVKQLSSNFGAISSVLNDILSRLDKVEAEVQIDRLITGRLQSLQTYVTQQLIRAAEIRASANLAATKMSECVLGQSKRVDFCGKGCHLMSFPQSAPHGVVFLHVTYVPAQEKNFTTAPAICHDGKAHFPREGVFVSNGTHWFVTQRNFYEPQIITTDNTFVSGNCDVVIGIVNNTVYDPLQPELDS

SEQ ID NO: 3262 - protein, 1147 aa, Artificial Sequence
  SARS-CoV-2/USA/WA-UW292/2020__EPI_ISL_418077 spike protein (1-1147)(I909C_Y1047C)
MFVFLVLLPLVSSQCVNLTTRTQLPPAYTNSFTRGVYYPDKVFRSSVLHSTQDLFLPFFSNVTWFHAIHVSGTNGTKRFDNPVLPFNDGVYFASTEKSNIIRGWIFGTTLDSKTQSLLIVNNATNVVIKVCEFQFCNDPFLGVYYHKNNKSWMESEFRVYSSANNCTFEYVSQPFLMDLEGKQGNFKNLREFVFKNIDGYFKIYSKHTPINLVRDLPQGFSALEPLVDLPIGINITRFQTLLALHRSYLTPGDSSSGWTAGAAAYYVGYLQPRTFLLKYNENGTITDAVDCALDPLSETKCTLKSFTVEKGIYQTSNFRVQPTESIVRFPNITNLCPFGEVFNATRFASVYAWNRKRISNCVADYSVLYNSASFSTFKCYGVSPTKLNDLCFTNVYADSFVIRGDEVRQIAPGQTGKIADYNYKLPDDFTGCVIAWNSNNLDSKVGGNYNYLYRLFRKSNLKPFERDISTEIYQASSTPCNGVEGFNCYFPLQSYGFQPTNGVGYQPYRVVVLSFELLHAPATVCGPKKSTNLVKNKCVNFNFNGLTGTGVLTESNKKFLPFQQFGRDIADTTDAVRDPQTLEILDITPCSFGGVSVITPGTNTSNQVAVLYQDVNCTEVPVAIHADQLTPTWRVYSTGSNVFQTRAGCLIGAEHVNNSYECDIPIGAGICASYQTQTNSPRRARSVASQSIIAYTMSLGAENSVAYSNNSIAIPTNFTISVTTEILPVSMTKTSVDCTMYICGDSTECSNLLLQYGSFCTQLNRALTGIAVEQDKNTQEVFAQVKQIYKTPPIKDFGGFNFSQILPDPSKPSKRSFIEDLLFNKVTLADAGFIKQYGDCLGDIAARDLICAQKFNGLTVLPPLLTDEMIAQYTSALLAGTITSGWTFGAGAALQIPFAMQMAYRFNGCGVTQNVLYENQKLIANQFNSAIGKIQDSLSSTASALGKLQDVVNQNAQALNTLVKQLSSNFGAISSVLNDILSRLDKVEAEVQIDRLITGRLQSLQTYVTQQLIRAAEIRASANLAATKMSECVLGQSKRVDFCGKGCHLMSFPQSAPHGVVFLHVTYVPAQEKNFTTAPAICHDGKAHFPREGVFVSNGTHWFVTQRNFYEPQIITTDNTFVSGNCDVVIGIVNNTVYDPLQPELDS

SEQ ID NO: 3263 - protein, 1147 aa, Artificial Sequence
  SARS-CoV-2/Iceland/192/2020__EPI_ISL_417819 spike protein (1-1147)(I909C_Y1047C)
MFVFFVLLPLVSSQCVNLTTRTQLPPAYTNSFTRGVYYPDKVFRSSVLHSTQDLFLPFFSNVTWFHAIHVSGTNGTKRFDNPVLPFNDGVYFASTEKSNIIRGWIFGTTLDSKTQSLLIVNNATNVVIKVCEFQFCNDPFLGVYYHKNNKSWMESEFRVYSSANNCTFEYVSQPFLMDLEGKQGNFKNLREFVFKNIDGYFKIYSKHTPINLVRDLPQGFSALEPLVDLPIGINITRFQTLLALHRSYLTPGDSSSGWTAGAAAYYVGYLQPRTFLLKYNENGTITDAVDCALDPLSETKCTLKSFTVEKGIYQTSNFRVQPTESIVRFPNITNLCPFGEVFNATRFASVYAWNRKRISNCVADYSVLYNSASFSTFKCYGVSPTKLNDLCFTNVYADSFVIRGDEVRQIAPGQTGKIADYNYKLPDDFTGCVIAWNSNNLDSKVGGNYNYLYRLFRKSNLKPFERDISTEIYQAGSTPCNGVEGFNCYFPLQSYGFQPTNGVGYQPYRVVVLSFELLHAPATVCGPKKSTNLVKNKCVNFNFNGLTGTGVLTESNKKFLPFQQFGRDIADTTDAVRDPQTLEILDITPCSFGGVSVITPGTNTSNQVAVLYQGVNCTEVPVAIHADQLTPTWRVYSTGSNVFQTRAGCLIGAEHVNNSYECDIPIGAGICASYQTQTNSPRRARSVASQSIIAYTMSLGAENSVAYSNNSIAIPTNFTISVTTEILPVSMTKTSVDCTMYICGDSTECSNLLLQYGSFCTQLNRALTGIAVEQDKNTQEVFAQVKQIYKTPPIKDFGGFNFSQILPDPSKPSKRSFIEDLLFNKVTLADAGFIKQYGDCLGDIAARDLICAQKFNGLTVLPPLLTDEMIAQYTSALLAGTITSGWTFGAGAALQIPFAMQMAYRFNGCGVTQNVLYENQKLIANQFNSAIGKIQDSLSSTASALGKLQDVVNQNAQALNTLVKQLSSNFGAISSVLNDILSRLDKVEAEVQIDRLITGRLQSLQTYVTQQLIRAAEIRASANLAATKMSECVLGQSKRVDFCGKGCHLMSFPQSAPHGVVFLHVTYVPAQEKNFTTAPAICHDGKAHFPREGVFVSNGTHWFVTQRNFYEPQIITTDNTFVSGNCDVVIGIVNNTVYDPLQPELDS

SEQ ID NO: 3264 - protein, 1147 aa, Artificial Sequence
  SARS-CoV-2/Belgium/ULG-6939/2020__EPI_ISL_417020 spike protein (1-1147)(I909C_Y1047C)
MFVFLVLLPLVSSQCVNLTTRTQLPPAYTNSFTRGVYYPDKVFRSSVLHSTQDLFLPFFSNVTWFHAIHVSGTNGTKRFDNPVLPFNDGVYFASTEKSNIIRGWIFGTTLDSKTQSLLIVNNATNVVIKVCEFQFCNDPFLGVYYHKNNKSWMESEFRVYSSANNCTFEYVSQPFLMDLEGKQGNFKNLREFVFKNIDGYFKIYSKHTPINLVRDLPQGFSALEPLVDLPIGINITRFQTLLALHRSYLTPGDSSSGWTAGAAAYYVGYLQPRTFLLKYNENGTITDAVDCALDPLSETKCTLKSFTVEKGIYQTSNFRVQPTESIVRFPNITNLCPFGEVFNATRFASVYAWNRKRISNCVADYSVLYNSASFSTFKCYGVSPTKLNDLCFTNVYADSFVIRGDEVRQIAPGQTGKIADYNYKLPDDFTGCVIAWNSNNLDSKVGGNYNYLYRLFRKSNLKPFERDISTEIYQAGSTPCNGVEGFNCYFPLQSYGFQPTNGVGYQPYRVVVLSFELLHAPATVCGPKKSTNLVKNKCVNFNFNGLTGTGVLTESNKKFLPFQQFGRDIADTTDAVRDPQTLEILDITPCSFGGVSVITPGTNTSNQVAVLYQGVNCTEVPVAIHADQLTPTWRVYSTGSNVFQTRAGCLIGAEHVNNSYECDIPIGAGICASYQTQTNSPRRARSVASQSIIAYTMSLGAENSVVYSNNSIAIPTNFTISVTTEILPVSMTKTSVDCTMYICGDSTECSNLLLQYGSFCTQLNRALTGIAVEQDKNTQEVFAQVKQIYKTPPIKDFGGFNFSQILPDPSKPSKRSFIEDLLFNKVTLADAGFIKQYGDCLGDIAARDLICAQKFNGLTVLPPLLTDEMIAQYTSALLAGTITSGWTFGAGAALQIPFAMQMAYRFNGCGVTQNVLYENQKLIANQFNSAIGKIQDSLSSTASALGKLQDVVNQNAQALNTLVKQLSSNFGAISSVLNDILSRLDKVEAEVQIDRLITGRLQSLQTYVTQQLIRAAEIRASANLAATKMSECVLGQSKRVDFCGKGCHLMSFPQSAPHGVVFLHVTYVPAQEKNFTTAPAICHDGKAHFPREGVFVSNGTHWFVTQRNFYEPQIITTDNTFVSGNCDVVIGIVNNTVYDPLQPELDS

SEQ ID NO: 3265 - protein, 1147 aa, Artificial Sequence
  SARS-CoV-2/France/HF2496/2020__EPI_ISL_418231 spike protein (1-1147)(I909C_Y1047C)
MFVFLVLLPLVSSQCVNLTTRTQLPPAYTNSFTRGVYYPDKVFRSSVLHSTQDLFLPFFSNVTWFHAIHVSGTNGTKRFDNPVLPFNDGVYFASTEKSNIIRGWIFGTTLDSKTQSLLIVNNATNVVIKVCEFQFCNDPFLGVYYHKNNKSWMESEFRVYSSANNCTFEYVSQPFLMDLEGKQGNFKNLREFVFKNIDGYFKIYSKHTPINLVRDLPQGFSALEPLVDLPIGINITRFQTLLALHRSYLTPGDSSSGWTAGAAAYYVGYLQPRTFLLKYNENGTITDAVDCALDPLSETKCTLKSFTVEKGIYQTSNFRVQPTESIVRFPNITNLCPFGEVFNATRFASVYAWNRKRISNCVADYSVLYNSASFSTFKCYGVSPTKLNDLCFTNVYADSFVIRGDEVRQIAPGQTGKIADYNYKLPDDFTGCVIAWNSNNLDSKVGGNYNYLYRLFRKSNLKPFERDISTEIYQAGSTPCNGVEGFNCYFPLQSYGFQPTNGVGYQPYRVVVLSFELLHAPATVCGPKKSTNLVKNKCVNFNFNGLTGTGVLTESNKKFLPFQQFGRDIADTTDAVRDPQTLEILDITPCSFGGVSVITPGTNTSNQVAVLYQGVNCTEVPVAIHADQLTPTWRVYSTGSNVFQTRAGCLIGAEHVNNSYECDIPIGAGICASYQTQTNSPRRARSVASQSIIAYTMSLGAENSVAYSNNSIAIPTNFTISVTTEILPVSMTKTSVDCTMYICGDSTECSNLLLQYGSFCTQLNRALTGIAVEQDKNTQEVFAQVKQIYKTPPIKDFGGFNFSQILPDPSKPSKRSFIEDLLFNKVTLADAGFIKQYGDCLGDIVARDLICAQKFNGLTVLPPLLTDEMIAQYTSALLAGTITSGWTFGAGAALQIPFAMQMAYRFNGCGVTQNVLYENQKLIANQFNSAIGKIQDSLSSTASALGKLQDVVNQNAQALNTLVKQLSSNFGAISSVLNDILSRLDKVEAEVQIDRLITGRLQSLQTYVTQQLIRAAEIRASANLAATKMSECVLGQSKRVDFCGKGCHLMSFPQSAPHGVVFLHVTYVPAQEKNFTTAPAICHDGKAHFPREGVFVSNGTHWFVTQRNFYEPQIITTDNTFVSGNCDVVIGIVNNTVYDPLQPELDS

SEQ ID NO: 3266 - protein, 1147 aa, Artificial Sequence
  SARS-CoV-2/USA/WA-UW291/2020__EPI_ISL_418076 spike protein (1-1147)(I909C_Y1047C)
MFVFLVLLPLVSSQCVNLTTRTQLPPAYTNSFTRGVYYPDKVFRSSVLHSTQDLFLPFFSNVTWFHAIHVSGTNGTKRFDNPVLPFNDGVYFASTEKSNIIRGWIFGTTLDSKTQSLLIVNNATNVVIKVCEFQFCNDPFLGVYYHKNNKSWMESEFRVYSSANNCTFEYVSQPFLMDLEGKQGNFKNLREFVFKNIDGYFKIYSKHTPINLVRDLPQGFSALEPLVDLPIGINITRFQTLLALHRSYLTPGDSSSGWTAGAAAYYVGYLQPRTFLLKYNENGTITDAVDCALDPLSETKCTLKSFTVEKGIYQTSNFRVQPTESIVRFPNITNLCPFGEVFNATRFASVYAWNRKRISNCVADYSVLYNSASFSTFKCYGVSPTKLNDLCFTNVYADSFVIRGDEVRQIAPGQTGKIADYNYKLPDDFTGCVIAWNSNNLDSKVGGNYNYLYRLFRKSNLKPFERDISTEIYQAGSTPCNGVEGFNCYFPLQSYGFQPTNGVGYQPYRVVVLSFELLHAPATVCGPKKSTNLVKNKCVNFNFNGLTGTGVLTESNKKFLPFQQFGRDIADTTDAVRDPQTLEILDITPCSFGGVSVITPGTNTSNQVAVLYQGVNCTEVPVAIHADQLTPTWRVYSTGSNVFQTRAGCLIGAEHVNNSYECDIPIGAGICASYQTQTNSPRRARSVASQSIIAYTMSLGAENSVAYSNNSIAIPTNFTISVTTEILPVSMTKTSVDCTMYICGDSTECSNLLLQYGSFCTQLNRALTGIAVEQDKNTQEVFAQVKQIYKTPPIKDFGGFNFSQILPDPSKPSKRSFIEDLLFNKVTLADAGFIKQYGDCLGDIAARDLICAQKFNGLTVLPPLLTDEMIAQYTSALLAGTITSGWTFGAGAALQIPFAMQMAYRFNGCGVTQNVLYENQKLIANQFNSAIGKIQYSLSSTASALGKLQDVVNQNAQALNTLVKQLSSNFGAISSVLNDILSRLDKVEAEVQIDRLITGRLQSLQTYVTQQLIRAAEIRASANLAATKMSECVLGQSKRVDFCGKGCHLMSFPQSAPHGVVFLHVTYVPAQEKNFTTAPAICHDGKAHFPREGVFVSNGTHWFVTQRNFYEPQIITTDNTFVSGNCDVVIGIVNNTVYDPLQPELDS

SEQ ID NO: 3267 - protein, 1147 aa, Artificial Sequence; identical to SEQ ID NO: 3230
  SARS-CoV-2/Portugal/PT0034/2020__EPI_ISL_418019 spike protein (1-1147)(I909C_Y1047C)

SEQ ID NO: 3268 - protein, 1147 aa, Artificial Sequence; identical to SEQ ID NO: 3222
  SARS-CoV-2/Iceland/202/2020__EPI_ISL_417750 spike protein (1-1147)(I909C_Y1047C)

SEQ ID NO: 3269 - protein, 1147 aa, Artificial Sequence
  SARS-CoV-2/USA/WA-UW261/2020__EPI_ISL_418046 spike protein (1-1147)(I909C_Y1047C)
MFVFLVLLPLVSSQCVNLTTRTQLPPAYTNSFTRGVYYPDKVFRSSVLHSTQDLFLPFFSNVTWFHAIHVSGTNGTKRFDNPVLPFNDGVYFASTEKSNIIRGWIFGTTLDSKTQSLLIVNNATNVVIKVCEFQFCNDPFLGVYYHKNNKSWMESEFRVYSSANNCTFEYVSQPFLMDLEGKQGNFKNLREFVFKNIDGYFKIYSKHTPINLVRDLPQGFSALEPLVDLPIGINITRFQTLLALHRSYLTPGDSSSGWTAGAAAYYVGYLQPRTFLLKYNENGTITDAVDCALDPLSETKCTLKSFTVEKGIYQTSNFRVQPTESIVRFPNITNLCPFGEVFNATRFTSVYAWNRKRISNCVADYSVLYNSASFSTFKCYGVSPTKLNDLCFTNVYADSFVIRGDEVRQIAPGQTGKIADYNYKLPDDFTGCVIAWNSNNLDSKVGGNYNYLYRLFRKSNLKPFERDISTEIYQAGSTPCNGVEGFNCYFPLQSYGFQPTNGVGYQPYRVVVLSFELLHAPATVCGPKKSTNLVKNKCVNFNFNGLTGTGVLTESNKKFLPFQQFGRDIADTTDAVRDPQTLEILDITPCSFGGVSVITPGTNTSNQVAVLYQDVNCTEVPVAIHADQLTPTWRVYSTGSNVFQTRAGCLIGAEHVNNSYECDIPIGAGICASYQTQTNSPRRARSVASQSIIAYTMSLGAENSVAYSNNSIAIPTNFTISVTTEILPVSMTKTSVDCTMYICGDSTECSNLLLQYGSFCTQLNRALTGIAVEQDKNTQEVFAQVKQIYKTPPIKDFGGFNFSQILPDPSKPSKRSFIEDLLFNKVTLADAGFIKQYGDCLGDIAARDLICAQKFNGLTVLPPLLTDEMIAQYTSALLAGTITSGWTFGAGAALQIPFAMQMAYRFNGCGVTQNVLYENQKLIANQFNSAIGKIQDSLSSTASALGKLQDVVNQNAQALNTLVKQLSSNFGAISSVLNDILSRLDKVEAEVQIDRLITGRLQSLQTYVTQQLIRAAEIRASANLAATKMSECVLGQSKRVDFCGKGCHLMSFPQSAPHGVVFLHVTYVPAQEKNFTTAPAICHDGKAHFPREGVFVSNGTHWFVTQRNFYEPQIITTDNTFVSGNCDVVIGIVNNTVYDPLQPELDS

SEQ ID NO: 3270 - protein, 1147 aa, Artificial Sequence
  SARS-CoV-2/Portugal/PT0035/2020__EPI_ISL_418020 spike protein (1-1147)(I909C_Y1047C)
MFVFLVLLPLVSSQCVNLTTRTQLPPAYTNSFTRGVYYPDKVFRSSVLHSTQDLFLPFFSNVTWFHAIHVSGTNGTKRFDNPVLPFNDGVYFASTEKSNIIRGWIFGTTLDSKTQSLLIVNNATNVVIKVCEFQFCNDPFLGVYYHKNNKSWMESEFRVYSSANNCTFEYVSQPFLMDLEGKQGNFKNLREFVFKNIDGYFKIYSKHTPINLVRDLPQGFSALEPLVDLPIGINITRFQTLLALHRSYLTPGDSSSGWTAGAAAYYVGYLQPRTFLLKYNENGTITDAVDCALDPLSETKCTLKSFTVEKGIYQTSNFRVQPTESIVRFPNITNLCPFGEVFNATRFASVYAWNRKRISNCVADYSVLYNSASFSTFKCYGVSPTKLNDLCFTNVYADSFVIRGDEVRQIAPGQTGKIADYNYKLPDDFTGCVIAWNSNNLDSKVGGNYNYLYRLFRKSNLKPFERDISTEIYQAGSTPCNGVEGFNCYFPLQSYGFQPTNGVGYQPYRVVVLSFELLHAPATVCGPKKSTNLVKNKCVNFNFNGLTGTGVLTESNKKFLPFQQFGRDIADTTDAVRDPQTLEILDITPCSFGGVSVITPGTNTSNQVAVLYQDVNCTEVPVAIHADQLTPTWRVYSTGSNVFQTRAGCLIGAEHVNNSYECDIPIGAGICASYQTQTNSPRRARSVASQSIIAYTMSLGAENSVAYSNNSIAIPTNFTISVTTEILPVSMTKTSVDCTMYICGDSTECSNLLLQYGSFCTQLNRALTGIAVEQDKNTQEVFAQVKQIYKTPPIKDFGGFNFSQILPDPSKPSKRSFIEDLLFNKVTLADAGFIKQYGDCLGDISARDLICAQKFNGLTVLPPLLTDEMIAQYTSALLAGTITSGWTFGAGAALQIPFAMQMAYRFNGCGVTQNVLYENQKLIANQFNSAIGKIQDSLSSTASALGKLQDVVNQNAQALNTLVKQLSSNFGAISSVLNDILSRLDKVEAEVQIDRLITGRLQSLQTYVTQQLIRAAEIRASANLAATKMSECVLGQSKRVDFCGKGCHLMSFPQSAPHGVVFLHVTYVPAQEKNFTTAPAICHDGKAHFPREGVFVSNGTHWFVTQRNFYEPQIITTDNTFVSGNCDVVIGIVNNTVYDPLQPELDS

SEQ ID NO: 3271 - protein, 1147 aa, Artificial Sequence
  SARS-CoV-2/USA/NY-NYUMC7/2020__EPI_ISL_418192 spike protein (1-1147)(I909C_Y1047C)
MFVFLVLLPLVSSQCVNLTTRTQLPPAYTNSFTRGVYYPDKVFRSSVLHSTQDLFLPFFSNVTWFHAIHVSGTNGTKRFDNPVLPFNDGVYFASTEKSNIIRGWIFGTTLDSKTQSLLIVNNATNVVIKVCEFQFCNDPFLGVYHHKNNKSWMESEFRVYSSANNCTFEYVSQPFLMDLEGKQGNFKNLREFVFKNIDGYFKIYSKHTPINLVRDLPQGFSALEPLVDLPIGINITRFQTLLALHRSYLTPGDSSSGWTAGAAAYYVGYLQPRTFLLKYNENGTITDAVDCALDPLSETKCTLKSFTVEKGIYQTSNFRVQPTESIVRFPNITNLCPFGEVFNATRFASVYAWNRKRISNCVADYSVLYNSASFSTFKCYGVSPTKLNDLCFTNVYADSFVIRGDEVRQIAPGQTGKIADYNYKLPDDFTGCVIAWNSNNLDSKVGGNYNYLYRLFRKSNLKPFERDISTEIYQAGSTPCNGVEGFNCYFPLQSYGFQPTNGVGYQPYRVVVLSFELLHAPATVCGPKKSTNLVKNKCVNFNFNGLTGTGVLTESNKKFLPFQQFGRDIADTTDAVRDPQTLEILDITPCSFGGVSVITPGTNTSNQVAVLYQGVNCTEVPVAIHADQLTPTWRVYSTGSNVFQTRAGCLIGAEHVNNSYECDIPIGAGICASYQTQTNSPRRARSVASQSIIAYTMSLGAENSVAYSNNSIAIPTNFTISVTTEILPVSMTKTSVDCTMYICGDSTECSNLLLQYGSFCTQLNRALTGIAVEQDKNTQEVFAQVKQIYKTPPIKDFGGFNFSQILPDPSKPSKRSFIEDLLFNKVTLADAGFIKQYGDCLGDIAARDLICAQKFNGLTVLPPLLTDEMIAQYTSALLAGTITSGWTFGAGAALQIPFAMQMAYRFNGCGVTQNVLYENQKLIANQFNSAIGKIQDSLSSTASALGKLQDVVNQNAQALNTLVKQLSSNFGAISSVLNDILSRLDKVEAEVQIDRLITGRLQSLQTYVTQQLIRAAEIRASANLAATKMSECVLGQSKRVDFCGKGCHLMSFPQSAPHGVVFLHVTYVPAQEKNFTTAPAICHDGKAHFPREGVFVSNGTHWFVTQRNFYEPQIITTDNTFVSGNCDVVIGIVNNTVYDPLQPELDS

SEQ ID NO: 3272 - protein, 1147 aa, Artificial Sequence
  SARS-CoV-2/Iceland/189/2020__EPI_ISL_417709 spike protein (1-1147)(I909C_Y1047C)
MFVFLVLLPLVSSQCVNLTTRTQLPPAYTNSFTRGVYYPDKVFRSSVLHSTQDLFLPFFSNVTWFHAIHVSGTNGTKRFDNPVLPFNDGVYFASTEKSNIIRGWIFGTTLDSKTQSLLIVNNATNVVIKVCEFQFCNDPFLGVYYHKNNKSWMESEFRVYSSANNCTFEYVSQPFLMDLEGKQGNFKNLREFVFKNIDGYFKIYSKHTPINLVRDLPQGFSALEPLVDLPIGINITRFQTLLALHRSYLTPGDSSSGWTAGAAAYYVGYLQPRTFLLKYNENGTITDAVDCALDPLSETKCTLKSFTVEKGIYQTSNFRVQPTESIVRFPNITNLCPFGEVFNATRFASVYAWNRKRISNCVADYSVLYNSASFSTFKCYGVSPTKLNDLCFTNVYADSFVIRGDEVRQIAPGQTGKIADYNYKLPDDFTGCVIAWNSNNLDSKVGGNYNYLYRLFRKSNLKPFERDISTEIYQAGSTPCNGVEGFNCYFPLQSYGFQPTNGVGYQPYRVVVLSFELLHAPATVCGPKKSTNLVKNKCVNFNFNGLTGTGVLTESNKKFLPFQQFGRDIADTTDAVRDPQTLEILDITPCSFGGVSVITPGTNTSNQVAVLYQGVNCTEVPVAIHADQLTPTWRVYSTGSNVFQTRAGCLIGAEHVNNSYECDIPIGAGICASYQTQTNSPRRARSVASQSIIAYTMSLGAENSVAYSNNSIAIPTNFTISVTTEILPVSMTKTSVDCTMYICGDSTECSNLLLQYGSFCTQLNRALTGIAVEQDKNTQEVFAQVKQIYKTPPIKDFGGFNFSQILPDPSKPSKRSFIEDLLFNKVTLADAGFTKQYGDCLGDIAARDLICAQKFNGLTVLPPLLTDEMIAQYTSALLAGTITSGWTFGAGAALQIPFAMQMAYRFNGCGVTQNVLYENQKLIANQFNSAIGKIQDSLSSTASALGKLQDVVNQNAQALNTLVKQLSSNFGAISSVLNDILSRLDKVEAEVQIDRLITGRLQSLQTYVTQQLIRAAEIRASANLAATKMSECVLGQSKRVDFCGKGCHLMSFPQSAPHGVVFLHVTYVPAQEKNFTTAPAICHDGKAHFPREGVFVSNGTHWFVTQRNFYEPQIITTDNTFVSGNCDVVIGIVNNTVYDPLQPELDS

SEQ ID NO: 3273 - protein, 1147 aa, Artificial Sequence
  SARS-CoV-2/Australia/NSW56/2020__EPI_ISL_417408 spike protein (1-1147)(I909C_Y1047C)
MFVFLVLLPLVSSQCVNLTTRTQLPPAYTNSFTRGVYYPDKVFRSSVLHSTQDLFLPFFSNVTWFHAIHVSGTNGTKRFDNPVLPFNDGVYFASTEKSNIIRGWIFGTTLDSKTQSLLIVNNATNVVIKVCEFQFCNDPFLGVYYHKNNKSWMESEFRVYSSANNCTFEYVSQPFLMDLEGKQGNFKNLREFVFKNIDGYFKIYSKHTPINLVRDLPQGFSALEPLVDLPIGINITRFQTLLALHRSYLTPGDSSSGWTAGAAAYYVGYLQPRTFLLKYNENGTITDAVDCALDPLSETKCTLKSFTVEKGIYQTSNFRVQPTESIVRFPNITNLCPFGEVFNATRFASVYAWNRKRISNCVADYSVLYNSASFSTFKCYGVSPTKLNDLCFTNVYADSFVIRGDEVRQIAPGQTGKIADYNYKLPDDFTGCVIAWNSNNLDSKVGGNYNYLYRLFRKSNLKPFERDISTEIYQAGSTPCNGVEGFNCYFPLQSYGFQPTNGVGYQPYRVVVLSFELLHAPATVCGPKKSTNLVKNKCVNFNFNGLTGTGVLTESNKKFLPFQQFGRDIADTTDAVRDPQTLEILDITPCSFGGVSVITPGTNTSNQVAVLYQDVNCTEVPVAIHADQLTPTWRVYSTGSNVFQTRAGCLIGAEHVNNSYECDIPIGAGICASYQTQTNSPRRARSVASQSIIAYTMSLGAENSVAYSNNSIAIPTNFTISVTTEILPVSMTKTSVDCTMYICGDSTECSNLLLQYGSFCTQLNRALTGIAVEQDKNTQEVFAQVKQIYKTPPIKDFGGFNFSQILPDSSKPSKRSFIEDLLFNKVTLADAGFIKQYGDCLGDIAARDLICAQKFNGLTVLPPLLTDEMIAQYTSALLAGTITSGWTFGAGAALQIPFAMQMAYRFNGCGVTQNVLYENQKLIANQFNSAIGKIQDSLSSTASALGKLQDVVNQNAQALNTLVKQLSSNFGAISSVLNDILSRLDKVEAEVQIDRLITGRLQSLQTYVTQQLIRAAEIRASANLAATKMSECVLGQSKRVDFCGKGCHLMSFPQSAPHGVVFLHVTYVPAQEKNFTTAPAICHDGKAHFPREGVFVSNGTHWFVTQRNFYEPQIITTDNTFVSGNCDVVIGIVNNTVYDPLQPELDS

SEQ ID NO: 3274 - protein, 1147 aa, Artificial Sequence
  SARS-CoV-2/Iceland/280/2020__EPI_ISL_417608 spike protein (1-1147)(I909C_Y1047C)
MFVFLVLLPLVSSQCVNLTTRTQLPPAYTNSFTRGVYYPDKVFRSSVLHSTQDLFLPFFSNVTWFHAIHVSGTNGTKRFDNPVLPFNDGVYFASTEKSNIIRGWIFGTTLDSKTQSLLIVNNATNVVIKVCEFQFCNDPFLGVYYHKNNKSWMESEFRVYSSANNCTFEYVSQPFLMDLEGKQGNFKNLREFVFKNIDGYFKIYSKHTPINLVRDLPQGFSALEPLVDLPIGINITRFQTLLALHRSYLTPGDSSSGWTAGAAAYYVGYLQPRTFLLKYNENGTITDAVDCALDPLSETKCTLKSFTVEKGIYQTSNFRVQPTESIVRFPNITNLCPFGEVFNATRFASVYAWNRKRISNCVADYSVLYNSASFSTFKCYGVSPTKLNDLCFTNVYADSFVIRGDEVRQIAPGQTGKIADYNYKLPDDFTGCVIAWNSNNLDSKVGGNYNYLYRLFRKSNLKPFERDISTEIYQAGSTPCNGVEGFNCYFPLQSYGFQPTNGVGYQPYRVVVLSFELLHAPATVCGPKKSTNLVKNKCVNFNFNGLTGTGVLTESNKKFLPFQQFGRDIADTTDAVRDPQTLEILDITPCSFGGVSVITPGTNTSNQVAVLYQGVNCTEVPVAIHADQLTPTWRVYSTGSNVFQTRAGCLIGAEHVNNSYECDIPIGAGICASYHTQTNSPRRARSVASQSIIAYTMSLGAENSVAYSNNSIAIPTNFTISVTTEILPVSMTKTSVDCTMYICGDSTECSNLLLQYGSFCTQLNRALTGIAVEQDKNTQEVFAQVKQIYKTPPIKDFGGFNFSQILPDPSKPSKRSFIEDLLFNKVTLADAGFIKQYGDCLGDIAARDLICAQKFNGLTVLPPLLTDEMIAQYTSALLAGTITSGWTFGAGAALQIPFAMQMAYRFNGCGVTQNVLYENQKLIANQFNSAIGKIQDSLSSTASALGKLQDVVNQNAQALNTLVKQLSSNFGAISSVLNDILSRLDKVEAEVQIDRLITGRLQSLQTYVTQQLIRAAEIRASANLAATKMSECVLGQSKRVDFCGKGCHLMSFPQSAPHGVVFLHVTYVPAQEKNFTTAPAICHDGKAHFPREGVFVSNGTHWFVTQRNFYEPQIITTDNTFVSGNCDVVIGIVNNTVYDPLQPELDS

SEQ ID NO: 3275 - protein, 1147 aa, Artificial Sequence; identical to SEQ ID NO: 3230
  SARS-CoV-2/Iceland/247/2020__EPI_ISL_417575 spike protein (1-1147)(I909C_Y1047C)

SEQ ID NO: 3276 - protein, 1147 aa, Artificial Sequence
  SARS-CoV-2/Iceland/238/2020__EPI_ISL_417566 spike protein (1-1147)(I909C_Y1047C)
MFVFLVLLPLVSSQCVNLTTRTQLPPAYTNSFTRGVYYPDKVFRSSVLHSTQDLFLPFFSNVTWFHAIHVSGTNGTKRFDNPVLPFNDGVYFASTEKSNIIRGWIFGTTLDSKTQSLLIVNNATNVVIKVCEFQFCNDPFLGVYYHKNNKSWMESEFRVYSSANNCTFEYVSQPFLMDLEGKQGNFKNLREFVFKNIDGYFKIYSKHTPINLVRDLPQGFSALEPLVDLPIGINITRFQTLLALHRSYLTPGDSSSGWTAGAAAYYVGYLQPRTFLLKYNENGTITDAVDCALDPLSETKCTLKSFTVEKGIYQTSNFRVQPTESIVRFPNITNLCPFGEVFNATRFASVYAWNRKRISNCVADYSVLYNSASFSTFKCYGVSPTKLNDLCFTNVYADSFVIRGDEVRQIAPGQTGKIADYNYKLPDDFTGCVIAWNSNNLDSKVGGNYNYLYRLFRKSNLKPFERDISTEIYQAGSTPCNGVEGFNCYFPLQSYGFQPTNGVGYQPYRVVVLSFELLHAPATVCGPKKSTNLVKNKCVNFNFNGLTGTGVLTESNKKFLPFQQFGRDIADTTDAVRDPQTLEILDITPCSFGGVSVITPGTNTSNQVAVLYQGVNCTEVPVAIHADQLTPTWRVYSTGSNVFQTRAGCLIGAEHVNNSYECDIPIGAGICASYQTQTNSPRRARSVASQSIIAYTMSLGAENSVAYSNNSIAIPTNFTISVTTEILPVSMTKTSVDCTMYICGDSTECSNLLLQYGSFCTQLNRALTGIAVEQDKNTQEVFAQVKQIYKTPPIKDFGGFNFSQILPDPSKPSKRSFIEDLLFNKVTLADVGFIKQYGDCLGDIAARDLICAQKFNGLTVLPPLLTDEMIAQYTSALLAGTITSGWTFGAGAALQIPFAMQMAYRFNGCGVTQNVLYENQKLIANQFNSAIGKIQDSLSSTASALGKLQDVVNQNAQALNTLVKQLSSNFGAISSVLNDILSRLDKVEAEVQIDRLITGRLQSLQTYVTQQLIRAAEIRASANLAATKMSECVLGQSKRVDFCGKGCHLMSFPQSAPHGVVFLHVTYVPAQEKNFTTAPAICHDGKAHFPREGVFVSNGTHWFVTQRNFYEPQIITTDNTFVSGNCDVVIGIVNNTVYDPLQPELDS

SEQ ID NO: 3277 - protein, 1147 aa, Artificial Sequence
  SARS-CoV-2/Greece/16/2020__EPI_ISL_418265 spike protein (1-1147)(I909C_Y1047C)
MFVFLVLLPLVSSQCVNLTTRTQLPPAYTNSFTRGVYYPDKVFRSSVLHSTQDLFLPFFSNVTWFHAIHVSGTNGTKRFDNPVLPFNDGVYFASTEKSNIIRGWIFGTTLDSKTQSLLIVNNATNVVIKVCEFQFCNDPFLGVYYHKNNKSWMESEFRVYSSANNCTFEYVSQPFLMDLEGKQGNFKNLREFVFKNVDGYFKIYSKHTPINLVRDLPQGFSALEPLVDLPIGINITRFQTLLALHRSYLTPGDSSSGWTAGAAAYYVGYLQPRTFLLKYNENGTITDAVDCALDPLSETKCTLKSFTVEKGIYQTSNFRVQPTESIVRFPNITNLCPFGEVFNATRFASVYAWNRKRISNCVADYSVLYNSASFSTFKCYGVSPTKLNDLCFTNVYADSFVIRGDEVRQIAPGQTGKIADYNYKLPDDFTGCVIAWNSNNLDSKVGGNYNYLYRLFRKSNLKPFERDISTEIYQAGSTPCNGVEGFNCYFPLQSYGFQPTNGVGYQPYRVVVLSFELLHAPATVCGPKKSTNLVKNKCVNFNFNGLTGTGVLTESNKKFLPFQQFGRDIADTTDAVRDPQTLEILDITPCSFGGVSVITPGTNTSNQVAVLYQDVNCTEVPVAIHADQLTPTWRVYSTGSNVFQTRAGCLIGAEHVNNSYECDIPIGAGICASYQTQTNSPRRARSVASQSIIAYTMSLGAENSVAYSNNSIAIPTNFTISVTTEILPVSMTKTSVDCTMYICGDSTECSNLLLQYGSFCTQLNRALTGIAVEQDKNTQEVFAQVKQIYKTPPIKDFGGFNFSQILPDPSKPSKRSFIEDLLFNKVTLADAGFIKQYGDCLGDIAARDLICAQKFNGLTVLPPLLTDEMIAQYTSALLAGTITSGWTFGAGAALQIPFAMQMAYRFNGCGVTQNVLYENQKLIANQFNSAIGKIQDSLSSTASALGKLQDVVNQNAQALNTLVKQLSSNFGAISSVLNDILSRLDKVEAEVQIDRLITGRLQSLQTYVTQQLIRAAEIRASANLAATKMSECVLGQSKRVDFCGKGCHLMSFPQSAPHGVVFLHVTYVPAQEKNFTTAPAICHDGKAHFPREGVFVSNGTHWFVTQRNFYEPQIITTDNTFVSGNCDVVIGIVNNTVYDPLQPELDS

SEQ ID NO: 3278 - protein, 1147 aa, Artificial Sequence
  SARS-CoV-2/Iceland/319/2020__EPI_ISL_417648 spike protein (1-1147)(I909C_Y1047C)
MFVFLVLLPLVSSQCVNLTTRTQLPPAYTNSFTRGVYYPDKVFRSSVLHSTQDLFLPFFSNVTWFHAIHVSGTNGTKRFDNPVLPFNDGVYFASTEKSNIIRGWIFGTTLDSKTQSLLIVNNATNVVIKVCEFQFCNDPFLGVYYHKNNKSWMESEFRVYSSANNCTFEYVSQPFLIDLEGKQGNFKNLREFVFKNIDGYFKIYSKHTPINLVRDLPQGFSALEPLVDLPIGINITRFQTLLALHRSYLTPGDSSSGWTAGAAAYYVGYLQPRTFLLKYNENGTITDAVDCALDPLSETKCTLKSFTVEKGIYQTSNFRVQPTESIVRFPNITNLCPFGEVFNATRFASVYAWNRKRISNCVADYSVLYNSASFSTFKCYGVSPTKLNDLCFTNVYADSFVIRGDEVRQIAPGQTGKIADYNYKLPDDFTGCVIAWNSNNLDSKVGGNYNYLYRLFRKSNLKPFERDISTEIYQAGSTPCNGVEGFNCYFPLQSYGFQPTNGVGYQPYRVVVLSFELLHAPATVCGPKKSTNLVKNKCVNFNFNGLTGTGVLTESNKKFLPFQQFGRDIADTTDAVRDPQTLEILDITPCSFGGVSVITPGTNTSNQVAVLYQGVNCTEVPVAIHADQLTPTWRVYSTGSNVFQTRAGCLIGAEHVNNSYECDIPIGAGICASYQTQTNSPRRARSVASQSIIAYTMSLGAENSVAYSNNSIAIPTNFTISVTTEILPVSMTKTSVDCTMYICGDSTECSNLLLQYGSFCTQLNRALTGIAVEQDKNTQEVFAQVKQIYKTPPIKDFGGFNFSQILPDPSKPSKRSFIEDLLFNKVTLADAGFIKQYGDCLGDIAARDLICAQKFNGLTVLPPLLTDEMIAQYTSALLAGTITSGWTFGAGAALQIPFAMQMAYRFNGCGVTQNVLYENQKLIANQFNSAIGKIQDSLSSTASALGKLQDVVNQNAQALNTLVKQLSSNFGAISSVLNDILSRLDKVEAEVQIDRLITGRLQSLQTYVTQQLIRAAEIRASANLAATKMSECVLGQSKRVDFCGKGCHLMSFPQSAPHGVVFLHVTYVPAQEKNFTTAPAICHDGKAHFPREGVFVSNGTHWFVTQRNFYEPQIITTDNTFVSGNCDVVIGIVNNTVYDPLQPELDS

SEQ ID NO: 3279 - protein, 1147 aa, Artificial Sequence
  SARS-CoV-2/Congo/94/2020__EPI_ISL_417947 spike protein (1-1147)(I909C_Y1047C)
MFVFLVLLPLVSSQCVNLTTRTQLPPAYTNSFTRGVYYPDKVFRSSVLHSTQDLFLPFFSNVTWFHAIHVSGTNGTKRFDNPVLPFNDGVYFASTEKSNIIRGWIFGTTLDSKTQSLLIVNNATNVVIKVCEFQFCNDPFLGVYYHKNNKSWMESEFRVYSSANNCTFEYVSQPFLMDLEGKQGNFKNLREFVFKNIDGYFKIYSKHTPINLVRDLPQGFSALEPLVDLPIGINITRFQTLLALHRSYLTPGDSSSGWTAGAAAYYVGYLQPRTFLLKYNENGTITDAVDCALDPLSETKCTLKSFTVEKGIYQTSNFRVQPTESIVRFPNITNLCPFGEVFNATRFASVYAWNRKRISNCVADYSVLYNSASFSTFKCYGVSPTKLNDLCFTNVYADSFVIRGDEVRQIAPGQTGKIADYNYKLPDDFTGCVIAWNSNNLDSKVGGNYNYLYRLFRKSNLKPFERDISTEIYQAGSTPCNGVEGFNCYFPLQSYGFQPTNGVGYQPYRVVVLSFELLHAPATVCGPKKSTNLVKNKCVNFNFNGLTGTGVLTESNKKFLPFQQFGRDIADTTDAVRDPQTLEILDITPCSFGGVSVITPGTNTSNQVAVLYQGVNCTEVPVAIHADQLTPTWRVYSTGSNVFQTRAGCLIGAEHVNNSYECDIPIGAGICASYQTQTNSPRRARSVASQSIIAYTMSLGAENSVAYSNNSIAIPTNFTISVTTEILPVSMTKTSVDCTMYICGDSTECSNLLLQYGSFCTQLNRALTGIAVEQDKNTQEVFAQVKQIYKTPPIKDFGGFNFSQILPDPSKPSKRSFIEDILFNKVTLADAGFIKQYGDCLGDIAARDLICAQKFNGLTVLPPLLTDEMIAQYTSALLAGTITSGWTFGAGAALQIPFAMQMAYRFNGCGVTQNVLYENQKLIANQFNSAIGKIQDSLSSTASALGKLQDVVNQNAQALNTLVKQLSSNFGAISSVLNDILSRLDKVEAEVQIDRLITGRLQSLQTYVTQQLIRAAEIRASANLAATKMSECVLGQSKRVDFCGKGCHLMSFPQSAPHGVVFLHVTYVPAQEKNFTTAPAICHDGKAHFPREGVFVSNGTHWFVTQRNFYEPQIITTDNTFVSGNCDVVIGIVNNTVYDPLQPELDS

SEQ ID NO: 3280 - protein, 1147 aa, Artificial Sequence
  SARS-CoV-2/Congo/158/2020__EPI_ISL_417950 spike protein (1-1147)(I909C_Y1047C)
MFVFLVLLPLVSSQCVNLTTRTQLPPAYTNSFTRGVYYPDKVFRSSVLHSTQDLFLPFFSNVTWFHAIHVSGTNGTKRFDNPVLPFNDGVYFASTEKSNIIRGWIFGTTLDSKTQSLLIVNNATNVVIKVCEFQFCNDPFLGVYYHKNNKSWMESEFRVYSSANNCTFEYVSQPFLMDLEGKQGNFKNLREFVFKNIDGYFKIYSKHTPINLVRDLPQGFSALEPLVDLPIGINITRFQTLLALHRSYLTPGDSSSGWTAGAAAYYVGYLQPRTFLLKYNENGTITDAVDCALDPLSETKCTLKSFTVEKGIYQTSNFRVQPTESIVRFPNITNLCPFGEVFNATRFASVYAWNRKRISNCVADYSVLYNSASFSTFKCYGVSPTKLNDLCFTNVYADSFVIRGDEVRQIAPGQTGKIADYNYKLPDDFTGCVIAWNSNNLDSKVGGNYNYLYRLFRKSNLKPFERDISTEIYQAGSTPCNGVEGFNCYFPLQSYGFQPTNGVGYQPYRVVVLSFELLHAPATVCGPKKSTNLVKNKCVNFNFNGLTGTGVLTESNKKFLPFQQFGRDIADTTDAVRDPQTLEILDITPCSFGGVSVITPGTNTSNQVAVLYQDVNCTEVPVAIHADQLTPTWRVYSTGSNVFQTRAGCLIGAEHVNNSYECDIPIGAGICASYQTQTNSPRRARSVASQSIIAYTMSLGAENSVAYSNNSIAIPTNFTISVTTEILPVSMTKTSVDCTMYICGDSTECSNLLLQYGSFCTQLNRALTGIAVEQDKNTQEVFAQVKQIYKTPPIKDFGGFNFSQILPDPSKPSKRSFIEDLLFNKVTLADAGFIKQYGDCLGDIAARDLICAQKFNGLTVLPPLLTDEMIAQYTSALLAGTITSGWTFGAGAALQIPFAMQMAYRFNGCGVTQNVLYENQKLIANQFNSAIGKIQDSLSSTASALGKLQDVVNQNAQALNTLVKQLSSNFGAISSVLNDILSRLDKVEAEVQIDRLITGRLQSLQTYVTQQLIRAAEIRASANLAATKMSECVLGQSKRVDFCGKGCHLMSFPQSAPHGVVFLHVTYVPAQEKNFTTAPAICHDGKAHFPREGVFVSNGTHWFVTQRNFYEPQIITTDNTFLSGNCDVVIGIVNNTVYDPLQPELDS

SEQ ID NO: 3281 - protein, 1147 aa, Artificial Sequence
  SARS-CoV-2/USA/UT-00034/2020__EPI_ISL_417977 spike protein (1-1147)(I909C_Y1047C)
MFVFLVLLPLVSSQCVNLTTRTQLPPAYTNSFTRGVYYPDKVFRSSVLHSTQDLFLPFFSNVTWFHAIHVSGTNGTKRFDNPVLPFNDGVYFASTEKSNIIRGWIFGTTLDSKTQSLLIVNNATNVVIKVCEFQFCNDPFLGVYYYKNNKSWMESEFRVYSSANNCTFEYVSQPFLMDLEGKQGNFKNLREFVFKNIDGYFKIYSKHTPINLVRDLPQGFSALEPLVDLPIGINITRFQTLLALHRSYLTPGDSSSGWTAGAAAYYVGYLQPRTFLLKYNENGTITDAVDCALDPLSETKCTLKSFTVEKGIYQTSNFRVQPTESIVRFPNITNLCPFGEVFNATRFASVYAWNRKRISNCVADYSVLYNSASFSTFKCYGVSPTKLNDLCFTNVYADSFVIRGDEVRQIAPGQTGKIADYNYKLPDDFTGCVIAWNSNNLDSKVGGNYNYLYRLFRKSNLKPFERDISTEIYQAGSTPCNGVEGFNCYFPLQSYGFQPTNGVGYQPYRVVVLSFELLHAPATVCGPKKSTNLVKNKCVNFNFNGLTGTGVLTESNKKFLPFQQFGRDIADTTDAVRDPQTLEILDITPCSFGGVSVITPGTNTSNQVAVLYQGVNCTEVPVAIHADQLTPTWRVYSTGSNVFQTRAGCLIGAEHVNNSYECDIPIGAGICASYQTQTNSPRRARSVASQSIIAYTMSLGAENSVAYSNNSIAIPTNFTISVTTEILPVSMTKTSVDCTMYICGDSTECSNLLLQYGSFCTQLNRALTGIAVEQDKNTQEVFAQVKQIYKTPPIKDFGGFNFSQILPDPSKPSKRSFIEDLLFNKVTLADAGFIKQYGDCLGDIAARDLICAQKFNGLTVLPPLLTDEMIAQYTSALLAGTITSGWTFGAGAALQIPFAMQMAYRFNGCGVTQNVLYENQKLIANQFNSAIGKIQDSLSSTASALGKLQDVVNQNAQALNTLVKQLSSNFGAISSVLNDILSRLDKVEAEVQIDRLITGRLQSLQTYVTQQLIRAAEIRASANLAATKMSECVLGQSKRVDFCGKGCHLMSFPQSAPHGVVFLHVTYVPAQEKNFTTAPAICHDGKAHFPREGVFVSNGTHWFVTQRNFYEPQIITTDNTFVSGNCDVVIGIVNNTVYDPLQPELDS

SEQ ID NO: 3282 - protein, 1147 aa, Artificial Sequence
  SARS-CoV-2/USA/UT-00033/2020__EPI_ISL_417976 spike protein (1-1147)(I909C_Y1047C)
MFVFLVLLPLVSSQCVNLTTRTQLPPAYTNSFTRGVYYPDKVFRSSVLHSTQDLFLPFFSNVTWFHAIHVSGTNGTKRFDNPVLPFNDGVYFASTEKSNIIRGWIFGTTLDSKTQSLLIVNNATNVVIKVCEFQFCNDPFLGVYYHKNNKSWMESEFRVYSSANNCTFEYVSQPFLMDLEGKQGNFKNLREFVFKNIDGYFKIYSKHTPINLVRDLPQGFSALEPLVDLPIGINITRFQTLLALHRSYLTPGDSSSGLTAGAAAYYVGYLQPRTFLLKYNENGTITDAVDCALDPLSETKCTLKSFTVEKGIYQTSNFRVQPTESIVRFPNITNLCPFGEVFNATRFASVYAWNRKRISNCVADYSVLYNSASFSTFKCYGVSPTKLNDLCFTNVYADSFVIRGDEVRQIAPGQTGKIADYNYKLPDDFTGCVIAWNSNNLDSKVGGNYNYLYRLFRKSNLKPFERDISTEIYQAGSTPCNGVEGFNCYFPLQSYGFQPTNGVGYQPYRVVVLSFELLHAPATVCGPKKSTNLVKNKCVNFNFNGLTGTGVLTESNKKFLPFQQFGRDIADTTDAVRDPQTLEILDITPCSFGGVSVITPGTNTSNQVAVLYQGVNCTEVPVAIHADQLTPTWRVYSTGSNVFQTRAGCLIGAEHVNNSYECDIPIGAGICASYQTQTNSPRRARSVASQSIIAYTMSLGAENSVAYSNNSIAIPTNFTISVTTEILPVSMTKTSVDCTMYICGDSTECSNLLLQYGSFCTQLNRALTGIAVEQDKNTQEVFAQVKQIYKTPPIKDFGGFNFSQILPDPSKPSKRSFIEDLLFNKVTLADAGFIKQYGDCLGDIAARDLICAQKFNGLTVLPPLLTDEMIAQYTSALLAGTITSGWTFGAGAALQIPFAMQMAYRFNGCGVTQNVLYENQKLIANQFNSAIGKIQDSLSSTASALGKLQDVVNQNAQALNTLVKQLSSNFGAISSVLNDILSRLDKVEAEVQIDRLITGRLQSLQTYVTQQLIRAAEIRASANLAATKMSECVLGQSKRVDFCGKGCHLMSFPQSAPHGVVFLHVTYVPAQEKNFTTAPAICHDGKAHFPREGVFVSNGTHWFVTQRNFYEPQIITTDNTFVSGNCDVVIGIVNNTVYDPLQPELDS

SEQ ID NO: 3283 - protein, 1147 aa, Artificial Sequence
  SARS-CoV-2/USA/WI-13/2020__EPI_ISL_417516 spike protein (1-1147)(I909C_Y1047C)
MFVFLVLLPLVSSQCVNLTTRTQLPPAYTNSFTRGVYYPDKVFRSSVLHSTQDLFLPFFSNVTWFHAIHVSGTNGTKRFDNPVLPFNDGVYFASTEKSNIIRGWIFGTTLDSKTQSLLIVNNATNVVIKVCEFQFCNDPFLGVYYHKNNKSWMESEFRVYSSANNCTFEYVSQPFLMDLEGKQGNFKNLREFVFKNIDGYFKIYSKHTPINLVRDLPQGFSALEPLVDLPIGINITRFQTLLALHRSYLTPGDSSSGWTAGAAAYYVGYLQPRTFLLKYNENGTITDAVDCALDPLSETKCTLKSFTVEKGIYQTSNFRVLPTESIVRFPNITNLCPFGEVFNATRFASVYAWNRKRISNCVADYSVLYNSASFSTFKCYGVSPTKLNDLCFTNVYADSFVIRGDEVRQIAPGQTGKIADYNYKLPDDFTGCVIAWNSNNLDSKVGGNYNYLYRLFRKSNLKPFERDISTEIYQAGSTPCNGVEGFNCYFPLQSYGFQPTNGVGYQPYRVVVLSFELLHAPATVCGPKKSTNLVKNKCVNFNFNGLTGTGVLTESNKKFLPFQQFGRDIADTTDAVRDPQTLEILDITPCSFGGVSVITPGTNTSNQVAVLYQGVNCTEVPVAIHADQLTPTWRVYSTGSNVFQTRAGCLIGAEHVNNSYECDIPIGAGICASYQTQTNSPRRARSVASQSIIAYTMSLGAENSVAYSNNSIAIPTNFTISVTTEILPVSMTKTSVDCTMYICGDSTECSNLLLQYGSFCTQLNRALTGIAVEQDKNTQEVFAQVKQIYKTPPIKDFGGFNFSQILPDPSKPSKRSFIEDLLFNKVTLADAGFIKQYGDCLGDIAARDLICAQKFNGLTVLPPLLTDEMIAQYTSALLAGTITSGWTFGAGAALQIPFAMQMAYRFNGCGVTQNVLYENQKLIANQFNSAIGKIQDSLSSTASALGKLQDVVNQNAQALNTLVKQLSSNFGAISSVLNDILSRLDKVEAEVQIDRLITGRLQSLQTYVTQQLIRAAEIRASANLAATKMSECVLGQSKRVDFCGKGCHLMSFPQSAPHGVVFLHVTYVPAQEKNFTTAPAICHDGKAHFPREGVFVSNGTHWFVTQRNFYEPQIITTDNTFVSGNCDVVIGIVNNTVYDPLQPELDS

SEQ ID NO: 3284 - protein, 1146 aa, Artificial Sequence
  SARS-CoV-2/India/1-27/2020__EPI_ISL_413522 spike protein (1-1146)(I908C_Y1046C)
MFVFLVLLPLVSSQCVNLTTRTQLPPAYTNSFTRGVYYPDKVFRSSVLHSTQDLFLPFFSNVTWFHAIHVSGTNGTKRFDNPVLPFNDGVYFASTEKSNIIRGWIFGTTLDSKTQSLLIVNNATNVVIKVCEFQFCNDPFLGVYHKNNKSWMESEFRVYSSANNCTFEYVSQPFLMDLEGKQGNFKNLREFVFKNIDGYFKIYSKHTPINLVRDLPQGFSALEPLVDLPIGINITRFQTLLALHRSYLTPGDSSSGWTAGAAAYYVGYLQPRTFLLKYNENGTITDAVDCALDPLSETKCTLKSFTVEKGIYQTSNFRVQPTESIVRFPNITNLCPFGEVFNATRFASVYAWNRKRISNCVADYSVLYNSASFSTFKCYGVSPTKLNDLCFTNVYADSFVIRGDEVIQIAPGQTGKIADYNYKLPDDFTGCVIAWNSNNLDSKVGGNYNYLYRLFRKSNLKPFERDISTEIYQAGSTPCNGVEGFNCYFPLQSYGFQPTNGVGYQPYRVVVLSFELLHAPATVCGPKKSTNLVKNKCVNFNFNGLTGTGVLTESNKKFLPFQQFGRDIADTTDAVRDPQTLEILDITPCSFGGVSVITPGTNTSNQVAVLYQDVNCTEVPVAIHADQLTPTWRVYSTGSNVFQTRAGCLIGAEHVNNSYECDIPIGAGICASYQTQTNSPRRARSVASQSIIAYTMSLGAENSVAYSNNSIAIPTNFTISVTTEILPVSMTKTSVDCTMYICGDSTECSNLLLQYGSFCTQLNRALTGIAVEQDKNTQEVFAQVKQIYKTPPIKDFGGFNFSQILPDPSKPSKRSFIEDLLFNKVTLADAGFIKQYGDCLGDIAARDLICAQKFNGLTVLPPLLTDEMIAQYTSALLAGTITSGWTFGAGAALQIPFAMQMAYRFNGCGVTQNVLYENQKLIANQFNSAIGKIQDSLSSTASALGKLQDVVNQNAQALNTLVKQLSSNFGAISSVLNDILSRLDKVEAEVQIDRLITGRLQSLQTYVTQQLIRAAEIRASANLAATKMSECVLGQSKRVDFCGKGCHLMSFPQSAPHGVVFLHVTYVPAQEKNFTTAPAICHDGKAHFPREGVFVSNGTHWFVTQRNFYEPQIITTDNTFVSGNCDVVIGIVNNTVYDPLQPELDS

SEQ ID NO: 3285 - protein, 1141 aa, Artificial Sequence
  SARS-CoV-2/pangolin/Guangxi/P4L/2017__EPI_ISL_410538 spike protein (1-1141)(I903C_Y1041C)
MFVFLFVLPLVSSQCVNLTTRTGIPPGYTNSSTRGVYYPDKVFRSSILHLTQDLFLPFFSNVTWFNTINYQGGFKKFDNPVLPFNDGVYFASTEKSNIIRGWIFGTTLDARTQSLLIVNNATNVVIKVCEFQFCTDPFLGVYYHNNNKTWVENEFRVYSSANNCTFEYISQPFLMDLEGKQGNFKNLREFVFKNVDGYFKIYSKHTPIDLVRDLPRGFAALEPLVDLPIGINITRFQTLLALHRSYLTPGNLESGWTTGAAAYYVGYLQQRTFLLSYNQNGTITDAVDCSLDPLSETKCTLKSLTVEKGIYQTSNFRVQPTISIVRFPNITNLCPFGEVFNASKFASVYAWNRKRISNCVADYSVLYNSTSFSTFKCYGVSPTKLNDLCFTNVYADSFVVKGDEVRQIAPGQTGVIADYNYKLPDDFTGCVIAWNSVKQDALTGGNYGYLYRLFRKSKLKPFERDISTEIYQAGSTPCNGQVGLNCYYPLERYGFHPTTGVNYQPFRVVVLSFELLNGPATVCGPKLSTTLVKDKCVNFNFNGLTGTGVLTTSKKQFLPFQQFGRDISDTTDAVRDPQTLEILDITPCSFGGVSVITPGTNTSNQVAVLYQDVNCTEVPMAIHAEQLTPAWRVYSAGANVFQTRAGCLVGAEHVNNSYECDIPVGAGICASYHSMSSLRSVNQRSIIAYTMSLGAENSVAYSNNSIAIPTNFTISVTTEILPVSMTKTSVDCTMYICGDSIECSNLLLQYGSFCTQLNRALTGIAVEQDKNTQEVFAQVKQIYKTPPIKDFGGFNFSQILPDPSKPSKRSFIEDLLFNKVTLADAGFIKQYGDCLGDIAARDLICAQKFNGLTVLPPLLTDEMIAQYTSALLAGTITSGWTFGAGAALQIPFAMQMAYRFNGCGVTQNVLYENQKLIANQFNSAIGKIQDSLSSTASALGKLQDVVNQNAQALNTLVKQLSSNFGAISSVLNDILSRLDKVEAEVQIDRLITGRLQSLQTYVTQQLIRAAEIRASANLAATKMSECVLGQSKRVDFCGKGCHLMSFPQSAPHGVVFLHVTYVPAQEKNFTTAPAICHEGKAHFPREGVFVSNGTHWFITQRNFYEPQIITTDNTFVSGSCDVVIGIVNNTVYDPLQPELDS

SEQ ID NO: 3286 - protein, 1141 aa, Artificial Sequence
  SARS-CoV-2/pangolin/Guangxi/P5L/2017__EPI_ISL_410540 spike protein (1-1141)(I903C_Y1041C)
MFVFLFVLPLVSSQCVNLTTRTGIPPGYTNSSTRGVYYPDKVFRSSILHLTQDLFLPFFSNVTWFNTINYQGGFKKFDNPVLPFNDGVYFASTEKSNIIRGWIFGTTLDARTQSLLIVNNATNVVIKVCEFQFCTDPFLGVYYHNNNKTWVENEFRVYSSANNCTFEYISQPFLMDLEGKQGNFKNLREFVFKNVDGYFKIYSKHTPIDLVRDLPRGFAALEPLVDLPIGINITRFQTLLALHRSYLTPGKLESGWTTGAAAYYVGYLQQRTFLLSYNQNGTITDAVDCSLDPLSETKCTLKSLTVEKGIYQTSNFRVQPTISIVRFPNITNLCPFGEVFNASKFASVYAWNRKRISNCVADYSVLYNSTSFSTFKCYGVSPTKLNDLCFTNVYADSFVVKGDEVRQIAPGQTGVIADYNYKLPDDFTGCVIAWNSVKQDALTGGNYGYLYRLFRKSKLKPFERDISTEIYQAGSTPCNGQVGLNCYYPLERYGFHPTTGVNYQPFRVVVLSFELLNGPATVCGPKLSTTLVKDKCVNFNFNGLTGTGVLTTSKKQFLPFQQFGRDISDTTDAVRDPQTLEILDITPCSFGGVSVITPGTNTSNQVAVLYQDVNCTEVPMAIHAEQLTPAWRVYSAGANVFQTRAGCLVGAEHVNNSYECDIPVGAGICASYHSMSSFRSVNQRSIIAYTMSLGAENSVAYSNNSIAIPTNFTISVTTEILPVSMTKTSVDCTMYICGDSIECSNLLLQYGSFCTQLNRALTGIAVEQDKNTQEVFAQVKQIYKTPPIKDFGGFNFSQILPDPSKPSKRSFIEDLLFNKVTLADAGFIKQYGDCLGDIAARDLICAQKFNGLTVLPPLLTDEMIAQYTSALLAGTITSGWTFGAGAALQIPFAMQMAYRFNGCGVTQNVLYENQKLIANQFNSAIGKIQDSLSSTASALGKLQDVVNQNAQALNTLVKQLSSNFGAISSVLNDILSRLDKVEAEVQIDRLITGRLQSLQTYVTQQLIRAAEIRASANLAATKMSECVLGQSKRVDFCGKGCHLMSFPQSAPHGVVFLHVTYVPAQEKNFTTAPAICHEGKAHFPREGVFVSNGTHWFITQRNFYEPQIITTDNTFVSGSCDVVIGIVNNTVYDPLQPELDS

SEQ ID NO: 3287 - protein, 1141 aa, Artificial Sequence
  SARS-CoV-2/pangolin/Guangxi/P5E/2017__EPI_ISL_410541 spike protein (1-1141)(I903C_Y1041C)
MFVFLFVLPLVSSQCVNLTTRTGIPPGYTNSSTRGVYYPDKVFRSSILHLTQDLFLPFFSNVTWFNTITYQGGSKKFDNPVLPFNDGVYFASTEKSNIIRGWIFGTTLDARTQSLLIVNNATNVVIKVCEFQFCTDPFLGVYYHNNNKTWVENEFRVYSSANNCTFEYISQPFLMDLEGKQGNFKNLREFVFKNVDGYFKIYSKHTPIDLVRDLPRGFAALEPLVDLPIGINITRFQTLLALHRSYLTPGKLESGWTTGAAAYYVGYLQQRTFLLSYNQNGTITDAVDCSLDPLSETKCTLKSLTVEKGIYQTSNFRVQPTISIVRFPNITNLCPFGEVFNASKFASVYAWNRKRISNCVADYSVLYNSTSFSTFKCYGVSPTKLNDLCFTNVYADSFVVKGDEVRQIAPGQTGVIADYNYKLPDDFTGCVIAWNSVKQDALTGDNYGYLYRLFRKSKLKPFERDISTEIYQAGSTPCNGQVGLNCYYPLERYGFHPTTGVNYQPFRVVVLSFELLNGPATVCGPKLSTTLVKDKCVNFNFNGLTGTGVLTTSKKQFLPFQQFGRDISDTTDAVRDPQTLEILDITPCSFGGVSVITPGTNTSNQVAVLYQDVNCTEVPMAIHAEQLTPAWRVYSAGANVFQTRAGCLVGAEHVNNSYECDIPVGAGICASYHSMSSFRSVNQRSIIAYTMSLGAENSVAYSNNSIAIPTNFTISVTTEILPVSMTKTSVDCTMYICGDSIECSNLLLQYGSFCTQLNRALTGIAVEQDKNTQEVFAQVKQIYKTPPIKDFGGFNFSQILPDPSKPSKRSFIEDLLFNKVTLADAGFIKQYGDCLGDIAARDLICAQKFNGLTVLPPLLTDEMIAQYTSALLAGTITSGWTFGAGAALQIPFAMQMAYRFNGCGVTQNVLYENQKLIANQFNSAIGKIQDSLSSTASALGKLQDVVNQNAQALNTLVKQLSSNFGAISSVLNDILSRLDKVEAEVQIDRLITGRLQSLQTYVTQQLIRAAEIRASANLAATKMSECVLGQSKRVDFCGKGCHLMSFPQSAPHGVVFLHVTYVPAQEKNFTTAPAICHEGKAHFPREGVFVSNGTHWFITQRNFYEPQIITTDNTFVSGSCDVVIGIVNNTVYDPLQPELDS

SEQ ID NO: 3288 - protein, 1139 aa, Artificial Sequence
  SARS-CoV-2/pangolin/Guangxi/P1E/2017__EPI_ISL_410539 spike protein (1-1139)(I901C_Y1039C)
MFVFLFVLPLVSSQCVNLTTRTGIQPGYTNSSTRGVYYPDKVFRSSILHLTQDLFLPFFSNVTWFNTINYQGGFKKFDNPVLPFNDGVYFASTEKSNIIRGWIFGTTLDARTQSLLIVNNATNVVIKVCEFQFCTDPFLGVYYHNNNKTWVENEFRVYSSANNCTFEYISQPFLMDLEGKQGNFKNLREFVFKNVDGYFKIYSKHTPIDLVRDLPRGFAALEPLVDLPIGINITRFQTLLALHRSYLTPGKLESGWTTGAAAYYVGYLQQRTFLLSYNQNGTITDAVDCSLDPLSETKCTLKSLTVEKGIYQTSNFRVQPTISIVRFPNITNLCPFGEVFNASKFASVYAWNRKRISNCVADYSVLYNSTSFSTFKCYGVSPTKLNDLCFTNVYADSFVVKGDEVRQIAPGQTGVIADYNYKLPDDFTGCVIAWNSVKQDALTGGNYLYRLFRKSKLKPFERDISTEIYQAGSTPCNGQVGLNCYYPLERYGFHPTTGVNYQPFRVVVLSFELLNGPATVCGPKLSTTLVKDKCVNFNFNGLTGTGVLTTSKKQFLPFQQFGRDISDTTDAVRDPQTLEILDITPCSFGGVSVITPGTNTSNQVAVLYQDVNCTEVPMAIHAEQLTPAWRVYSAGANVFQTRAGCLVGAEHVNNSYECDIPVGAGICASYHSMSSLRSVNQRSIIAYTMSLGAENSVAYSNNSIAIPTNFTISVTTEILPVSMTKTSVDCTMYICGDSIECSNLLLQYGSFCTQLNRALTGIAVEQDKNTQEVFAQVKQIYKTPPIKDFGGFNFSQILPDPSKPSKRSFIEDLLFNKVTLADAGFIKQYGDCLGDIAARDLICAQKFNGLTVLPPLLTDEMIAQYTSALLAGTITSGWTFGAGAALQIPFAMQMAYRFNGCGVTQNVLYENQKLIANQFNSAIGKIQDSLSSTASALGKLQDVVNQNAQALNTLVKQLSSNFGAISSVLNDILSRLDKVEAEVQIDRLITGRLQSLQTYVTQQLIRAAEIRASANLAATKMSECVLGQSKRVDFCGKGCHLMSFPQSAPHGVVFLHVTYVPAQEKNFTTAPAICHEGKAHFPREGVFVSNGTHWFITQRNFYEPQIITTDNTFVSGSCDVVIGIVNNTVYDPLQPELDS

SEQ ID NO: 3289 - protein, 1147 aa, Artificial Sequence
  SARS-CoV-2/Wuhan/WIV05/2019__EPI_ISL_402128 spike protein (1-1147)(Q965C_S1003C)
MFVFLVLLPLVSSQCVNLTTRTQLPPAYTNSFTRGVYYPDKVFRSSVLHSTQDLFLPFFSNVTWFHAIHVSGTNGTKRFDNPVLPFNDGVYFASTEKSNIIRGWIFGTTLDSKTQSLLIVNNATNVVIKVCEFQFCNDPFLGVYYHKNNKSWMESEFRVYSSANNCTFEYVSQPFLMDLEGKQGNFKNLREFVFKNIDGYFKIYSKHTPINLVRDLPQGFSALEPLVDLPIGINITRFQTLLALHRSYLTPGDSSSGWTAGAAAYYVGYLQPRTFLLKYNENGTITDAVDCALDPLSETKCTLKSFTVEKGIYQTSNFRVQPTESIVRFPNITNLCPFGEVFNATRFASVYAWNRKRISNCVADYSVLYNSASFSTFKCYGVSPTKLNDLCFTNVYADSFVIRGDEVRQIAPGQTGKIADYNYKLPDDFTGCVIAWNSNNLDSKVGGNYNYLYRLFRKSNLKPFERDISTEIYQAGSTPCNGVEGFNCYFPLQSYGFQPTNGVGYQPYRVVVLSFELLHAPATVCGPKKSTNLVKNKCVNFNFNGLTGTGVLTESNKKFLPFQQFGRDIADTTDAVRDPQTLEILDITPCSFGGVSVITPGTNTSNQVAVLYQDVNCTEVPVAIHADQLTPTWRVYSTGSNVFQTRAGCLIGAEHVNNSYECDIPIGAGICASYQTQTNSPRRARSVASQSIIAYTMSLGAENSVAYSNNSIAIPTNFTISVTTEILPVSMTKTSVDCTMYICGDSTECSNLLLQYGSFCTQLNRALTGIAVEQDKNTQEVFAQVKQIYKTPPIKDFGGFNFSQILPDPSKPSKRSFIEDLLFNKVTLADAGFIKQYGDCLGDIAARDLICAQKFNGLTVLPPLLTDEMIAQYTSALLAGTITSGWTFGAGAALQIPFAMQMAYRFNGIGVTQNVLYENQKLIANQFNSAIGKIQDSLSSTASALGKLQDVVNQNAQALNTLVKCLSSNFGAISSVLNDILSRLDKVEAEVQIDRLITGRLQCLQTYVTQQLIRAAEIRASANLAATKMSECVLGQSKRVDFCGKGYHLMSFPQSAPHGVVFLHVTYVPAQEKNFTTAPAICHDGKAHFPREGVFVSNGTHWFVTQRNFYEPQIITTDNTFVSGNCDVVIGIVNNTVYDPLQPELDS

SEQ ID NO: 3290 - protein, 1143 aa, Artificial Sequence
  SARS-CoV-2/bat/Yunnan/RaTG13/2013__EPI_ISL_402131 spike protein (1-1143)(Q961C_S999C)
MFVFLVLLPLVSSQCVNLTTRTQLPPAYTNSSTRGVYYPDKVFRSSVLHLTQDLFLPFFSNVTWFHAIHVSGTNGIKRFDNPVLPFNDGVYFASTEKSNIIRGWIFGTTLDSKTQSLLIVNNATNVVIKVCEFQFCNDPFLGVYYHKNNKSWMESEFRVYSSANNCTFEYVSQPFLMDLEGKQGNFKNLREFVFKNIDGYFKIYSKHTPINLVRDLPPGFSALEPLVDLPIGINITRFQTLLALHRSYLTPGDSSSGWTAGAAAYYVGYLQPRTFLLKYNENGTITDAVDCALDPLSETKCTLKSFTVEKGIYQTSNFRVQPTDSIVRFPNITNLCPFGEVFNATTFASVYAWNRKRISNCVADYSVLYNSTSFSTFKCYGVSPTKLNDLCFTNVYADSFVITGDEVRQIAPGQTGKIADYNYKLPDDFTGCVIAWNSKHIDAKEGGNFNYLYRLFRKANLKPFERDISTEIYQAGSKPCNGQTGLNCYYPLYRYGFYPTDGVGHQPYRVVVLSFELLNAPATVCGPKKSTNLVKNKCVNFNFNGLTGTGVLTESNKKFLPFQQFGRDIADTTDAVRDPQTLEILDITPCSFGGVSVITPGTNASNQVAVLYQDVNCTEVPVAIHADQLTPTWRVYSTGSNVFQTRAGCLIGAEHVNNSYECDIPIGAGICASYQTQTNSRSVASQSIIAYTMSLGAENSVAYSNNSIAIPTNFTISVTTEILPVSMTKTSVDCTMYICGDSTECSNLLLQYGSFCTQLNRALTGIAVEQDKNTQEVFAQVKQIYKTPPIKDFGGFNFSQILPDPSKPSKRSFIEDLLFNKVTLADAGFIKQYGDCLGDIAARDLICAQKFNGLTVLPPLLTDEMIAQYTSALLAGTITSGWTFGAGAALQIPFAMQMAYRFNGIGVTQNVLYENQKLIANQFNSAIGKIQDSLSSTASALGKLQDVVNQNAQALNTLVKCLSSNFGAISSVLNDILSRLDKVEAEVQIDRLITGRLQCLQTYVTQQLIRAAEIRASANLAATKMSECVLGQSKRVDFCGKGYHLMSFPQSAPHGVVFLHVTYVPAQEKNFTTAPAICHDGKAHFPREGVFVSNGTHWFVTQRNFYEPQIITTDNTFVSGSCDVVIGIVNNTVYDPLQPELDS

SEQ ID NO: 3291 - protein, 1147 aa, Artificial Sequence
  SARS-CoV-2/Wuhan/HBCDC-HB-01/2019__EPI_ISL_402132 spike protein (1-1147)(Q965C_S1003C)
MFVFLVLLPLVSSQCVNLTTRTQLPPAYTNSITRGVYYPDKVFRSSVLHSTQDLFLPFFSNVTWFHAIHVSGTNGTKRFDNPVLPFNDGVYFASTEKSNIIRGWIFGTTLDSKTQSLLIVNNATNVVIKVCEFQFCNDPFLGVYYHKNNKSWMESEFRVYSSANNCTFEYVSQPFLMDLEGKQGNFKNLREFVFKNIDGYFKIYSKHTPINLVRDLPQGFSALEPLVDLPIGINITRFQTLLALHRSYLTPGDSSSGWTAGAAAYYVGYLQPRTFLLKYNENGTITDAVDCALDPLSETKCTLKSFTVEKGIYQTSNFRVQPTESIVRFPNITNLCPFGEVFNATRFASVYAWNRKRISNCVADYSVLYNSASFSTFKCYGVSPTKLNDLCFTNVYADSFVIRGDEVRQIAPGQTGKIADYNYKLPDDFTGCVIAWNSNNLDSKVGGNYNYLYRLFRKSNLKPFERDISTEIYQAGSTPCNGVEGFNCYFPLQSYGFQPTNGVGYQPYRVVVLSFELLHAPATVCGPKKSTNLVKNKCVNFNFNGLTGTGVLTESNKKFLPFQQFGRDIADTTDAVRDPQTLEILDITPCSFGGVSVITPGTNTSNQVAVLYQDVNCTEVPVAIHADQLTPTWRVYSTGSNVFQTRAGCLIGAEHVNNSYECDIPIGAGICASYQTQTNSPRRARSVASQSIIAYTMSLGAENSVAYSNNSIAIPTNFTISVTTEILPVSMTKTSVDCTMYICGDSTECSNLLLQYGSFCTQLNRALTGIAVEQDKNTQEVFAQVKQIYKTPPIKDFGGFNFSQILPDPSKPSKRSFIEDLLFNKVTLADAGFIKQYGDCLGDIAARDLICAQKFNGLTVLPPLLTDEMIAQYTSALLAGTITSGWTFGAGAALQIPFAMQMAYRFNGIGVTQNVLYENQKLIANQFNSAIGKIQDSLSSTASALGKLQDVVNQNAQALNTLVKCLSSNFGAISSVLNDILSRLDKVEAEVQIDRLITGRLQCLQTYVTQQLIRAAEIRASANLAATKMSECVLGQSKRVDFCGKGYHLMSFPQSAPHGVVFLHVTYVPAQEKNFTTAPAICHDGKAHFPREGVFVSNGTHWFVTQRNFYEPQIITTDNTFVSGNCDVVIGIVNNTVYDPLQPELDS

SEQ ID NO: 3292 - protein, 1147 aa, Artificial Sequence
  SARS-CoV-2/Guangdong/20SF028/2020__EPI_ISL_403936 spike protein (1-1147)(Q965C_S1003C)
MFVFLVLLPLVSSQCVNLTTRTQLPPAYTNSFTRGVYYPDKVFRSSVLYSTQDLFLPFFSNVTWFHAIHVSGTNGTKRFDNPVLPFNDGVYFASTEKSNIIRGWIFGTTLDSKTQSLLIVNNATNVVIKVCEFQFCNDPFLGVYYHKNNKSWMESEFRVYSSANNCTFEYVSQPFLMDLEGKQGNFKNLREFVFKNIDGYFKIYSKHTPINLVRDLPQGFSALEPLVDLPIGINITRFQTLLALHRSYLTPGDSSSGWTAGAAAYYVGYLQPRTFLLKYNENGTITDAVDCALDPLSETKCTLKSFTVEKGIYQTSNFRVQPTESIVRFPNITNLCPFGEVFNATRFASVYAWNRKRISNCVADYSVLYNSASFSTFKCYGVSPTKLNDLCFTNVYADSFVIRGDEVRQIAPGQTGKIADYNYKLPDDFTGCVIAWNSNNLDSKVGGNYNYLYRLFRKSNLKPFERDISTEIYQAGSTPCNGVEGFNCYFPLQSYGFQPTNGVGYQPYRVVVLSFELLHAPATVCGPKKSTNLVKNKCVNFNFNGLTGTGVLTESNKKFLPFQQFGRDIADTTDAVRDPQTLEILDITPCSFGGVSVITPGTNTSNQVAVLYQDVNCTEVPVAIHADQLTPTWRVYSTGSNVFQTRAGCLIGAEHVNNSYECDIPIGAGICASYQTQTNSPRRARSVASQSIIAYTMSLGAENSVAYSNNSIAIPTNFTISVTTEILPVSMTKTSVDCTMYICGDSTECSNLLLQYGSFCTQLNRALTGIAVEQDKNTQEVFAQVKQIYKTPPIKDFGGFNFSQILPDPSKPSKRSFIEDLLFNKVTLADAGFIKQYGDCLGDIAARDLICAQKFNGLTVLPPLLTDEMIAQYTSALLAGTITSGWTFGAGAALQIPFAMQMAYRFNGIGVTQNVLYENQKLIANQFNSAIGKIQDSLSSTASALGKLQDVVNQNAQALNTLVKCLSSNFGAISSVLNDILSRLDKVEAEVQIDRLITGRLQCLQTYVTQQLIRAAEIRASANLAATKMSECVLGQSKRVDFCGKGYHLMSFPQSAPHGVVFLHVTYVPAQEKNFTTAPAICHDGKAHFPREGVFVSNGTHWFVTQRNFYEPQIITTDNTFVSGNCDVVIGIVNNTVYDPLQPELDS

SEQ ID NO: 3293 - protein, 1147 aa, Artificial Sequence
  SARS-CoV-2/Shenzhen/SZTH-001/2020__EPI_ISL_406592 spike protein (1-1147)(Q965C_S1003C)
MFVFLVLLPLVSSQCVNLTTRTQLPPAYTNSFTRGVYYPDKVFRSSVLHSTQDLFLPFFSNVTWFHAIHVSGTNGTKRFDNPVLPFNDGVYFASTEKSNIIRGWIFGTTLDSKTQSLLIVNNATNVVIKVCEFQFCNDPFLGVYYHKNNKSWMESEFRVYSSANNCTFEYVSQPFLMDLEGKQGNFKNLREFVFKNIDGYFKIYSKHTPINLVRDLPQGFSALEPLVDLPIGINITRFQTLLALHRSYLTPGDSSSGWTAGAAAYYVGYLQPRTFLLKYNENGTITDAVDCALDPLSETKCTLKSFTVEKGIYQTSNFRVQPTESIVRFPNITNLCPFGEVFNATRFASVYAWNRKRISNCVADYSVLYNSASFSTFKCYGVSPTKLNDLCFTNVYADSFVIRGDEVRQIAPGQTGKIADYNYKLPDDFTGCVIAWNSNNLDSKVGGNYNYLYRLFRKSNLKPFERDISTEIYQAGSTPCNGVEGFNCYFPLQSYGFQPTNGVGYQPYRVVVLSFELLHAPATVCGPKKSTNLVKNKCVNFNFNGLTGTGVLTESNKKFLPFQQFGRDIADTTDAVRDPQTLEILDITPCSFGGVSVITPGTNTSNQVAVLYQDVNCTEVPVAIHADQLTPTWRVYSTGSNVFQTRAGCLIGAEHVNNSYECDIPIGAGICASYQTQTNSPRRARSVASQSIIAYTMSLGAENSVAYSNNSIAIPTNFTISVTTEILPVSMTKTSVDCTMYICGDSTECSNLLLQYGSFCTQLNRALTGIAVEQDKNTQEVFAQVKQIYKTPPIKDFGGFNFSQILPDPSKPSKRSFIEDLLFNKVTLADAGFIKQYGDCLGDIAARDLICAQKFNGLTVLPPLLTDEMIAQYTSALLAGTITSGWTFGAGAALQIPFAMQMAYRFNGIGVTQNVLYENQKLIANQFNSAIGKIQDSLSSTASALGKLQDVVNQNAQALNTLVKCLSSNFGAISSVLNDILSRLDKVEAEVQIDRLITGRLQCLQTYVTQQLIRAAEIRASANLAATKMSECVLGQSKRVDFCGKGYHLMSFPQSAPHGVVFLHVTYVPAQEKNFTTAPAICHDGKAHFPREGVFVSNGTHWFVTQRNFYEPQIITTDNTFVSGNCDVLIGIVNNTVYDPLQPELDS

SEQ ID NO: 3294 - protein, 1147 aa, Artificial Sequence
  SARS-CoV-2/Shenzhen/SZTH-004/2020__EPI_ISL_406595 spike protein (1-1147)(Q965C_S1003C)
MFVFLVLLPLVSSQCVNLTTRTQLPPAYTNSFTRGVYYPDKVFRSSVLHSTQDLFLPFFSNVTWFHAIHVSGTNGTKRFDNPVLPFNDGVYFASTEKSNIIRGWIFGTTLDSKTQSLLIVNNATNVVIKVCEFQFCNDPFLGVYYHKNNKSWMESEFRVYSSANNCTFEYVSQPFLMDLEGKQGNFKNLREFVFKNIDGYFKIYSKHTPINLVRDLPQGFSALEPLVDLPIGINITRFQTLLALHRSYLTPGDSSSGWTAGAAAYYVGYLQPRTFLLKYNENGTITDAVDCALDPLSETKCTLKSFTVEKGIYQTSNFRVQPTESIVRFPNITNLCPFGEVFNATRFASVYAWDRKRISNCVAYYSVLYNSASFSTFKCYGVSPTKLNDLCFTNVYADSFVIRGDEVRQIAPGQTGKIADYNYKLPDDFTGCVIAWNSNNLDSKVGGNYNYLYRLFRKSNLKPFERDISTEIYQAGSTPCNGVEGFNCYFPLQSYGFQPTNGVGYQPYRVVVLSFELLHAPATVCGPKKSTNLVKNKCVNFNFNGLTGTGVLTESNKKFLPFQQFGRDIADTTDAVRDPQTLEILDITPCSFGGVSVITPGTNTSNQVAVLYQDVNCTEVPVAIHADQLTPTWRVYSTGSNVFQTRAGCLIGAEHVNNSYECDIPIGAGICASYQTQTNSPRRARSVASQSIIAYTMSLGAENSVAYSNNSIAIPTNFTISVTTEILPVSMTKTSVDCTMYICGDSTECSNLLLQYGSFCTQLNRALTGIAVEQDKNTQEVFAQVKQIYKTPPIKDFGGFNFSQILPDPSKPSKRSFIEDLLFNKVTLADAGFIKQYGDCLGDIAARDLICAQKFNGLTVLPPLLTDEMIAQYTSALLAGTITSGWTFGAGAALQIPFAMQMAYRFNGIGVTQNVLYENQKLIANQFNSAIGKIQDSLSSTASALGKLQDVVNQNAQALNTLVKCLSSNFGAISSVLNDILSRLDKVEAEVQIDRLITGRLQCLQTYVTQQLIRAAEIRASANLAATKMSECVLGQSKRVDFCGKGYHLMSFPQSAPHGVVFLHVTYVPAQEKNFTTAPAICHDGKAHFPREGVFVSNGTHWFVTQRNFYEPQIITTDNTFVSGNCDVVIGIVNNTVYDPLQPELDS

SEQ ID NO: 3295 - protein, 1147 aa, Artificial Sequence
  SARS-CoV-2/France/IDF0372/2020__EPI_ISL_406596 spike protein (1-1147)(Q965C_S1003C)
MFVFLVLLPLVSSQCVNLTTRTQLPPAYTNSFTRGVYYPDKVFRSSVLHSTQDLFLPFFSNVTWFHAIHVSGTNGTKRFDNPVLPFNDGVYFASTEKSNIIRGWIFGTTLDSKTQSLLIVNNATNVVIKVCEFQFCNDPFLGVYYHKNNKSWMESEFRVYSSANNCTFEYVSQPFLMDLEGKQGNFKNLREFVFKNIDGYFKIYSKHTPINLVRDLPQGFSALEPLVDLPIGINITRFQTLLALHRSYLTPGDSSSGWTAGAAAYYVGYLQPRTFLLKYNENGTITDAVDCALDPLSETKCTLKSFTVEKGIYQTSNFRVQPTESIVRFPNITNLCPFGEVFNATRFASVYAWNRKRISNCVADYSFLYNSASFSTFKCYGVSPTKLNDLCFTNVYADSFVIRGDEVRQIAPGQTGKIADYNYKLPDDFTGCVIAWNSNNLDSKVGGNYNYLYRLFRKSNLKPFERDISTEIYQAGSTPCNGVEGFNCYFPLQSYGFQPTNGVGYQPYRVVVLSFELLHAPATVCGPKKSTNLVKNKCVNFNFNGLTGTGVLTESNKKFLPFQQFGRDIADTTDAVRDPQTLEILDITPCSFGGVSVITPGTNTSNQVAVLYQDVNCTEVPVAIHADQLTPTWRVYSTGSNVFQTRAGCLIGAEHVNNSYECDIPIGAGICASYQTQTNSPRRARSVASQSIIAYTMSLGAENSVAYSNNSIAIPTNFTISVTTEILPVSMTKTSVDCTMYICGDSTECSNLLLQYGSFCTQLNRALTGIAVEQDKNTQEVFAQVKQIYKTPPIKDFGGFNFSQILPDPSKPSKRSFIEDLLFNKVTLADAGFIKQYGDCLGDIAARDLICAQKFNGLTVLPPLLTDEMIAQYTSALLAGTITSGWTFGAGAALQIPFAMQMAYRFNGIGVTQNVLYENQKLIANQFNSAIGKIQDSLSSTASALGKLQDVVNQNAQALNTLVKCLSSNFGAISSVLNDILSRLDKVEAEVQIDRLITGRLQCLQTYVTQQLIRAAEIRASANLAATKMSECVLGQSKRVDFCGKGYHLMSFPQSAPHGVVFLHVTYVPAQEKNFTTAPAICHDGKAHFPREGVFVSNGTHWFVTQRNFYEPQIITTDNTFVSGNCDVVIGIVNNTVYDPLQPELDS

SEQ ID NO: 3296 - protein, 1147 aa, Artificial Sequence
  SARS-CoV-2/Australia/VIC01/2020__EPI_ISL_406844 spike protein (1-1147)(Q965C_S1003C)
MFVFLVLLPLVSSQCVNLTTRTQLPPAYTNSFTRGVYYPDKVFRSSVLHSTQDLFLPFFSNVTWFHAIHVSGTNGTKRFDNPVLPFNDGVYFASTEKSNIIRGWIFGTTLDSKTQSLLIVNNATNVVIKVCEFQFCNDPFLGVYYHKNNKSWMESEFRVYSSANNCTFEYVSQPFLMDLEGKQGNFKNLREFVFKNIDGYFKIYSKHTPINLVRDLPQGFSALEPLVDLPIGINITRFQTLLALHRRYLTPGDSSSGWTAGAAAYYVGYLQPRTFLLKYNENGTITDAVDCALDPLSETKCTLKSFTVEKGIYQTSNFRVQPTESIVRFPNITNLCPFGEVFNATRFASVYAWNRKRISNCVADYSVLYNSASFSTFKCYGVSPTKLNDLCFTNVYADSFVIRGDEVRQIAPGQTGKIADYNYKLPDDFTGCVIAWNSNNLDSKVGGNYNYLYRLFRKSNLKPFERDISTEIYQAGSTPCNGVEGFNCYFPLQSYGFQPTNGVGYQPYRVVVLSFELLHAPATVCGPKKSTNLVKNKCVNFNFNGLTGTGVLTESNKKFLPFQQFGRDIADTTDAVRDPQTLEILDITPCSFGGVSVITPGTNTSNQVAVLYQDVNCTEVPVAIHADQLTPTWRVYSTGSNVFQTRAGCLIGAEHVNNSYECDIPIGAGICASYQTQTNSPRRARSVASQSIIAYTMSLGAENSVAYSNNSIAIPTNFTISVTTEILPVSMTKTSVDCTMYICGDSTECSNLLLQYGSFCTQLNRALTGIAVEQDKNTQEVFAQVKQIYKTPPIKDFGGFNFSQILPDPSKPSKRSFIEDLLFNKVTLADAGFIKQYGDCLGDIAARDLICAQKFNGLTVLPPLLTDEMIAQYTSALLAGTITSGWTFGAGAALQIPFAMQMAYRFNGIGVTQNVLYENQKLIANQFNSAIGKIQDSLSSTASALGKLQDVVNQNAQALNTLVKCLSSNFGAISSVLNDILSRLDKVEAEVQIDRLITGRLQCLQTYVTQQLIRAAEIRASANLAATKMSECVLGQSKRVDFCGKGYHLMSFPQSAPHGVVFLHVTYVPAQEKNFTTAPAICHDGKAHFPREGVFVSNGTHWFVTQRNFYEPQIITTDNTFVSGNCDVVIGIVNNTVYDPLQPELDS

SEQ ID NO: 3297 - protein, 1147 aa, Artificial Sequence
  SARS-CoV-2/Germany/BavPat1/2020__EPI_ISL_406862 spike protein (1-1147)(Q965C_S1003C)
MFVFLVLLPLVSSQCVNLTTRTQLPPAYTNSFTRGVYYPDKVFRSSVLHSTQDLFLPFFSNVTWFHAIHVSGTNGTKRFDNPVLPFNDGVYFASTEKSNIIRGWIFGTTLDSKTQSLLIVNNATNVVIKVCEFQFCNDPFLGVYYHKNNKSWMESEFRVYSSANNCTFEYVSQPFLMDLEGKQGNFKNLREFVFKNIDGYFKIYSKHTPINLVRDLPQGFSALEPLVDLPIGINITRFQTLLALHRSYLTPGDSSSGWTAGAAAYYVGYLQPRTFLLKYNENGTITDAVDCALDPLSETKCTLKSFTVEKGIYQTSNFRVQPTESIVRFPNITNLCPFGEVFNATRFASVYAWNRKRISNCVADYSVLYNSASFSTFKCYGVSPTKLNDLCFTNVYADSFVIRGDEVRQIAPGQTGKIADYNYKLPDDFTGCVIAWNSNNLDSKVGGNYNYLYRLFRKSNLKPFERDISTEIYQAGSTPCNGVEGFNCYFPLQSYGFQPTNGVGYQPYRVVVLSFELLHAPATVCGPKKSTNLVKNKCVNFNFNGLTGTGVLTESNKKFLPFQQFGRDIADTTDAVRDPQTLEILDITPCSFGGVSVITPGTNTSNQVAVLYQGVNCTEVPVAIHADQLTPTWRVYSTGSNVFQTRAGCLIGAEHVNNSYECDIPIGAGICASYQTQTNSPRRARSVASQSIIAYTMSLGAENSVAYSNNSIAIPTNFTISVTTEILPVSMTKTSVDCTMYICGDSTECSNLLLQYGSFCTQLNRALTGIAVEQDKNTQEVFAQVKQIYKTPPIKDFGGFNFSQILPDPSKPSKRSFIEDLLFNKVTLADAGFIKQYGDCLGDIAARDLICAQKFNGLTVLPPLLTDEMIAQYTSALLAGTITSGWTFGAGAALQIPFAMQMAYRFNGIGVTQNVLYENQKLIANQFNSAIGKIQDSLSSTASALGKLQDVVNQNAQALNTLVKCLSSNFGAISSVLNDILSRLDKVEAEVQIDRLITGRLQCLQTYVTQQLIRAAEIRASANLAATKMSECVLGQSKRVDFCGKGYHLMSFPQSAPHGVVFLHVTYVPAQEKNFTTAPAICHDGKAHFPREGVFVSNGTHWFVTQRNFYEPQIITTDNTFVSGNCDVVIGIVNNTVYDPLQPELDS

SEQ ID NO: 3298 - protein, 1147 aa, Artificial Sequence
  SARS-CoV-2/Wuhan/HBCDC-HB-02/2020__EPI_ISL_412978 spike protein (1-1147)(Q965C_S1003C)
MFVFLVLLPLVSSQCVNLTTRTQLPPAYTNSFTRGVYYPDKVFRSSVLHSTQDLFLPFFSNVTWFHAIHVSGTNGTKRFDNPVLPFNDGVYFASTEKSNIIRGWIFGTTLDSKTQSLLIVNNATNVVIKVCEFQFCNDPFLGVYYHKNNKSWMESEFRVYSSANNCTFEYVSQPFLMDLEGKQGNFKNLREFVFKNIDGYFKIYSKHTPINLVRDLPQGFSALEPLVDLPIGINITRFQTLLALHRSYLTPGDSSSGWTAGAAAYYVGYLQPRTFLLKYNENGTITDAVDCALDPLSETKCTLKSFTVEKGIYQTSNFRVQPTESIVRFPNITNLCPFGEVFNATRFASVYAWNRKRISNCVADYSVLYNSASFSTFKCYGVSPTKLNDLCFTNVYADSFVIRGDEVRQIAPGQTGKIADYNYKLPDDFTGCVIAWNSNNLDSKVGGNYNYLYRLFRKSNLKPFERDISTEIYQAGSTPCNGVEGFNCYFPLQSYGFQPTNGVGYQPYRVVVLSFELLHAPATVCGPKKSTNLVKNKCVNFNFNGLTGTGVLTESNKKFLPFQQFGRDIADTTDAVRDPQTLEILDITPCSFGGVSVITPGTNTSNQVAVLYQDVNCTEVPVAIHADQLTPTWRVYSTGSNVFQTRAGCLIGAEHVNNSYECDIPIGAGICASYQTQTNSPRRARSVASQSIIAYTMSLGAENSVAYSNNSIAIPTNFTISVTTEILPVSMTKTSVDCTMYICGDSTECSNFLLQYGSFCTQLNRALTGIAVEQDKNTQEVFAQVKQIYKTPPIKDFGGFNFSQILPDPSKPSKRSFIEDLLFNKVTLADAGFIKQYGDCLGDIAARDLICAQKFNGLTVLPPLLTDEMIAQYTSALLAGTITSGWTFGAGAALQIPFAMQMAYRFNGIGVTQNVLYENQKLIANQFNSAIGKIQDSLSSTASALGKLQDVVNQNAQALNTLVKCLSSNFGAISSVLNDILSRLDKVEAEVQIDRLITGRLQCLQTYVTQQLIRAAEIRASANLAATKMSECVLGQSKRVDFCGKGYHLMSFPQSAPHGVVFLHVTYVPAQEKNFTTAPAICHDGKAHFPREGVFVSNGTHWFVTQRNFYEPQIITTDNTFVSGNCDVVIGIVNNTVYDPLQPELDS

SEQ ID NO: 3299 - protein, 1147 aa, Artificial Sequence
  SARS-CoV-2/Australia/QLD02/2020__EPI_ISL_407896 spike protein (1-1147)(Q965C_S1003C)
MFVFLVLLPLVSSQCVNLTTRTQLPPAYTNSFTRGVYYPDKVFRSSVLHSTQDLFLPFFSNVTWFHAIHVSGTNGTKRFDNPVLPFNDGVYFASTEKSNIIRGWIFGTTLDSKTQSLLIVNNATNVVIKVCEFQFCNDPFLGVYYHKNNKSWMESEFRVYSSANNCTFEYVSQPFLMDLEGKQGNFKNLREFVFKNIDGYFKIYSKHTPINLVRDLPQGFSALEPLVDLPIGINITRFQTLLALHRSYLTPGDSSSGWTAGAAAYYVGYLQPRTFLLKYNENGTITDAVDCALDPLSETKCTLKSFTVEKGIYQTSNFRVQPTESIVRFPNITNLCPFGEVFNATRFASVYAWNRKRISNCVADYSVLYNSASFSTFKCYGVSPTKLNDLCFTNVYADSFVIRGDEVRQIAPGQTGKIADYNYKLPDDFTGCVIAWNSNNLDSKVGGNYNYLYRLFRKSNLKPFERDISTEIYQAGSTPCNGVEGFNCYFPLQSYGFQPTNGVGYQPYRVVVLSFELLHAPATVCGPKKSTNLVKNKCVNFNFNGLTGTGVLTESNKKFLPFQQFGRDIADTTDAVRDPQTLEILDITPCSFGGVSVITPGTNTSNQVAVLYQDVNCTEVPVAIHADQLTPTWRVYSTGSNVFQTRAGCLIGAEHVNNSYECDIPIGAGICASYQTQTNSPRRARSVASQSIIAYTMSLGAENSVAYSNNSIAIPTNFTISVTTEILPVSMTKTSVDCTMYICGDSTECSNLLLQYGSFCTQLNRALTGIAVEQDKNTQEVFAQVKQIYKTPPIKDFGGFNFSQILPDPSKPSKRSFIEDLLFNKVTLADAGFIKQYGDCLGDIAARDLICAQKFNGLTVLPPLLTDEMIAQYTSALLAGTITSGWTFGAGAALQIPFAMQMAYRFNGIGVTQNVLYENQKLIANQFNSAIGKIQDSLSSTASALGKLQDVVNQNAQALNTLVKCLSSNFGAISSVLNDILSRLDKVEAEVQIDRLITGRLQCLQTYVTQQLIRAAEIRASANLAATKMSECVLGQSKRVDFCGKGYHLMSFPQSAPHGVVFLHVTYVPAQEKNFTTAPAICHDGKAHFPREGVFVSNGTHWFVTQRNFYEPQIITTDNTFVSGNCDVVIGIVNNTVYDPLQLELDS

SEQ ID NO: 3300 - protein, 1147 aa, Artificial Sequence
  SARS-CoV-2/India/1-31/2020__EPI_ISL_413523 spike protein (1-1147)(Q965C_S1003C)
MFVFLVLLPLVSSQCVNLTTRTQLPPAYTNSFTRGVYYPDKVFRSSVLHSTQDLFLPFFSNVTWFHAIHVSGTNGTKRFDNPVLPFNDGVYFASTEKSNIIRGWIFGTTLDSKTQSLLIVNNATNVVIKVCEFQFCNDPFLGVYYHKNNKSWMESEFRVYSSANNCTFEYVSQPFLMDLEGKQGNFKNLREFVFKNIDGYFKIYSKHTPINLVRDLPQGFSALEPLVDLPIGINITRFQTLLALHRSYLTPGDSSSGWTAGAAAYYVGYLQPRTFLLKYNENGTITDAVDCALDPLSETKCTLKSFTVEKGIYQTSNFRVQPTESIVRFPNITNLCPFGEVFNATRFASVYAWNRKRISNCVADYSVLYNSASFSTFKCYGVSPTKLNDLCFTNVYADSFVIRGDEVRQIAPGQTGKIADYNYKLPDDFTGCVIAWNSNNLDSKVGGNYNYLYRLFRKSNLKPFERDISTEIYQAGSTPCNGVEGFNCYFPLQSYGFQPTNGVGYQPYRVVVLSFELLHAPATVCGPKKSTNLVKNKCVNFNFNGLTGTGVLTESNKKFLPFQQFGRDIADTTDAVRDPQTLEILDITPCSFGGVSVITPGTNTSNQVAVLYQDVNCTEVPVAIHADQLTPTWRVYSTGSNVFQTRAGCLIGAEHVNNSYECDIPIGAGICASYQTQTNSPRRARSVASQSIIAYTMSLGAENSVAYSNNSIAIPTNFTISVTTEILPVSMTKTSVDCTMYICGDSTECSNLLLQYGSFCTQLNRALTGIAVEQDKNTQEVFAQVKQIYKTPPIKDFGGFNFSQILPDPSKPSKRSFIEDLLFNKVTLADAGFIKQYGDCLGDIAARDLICAQKFNGLTVLPPLLTDEMIAQYTSALLAGTITSGWTFGAGAALQIPFAMQMAYRFNGIGVTQNVLYENQKLIANQFNSVIGKIQDSLSSTASALGKLQDVVNQNAQALNTLVKCLSSNFGAISSVLNDILSRLDKVEAEVQIDRLITGRLQCLQTYVTQQLIRAAEIRASANLAATKMSECVLGQSKRVDFCGKGYHLMSFPQSAPHGVVFLHVTYVPAQEKNFTTAPAICHDGKAHFPREGVFVSNGTHWFVTQRNFYEPQIITTDNTFVSGNCDVVIGIVNNTVYDPLQPELDS

SEQ ID NO: 3301 - protein, 1147 aa, Artificial Sequence
  SARS-CoV-2/Guangdong/GD2020087-P0008/2020__EPI_ISL_413863 spike protein (1-1147)(Q965C_S1003C)
MFVFLVLLPLVSSQCVNLTTRTQLPPAYTNSFTRGVYYPDKVFRSSVLHSTQDLFLPFFSNVTWFHAIHVSGTNGTKRFDNPVLPFNDGVYFASTEKSNIIRGWIFGTTLDSKTQSLLIVNNATNVVIKVCEFQFCNDPFLGVYYHKNNKSWMESEFRVYSSANNCTFEYVSQPFLMDLEGKQGNFKNLREFVFKNIDGYFKIYSKHTPINLVRDLPQGFSALEPLVDLPIGINITRFQTLLALHRSYLTPGDSSSGWTAGAAAYYVGYLQPRTFLLKYNENGTITDAVDCALDPLSETKCTLKSFTVEKGIYQTSNFRVQPTESIVRFPNITNLCPFGEVFNATRFASVYAWNRKRISNCVADYSVLYNSASFSTFKCYGVSPTKLNDLCFTNVYADSFVIRGDEVREIAPGQTGKIADYNYKLPDDFTGCVIAWNSNNLDSKVGGNYNYLYRLFRKSNLKPFERDISTEIYQAGSTPCNGVEGFNCYFPLQSYGFQPTNGVGYQPYRVVVLSFELLHAPATVCGPKKSTNLVKNKCVNFNFNGLTGTGVLTESNKKFLPFQQFGRDIADTTDAVRDPQTLEILDITPCSFGGVSVITPGTNTSNQVAVLYQDVNCTEVPVAIHADQLTPTWRVYSTGSNVFQTRAGCLIGAEHVNNSYECDIPIGAGICASYQTQTNSPRRARSVASQSIIAYTMSLGAENSVAYSNNSIAIPTNFTISVTTEILPVSMTKTSVDCTMYICGDSTECSNLLLQYGSFCTQLNRALTGIAVEQDKNTQEVFAQVKQIYKTPPIKDFGGFNFSQILPDPSKPSKRSFIEDLLFNKVTLADAGFIKQYGDCLGDIAARDLICAQKFNGLTVLPPLLTDEMIAQYTSALLAGTITSGWTFGAGAALQIPFAMQMAYRFNGIGVTQNVLYENQKLIANQFNSAIGKIQDSLSSTASALGKLQDVVNQNAQALNTLVKCLSSNFGAISSVLNDILSRLDKVEAEVQIDRLITGRLQCLQTYVTQQLIRAAEIRASANLAATKMSECVLGQSKRVDFCGKGYHLMSFPQSAPHGVVFLHVTYVPAQEKNFTTAPAICHDGKAHFPREGVFVSNGTHWFVTQRNFYEPQIITTDNTFVSGNCDVVIGIVNNTVYDPLQPELDS

SEQ ID NO: 3302 - protein, 1147 aa, Artificial Sequence
  SARS-CoV-2/Sweden/01/2020__EPI_ISL_411951 spike protein (1-1147)(Q965C_S1003C)
MFVFLVLLPLVSSQCVNLTTRTQLPPAYTNSFTRGVYYPDKVFRSSVLHSTQDLFLPFFSNVTWFHAIHVSGTNGTKRFDNPVLPFNDGVYFASTEKSNIIRGWIFGTTLDSKTQSLLIVNNATNVVIKVCEFQFCNDPFLGVYYHKNNKSWMESEFRVYSSANNCTFEYVSQPFLMDLEGKQGNFKNLREFVFKNIDGYFKIYSKHTPINLVRDLPQGFSALEPLVDLPIGINITRFQTLLALHRSYLTPGDSSSGWTAGAAAYYVGYLQPRTFLLKYNENGTITDAVDCALDPLSETKCTLKSFTVEKGIYQTSNFRVQPTESIVRFPNITNLCPFGEVFNATRFASVYAWNRKRISNCVADYSVLYNSASFSTFKCYGVSPTKLNDLCFTNVYADSFVIRGDEVRQIAPGQTGKIADYNYKLPDDFTGCVIAWNSNNLDSKVGGNYNYLYRLFRKSNLKPFERDISTEIYQAGSTPCNGVEGFNCYFPLQSYGFQPTNGVGYQPYRVVVLSFELLHAPATVCGPKKSTNLVKNKCVNFNFNGLTGTGVLTESNKKFLPFQQFGRDIADTTDAVRDPQTLEILDITPCSFGGVSVITPGTNTSNQVAVLYQDVNCTEVPVAIHADQLTPTWRVYSTGSNVFQTRAGCLIGAEHVNNSYECDIPIGAGICASYQTQTNSPRRARSVASQSIIAYTMSLGAENSVAYSNNSIAIPTNFTISVTTEILPVSMTKTSVDCTMYICGDSTECSNLLLQYGSFCTQLNRALTGIAVEQDKNTQEVFAQVKQIYKTPPIKDCGGFNFSQILPDPSKPSKRSFIEDLLFNKVTLADAGFIKQYGDCLGDIAARDLICAQKFNGLTVLPPLLTDEMIAQYTSALLAGTITSGWTFGAGAALQIPFAMQMAYRFNGIGVTQNVLYENQKLIANQFNSAIGKIQDSLSSTASALGKLQDVVNQNAQALNTLVKCLSSNFGAISSVLNDILSRLDKVEAEVQIDRLITGRLQCLQTYVTQQLIRAAEIRASANLAATKMSECVLGQSKRVDFCGKGYHLMSFPQSAPHGVVFLHVTYVPAQEKNFTTAPAICHDGKAHFPREGVFVSNGTHWFVTQRNFYEPQIITTDNTFVSGNCDVVIGIVNNTVYDPLQPELDS

SEQ ID NO: 3303 - protein, 1147 aa, Artificial Sequence
  SARS-CoV-2/Tianmen/HBCDC-HB-07/2020__EPI_ISL_412983 spike protein (1-1147)(Q965C_S1003C)
MFVFLVLLPLVSSQCVNLTTRTQLPPAYTNSFTRGVYYPDKVFRSSVLHSTQDLFLPFFSNVTWFHAIHVSGTNGTKRFDNPVLPFNDGVYFASTEKSNIIRGWIFGTTLDSKTQSLLIVNNATNVVIKVCEFQFCNDPFLGVYYHKNNKSWMESEFRVYSSANNCTFEYVSQPFLMDLEGKQGNFKNLREFVFKNIDGYFKIYSKHTPINLVRDLPQGFSALEPLVDLPIGINITRFQTLLALHRSYLTPGDSSSGWTAGAAAYYVGYLQPRTFLLKYNENGTITDAVDCALDPLSETKCTLKSFTVEKGIYQTSNFRVQPTESIVRFPNITNLCPFGEVFNATRFASVYAWNRKRISNCVADYSVLYNSASFSTFKCYGVSPTKLNDLCFTNVYADSFVIRGDEVRQIAPGQTGKIADYNYKLPDDFTGCVIAWNSNNLDSKVGGNYNYLYRLFRKSNLKPFERDISTEIYQAGSTPCNGVEGFNCYFPLQSYGFQPTNGVGYQPYRVVVLSFELLHAPATVCGPKKSTNLVKNKCVNFNFNGLTGTGVLTESNKKFLPFQQFGRDIADTTDAVRDPQTLEILDITPCSFGGVSVITPGTNTSNQVAVLYQDLNCTEVPVAIHADQLTPTWRVYSTGSNVFQTRAGCLIGAEHVNNSYECDIPIGAGICASYQTQTNSPRRARSVASQSIIAYTMSLGAENSVAYSNNSIAIPTNFTISVTTEILPVSMTKTSVDCTMYICGDSTECSNLLLQYGSFCTQLNRALTGIAVEQDKNTQEVFAQVKQIYKTPPIKDFGGFNFSQILPDPSKPSKRSFIEDLLFNKVTLADAGFIKQYGDCLGDIAARDLICAQKFNGLTVLPPLLTDEMIAQYTSALLAGTITSGWTFGAGAALQIPFAMQMAYRFNGIGVTQNVLYENQKLIANQFNSAIGKIQDSLSSTASALGKLQDVVNQNAQALNTLVKCLSSNFGAISSVLNDILSRLDKVEAEVQIDRLITGRLQCLQTYVTQQLIRAAEIRASANLAATKMSECVLGQSKRVDFCGKGYHLMSFPQSAPHGVVFLHVTYVPAQEKNFTTAPAICHDGKAHFPREGVFVSNGTHWFVTQRNFYEPQIITTDNTFVSGNCDVVIGIVNNTVYDPLQPELDS

SEQ ID NO: 3304 - protein, 1147 aa, Artificial Sequence
  SARS-CoV-2/Hong Kong/case42_VM20002493/2020__EPI_ISL_414527 spike protein (1-1147)(Q965C_S1003C)
MFVFLVLLPLVSSQCVNLTTRTQLPPAYTNSFTRGVYYPDKVFRSSVLHSTQDLFLPFFSNVTWFHAIHVSGTNGTKRFDNPVLPFNDGVYFASTEKSNIIRGWIFGTTLDSKTQSLLIVNNATNVVIKVCEFQFCNDPFLGVYYHKNNKSWMESEFRVYSSANNCTFEYVSQPFLMDLEGKQGNFKNLREFVFKNIDGYFKIYSKHTPINLVRDLPQGFSALEPLVDLPIGINITRFQTLLALHRSYLTPGDSSSGWTAGAAAYYVGYLQPRTFLLKYNENGTITDAVDCALDPLSETKCTLKSFTVEKGIYQTSNFRVQPTESIVRFPNITNLCPFGEVFNATRFASVYAWNRKRISNCVADYSVLYNSASFSTFKCYGVSPTKLNDLCFTNVYADSFVIRGDEVRQIAPGQTGKIADYNYKLPDDFTGCVIAWNSNNLDSKVGGNYNYLYRLFRKSNLKPFERDISTEIYQAGSTPCNGVEGFNCYFPLQSYGFQPTNGVGYQPYRVVVLSFELLHAPATVCGPKKSTNLVKNKCVNFNFNGLTGTGVLTESNKKFLPFQQFGRDIADTTDAVRDPQTLEILDITPCSFGGVSVITPGTNTSNQVAVLYQDVNCTEVPVAIHADQLTPTWRVYSTGSNVFQTRAGCLIGAEHVNNSYECDIPIGAGICASYQTQTNSPRRARSVASQSIIAYTMSLGAENSVAYSNNSIAIPTNFAISVTTEILPVSMTKTSVDCTMYICGDSTECSNLLLQYGSFCTQLNRALTGIAVEQDKNTQEVFAQVKQIYKTPPIKDFGGFNFSQILPDPSKPSKRSFIEDLLFNKVTLADAGFIKQYGDCLGDIAARDLICAQKFNGLTVLPPLLTDEMIAQYTSALLAGTITSGWTFGAGAALQIPFAMQMAYRFNGIGVTQNVLYENQKLIANQFNSAIGKIQDSLSSTASALGKLQDVVNQNAQALNTLVKCLSSNFGAISSVLNDILSRLDKVEAEVQIDRLITGRLQCLQTYVTQQLIRAAEIRASANLAATKMSECVLGQSKRVDFCGKGYHLMSFPQSAPHGVVFLHVTYVPAQEKNFTTAPAICHDGKAHFPREGVFVSNGTHWFVTQRNFYEPQIITTDNTFVSGNCDVVIGIVNNTVYDPLQPELDS

SEQ ID NO: 3305 - protein, 1147 aa, Artificial Sequence
  SARS-CoV-2/USA/CruiseA-23/2020__EPI_ISL_414482 spike protein (1-1147)(Q965C_S1003C)
MFVFLVLLPLVSSQCVNLTTRTQLPPAYTNSFTRGVYYPDKVFRSSVLHSTQDLFLPFFSNVTWFHAIHVSGTNGTKRFDNPVLPFNDGVYFASTEKSNIIRGWIFGTTLDSKTQSLLIVNNATNVVIKVCEFQFCNDPFLGVYYHKNNKSWMESEFRVYSSANNCTFEYVSQPFLMDLEVKQGNFKNLREFVFKNIDGYFKIYSKHTPINLVRDLPQGFSALEPLVDLPIGINITRFQTLLALHRSYLTPGDSSSGWTAGAAAYYVGYLQPRTFLLKYNENGTITDAVDCALDPLSETKCTLKSFTVEKGIYQTSNFRVQPTESIVRFPNITNLCPFGEVFNATRFASVYAWNRKRISNCVADYSVLYNSASFSTFKCYGVSPTKLNDLCFTNVYADSFVIRGDEVRQIAPGQTGKIADYNYKLPDDFTGCVIAWNSNNLDSKVGGNYNYLYRLFRKSNLKPFERDISTEIYQAGSTPCNGVEGFNCYFPLQSYGFQPTNGVGYQPYRVVVLSFELLHAPATVCGPKKSTNLVKNKCVNFNFNGLTGTGVLTESNKKFLPFQQFGRDIADTTDAVRDPQTLEILDITPCSFGGVSVITPGTNTSNQVAVLYQDVNCTEVPVAIHADQLTPTWRVYSTGSNVFQTRAGCLIGAEHVNNSYECDIPIGAGICASYQTQTNSPRRARSVASQSIIAYTMSLGAENSVAYSNNSIAIPTNFTISVTTEILPVSMTKTSVDCTMYICGDSTECSNLLLQYGSFCTQLNRALTGIAVEQDKNTQEVFAQVKQIYKTPPIKDFGGFNFSQILPDPSKPSKRSFIEDLLFNKVTLADAGFIKQYGDCLGDIAARDLICAQKFNGLTVLPPLLTDEMIAQYTSALLAGTITSGWTFGAGAALQIPFAMQMAYRFNGIGVTQNVLYENQKLIANQFNSAIGKIQDSLSSTASALGKLQDVVNQNAQALNTLVKCLSSNFGAISSVLNDILSRLDKVEAEVQIDRLITGRLQCLQTYVTQQLIRAAEIRASANLAATKMSECVLGQSKRVDFCGKGYHLMSFPQSAPHGVVFLHVTYVPAQEKNFTTAPAICHDGKAHFPREGVFVSNGTHWFVTQRNFYEPQIITTDNTFVSGNCDVVIGIVNNTVYDPLQPELDS

SEQ ID NO: 3306 - protein, 1147 aa, Artificial Sequence
  SARS-CoV-2/Hong Kong/case85_VM20002868/2020__EPI_ISL_414519 spike protein (1-1147)(Q965C_S1003C)
MFVFLVLVPLVSSQCVNLTTRTQLPPAYTNSFTRGVYYPDKVFRSSVLHSTQDLFLPFFSNVTWFHAIHVSGTNGTKRFDNPVLPFNDGVYFASTEKSNIIRGWIFGTTLDSKTQSLLIVNNATNVVIKVCEFQFCNDPFLGVYYHKNNKSWMESEFRVYSSANNCTFEYVSQPFLMDLEGKQGNFKNLREFVFKNIDGYFKIYSKHTPINLVRDLPQGFSALEPLVDLPIGINITRFQTLLALHRSYLTPGDSSSGWTAGAAAYYVGYLQPRTFLLKYNENGTITDAVDCALDPLSETKCTLKSFTVEKGIYQTSNFRVQPTESIVRFPNITNLCPFGEVFNATRFASVYAWNRKRISNCVADYSVLYNSASFSTFKCYGVSPTKLNDLCFTNVYADSFVIRGDEVRQIAPGQTGKIADYNYKLPDDFTGCVIAWNSNNLDSKVGGNYNYLYRLFRKSNLKPFERDISTEIYQAGSTPCNGVEGFNCYFPLQSYGFQPTNGVGYQPYRVVVLSFELLHAPATVCGPKKSTNLVKNKCVNFNFNGLTGTGVLTESNKKFLPFQQFGRDIADTTDAVRDPQTLEILDITPCSFGGVSVITPGTNTSNQVAVLYQDVNCTEVPVAIHADQLTPTWRVYSTGSNVFQTRAGCLIGAEHVNNSYECDIPIGAGICASYQTQTNSPRRARSVASQSIIAYTMSLGAENSVAYSNNSIAIPTNFTISVTTEILPVSMTKTSVDCTMYICGDSTECSNLLLQYGSFCTQLNRALTGIAVEQDKNTQEVFAQVKQIYKTPPIKDFGGFNFSQILPDPSKPSKRSFIEDLLFNKVTLADAGFIKQYGDCLGDIAARDLICAQKFNGLTVLPPLLTDEMIAQYTSALLAGTITSGWTFGAGAALQIPFAMQMAYRFNGIGVTQNVLYENQKLIANQFNSAIGKIQDSLSSTASALGKLQDVVNQNAQALNTLVKCLSSNFGAISSVLNDILSRLDKVEAEVQIDRLITGRLQCLQTYVTQQLIRAAEIRASANLAATKMSECVLGQSKRVDFCGKGYHLMSFPQSAPHGVVFLHVTYVPAQEKNFTTAPAICHDGKAHFPREGVFVSNGTHWFVTQRNFYEPQIITTDNTFVSGNCDVVIGIVNNTVYDPLQPELDS

SEQ ID NO: 3307 - protein, 1147 aa, Artificial Sequence; identical to SEQ ID NO: 3297
  SARS-CoV-2/England/200990660/2020__EPI_ISL_414523 spike protein (1-1147)(Q965C_S1003C)

SEQ ID NO: 3308 - protein, 1147 aa, Artificial Sequence
  SARS-CoV-2/Australia/NSW09/2020__EPI_ISL_413595 spike protein (1-1147)(Q965C_S1003C)
MFVFLVLLPLVSSQCVNLTTRTQLPPAYTNSFTRGVYYPDKVFRSSVLHSTQDLFLPFFSNVTWFHAIHVSGTNGTKRFDNPVLPFNDGVYFASTEKSNIIRGWIFGTTLDSKTQSLLIVNNATNVVIKVCEFQFCNDPFLGVYYHKNNKSWMESEFRVYSSANNCTFEYVSQPFLMDLEGKQGNFKNLREFVFKNIDGYFKIYSKHTPINLVRDLPQGFSALEPLVDLPIGINITRFQTLLALHRSYLTPGDSSSGWTAGAAAYYVGYLQPRTFLLKYNENGTITDAVDCALDPLSETKCTLKSFTVEKGIYQTSNFRVQPTESIVRFPNITNLCPFGEVFNATRFASVYAWNRKRISNCVADYSVLYNSASFSTFKCYGVSPTKLNDLCFTNVYADSFVIRGDEVRQIAPGQTGKIADYNYKLPDDFTGCVIAWNSNNLDSKVGGNYNYLYRLFRKSNLKPFERDISTEIYQAGSTPCNGVEGFNCYFPLQSYGFQPTNGVGYQPYRVVVLSFELLHAPATVCGPKKSTNLVKNKCVNFNFNGLTGTGVLTESNKKFLPFQQFGRDIADTTDAVRDPQTLEILDITPCSFGGVSVITPGTNTSNQVAVLYQDVNCTEVPVAIHADQLTPTWRVYSTGSNVFQTRAGCLIGAEHVNNSYECDIPIGAGICASYQTQTNSPRRARSVASQSIIAYTMSLGAENSVAYSNNSIAIPTNFTISVTTEILPVSMTKTSVDCTMYICGDSTECSNLLLQYGSFCTQLNRALTGIAVEQDKNTQEVFAQVKQIYKTPPIKDFGGFNFSQILPDPSKPSKRSFIEDLLFNKVTLADAGFIKQYGDCLGDIAARDLICAQKFNGLTVLPPLLTDEMIAQYTSALLAGTITSGWTFGAGAALQIPFAMQMAYRFNGIGVTQNVLYENQKLIANQFNSAIGKIQDSLSFTASALGKLQDVVNQNAQALNTLVKCLSSNFGAISSVLNDILSRLDKVEAEVQIDRLITGRLQCLQTYVTQQLIRAAEIRASANLAATKMSECVLGQSKRVDFCGKGYHLMSFPQSAPHGVVFLHVTYVPAQEKNFTTAPAICHDGKAHFPREGVFVSNGTHWFVTQRNFYEPQIITTDNTFVSGNCDVVIGIVNNTVYDPLQPELDS

SEQ ID NO: 3309 - protein, 1147 aa, Artificial Sequence; identical to SEQ ID NO: 3289
  SARS-CoV-2/Australia/NSW10/2020__EPI_ISL_413596 spike protein (1-1147)(Q965C_S1003C)

SEQ ID NO: 3310 - protein, 1147 aa, Artificial Sequence
  SARS-CoV-2/Switzerland/1000477797/2020__EPI_ISL_413023 spike protein (1-1147)(Q965C_S1003C)
MFVFLVLLPLVSSQCVNLTTRTQLPPAYTNSFTRGVYYPDKVFRSSVLHSTQDLFLPFFSNVTWFHAIHVSGTNGTKRFDNPVLPFNDGVYFASTEKSNIIRGWIFGTTLDSKTQSLLIVNNATNVVIKVCEFQFCNDPFLGVYYHKNNKSWMESEFRVYSSANNCTFEYVSQPFLMDLEGKQGNFKNLREFVFKNIDGYFNIYSKHTPINLVRDLPQGFSALEPLVDLPIGINITRFQTLLALHRSYLTPGDSSSGWTAGAAAYYVGYLQPRTFLLKYNENGTITDAVDCALDPLSETKCTLKSFTVEKGIYQTSNFRVQPTESIVRFPNITNLCPFGEVFNATRFASVYAWNRKRISNCVADYSVLYNSASFSTFKCYGVSPTKLNDLCFTNVYADSFVIRGDEVRQIAPGQTGKIADYNYKLPDDFTGCVIAWNSNNLDSKVGGNYNYLYRLFRKSNLKPFERDISTEIYQAGSTPCNGVEGFNCYFPLQSYGFQPTNGVGYQPYRVVVLSFELLHAPATVCGPKKSTNLVKNKCVNFNFNGLTGTGVLTESNKKFLPFQQFGRDIADTTDAVRDPQTLEILDITPCSFGGVSVITPGTNTSNQVAVLYQGVNCTEVPVAIHADQLTPTWRVYSTGSNVFQTRAGCLIGAEHVNNSYECDIPIGAGICASYQTQTNSPRRARSVASQSIIAYTMSLGAENSVAYSNNSIAIPTNFTISVTTEILPVSMTKTSVDCTMYICGDSTECSNLLLQYGSFCTQLNRALTGIAVEQDKNTQEVFAQVKQIYKTPPIKDFGGFNFSQILPDPSKPSKRSFIEDLLFNKVTLADAGFIKQYGDCLGDIAARDLICAQKFNGLTVLPPLLTDEMIAQYTSALLAGTITSGWTFGAGAALQIPFAMQMAYRFNGIGVTQNVLYENQKLIANQFNSAIGKIQDSLSSTASALGKLQDVVNQNAQALNTLVKCLSSNFGAISSVLNDILSRLDKVEAEVQIDRLITGRLQCLQTYVTQQLIRAAEIRASANLAATKMSECVLGQSKRVDFCGKGYHLMSFPQSAPHGVVFLHVTYVPAQEKNFTTAPAICHDGKAHFPREGVFVSNGTHWFVTQRNFYEPQIITTDNTFVSGNCDVVIGIVNNTVYDPLQPELDS

SEQ ID NO: 3311 - protein, 1147 aa, Artificial Sequence
  SARS-CoV-2/Belgium/BA-02291/2020__EPI_ISL_415159 spike protein (1-1147)(Q965C_S1003C)
MFVFLVLLPLVSSQCVNLTTRTQLPPAYTNSFTRGVYYPDKVFRSSVLHSTQDLFLPFFSNVTWFHAIHVSGTNGTKRFDNPVLPFNDGVYFASTEKSNIIRGWIFGTTLDSKTQSLLIVNNATNVVIKVCEFQFCNDPFLGVYYHKNNKSWMESEFRVYSSANNCTFEYVSQPFLMDLEGKQGNFKNLREFVFKNIDGYFKIYSKHTPINLVRDLPQGFSALEPLVDLPIGINITRFQTLLALHRSYLTPGDSSSGWTAGAAAYYVGYLQPRTFLLKYNENGTITDAVDCALDPLSETKCTLKSFTVEKGIYQTSNFRVQPTESIVRFPNITNLCPFGEVFNATRFASVYAWNRKRISNCVADYSVLYNSASFSTFKCYGVSPTKLNDLCFTNVYADSFVIRGDEVRQIAPGQTGKIADYNYKLPDDFTGCVIAWNSNNLDSKVGGNYNYLYRLFRRSNLKPFERDISTEIYQAGSTPCNGVEGFNCYFPLQSYGFQPTNGVGYQPYRVVVLSFELLPAPATVCGPKKSTNLVKNKCVNFNFNGLTGTGVLTESNKKFLPFQQFGRDIADTTDAVRDPQTLEILDITPCSFGGVSVITPGTNTSNQVAVLYQGVNCTEVPVAIHADQLTPTWRVYSTGSNVFQTRAGCLIGAEHVNNSYECDIPIGAGICASYQTQTNSPRRARSVASQSIIAYTMSLGAENSVAYSNNSIAIPTNFTISVTTEILPVSMTKTSVDCTMYICGDSTECSNLLLQYGSFCTQLNRALTGIAVEQDKNTQEVFAQVKQIYKTPPIKDFGGFNFSQILPDPSKPSKRSFIEDLLFNKVTLADAGFIKQYGDCLGDIAARDLICAQKFNGLTVLPPLLTDEMIAQYTSALLAGTITSGWTFGAGAALQIPFAMQMAYRFNGIGVTQNVLYENQKLIANQFNSAIGKIQDSLSSAAPALGKLQDVVNQNAQALNTLVKCLSSNFGAISSVLNDILSRLDKVEAEVQIDRLITGRLQCLQTYVTQQLIRAAEIRASANLAATKMSECVLGQSKRVDFCGKGYHLMSFPQSAPHGVVFLHVTYVPAQEKNFTTAPAICHDGKAHFPREGVFVSNGTHWFVTQRNFYEPQIITTDNTFVSGNCDVVIGIVNNTVYDPLQPELDS

SEQ ID NO: 3312 - protein, 1147 aa, Artificial Sequence
  SARS-CoV-2/USA/WA8-UW5/2020__EPI_ISL_413486 spike protein (1-1147)(Q965C_S1003C)
MFVFLVLLPLVSSQCVNLTTRTQLPPAYTNSFTRGVYYPDKVFRSSVLHSTQDLFLPFFSNVTWFHAIHVSGTNGTKRFDNPVLPFNDGVYFASTEKSNIIRGWIFGTTLDSKTQSLLIVNNATNVVIKVCEFQFCNDPFLGVYYHKNNKSWMESEFRVYSSANNCTFEYVSQPFLMDLEGKQGNFKNLREFVFKNIDGYFKIYSKHTPINLVRDLPQGFSALEPLVDLPIGINITRFQTLLALHRSYLTPGDSSSGWTAGAAAYYVGYLQPRTFLLKYNENGTITDAVDCALDPLSETKCTLKSFTVEKGIYQTSNFRVQPTESIVRFPNITNLCPFGEVFNATRFASVYAWNRKRISNCVADYSVLYNSASFSTFKCYGVSPTKLNDLCFTNVYADSFVIRGDEVRQIAPGQTGKIADYNYKLPDDFTGCVIAWNSNNLDSKVGGNYNYLYRLFRKSNLKPFERDISTEIYQAGSTPCNGVEGFNCYFPLQSYGFQPTNGVGYQPYRVVVLSFELLHAPATVCGPKKSTNLVKNKCVNFNFNGLTGTGVLTESNKKFLPFQQFGRDIADTTDAVRDPQTLEILDITPCSFGGVSVITPGTNTSNQVAVLYQDVNCTEVPVAIHADQLTPTWRVYSTGSNVFQTRAGCLIGAEYVNNSYECDIPIGAGICASYQTQTNSPRRARSVASQSIIAYTMSLGAENSVAYSNNSIAIPTNFTISVTTEILPVSMTKTSVDCTMYICGDSTECSNLLLQYGSFCTQLNRALTGIAVEQDKNTQEVFAQVKQIYKTPPIKDFGGFNFSQILPDPSKPSKRSFIEDLLFNKVTLADAGFIKQYGDCLGDIAARDLICAQKFNGLTVLPPLLTDEMIAQYTSALLAGTITSGWTFGAGAALQIPFAMQMAYRFNGIGVTQNVLYENQKLIANQFNSAIGKIQDSLSSTASALGKLQDVVNQNAQALNTLVKCLSSNFGAISSVLNDILSRLDKVEAEVQIDRLITGRLQCLQTYVTQQLIRAAEIRASANLAATKMSECVLGQSKRVDFCGKGYHLMSFPQSAPHGVVFLHVTYVPAQEKNFTTAPAICHDGKAHFPREGVFVSNGTHWFVTQRNFYEPQIITTDNTFVSGNCDVVIGIVNNTVYDPLQPELDS

SEQ ID NO: 3313 - protein, 1147 aa, Artificial Sequence
  SARS-CoV-2/England/20102000506/2020__EPI_ISL_415147 spike protein (1-1147)(Q965C_S1003C)
MFVFLVLLPLVSSQCVNLTTRTQLPPAYTNSFTRGVYYPDKVFRSSVLHSTQDLFLPFFSNVTWFHAIHVSGTNGTKRFDNPVLPFNDGVYFASTEKSNIIRGWIFGTTLDSKTQSLLIVNNATNVVIKVCEFQFCNDPFLGVYYHKNNKSWMESEFRVYSSANNCTFEYVSQPFLMDLEGKQGNFKNLREFVFKNIDGYFKIYSKHTPINLVRDLPQGFSALEPLVDLPIGINITRFQTLLALHRSYLTPGDSSSGWTAGAAAYYVGYLQPRTFLLKYNENGTITDAVDCALDPLSETKCTLKSFTVEKGIYQTSNFRVQPTESIVRFPNITNLCPFGEVFNATRFASVYAWNRKRISNCVADYSVLYNSASFSTFKCYGVSPTKLNDLCFTNVYADSFVIRGDEVRQIAPGQTGKIADYNYKLPDDFTGCVIAWNSNNLDSKVGGNYNYLYRLFRKSNLKPFERDISTEIYQAGSTPCNGVEGFNCYFPLQSYGFQPTNGVGYQPYRVVVLSFELLHAPATVCGPKKSTNLVKNKCVNFNFNGLTGTGVLTESNKKFLPFQQFGRDIADTTDAVRDPQTLEILDITPCSFGGVSVITPGTNTSNQVAVLYQGVNCTEVPVAIHADQLTPTWRVYSTGSNVFQTRAGCLIGAEHVNNSYECDIPIGAGICASYQTQTNSPRRARSVASQSIIAYTMSLGAENSVAYSNNSIAIPTNFTISVTTEILPVSMTKTSVDCTMYICGDSTECSNLLLQYGSFCTQLNRALTGIAVEQDKNTQEVFAQVKQIYKTPPIKDFGGFNFSQILPDPSKPSKRSFIEDLLFNKVTLADAGFIKQYGYCLGDIAARDLICAQKFNGLTVLPPLLTDEMIAQYTSALLAGTITSGWTFGAGAALQIPFAMQMAYRFNGIGVTQNVLYENQKLIANQFNSAIGKIQDSLSSTASALGKLQDVVNQNAQALNTLVKCLSSNFGAISSVLNDILSRLDKVEAEVQIDRLITGRLQCLQTYVTQQLIRAAEIRASANLAATKMSECVLGQSKRVDFCGKGYHLMSFPQSAPHGVVFLHVTYVPAQEKNFTTAPAICHDGKAHFPREGVFVSNGTHWFVTQRNFYEPQIITTDNTFVSGNCDVVIGIVNNTVYDPLQPELDS

SEQ ID NO: 3314 - protein, 1147 aa, Artificial Sequence
  SARS-CoV-2/Belgium/VAG-03013/2020__EPI_ISL_415155 spike protein (1-1147)(Q965C_S1003C)
MFVFLVLLPLVSSQCVNLTTRTQLPPAYTNSFTRGVYYPDKVFRSSVLHSTQDLFLPFFSNVTWFHAIHVSGTNGTKRFDNPVLPFNDGVYFASTEKSNIIRGWIFGTTLDSKTQSLLIVNNATNVVIKVCEFQFCNDPFLGVYYHKNNKSWMESEFRVYSSANNCTFEYVSQPFLMDLEGKQGNFKNLREFVFKNIDGYFKIYSKHTPINLVRDLPQGFSALEPLVDLPIGINITRFQTLLALHRSYLTPGDSSSGWTAGAAAYYVGYLQPRTFLLKYNENGTITDAVDCALDPLSETKCTLKSFTVEKGIYQTSNFRVQPTESIVRFPNITNLCPFGEVFNATRFASVYAWNRKRISNCVADYSVLYNSASFSTFKCYGVSPTKLNDLCFTNVYADSFVIRGDEVRQIAPGQTGKIADYNYKLPDDFTGCVIAWNSNNLDSKVGGNYNYLYRLFRKSNLKPFERDISTEIYQAGSTPCNGVEGFNCYFPLQSYGFQPTNGVGYQPYRVVVLSFELLHAPATVCGPKKSTNLVKNKCVNFNFNGLTGTGVLTESNKKFLPFQQFGRDIADTTDAVRDPQTLEILDITPCSFGGVSVITPGTNTSNQVAVLYQGVNCTEVPVAIHADQLTPTWRVYSTGSNVFQTRAGCLIGAEHVNNSYECDIPIGAGICASYQTQTNSPRRARSVASQSIIAYTMSLGAENSVAYSNNSIAIPTNFTISVTTEILPVSMTKTSVDCTMYICGDSTECSNLLLQYGSFCTQLNRALTGIAVEQDKNTQEVFAQVKQIYKTPPIKDFGGFNFSQILPDPSKPSKRSFIEDLLFNKVTLADAGFIKQYGDCLGDIAARDLICAQKFNGLTVLPPLLTDEMIAQYTSALLAGTITSGWTFGAGAALQIPFAMQMAYRFNGIGVTQNVLYENQKLIANQFNSAIGKIQDSLSSTATALGKLQDVVNQNAQALNTLVKCLSSNFGAISSVLNDILSRLDKVEAEVQIDRLITGRLQCLQTYVTQQLIRAAEIRASANLAATKMSECVLGQSKRVDFCGKGYHLMSFPQSAPHGVVFLHVTYVPAQEKNFTTAPAICHDGKAHFPREGVFVSNGTHWFVTQRNFYEPQIITTDNTFVSGNCDVVIGIVNNTVYDPLQPELDS

SEQ ID NO: 3315 - protein, 1147 aa, Artificial Sequence
  SARS-CoV-2/Belgium/BC-03016/2020__EPI_ISL_415157 spike protein (1-1147)(Q965C_S1003C)
MFVFLVLLPLVSSQCVNLTTRTQLPPAYTNSFTRGVYYPDKVFRSSVLHSTQDLFLPFFSNVTWFHAIHVSGTNGTKRFDNPVLPFNDGVYFASTEKSNIIRGWIFGTTLDSKTQSLLIVNNATNVVIKVCEFQFCNDPFLGVYYHKNNKSWMESEFRVYSSANNCTFEYVSQPFLMDLEGKQGNFKNLREFVFKNIDGYFKIYSKHTPINLVRDLPQGFSALEPLVDLPIGINITRFQTLLALHRSYLTPGDSSSGWTAGAAAYYVGYLQPRTFLLKYNENGTITDAVDCALDPLSETKCTLKSFTVEKGIYQTSNFRVQPTESIVRFPNITNLCPFGEVFNATRFASVYAWNRKRISNCVADYSVLYNSASFSTFKCYGVSPTKLNDLCFTNVYADSFVIRGDEVRQIAPGQTGKIADYNYKLPDDFTGCVIAWNSNNLDSKVGGNYNYLYRLFRKSNLKPFERDISTEIYQAGSTPCNGVEGFNCYFPLQSYGFQPTNGVGYQPYRVVVLSFELLHAPATVCGPKKSTNLVKNKCVNFNFNGLTGTGVLTESNKKFLPFQQFGRDIADTTDAVRDPQTLEILDITPCSFGGVSVITPGTNTSNQVAVLYQGVNCTEVPVAIHADQLTPTWRVYSTGSNVFQTRAGCLIGAEHVNNSYECDIPIGAGICASYQTQTNSPRRARSVASQSIIAYTMSLGAENSVAYSNNSIAIPTNFTISVTTEILPVSMTKTSVDCTMYICGDSTECSNLLLQYGSFCTQLNRALTGIAVEQDKNTQEVFAQVKQIYKTPPIKDFGGFNFSQILPDPSKPSKRSFIEDLLFNKVTLADAGFIKQYGDCLGDIAARDLICAQKFNGLTVLPPLLTDEMIAQYTSALLAGTITSGWTFGAGAALQIPFAMQMAYRFNGIGVTQNVLYENQKLIANQFNSAIGKIQDSLSSTAPALGKLQDVVNQNAQALNTLVKCLSSNFGAISSVLNDILSRLDKVEAEVQIDRLITGRLQCLQTYVTQQLIRAAEIRASANLAATKMSECVLGQSKRVDFCGKGYHLMSFPQSAPHGVVFLHVTYVPAQEKNFTTAPAICHDGKAHFPREGVFVSNGTHWFVTQRNFYEPQIITTDNTFVSGNCDVVIGIVNNTVYDPLQPELDS

SEQ ID NO: 3316 - protein, 1147 aa, Artificial Sequence
  SARS-CoV-2/Germany/BavPat3/2020__EPI_ISL_414521 spike protein (1-1147)(Q965C_S1003C)
MFVFLVLLPLVSSQCVNLTTRTQLPPAYTNSFTRGVYYPDKVFRSSVLHSTQDLFLPFFSNVTWFHAIHVSGTNGTKRFDNPVLPFNDGVYFASTEKSNIIRGWIFGTTLDSKTQSLLIVNNATNVVIKVCEFQFCNDPFLGVYYHKNNKSWMESEFRVYSSANNCTFEYVSQPFLMDLEGKQGNFKNLREFVFKNIDGYFKIYSKHTPINLVRDLPQGFSALEPLVDLPIGINITRFQTLLALHRSYLTPGDSSSGWTAGAAAYYVGYLQPRTFLLKYNENGTITDAVDCALDPLSETKCTLKSFTVEKGIYQTSNFRVQPTESIVRFPNITNLCPFGEVFNATRFASVYAWNRKRISNCVADYSVLYNSASFSTFKCYGVSPTKLNDLCFTNVYADSFVIRGDEVRQIAPGQTGKIADYNYKLPDDFTGCVIAWNSNNLDSKVGGNYNYLYRLFRKSNLKPFERDISTEIYQAGSTPCNGVEGFNCYFPLQSYGFQPTNGVGYQPYRVVVLSFELLHAPATVCGPKKSTNLVKNKCVNFNFNGLTGTGVLTESNKKFLPFQQFGRDIADTTDAVRDPQTLEILDITPCSFGGVSVITPGTNTSNQVAVLYQDVNCTEVPVAIHADQLTPTWRVYSTGSNVFQTRAGCLIGAEHVNNSYECDIPIGAGICASYQTQTNSPRRARSVASQSIIAYTMSLGAENSVAYSNNSIAIPTNFTISVTTEILPVSMTKTSVDCTMYICGDSTECSNLLLQYGSFCTQLNRALTGIAVEQDKNTQQVFAQVKQIYKTPPIKDFGGFNFSQILPDPSKPSKRSFIEDLLFNKVTLADAGFIKQYGDCLGDIAARDLICAQKFNGLTVLPPLLTDEMIAQYTSALLAGTITSGWTFGAGAALQIPFAMQMAYRFNGIGVTQNVLYENQKLIANQFNSAIGKIQDSLSSTASALGKLQDVVNQNAQALNTLVKCLSSNFGAISSVLNDILSRLDKVEAEVQIDRLITGRLQCLQTYVTQQLIRAAEIRASANLAATKMSECVLGQSKRVDFCGKGYHLMSFPQSAPHGVVFLHVTYVPAQEKNFTTAPAICHDGKAHFPREGVFVSNGTHWFVTQRNFYEPQIITTDNTFVSGNCDVVIGIVNNTVYDPLQPELDS

SEQ ID NO: 3317 - protein, 1147 aa, Artificial Sequence
  SARS-CoV-2/France/HF1805/2020__EPI_ISL_414628 spike protein (1-1147)(Q965C_S1003C)
MFVFLVLLPLVSSQCVNLTTRTQLPPAYTNSFTRGVYYPDKVFRSSVLHSTQDLFLPFFSNVTWFHAIHVSGTNGTKRFDNPVLPFNDGVYFASTEKSNIIRGWIFGTTLDSKTQSLLIVNNATNVVIKVCEFQFCNDPFLGVYYHKNNKSWMESEFRVYSSANNCTFEYVSQPFLMDLEGKQGNFKNLREFVFKNIDGYFKIYSKHTPINLVRDLPQGFSALEPLVDLPIGINITRFQTLLALHRSYLTPGDSSSGWTAGAAAYYVGYLQPRTFLLKYNENGTITDAVDCALDPLSETKCTLKSFTVEKGIYQTSNFRVQPTESIVRFPNITNLCPFGEVFNATRFASVYAWNRKRISNCVADYSVLYNSASFSTFKCYGVSPTKLNDLCFTNVYADSFVIRGDEVRQIAPGQTGKIADYNYKLPDDFTGCVIAWNSNNLDSKVGGNYNYLYRLFRKSNLKPFERDISTEIYQAGSTPCNGVEGFNCYFPLQSYGFQPTNGVGYQPYRVVVLSFELLHAPATVCGPKKSTNLVKNKCVNFNFNGLTGTGVLTESNKKFLPFQQFGRDIADTTDAVRDPQTLEILDITPCSFGGVSVITPGTNTSNQVAVLYQGVNCTEVPVAIHADQLTPTWRVYSTGSNVFQTRAGCLIGAEHVNNSYECDIPIGAGICASYQTQTNSPRRARSVASQSIIAYTMSLGAENSVAYSNNSIAIPTNFTISVTTEILPVSMTKTSVDCTMYICGDSTECSNLLLQYGSFCTQLNRALTGIAVEQDKNTQEVFAQVKQIYKTPPIKDFGGFNFSQILPDPSKPSKRSFIEDLLFNKVTLADAGFIKQYGDCLGDIAARDLICAQKFNGLTVLPPLLTDEMIAQYTSALLAGTITSGWTFGAGAALQIPFAMQMAYRFNGIGVTQNVLYENQKLIANQFNSAIGKIQDSLSSTASALGKLQDVVNQNAQALNTLVKCLSSNFGAISSVLNDILSRLDKVEAEVQIDRLITGRLQCLQTYVTQQLIRAAEIRASANLAATKMSECVLGQSKRVDFCGKGYHLMSFPQSAPHGVVFLHVTYVPAQEKNFTTAPAICHDGKAHFPREGVFVSNGTHWFVTQRNFYEPQIITTDNTFVSGNCDVVIGVVNNTVYDPLQPELDS

SEQ ID NO: 3318 - protein, 1147 aa, Artificial Sequence
  SARS-CoV-2/Netherlands/ZuidHolland_9/2020__EPI_ISL_414445 spike protein (1-1147)(Q965C_S1003C)
MFVFLVLLPLVSSQCVNLTTRTQLPPAYTNSFTRGVYYPDKVFRSSVLHSTQDLFLPFFSNVTWFHAIHVSGTNGTKRFDNPVLPFNDGVYFASTEKSNIIRGWIFGTTLDSKTQSLLIVNNATNVVIKVCEFQFCNDPFLGVYYHKNNKSWMESEFRVYSSANNCTFEYVSQPFLMDLEGKQGNFKNLREFVFKNIDGYFKIYSKHTPINLVRDLPQGFSALEPLVDLPIGINITRFQTLLALHRSYLTPGDSSSGWTAGAAAYYVGYLQPRTFLLKYNENGTITDAVDCALDPLSETKCTLKSFTVEKGIYQTSNFRVQPTESIVRFPNITNLCPFGEVFNATRFASVYAWNRKRISNCVADYSVLYNSASFSTFKCYGVSPTKLNDLCFTNVYADSFVIRGDEVRQIAPGQTGKIADYNYKLPDDFTGCVIAWNSNNLDSKVGGNYNYLYRLFRKSNLKPFERDISTEIYQAGSTPCNGVEGFNCYFPLQSYGFQPTNGVGYQPYRVVVLSFELLHAPATVCGPKKSTNLVKNKCVNFNFNGLTGTGVLTESNKKFLPFQQFGRDIADTTDAVRDPQTLEILDITPCSFGGVSVITPGTNTSNQVAVLYQGVNCTEVPVAIHADQLTPTWRVYSTGSNVFQTRAGCLIGAEHVNNSYECDIPIGAGICASYQTQTNSPRRARSVASQSIIAYTMSLGAENSVAYSNNSIAIPTNFTISVTTEILPVSMTKTSVDCTMYICGDSTECSNLLLQYGSFCTQLNRALTGIAVEQDKNTQEVFAQVKQIYKTPPIKDFGGFNFSQILPDPSKPSKRSFIEDLLFNKVTLADAGFIKQYGDCLGDIAARDLICVQKFNGLTVLPPLLTDEMIAQYTSALLAGTITSGWTFGAGAALQIPFAMQMAYRFNGIGVTQNVLYENQKLIANQFNSAIGKIQDSLSSTASALGKLQDVVNQNAQALNTLVKCLSSNFGAISSVLNDILSRLDKVEAEVQIDRLITGRLQCLQTYVTQQLIRAAEIRASANLAATKMSECVLGQSKRVDFCGKGYHLMSFPQSAPHGVVFLHVTYVPAQEKNFTTAPAICHDGKAHFPREGVFVSNGTHWFVTQRNFYEPQIITTDNTFVSGNCDVVIGIVNNTVYDPLQPELDS

SEQ ID NO: 3319 - protein, 1147 aa, Artificial Sequence
  SARS-CoV-2/Finland/FIN03032020A/2020__EPI_ISL_413602 spike protein (1-1147)(Q965C_S1003C)
MFVFLVLLPLVSSQCVNLTTRTQLPPAYTNSFTRGVYYPDKVFRSSVLHSTQDLFLPFFSNVTWFHAIHVSGTNGTKRFDNPVLPFNDGVYFASTEKSNIIRGWIFGTTLDSKTQSLLIVNNATNVVIKVCEFQFCNDPFLGVYYHKNNKSWMESEFRVYSSANNCTFEYVSQPFLMDLEGKQGNFKNLREFVFKNIDGYFKIYSKHTPINLVRDLPQGFSALEPLVDLPIGINITRFQTLLALHRSYLTPGDSSSGWTAGAAAYYVGYLQPRTFLLKYNENGTITDAVDCALDPLSETKCTLKSFTVEKGIYQTSNFRVQPTESIVRFPNITNLCPFGEVFNATRFASVYAWNRKRISNCVADYSVLYNSASFSTFKCYGVSPTKLNDLCFTNVYADSFVIRGDEVRQIAPGQTGKIADYNYKLPDDFTGCVISWNSNNLDSKVGGNYNYLYRLFRKSNLKPFERDISTEIYQAGSTPCNGVEGFNCYFPLQSYGFQPTNGVGYQPYRVVVLSFELLHAPATVCGPKKSTNLVKNKCVNFNFNGLTGTGVLTESNKKFLPFQQFGRDIADTTDAVRDPQTLEILDITPCSFGGVSVITPGTNTSNQVAVLYQGVNCTEVPVAIHADQLTPTWRVYSTGSNVFQTRAGCLIGAEHVNNSYECDIPIGAGICASYQTQTNSPRRARSVASQSIIAYTMSLGAENSVAYSNNSIAIPTNFTISVTTEILPVSMTKTSVDCTMYICGDSTECSNLLLQYGSFCTQLNRALTGIAVEQDKNTQEVFAQVKQIYKTPPIKDFGGFNFSQILPDPSKPSKRSFIEDLLFNKVTLADAGFIKQYGDCLGDIAARDLICAQKFNGLTVLPPLLTDEMIAQYTSALLAGTITSGWTFGAGAALQIPFAMQMAYRFNGIGVTQNVLYENQKLIANQFNSAIGKIQDSLSSTASALGKLQDVVNQNAQALNTLVKCLSSNFGAISSVLNDILSRLDKVEAEVQIDRLITGRLQCLQTYVTQQLIRAAEIRASANLAATKMSECVLGQSKRVDFCGKGYHLMSFPQSAPHGVVFLHVTYVPAQEKNFTTAPAICHDGKAHFPREGVFVSNGTHWFVTQRNFYEPQIITTDNTFVSGNCDVVIGIVNNTVYDPLQPELDS

SEQ ID NO: 3320 - protein, 1147 aa, Artificial Sequence
  SARS-CoV-2/France/GE1977/2020__EPI_ISL_414632 spike protein (1-1147)(Q965C_S1003C)
MFVFLVLLPLVSSQCVNLTTRTQLPPAYTNSFTRGVYYPDKVFRSSVLHSTQDLFLPFFSNVTWFHAIHVSGTNGTKRFDNPVLPFNDGVYFASTEKSNIIRGWIFGTTLDSKTQSLLIVNNATNVVIKVCEFQFCNDPFLGVYYHKNNKSWMESEFRVYSSANNCTFEYVSQPFLMDLEGKQGNFKNLREFVFKNIDGYFKIYSKHTPINLVRDLPQGFSALEPLVDLPIGINITRFQTLLALHRSYLTPGDSSSGWTAGAAAYYVGYLQPRTFLLKYNENGTITDAVDCALDPLSETKCTLKSFTVEKGIYQTSNFRVQPTESIVRFPNITNLCPFGEVFNATRFASVYAWNRKRISNCVADYSVLYNSASFSTFKCYGVSPTKLNDLCFTNVYADSFVIRGDEVRQIAPGQTGKIADYNYKLPDDFTGCVIAWNSNNLDSKVGGNYNYLYRLFRKSNLKPFERDISTEIYQAGSTPCNGVEGFNCYFPLQSYGFQPTNGVGYQPYRVVVLSFELLHAPATVCGPKKSTNLVKNKCVNFNFNGLTGTGVLTESNKKFLPFQQFGRDIADTTDAVRDPQTLEILDITPCSFGGVSVITPGTNTSNQVAVLYQGVNCTEVPVAIHADQLTPTWRVYSTGSNVFQTRAGCLIGAEHVNNSYECDIPIGAGICASYQTQTNSPRRARSVASQSIIAYTMSLGAENSVAYSNNSIAIPTNFTISVTTEILPVSMTKTSVDCTMYICGDSTECSNLLLQYGSFCTQLNRALTGIAVEQDKNTQEVFAQVKQIYKTPPIKDFGGFNFSQILPDPSKPSKRSFIEDLLFNKVTLADAGFIKQYGDCLGDIAARDLICAQKFNGLTVLPPLLTDEMIAQYTSALLAGTITSGWTFGAGAALQIPFAMQMAYRFNGIGVTQNVLYENQKLIANQFNSAIGKIQDSLFSTASALGKLQDVVNQNAQALNTLVKCLSSNFGAISSVLNDILSRLDKVEAEVQIDRLITGRLQCLQTYVTQQLIRAAEIRASANLAATKMSECVLGQSKRVDFCGKGYHLMSFPQSAPHGVVFLHVTYVPAQEKNFTTAPAICHDGKAHFPREGVFVSNGTHWFVTQRNFYEPQIITTDNTFVSGNCDVVIGIVNNTVYDPLQPELDS

SEQ ID NO: 3321 - protein, 1147 aa, Artificial Sequence
  SARS-CoV-2/Finland/FIN-313/2020__EPI_ISL_414641 spike protein (1-1147)(Q965C_S1003C)
MFVFLVLLPLVSSQCVNLTTRTQLPPAYTNSFTRGVYYPDKVFRSSVLHSTQDLFLPFFSNVTWFHAIHVSGTNGTKRFDNPVLPFNDGVYFASTEKSNIIRGWIFGTTLDSKTQSLLIVNNATNVVIKVCEFQFCNDPFLGVYYHKNNKSWMESEFRVYSSANNCTFEYVSQPFLMDLEGKQGNFKNLREFVFKNIDGYFKIYSKHTPINLVRDLPQGFSALEPLVDLPIGINITRFKTLLALHRSYLTPGDSSSGWTAGAAAYYVGYLQPRTFLLKYNENGTITDAVDCALDPLSETKCTLKSFTVEKGIYQTSNFRVQPTESIVRFPNITNLCPFGEVFNATRFASVYAWNRKRISNCVADYSVLYNSASFSTFKCYGVSPTKLNDLCFTNVYADSFVIRGDEVRQIAPGQTGKIADYNYKLPDDFTGCVIAWNSNNLDSKVGGNYNYLYRLFRKSNLKPFERDISTEIYQAGSTPCNGVEGFNCYFPLQSYGFQPTNGVGYQPYRVVVLSFELLHAPATVCGPKKSTNLVKNKCVNFNFNGLTGTGVLTESNKKFLPFQQFGRDIADTTDAVRDPQTLEILDITPCSFGGVSVITPGTNTSNQVAVLYQGVNCTEVPVAIHADQLTPTWRVYSTGSNVFQTRAGCLIGAEHVNNSYECDIPIGAGICASYQTQTNSPRRARSVASQSIIAYTMSLGAENSVAYSNNSIAIPTNFTISVTTEILPVSMTKTSVDCTMYICGDSTECSNLLLQYGSFCTQLNRALTGIAVEQDKNTQEVFAQVKQIYKTPPIKDFGGFNFSQILPDPSKPSKRSFIEDLLFNKVTLADAGFIKQYGDCLGDIAARDLICAQKFNGLTVLPPLLTDEMIAQYTSALLAGTITSGWTFGAGAALQIPFAMQMAYRFNGIGVTQNVLYENQKLIANQFNSAIGKIQDSLSSTASALGKLQDVVNQNAQALNTLVKCLSSNFGAISSVLNDILSRLDKVEAEVQIDRLITGRLQCLQTYVTQQLIRAAEIRASANLAATKMSECVLGQSKRVDFCGKGYHLMSFPQSAPHGVVFLHVTYVPAQEKNFTTAPAICHDGKAHFPREGVFVSNGTHWFVTQRNFYEPQIITTDNTFVSGNCDVVIGIVNNTVYDPLQPELDS

SEQ ID NO: 3322 - protein, 1147 aa, Artificial Sequence
  SARS-CoV-2/Netherlands/ZuidHolland_2/2020__EPI_ISL_414556 spike protein (1-1147)(Q965C_S1003C)
MFVFLVLLPLVSSQCVNLTTRTQLPPAYTNSFTRGVYYPDKVFRSSVLHSTQDLFLPFFSNVTWFHAIHVSGTNGTKRFDNPVLPFNDGVYFASTEKSNIIRGWIFGTTLDSKTQSLLIVNNATNVVIKVCEFQFCNDPFLGVYYHKNNKSWMESEFRVYSSANNCTFEYVSQPFLMDLEGKQGNFKNLREFVFKNIDGYFKIYSKHTPINLVRDLPQGFSALEPLVDLPIGINITRFQTLLALHRSYLTPGDSSSGWTAGAAAYYVGYLQPRTFLLKYNENGTITDAVDCALDPLSETKCTLKSFTVEKGIYQTSNFRVQPTESIVRFPNITNLCPFGEVFNATRFASVYAWNRKRISNCVADYSVLYNSASFSTFKCYGVSPTKLNDLCFTNVYADSFVIRGDEVRQIAPGQTGKIADYNYKLPDDFTGCVIAWNSNNLDSKVGGNYNYLYRLFRKSNLKPFERDISTEIYQAGSTPCNGVEGFNCYFPLQSYGFQPTNGVGYQPYRVVVLSFELLHAPATVCGPKKSTNLVKNKCVNFNFNGLTGTGVLTESNKKFLPFQQFGRDIADTTDAVRDPQTLEILDITPCSFGGVSVITPGTNTSNQVAVLYQGVNCTEVPVAIHADQLTPTWRVYSTGSNVFQTRAGCLIGAEHVNNSYECDIPIGAGICASYQTQTNSPRRARSVASQSIIAYTMSLGAENSVAYSNNSIAIPTNFTISVTTEILPVSMTKTSVDCTMYICGDSTECSNLLLQYGSFCTQLNRALTGIALEQDKNTQEVFAQVKQIYKTPPIKDFGGFNFSQILPDPSKPSKRSFIEDLLFNKVTLADAGFIKQYGDCLGDIAARDLICAQKFNGLTVLPPLLTDEMIAQYTSALLAGTITSGWTFGAGAALQIPFAMQMAYRFNGIGVTQNVLYENQKLIANQFNSAIGKIQDSLSSTASALGKLQDVVNQNAQALNTLVKCLSSNFGAISSVLNDILSRLDKVEAEVQIDRLITGRLQCLQTYVTQQLIRAAEIRASANLAATKMSECVLGQSKRVDFCGKGYHLMSFPQSAPHGVVFLHVTYVPAQEKNFTTAPAICHDGKAHFPREGVFVSNGTHWFVTQRNFYEPQIITTDNTFVSGNCDVVIGIVNNTVYDPLQPELDS

SEQ ID NO: 3323 - protein, 1147 aa, Artificial Sequence
  SARS-CoV-2/USA/WA-UW31/2020__EPI_ISL_414618 spike protein (1-1147)(Q965C_S1003C)
MFVFLVLLPLVSSQCVNLTTRTQLPPAYTNSFTRGVYYPDKVFRSSVLHSTQDLFLPFFSNVTWFHAIHVSGTNGTKRFDNPVLPFNDGVYFASTEKSNIIRGWIFGTTLDSKTQSLLIVNNATNVVIKVCEFQFCNDPFLGVYYHKNNKSWMESEFRVYSSANNCTFEYVSQPFLMDLEGKQGNFKNLREFVFKNIDGYFKIYSKHTPINLVRDLPQGFSALEPLVDLPIGINITRFQTLLALHRSYLTPGDSSSGWTAGAAAYYVGYLQPRTFLLKYNENGTITDAVDCALDPLSETKCTLKSFTVEKGIYQTSNFRVQPTESIVRFPNITNLCPFGEVFNATRFASVYAWNRKRISNCVADYSVLYNSASFSTFKCYGVSPTKLNDLCFTNVYADSFVIRGDEVRQIAPGQTGKIADYNYKLPDDFTGCVIAWNSNNLDSKVGGNYNYLYRLFRKSNLKPFERDISTEIYQAGSTPCNGAEGFNCYFPLQSYGFQPTNGVGYQPYRVVVLSFELLHAPATVCGPKKSTNLVKNKCVNFNFNGLTGTGVLTESNKKFLPFQQFGRDIADTTDAVRDPQTLEILDITPCSFGGVSVITPGTNTSNQVAVLYQDVNCTEVPVAIHADQLTPTWRVYSTGSNVFQTRAGCLIGAEHVNNSYECDIPIGAGICASYQTQTNSPRRARSVASQSIIAYTMSLGAENSVAYSNNSIAIPTNFTISVTTEILPVSMTKTSVDCTMYICGDSTECSNLLLQYGSFCTQLNRALTGIAVEQDKNTQEVFAQVKQIYKTPPIKDFGGFNFSQILPDPSKPSKRSFIEDLLFNKVTLADAGFIKQYGDCLGDIAARDLICAQKFNGLTVLPPLLTDEMIAQYTSALLAGTITSGWTFGAGAALQIPFAMQMAYRFNGIGVTQNVLYENQKLIANQFNSAIGKIQDSLSSTASALGKLQDVVNQNAQALNTLVKCLSSNFGAISSVLNDILSRLDKVEAEVQIDRLITGRLQCLQTYVTQQLIRAAEIRASANLAATKMSECVLGQSKRVDFCGKGYHLMSFPQSAPHGVVFLHVTYVPAQEKNFTTAPAICHDGKAHFPREGVFVSNGTHWFVTQRNFYEPQIITTDNTFVSGNCDVVIGIVNNTVYDPLQPELDS

SEQ ID NO: 3324 - protein, 1147 aa, Artificial Sequence
  SARS-CoV-2/South Korea/SNU01/2020__EPI_ISL_411929 spike protein (1-1147)(Q965C_S1003C)
MFVFLVLLPLVSSQCVNLTTRTQLPPAYTNSFTRGVYYPDKVFRSSVLHSTQDLFLPFFSNVTWFHAIHVSGTNGTKRFDNPVLPFNDGVYFASTEKSNIIRGWIFGTTLDSKTQSLLIVNNATNVVIKVCEFQFCNDPFLGVYYHKNNKSWMESEFRVYSSANNCTFEYVSQPFLMDLEGKQGNFKNLREFVFKNIDGYFKIYSKHTPINLVRDLPQGFWALEPLVDLPIGINITRFQTLLALHRSYLTPGDSSSGWTAGAAAYYVGYLQPRTFLLKYNENGTITDAVDCALDPLSETKCTLKSFTVEKGIYQTSNFRVQPTESIVRFPNITNLCPFGEVFNATRFASVYAWNRKRISNCVADYSVLYNSASFSTFKCYGVSPTKLNDLCFTNVYADSFVIRGDEVRQIAPGQTGKIADYNYKLPDDFTGCVIAWNSNNLDSKVGGNYNYLYRLFRKSNLKPFERDISTEIYQAGSTPCNGVEGFNCYFPLQSYGFQPTNGVGYQPYRVVVLSFELLHAPATVCGPKKSTNLVKNKCVNFNFNGLTGTGVLTESNKKFLPFQQFGRDIADTTDAVRDPQTLEILDITPCSFGGVSVITPGTNTSNQVAVLYQDVNCTEVPVAIHADQLTPTWRVYSTGSNVFQTRAGCLIGAEHVNNSYECDIPIGAGICASYQTQTNSPRRARSVASQSIIAYTMSLGAENSVAYSNNSIAIPTNFTISVTTEILPVSMTKTSVDCTMYICGDSTECSNLLLQYGSFCTQLNRALTGIAVEQDKNTQEVFAQVKQIYKTPPIKDFGGFNFSQILPDPSKPSKRSFIEDLLFNKVTLADAGFIKQYGDCLGDIAARDLICAQKFNGLTVLPPLLTDEMIAQYTSALLAGTITSGWTFGAGAALQIPFAMQMAYRFNGIGVTQNVLYENQKLIANQFNSAIGKIQDSLSSTASALGKLQDVVNQNAQALNTLVKCLSSNFGAISSVLNDILSRLDKVEAEVQIDRLITGRLQCLQTYVTQQLIRAAEIRASANLAATKMSECVLGQSKRVDFCGKGYHLMSFPQSAPHGVVFLHVTYVPAQEKNFTTAPAICHDGKAHFPREGVFVSNGTHWFVTQRNFYEPQIITTDNTFVSGNCDVVIGIVNNTVYDPLQPELDS

SEQ ID NO: 3325 - protein, 1147 aa, Artificial Sequence
  SARS-CoV-2/China/WF0004/2020__EPI_ISL_413694 spike protein (1-1147)(Q965C_S1003C)
MFVFLVLLPLVSSQCVNLTTRTQLPPAYTNSFTRGVYYPDKVFRSSVLHSTQDLFLPFFSNVTWFHAIHVSGTNGTKRFDNPVLPFNDGVYFASTEKSNIIRGWIFGTTLDSKTQSLLIVNNATNVVIKVCEFQFCNDPFLGVYYHKNNKSWTESEFRVYSSANNCTFEYVSQPFLMDLEGKQGNFKNLREFVFKNIDGYFKIYSKHTPINLVRDLPQGFSALEPLVDLPIGINITRFQTLLALHRSYLTPGDSSSGWTAGAAAYYVGYLQPRTFLLKYNENGTITDAVDCALDPLSETKCTLKSFTVEKGIYQTSNFRVQPTESIVRFPNITNLCPFGEVFNATRFASVYAWNRKRISNCVADYSVLYNSASFSTFKCYGVSPTKLNDLCFTNVYADSFVIRGDEVRQIAPGQTGKIADYNYKLPDDFTGCVIAWNSNNLDSKVGGNYNYLYRLFRKSNLKPFERDISTEIYQAGSTPCNGVEGFNCYFPLQSYGFQPTNGVGYQPYRVVVLSFELLHAPATVCGPKKSTNLVKNKCVNFNFNGLTGTGVLTESNKKFLPFQQFGRDIADTTDAVRDPQTLEILDITPCSFGGVSVITPGTNTSNQVAVLYQDVNCTEVPVAIHADQLTPTWRVYSTGSNVFQTRAGCLIGAEHVNNSYECDIPIGAGICASYQTQTNSPRRARSVASQSIIAYTMSLGAENSVAYSNNSIAIPTNFTISVTTEILPVSMTKTSVDCTMYICGDSTECSNLLLQYGSFCTQLNRALTGIAVEQDKNTQEVFAQVKQIYKTPPIKDFGGFNFSQILPDPSKPSKRSFIEDLLFNKVTLADAGFIKQYGDCLGDIAARDLICAQKFNGLTVLPPLLTDEMIAQYTSALLAGTITSGWTFGAGAALQIPFAMQMAYRFNGIGVTQNVLYENQKLIANQFNSAIGKIQDSLSSTASALGKLQDVVNQNAQALNTLVKCLSSNFGAISSVLNDILSRLDKVEAEVQIDRLITGRLQCLQTYVTQQLIRAAEIRASANLAATKMSECVLGQSKRFDFCGKGYHLMSFPQSAPHGVVFLHVTYVPAQEKNFTTAPAICHDGKAHFPREGVFVSNGTHWFVTQRNFYEPQIITTDNTFVSGNCDVVIGIVNNTVYDPLQPELDS

SEQ ID NO: 3326 - protein, 1147 aa, Artificial Sequence
  SARS-CoV-2/China/WF0028/2020__EPI_ISL_413791 spike protein (1-1147)(Q965C_S1003C)
MFVFLVLLPLVSSQCVNLTTRTQLPPAYTNSFTRGVYYPDKVFRSSVLHSTQDLFLPFFSNVTWFHAIHVSGTNGTKRFDNPVLPFNDGVYFASTEKSNIIRGWIFGTTLDSKTQSLLIVNNATNVVIKVCEFQFCNDPFLGVYYHKNNKSWMESEFRVYSSANNCTFEYVSQPFLMDLEGKQGNFKNLREFVFKNIDGYFKIYSKHTPINLVRDLPQGFSALEPLVDLPIGINITRFQTLLALHRSYLTPGDSSSGWTAGAAAYYVGYLQPRTFLLKYNENGTITDAVDCALDPLSETKCTLKSFTVEKGIYQTSNFRVQPTESIVRFPNITNLCPFGEVFNATRFASVYAWNRKRISNCVADYSVLYNSASFSTFKCYGVSPTKLNDLCFTNVYADSFVIRGDEVRQIAPGQTGKIADYNYKLPDDFTGCVIAWNSNNLDSKVGGNYNYLYRLFRKSNLKPFERDISTEIYQAGSTPCNGVEGFNCYFPLQSYGFQPTNGVGYQPYRVVVLSFELLHAPATVCGPKKSTNLVKNKCVNFNFNGLTGTGVLTESNKKFLPFQQFGRDIADTTDAVRDPQTLEILDITPCSFGGVSVITPGTNTSNQVAVLYQDVNCTEVPVAIHADQLTPTWRVYSTGSNVFQTRAGCLIGAEHVNNSYECDIPIGAGICASYQTQTNSPRRARSVASQSIIAYTMSLGAENSVAYSNNSIAIPTNFTISVTTEILPVSMTKTSVDCTMYICGDSTECSNLLLQYGSFCTQLNRALTGIAVEQDKNTQEVFAQVKQIYKTPPIKDFGGFNFSQILPDPSKPSKRSFIEDLLFNKVTLADAGFIKQYGDCLGDIAARDLICAQKFNGLTVLPPLLTDEMIAQYTSALLAGTITSGWTFGAGAALQIPFAMQMAYRFNGIGVTQNVLYENQKLIANQFNSAIGKIQDSLSSTASALGKLQDVVNQNAQALNTLVKCLSSNFGAISSVLNDILSRLDKVEAEVQIDRLITGRLQCLQTYVTQQLIRAAEIRASANLAATKMSECVLGQSKRVDFCGKGYHLMSFPQSAPHGVVFLHVTYVPAQEKNFTTAPAICHDGKAHFPREGVFVSNGTHWFVTQRNFYEPQIITTDNTFVSGNCDVVIGIVNNTVYDPLQPELES

SEQ ID NO: 3327 - protein, 1147 aa, Artificial Sequence
  SARS-CoV-2/2019-nCoV/USA-CruiseA-18/2020__MT159716.1 spike protein (1-1147)(Q965C_S1003C)
MFVFLVLLPLVSSQCVNLTTRTQLPPAYTNSFTRGVYYPDKVFRSSVLHSTQDLFLPFFSNVTWFHAIHVSGTNGTKRFDNPVLPFNDGVYFASTEKSNIIRGWIFGTTLDSKTQSLLIVNNATNVVIKVCEFQFCNDPFLGVYYHKNNKSWMESELRVYSSANNCTFEYVSQPFLMDLEGKQGNFKNLREFVFKNIDGYFKIYSKHTPINLVRDLPQGFSALEPLVDLPIGINITRFQTLLALHRSYLTPGDSSSGWTAGAAAYYVGYLQPRTFLLKYNENGTITDAVDCALDPLSETKCTLKSFTVEKGIYQTSNFRVQPTESIVRFPNITNLCPFGEVFNATRFASVYAWNRKRISNCVADYSVLYNSASFSTFKCYGVSPTKLNDLCFTNVYADSFVIRGDEVRQIAPGQTGKIADYNYKLPDDFTGCVIAWNSNNLDSKVGGNYNYLYRLFRKSNLKPFERDISTEIYQAGSTPCNGVEGFNCYFPLQSYGFQPTNGVGYQPYRVVVLSFELLHAPATVCGPKKSTNLVKNKCVNFNFNGLTGTGVLTESNKKFLPFQQFGRDIADTTDAVRDPQTLEILDITPCSFGGVSVITPGTNTSNQVAVLYQDVNCTEVPVAIHADQLTPTWRVYSTGSNVFQTRAGCLIGAEHVNNSYECDIPIGAGICASYQTQTNSPRRARSVASQSIIAYTMSLGAENSVAYSNNSIAIPTNFTISVTTEILPVSMTKTSVDCTMYICGDSTECSNLLLQYGSFCTQLNRALTGIAVEQDKNTQEVFAQVKQIYKTPPIKDFGGFNFSQILPDPSKPSKRSFIEDLLFNKVTLADAGFIKQYGDCLGDIAARDLICAQKFNGLTVLPPLLTDEMIAQYTSALLAGTITSGWTFGAGAALQIPFAMQMAYRFNGIGVTQNVLYENQKLIANQFNSAIGKIQDSLSSTASALGKLQDVVNQNAQALNTLVKCLSSNFGAISSVLNDILSRLDKVEAEVQIDRLITGRLQCLQTYVTQQLIRAAEIRASANLAATKMSECVLGQSKRVDFCGKGYHLMSFPQSAPHGVVFLHVTYVPAQEKNFTTAPAICHDGKAHFPREGVFVSNGTHWFVTQRNFYEPQIITTDNTFVSGNCDVVIGIVNNTVYDPLQPELDS

SEQ ID NO: 3328 - protein, 1147 aa, Artificial Sequence
  SARS-CoV-2/SARS-CoV-2/Yunnan-01/human/2020/CHN__MT049951.1 spike protein (1-1147)(Q965C_S1003C)
MFVFLVLLPLVSSQCVNLTTRTQLPPANTNSFTRGVYYPDKVFRSSVLHSTQDLFLPFFSNVTWFHAIHVSGTNGTKRFDNPVLPFNDGVYFASTEKSNIIRGWIFGTTLDSKTQSLLIVNNATNVVIKVCEFQFCNDPFLGVYYHKNNKSWMESEFRVYSSANNCTFEYVSQPFLMDLEGKQGNFKNLREFVFKNIDGYFKIYSKHTPINLVRDLPQGFSALEPLVDLPIGINITRFQTLLALHRSYLTPGDSSSGWTAGAAAYYVGYLQPRTFLLKYNENGTITDAVDCALDPLSETKCTLKSFTVEKGIYQTSNFRVQPTESIVRFPNITNLCPFGEVFNATRFASVYAWNRKRISNCVADYSVLYNSASFSTFKCYGVSPTKLNDLCFTNVYADSFVIRGDEVRQIAPGQTGKIADYNYKLPDDFTGCVIAWNSNNLDSKVGGNYNYLYRLFRKSNLKPFERDISTEIYQAGSTPCNGVEGFNCYFPLQSYGFQPTNGVGYQPYRVVVLSFELLHAPATVCGPKKSTNLVKNKCVNFNFNGLTGTGVLTESNKKFLPFQQFGRDIADTTDAVRDPQTLEILDITPCSFGGVSVITPGTNTSNQVAVLYQDVNCTEVPVAIHADQLTPTWRVYSTGSNVFQTRAGCLIGAEHVNNSYECDIPIGAGICASYQTQTNSPRRARSVASQSIIAYTMSLGAENSVAYSNNSIAIPTNFTISVTTEILPVSMTKTSVDCTMYICGDSTECSNLLLQYGSFCTQLNRALTGIAVEQDKNTQEVFAQVKQIYKTPPIKDFGGFNFSQILPDPSKPSKRSFIEDLLFNKVTLADAGFIKQYGDCLGDIAARDLICAQKFNGLTVLPPLLTDEMIAQYTSALLAGTITSGWTFGAGAALQIPFAMQMAYRFNGIGVTQNVLYENQKLIANQFNSAIGKIQDSLSSTASALGKLQDVVNQNAQALNTLVKCLSSNFGAISSVLNDILSRLDKVEAEVQIDRLITGRLQCLQTYVTQQLIRAAEIRASANLAATKMSECVLGQSKRVDFCGKGYHLMSFPQSAPHGVVFLHVTYVPAQEKNFTTAPAICHDGKAHFPREGVFVSNGTHWFVTQRNFYEPQIITTDNTFVSGNCDVVIGIVNNTVYDPLQPELDS

SEQ ID NO: 3329 - protein, 1147 aa, Artificial Sequence
  SARS-CoV-2/USA/WA-UW292/2020__EPI_ISL_418077 spike protein (1-1147)(Q965C_S1003C)
MFVFLVLLPLVSSQCVNLTTRTQLPPAYTNSFTRGVYYPDKVFRSSVLHSTQDLFLPFFSNVTWFHAIHVSGTNGTKRFDNPVLPFNDGVYFASTEKSNIIRGWIFGTTLDSKTQSLLIVNNATNVVIKVCEFQFCNDPFLGVYYHKNNKSWMESEFRVYSSANNCTFEYVSQPFLMDLEGKQGNFKNLREFVFKNIDGYFKIYSKHTPINLVRDLPQGFSALEPLVDLPIGINITRFQTLLALHRSYLTPGDSSSGWTAGAAAYYVGYLQPRTFLLKYNENGTITDAVDCALDPLSETKCTLKSFTVEKGIYQTSNFRVQPTESIVRFPNITNLCPFGEVFNATRFASVYAWNRKRISNCVADYSVLYNSASFSTFKCYGVSPTKLNDLCFTNVYADSFVIRGDEVRQIAPGQTGKIADYNYKLPDDFTGCVIAWNSNNLDSKVGGNYNYLYRLFRKSNLKPFERDISTEIYQASSTPCNGVEGFNCYFPLQSYGFQPTNGVGYQPYRVVVLSFELLHAPATVCGPKKSTNLVKNKCVNFNFNGLTGTGVLTESNKKFLPFQQFGRDIADTTDAVRDPQTLEILDITPCSFGGVSVITPGTNTSNQVAVLYQDVNCTEVPVAIHADQLTPTWRVYSTGSNVFQTRAGCLIGAEHVNNSYECDIPIGAGICASYQTQTNSPRRARSVASQSIIAYTMSLGAENSVAYSNNSIAIPTNFTISVTTEILPVSMTKTSVDCTMYICGDSTECSNLLLQYGSFCTQLNRALTGIAVEQDKNTQEVFAQVKQIYKTPPIKDFGGFNFSQILPDPSKPSKRSFIEDLLFNKVTLADAGFIKQYGDCLGDIAARDLICAQKFNGLTVLPPLLTDEMIAQYTSALLAGTITSGWTFGAGAALQIPFAMQMAYRFNGIGVTQNVLYENQKLIANQFNSAIGKIQDSLSSTASALGKLQDVVNQNAQALNTLVKCLSSNFGAISSVLNDILSRLDKVEAEVQIDRLITGRLQCLQTYVTQQLIRAAEIRASANLAATKMSECVLGQSKRVDFCGKGYHLMSFPQSAPHGVVFLHVTYVPAQEKNFTTAPAICHDGKAHFPREGVFVSNGTHWFVTQRNFYEPQIITTDNTFVSGNCDVVIGIVNNTVYDPLQPELDS

SEQ ID NO: 3330 - protein, 1147 aa, Artificial Sequence
  SARS-CoV-2/Iceland/192/2020__EPI_ISL_417819 spike protein (1-1147)(Q965C_S1003C)
MFVFFVLLPLVSSQCVNLTTRTQLPPAYTNSFTRGVYYPDKVFRSSVLHSTQDLFLPFFSNVTWFHAIHVSGTNGTKRFDNPVLPFNDGVYFASTEKSNIIRGWIFGTTLDSKTQSLLIVNNATNVVIKVCEFQFCNDPFLGVYYHKNNKSWMESEFRVYSSANNCTFEYVSQPFLMDLEGKQGNFKNLREFVFKNIDGYFKIYSKHTPINLVRDLPQGFSALEPLVDLPIGINITRFQTLLALHRSYLTPGDSSSGWTAGAAAYYVGYLQPRTFLLKYNENGTITDAVDCALDPLSETKCTLKSFTVEKGIYQTSNFRVQPTESIVRFPNITNLCPFGEVFNATRFASVYAWNRKRISNCVADYSVLYNSASFSTFKCYGVSPTKLNDLCFTNVYADSFVIRGDEVRQIAPGQTGKIADYNYKLPDDFTGCVIAWNSNNLDSKVGGNYNYLYRLFRKSNLKPFERDISTEIYQAGSTPCNGVEGFNCYFPLQSYGFQPTNGVGYQPYRVVVLSFELLHAPATVCGPKKSTNLVKNKCVNFNFNGLTGTGVLTESNKKFLPFQQFGRDIADTTDAVRDPQTLEILDITPCSFGGVSVITPGTNTSNQVAVLYQGVNCTEVPVAIHADQLTPTWRVYSTGSNVFQTRAGCLIGAEHVNNSYECDIPIGAGICASYQTQTNSPRRARSVASQSIIAYTMSLGAENSVAYSNNSIAIPTNFTISVTTEILPVSMTKTSVDCTMYICGDSTECSNLLLQYGSFCTQLNRALTGIAVEQDKNTQEVFAQVKQIYKTPPIKDFGGFNFSQILPDPSKPSKRSFIEDLLFNKVTLADAGFIKQYGDCLGDIAARDLICAQKFNGLTVLPPLLTDEMIAQYTSALLAGTITSGWTFGAGAALQIPFAMQMAYRFNGIGVTQNVLYENQKLIANQFNSAIGKIQDSLSSTASALGKLQDVVNQNAQALNTLVKCLSSNFGAISSVLNDILSRLDKVEAEVQIDRLITGRLQCLQTYVTQQLIRAAEIRASANLAATKMSECVLGQSKRVDFCGKGYHLMSFPQSAPHGVVFLHVTYVPAQEKNFTTAPAICHDGKAHFPREGVFVSNGTHWFVTQRNFYEPQIITTDNTFVSGNCDVVIGIVNNTVYDPLQPELDS

SEQ ID NO: 3331 - protein, 1147 aa, Artificial Sequence
  SARS-CoV-2/Belgium/ULG-6939/2020__EPI_ISL_417020 spike protein (1-1147)(Q965C_S1003C)
MFVFLVLLPLVSSQCVNLTTRTQLPPAYTNSFTRGVYYPDKVFRSSVLHSTQDLFLPFFSNVTWFHAIHVSGTNGTKRFDNPVLPFNDGVYFASTEKSNIIRGWIFGTTLDSKTQSLLIVNNATNVVIKVCEFQFCNDPFLGVYYHKNNKSWMESEFRVYSSANNCTFEYVSQPFLMDLEGKQGNFKNLREFVFKNIDGYFKIYSKHTPINLVRDLPQGFSALEPLVDLPIGINITRFQTLLALHRSYLTPGDSSSGWTAGAAAYYVGYLQPRTFLLKYNENGTITDAVDCALDPLSETKCTLKSFTVEKGIYQTSNFRVQPTESIVRFPNITNLCPFGEVFNATRFASVYAWNRKRISNCVADYSVLYNSASFSTFKCYGVSPTKLNDLCFTNVYADSFVIRGDEVRQIAPGQTGKIADYNYKLPDDFTGCVIAWNSNNLDSKVGGNYNYLYRLFRKSNLKPFERDISTEIYQAGSTPCNGVEGFNCYFPLQSYGFQPTNGVGYQPYRVVVLSFELLHAPATVCGPKKSTNLVKNKCVNFNFNGLTGTGVLTESNKKFLPFQQFGRDIADTTDAVRDPQTLEILDITPCSFGGVSVITPGTNTSNQVAVLYQGVNCTEVPVAIHADQLTPTWRVYSTGSNVFQTRAGCLIGAEHVNNSYECDIPIGAGICASYQTQTNSPRRARSVASQSIIAYTMSLGAENSVVYSNNSIAIPTNFTISVTTEILPVSMTKTSVDCTMYICGDSTECSNLLLQYGSFCTQLNRALTGIAVEQDKNTQEVFAQVKQIYKTPPIKDFGGFNFSQILPDPSKPSKRSFIEDLLFNKVTLADAGFIKQYGDCLGDIAARDLICAQKFNGLTVLPPLLTDEMIAQYTSALLAGTITSGWTFGAGAALQIPFAMQMAYRFNGIGVTQNVLYENQKLIANQFNSAIGKIQDSLSSTASALGKLQDVVNQNAQALNTLVKCLSSNFGAISSVLNDILSRLDKVEAEVQIDRLITGRLQCLQTYVTQQLIRAAEIRASANLAATKMSECVLGQSKRVDFCGKGYHLMSFPQSAPHGVVFLHVTYVPAQEKNFTTAPAICHDGKAHFPREGVFVSNGTHWFVTQRNFYEPQIITTDNTFVSGNCDVVIGIVNNTVYDPLQPELDS

SEQ ID NO: 3332 - protein, 1147 aa, Artificial Sequence
  SARS-CoV-2/France/HF2496/2020__EPI_ISL_418231 spike protein (1-1147)(Q965C_S1003C)
MFVFLVLLPLVSSQCVNLTTRTQLPPAYTNSFTRGVYYPDKVFRSSVLHSTQDLFLPFFSNVTWFHAIHVSGTNGTKRFDNPVLPFNDGVYFASTEKSNIIRGWIFGTTLDSKTQSLLIVNNATNVVIKVCEFQFCNDPFLGVYYHKNNKSWMESEFRVYSSANNCTFEYVSQPFLMDLEGKQGNFKNLREFVFKNIDGYFKIYSKHTPINLVRDLPQGFSALEPLVDLPIGINITRFQTLLALHRSYLTPGDSSSGWTAGAAAYYVGYLQPRTFLLKYNENGTITDAVDCALDPLSETKCTLKSFTVEKGIYQTSNFRVQPTESIVRFPNITNLCPFGEVFNATRFASVYAWNRKRISNCVADYSVLYNSASFSTFKCYGVSPTKLNDLCFTNVYADSFVIRGDEVRQIAPGQTGKIADYNYKLPDDFTGCVIAWNSNNLDSKVGGNYNYLYRLFRKSNLKPFERDISTEIYQAGSTPCNGVEGFNCYFPLQSYGFQPTNGVGYQPYRVVVLSFELLHAPATVCGPKKSTNLVKNKCVNFNFNGLTGTGVLTESNKKFLPFQQFGRDIADTTDAVRDPQTLEILDITPCSFGGVSVITPGTNTSNQVAVLYQGVNCTEVPVAIHADQLTPTWRVYSTGSNVFQTRAGCLIGAEHVNNSYECDIPIGAGICASYQTQTNSPRRARSVASQSIIAYTMSLGAENSVAYSNNSIAIPTNFTISVTTEILPVSMTKTSVDCTMYICGDSTECSNLLLQYGSFCTQLNRALTGIAVEQDKNTQEVFAQVKQIYKTPPIKDFGGFNFSQILPDPSKPSKRSFIEDLLFNKVTLADAGFIKQYGDCLGDIVARDLICAQKFNGLTVLPPLLTDEMIAQYTSALLAGTITSGWTFGAGAALQIPFAMQMAYRFNGIGVTQNVLYENQKLIANQFNSAIGKIQDSLSSTASALGKLQDVVNQNAQALNTLVKCLSSNFGAISSVLNDILSRLDKVEAEVQIDRLITGRLQCLQTYVTQQLIRAAEIRASANLAATKMSECVLGQSKRVDFCGKGYHLMSFPQSAPHGVVFLHVTYVPAQEKNFTTAPAICHDGKAHFPREGVFVSNGTHWFVTQRNFYEPQIITTDNTFVSGNCDVVIGIVNNTVYDPLQPELDS

SEQ ID NO: 3333 - protein, 1147 aa, Artificial Sequence
  SARS-CoV-2/USA/WA-UW291/2020__EPI_ISL_418076 spike protein (1-1147)(Q965C_S1003C)
MFVFLVLLPLVSSQCVNLTTRTQLPPAYTNSFTRGVYYPDKVFRSSVLHSTQDLFLPFFSNVTWFHAIHVSGTNGTKRFDNPVLPFNDGVYFASTEKSNIIRGWIFGTTLDSKTQSLLIVNNATNVVIKVCEFQFCNDPFLGVYYHKNNKSWMESEFRVYSSANNCTFEYVSQPFLMDLEGKQGNFKNLREFVFKNIDGYFKIYSKHTPINLVRDLPQGFSALEPLVDLPIGINITRFQTLLALHRSYLTPGDSSSGWTAGAAAYYVGYLQPRTFLLKYNENGTITDAVDCALDPLSETKCTLKSFTVEKGIYQTSNFRVQPTESIVRFPNITNLCPFGEVFNATRFASVYAWNRKRISNCVADYSVLYNSASFSTFKCYGVSPTKLNDLCFTNVYADSFVIRGDEVRQIAPGQTGKIADYNYKLPDDFTGCVIAWNSNNLDSKVGGNYNYLYRLFRKSNLKPFERDISTEIYQAGSTPCNGVEGFNCYFPLQSYGFQPTNGVGYQPYRVVVLSFELLHAPATVCGPKKSTNLVKNKCVNFNFNGLTGTGVLTESNKKFLPFQQFGRDIADTTDAVRDPQTLEILDITPCSFGGVSVITPGTNTSNQVAVLYQGVNCTEVPVAIHADQLTPTWRVYSTGSNVFQTRAGCLIGAEHVNNSYECDIPIGAGICASYQTQTNSPRRARSVASQSIIAYTMSLGAENSVAYSNNSIAIPTNFTISVTTEILPVSMTKTSVDCTMYICGDSTECSNLLLQYGSFCTQLNRALTGIAVEQDKNTQEVFAQVKQIYKTPPIKDFGGFNFSQILPDPSKPSKRSFIEDLLFNKVTLADAGFIKQYGDCLGDIAARDLICAQKFNGLTVLPPLLTDEMIAQYTSALLAGTITSGWTFGAGAALQIPFAMQMAYRFNGIGVTQNVLYENQKLIANQFNSAIGKIQYSLSSTASALGKLQDVVNQNAQALNTLVKCLSSNFGAISSVLNDILSRLDKVEAEVQIDRLITGRLQCLQTYVTQQLIRAAEIRASANLAATKMSECVLGQSKRVDFCGKGYHLMSFPQSAPHGVVFLHVTYVPAQEKNFTTAPAICHDGKAHFPREGVFVSNGTHWFVTQRNFYEPQIITTDNTFVSGNCDVVIGIVNNTVYDPLQPELDS

SEQ ID NO: 3334 - protein, 1147 aa, Artificial Sequence; identical to SEQ ID NO: 3297
  SARS-CoV-2/Portugal/PT0034/2020__EPI_ISL_418019 spike protein (1-1147)(Q965C_S1003C)

SEQ ID NO: 3335 - protein, 1147 aa, Artificial Sequence; identical to SEQ ID NO: 3289
  SARS-CoV-2/Iceland/202/2020__EPI_ISL_417750 spike protein (1-1147)(Q965C_S1003C)

SEQ ID NO: 3336 - protein, 1147 aa, Artificial Sequence
  SARS-CoV-2/USA/WA-UW261/2020__EPI_ISL_418046 spike protein (1-1147)(Q965C_S1003C)
MFVFLVLLPLVSSQCVNLTTRTQLPPAYTNSFTRGVYYPDKVFRSSVLHSTQDLFLPFFSNVTWFHAIHVSGTNGTKRFDNPVLPFNDGVYFASTEKSNIIRGWIFGTTLDSKTQSLLIVNNATNVVIKVCEFQFCNDPFLGVYYHKNNKSWMESEFRVYSSANNCTFEYVSQPFLMDLEGKQGNFKNLREFVFKNIDGYFKIYSKHTPINLVRDLPQGFSALEPLVDLPIGINITRFQTLLALHRSYLTPGDSSSGWTAGAAAYYVGYLQPRTFLLKYNENGTITDAVDCALDPLSETKCTLKSFTVEKGIYQTSNFRVQPTESIVRFPNITNLCPFGEVFNATRFTSVYAWNRKRISNCVADYSVLYNSASFSTFKCYGVSPTKLNDLCFTNVYADSFVIRGDEVRQIAPGQTGKIADYNYKLPDDFTGCVIAWNSNNLDSKVGGNYNYLYRLFRKSNLKPFERDISTEIYQAGSTPCNGVEGFNCYFPLQSYGFQPTNGVGYQPYRVVVLSFELLHAPATVCGPKKSTNLVKNKCVNFNFNGLTGTGVLTESNKKFLPFQQFGRDIADTTDAVRDPQTLEILDITPCSFGGVSVITPGTNTSNQVAVLYQDVNCTEVPVAIHADQLTPTWRVYSTGSNVFQTRAGCLIGAEHVNNSYECDIPIGAGICASYQTQTNSPRRARSVASQSIIAYTMSLGAENSVAYSNNSIAIPTNFTISVTTEILPVSMTKTSVDCTMYICGDSTECSNLLLQYGSFCTQLNRALTGIAVEQDKNTQEVFAQVKQIYKTPPIKDFGGFNFSQILPDPSKPSKRSFIEDLLFNKVTLADAGFIKQYGDCLGDIAARDLICAQKFNGLTVLPPLLTDEMIAQYTSALLAGTITSGWTFGAGAALQIPFAMQMAYRFNGIGVTQNVLYENQKLIANQFNSAIGKIQDSLSSTASALGKLQDVVNQNAQALNTLVKCLSSNFGAISSVLNDILSRLDKVEAEVQIDRLITGRLQCLQTYVTQQLIRAAEIRASANLAATKMSECVLGQSKRVDFCGKGYHLMSFPQSAPHGVVFLHVTYVPAQEKNFTTAPAICHDGKAHFPREGVFVSNGTHWFVTQRNFYEPQIITTDNTFVSGNCDVVIGIVNNTVYDPLQPELDS

SEQ ID NO: 3337 - protein, 1147 aa, Artificial Sequence
  SARS-CoV-2/Portugal/PT0035/2020__EPI_ISL_418020 spike protein (1-1147)(Q965C_S1003C)
MFVFLVLLPLVSSQCVNLTTRTQLPPAYTNSFTRGVYYPDKVFRSSVLHSTQDLFLPFFSNVTWFHAIHVSGTNGTKRFDNPVLPFNDGVYFASTEKSNIIRGWIFGTTLDSKTQSLLIVNNATNVVIKVCEFQFCNDPFLGVYYHKNNKSWMESEFRVYSSANNCTFEYVSQPFLMDLEGKQGNFKNLREFVFKNIDGYFKIYSKHTPINLVRDLPQGFSALEPLVDLPIGINITRFQTLLALHRSYLTPGDSSSGWTAGAAAYYVGYLQPRTFLLKYNENGTITDAVDCALDPLSETKCTLKSFTVEKGIYQTSNFRVQPTESIVRFPNITNLCPFGEVFNATRFASVYAWNRKRISNCVADYSVLYNSASFSTFKCYGVSPTKLNDLCFTNVYADSFVIRGDEVRQIAPGQTGKIADYNYKLPDDFTGCVIAWNSNNLDSKVGGNYNYLYRLFRKSNLKPFERDISTEIYQAGSTPCNGVEGFNCYFPLQSYGFQPTNGVGYQPYRVVVLSFELLHAPATVCGPKKSTNLVKNKCVNFNFNGLTGTGVLTESNKKFLPFQQFGRDIADTTDAVRDPQTLEILDITPCSFGGVSVITPGTNTSNQVAVLYQDVNCTEVPVAIHADQLTPTWRVYSTGSNVFQTRAGCLIGAEHVNNSYECDIPIGAGICASYQTQTNSPRRARSVASQSIIAYTMSLGAENSVAYSNNSIAIPTNFTISVTTEILPVSMTKTSVDCTMYICGDSTECSNLLLQYGSFCTQLNRALTGIAVEQDKNTQEVFAQVKQIYKTPPIKDFGGFNFSQILPDPSKPSKRSFIEDLLFNKVTLADAGFIKQYGDCLGDISARDLICAQKFNGLTVLPPLLTDEMIAQYTSALLAGTITSGWTFGAGAALQIPFAMQMAYRFNGIGVTQNVLYENQKLIANQFNSAIGKIQDSLSSTASALGKLQDVVNQNAQALNTLVKCLSSNFGAISSVLNDILSRLDKVEAEVQIDRLITGRLQCLQTYVTQQLIRAAEIRASANLAATKMSECVLGQSKRVDFCGKGYHLMSFPQSAPHGVVFLHVTYVPAQEKNFTTAPAICHDGKAHFPREGVFVSNGTHWFVTQRNFYEPQIITTDNTFVSGNCDVVIGIVNNTVYDPLQPELDS

SEQ ID NO: 3338 - protein, 1147 aa, Artificial Sequence
  SARS-CoV-2/USA/NY-NYUMC7/2020__EPI_ISL_418192 spike protein (1-1147)(Q965C_S1003C)
MFVFLVLLPLVSSQCVNLTTRTQLPPAYTNSFTRGVYYPDKVFRSSVLHSTQDLFLPFFSNVTWFHAIHVSGTNGTKRFDNPVLPFNDGVYFASTEKSNIIRGWIFGTTLDSKTQSLLIVNNATNVVIKVCEFQFCNDPFLGVYHHKNNKSWMESEFRVYSSANNCTFEYVSQPFLMDLEGKQGNFKNLREFVFKNIDGYFKIYSKHTPINLVRDLPQGFSALEPLVDLPIGINITRFQTLLALHRSYLTPGDSSSGWTAGAAAYYVGYLQPRTFLLKYNENGTITDAVDCALDPLSETKCTLKSFTVEKGIYQTSNFRVQPTESIVRFPNITNLCPFGEVFNATRFASVYAWNRKRISNCVADYSVLYNSASFSTFKCYGVSPTKLNDLCFTNVYADSFVIRGDEVRQIAPGQTGKIADYNYKLPDDFTGCVIAWNSNNLDSKVGGNYNYLYRLFRKSNLKPFERDISTEIYQAGSTPCNGVEGFNCYFPLQSYGFQPTNGVGYQPYRVVVLSFELLHAPATVCGPKKSTNLVKNKCVNFNFNGLTGTGVLTESNKKFLPFQQFGRDIADTTDAVRDPQTLEILDITPCSFGGVSVITPGTNTSNQVAVLYQGVNCTEVPVAIHADQLTPTWRVYSTGSNVFQTRAGCLIGAEHVNNSYECDIPIGAGICASYQTQTNSPRRARSVASQSIIAYTMSLGAENSVAYSNNSIAIPTNFTISVTTEILPVSMTKTSVDCTMYICGDSTECSNLLLQYGSFCTQLNRALTGIAVEQDKNTQEVFAQVKQIYKTPPIKDFGGFNFSQILPDPSKPSKRSFIEDLLFNKVTLADAGFIKQYGDCLGDIAARDLICAQKFNGLTVLPPLLTDEMIAQYTSALLAGTITSGWTFGAGAALQIPFAMQMAYRFNGIGVTQNVLYENQKLIANQFNSAIGKIQDSLSSTASALGKLQDVVNQNAQALNTLVKCLSSNFGAISSVLNDILSRLDKVEAEVQIDRLITGRLQCLQTYVTQQLIRAAEIRASANLAATKMSECVLGQSKRVDFCGKGYHLMSFPQSAPHGVVFLHVTYVPAQEKNFTTAPAICHDGKAHFPREGVFVSNGTHWFVTQRNFYEPQIITTDNTFVSGNCDVVIGIVNNTVYDPLQPELDS

SEQ ID NO: 3339 - protein, 1147 aa, Artificial Sequence
  SARS-CoV-2/Iceland/189/2020__EPI_ISL_417709 spike protein (1-1147)(Q965C_S1003C)
MFVFLVLLPLVSSQCVNLTTRTQLPPAYTNSFTRGVYYPDKVFRSSVLHSTQDLFLPFFSNVTWFHAIHVSGTNGTKRFDNPVLPFNDGVYFASTEKSNIIRGWIFGTTLDSKTQSLLIVNNATNVVIKVCEFQFCNDPFLGVYYHKNNKSWMESEFRVYSSANNCTFEYVSQPFLMDLEGKQGNFKNLREFVFKNIDGYFKIYSKHTPINLVRDLPQGFSALEPLVDLPIGINITRFQTLLALHRSYLTPGDSSSGWTAGAAAYYVGYLQPRTFLLKYNENGTITDAVDCALDPLSETKCTLKSFTVEKGIYQTSNFRVQPTESIVRFPNITNLCPFGEVFNATRFASVYAWNRKRISNCVADYSVLYNSASFSTFKCYGVSPTKLNDLCFTNVYADSFVIRGDEVRQIAPGQTGKIADYNYKLPDDFTGCVIAWNSNNLDSKVGGNYNYLYRLFRKSNLKPFERDISTEIYQAGSTPCNGVEGFNCYFPLQSYGFQPTNGVGYQPYRVVVLSFELLHAPATVCGPKKSTNLVKNKCVNFNFNGLTGTGVLTESNKKFLPFQQFGRDIADTTDAVRDPQTLEILDITPCSFGGVSVITPGTNTSNQVAVLYQGVNCTEVPVAIHADQLTPTWRVYSTGSNVFQTRAGCLIGAEHVNNSYECDIPIGAGICASYQTQTNSPRRARSVASQSIIAYTMSLGAENSVAYSNNSIAIPTNFTISVTTEILPVSMTKTSVDCTMYICGDSTECSNLLLQYGSFCTQLNRALTGIAVEQDKNTQEVFAQVKQIYKTPPIKDFGGFNFSQILPDPSKPSKRSFIEDLLFNKVTLADAGFTKQYGDCLGDIAARDLICAQKFNGLTVLPPLLTDEMIAQYTSALLAGTITSGWTFGAGAALQIPFAMQMAYRFNGIGVTQNVLYENQKLIANQFNSAIGKIQDSLSSTASALGKLQDVVNQNAQALNTLVKCLSSNFGAISSVLNDILSRLDKVEAEVQIDRLITGRLQCLQTYVTQQLIRAAEIRASANLAATKMSECVLGQSKRVDFCGKGYHLMSFPQSAPHGVVFLHVTYVPAQEKNFTTAPAICHDGKAHFPREGVFVSNGTHWFVTQRNFYEPQIITTDNTFVSGNCDVVIGIVNNTVYDPLQPELDS

SEQ ID NO: 3340 - protein, 1147 aa, Artificial Sequence
  SARS-CoV-2/Australia/NSW56/2020__EPI_ISL_417408 spike protein (1-1147)(Q965C_S1003C)
MFVFLVLLPLVSSQCVNLTTRTQLPPAYTNSFTRGVYYPDKVFRSSVLHSTQDLFLPFFSNVTWFHAIHVSGTNGTKRFDNPVLPFNDGVYFASTEKSNIIRGWIFGTTLDSKTQSLLIVNNATNVVIKVCEFQFCNDPFLGVYYHKNNKSWMESEFRVYSSANNCTFEYVSQPFLMDLEGKQGNFKNLREFVFKNIDGYFKIYSKHTPINLVRDLPQGFSALEPLVDLPIGINITRFQTLLALHRSYLTPGDSSSGWTAGAAAYYVGYLQPRTFLLKYNENGTITDAVDCALDPLSETKCTLKSFTVEKGIYQTSNFRVQPTESIVRFPNITNLCPFGEVFNATRFASVYAWNRKRISNCVADYSVLYNSASFSTFKCYGVSPTKLNDLCFTNVYADSFVIRGDEVRQIAPGQTGKIADYNYKLPDDFTGCVIAWNSNNLDSKVGGNYNYLYRLFRKSNLKPFERDISTEIYQAGSTPCNGVEGFNCYFPLQSYGFQPTNGVGYQPYRVVVLSFELLHAPATVCGPKKSTNLVKNKCVNFNFNGLTGTGVLTESNKKFLPFQQFGRDIADTTDAVRDPQTLEILDITPCSFGGVSVITPGTNTSNQVAVLYQDVNCTEVPVAIHADQLTPTWRVYSTGSNVFQTRAGCLIGAEHVNNSYECDIPIGAGICASYQTQTNSPRRARSVASQSIIAYTMSLGAENSVAYSNNSIAIPTNFTISVTTEILPVSMTKTSVDCTMYICGDSTECSNLLLQYGSFCTQLNRALTGIAVEQDKNTQEVFAQVKQIYKTPPIKDFGGFNFSQILPDSSKPSKRSFIEDLLFNKVTLADAGFIKQYGDCLGDIAARDLICAQKFNGLTVLPPLLTDEMIAQYTSALLAGTITSGWTFGAGAALQIPFAMQMAYRFNGIGVTQNVLYENQKLIANQFNSAIGKIQDSLSSTASALGKLQDVVNQNAQALNTLVKCLSSNFGAISSVLNDILSRLDKVEAEVQIDRLITGRLQCLQTYVTQQLIRAAEIRASANLAATKMSECVLGQSKRVDFCGKGYHLMSFPQSAPHGVVFLHVTYVPAQEKNFTTAPAICHDGKAHFPREGVFVSNGTHWFVTQRNFYEPQIITTDNTFVSGNCDVVIGIVNNTVYDPLQPELDS

SEQ ID NO: 3341 - protein, 1147 aa, Artificial Sequence
  SARS-CoV-2/Iceland/280/2020__EPI_ISL_417608 spike protein (1-1147)(Q965C_S1003C)
MFVFLVLLPLVSSQCVNLTTRTQLPPAYTNSFTRGVYYPDKVFRSSVLHSTQDLFLPFFSNVTWFHAIHVSGTNGTKRFDNPVLPFNDGVYFASTEKSNIIRGWIFGTTLDSKTQSLLIVNNATNVVIKVCEFQFCNDPFLGVYYHKNNKSWMESEFRVYSSANNCTFEYVSQPFLMDLEGKQGNFKNLREFVFKNIDGYFKIYSKHTPINLVRDLPQGFSALEPLVDLPIGINITRFQTLLALHRSYLTPGDSSSGWTAGAAAYYVGYLQPRTFLLKYNENGTITDAVDCALDPLSETKCTLKSFTVEKGIYQTSNFRVQPTESIVRFPNITNLCPFGEVFNATRFASVYAWNRKRISNCVADYSVLYNSASFSTFKCYGVSPTKLNDLCFTNVYADSFVIRGDEVRQIAPGQTGKIADYNYKLPDDFTGCVIAWNSNNLDSKVGGNYNYLYRLFRKSNLKPFERDISTEIYQAGSTPCNGVEGFNCYFPLQSYGFQPTNGVGYQPYRVVVLSFELLHAPATVCGPKKSTNLVKNKCVNFNFNGLTGTGVLTESNKKFLPFQQFGRDIADTTDAVRDPQTLEILDITPCSFGGVSVITPGTNTSNQVAVLYQGVNCTEVPVAIHADQLTPTWRVYSTGSNVFQTRAGCLIGAEHVNNSYECDIPIGAGICASYHTQTNSPRRARSVASQSIIAYTMSLGAENSVAYSNNSIAIPTNFTISVTTEILPVSMTKTSVDCTMYICGDSTECSNLLLQYGSFCTQLNRALTGIAVEQDKNTQEVFAQVKQIYKTPPIKDFGGFNFSQILPDPSKPSKRSFIEDLLFNKVTLADAGFIKQYGDCLGDIAARDLICAQKFNGLTVLPPLLTDEMIAQYTSALLAGTITSGWTFGAGAALQIPFAMQMAYRFNGIGVTQNVLYENQKLIANQFNSAIGKIQDSLSSTASALGKLQDVVNQNAQALNTLVKCLSSNFGAISSVLNDILSRLDKVEAEVQIDRLITGRLQCLQTYVTQQLIRAAEIRASANLAATKMSECVLGQSKRVDFCGKGYHLMSFPQSAPHGVVFLHVTYVPAQEKNFTTAPAICHDGKAHFPREGVFVSNGTHWFVTQRNFYEPQIITTDNTFVSGNCDVVIGIVNNTVYDPLQPELDS

SEQ ID NO: 3342 - protein, 1147 aa, Artificial Sequence; identical to SEQ ID NO: 3297
  SARS-CoV-2/Iceland/247/2020__EPI_ISL_417575 spike protein (1-1147)(Q965C_S1003C)

SEQ ID NO: 3343 - protein, 1147 aa, Artificial Sequence
  SARS-CoV-2/Iceland/238/2020__EPI_ISL_417566 spike protein (1-1147)(Q965C_S1003C)
MFVFLVLLPLVSSQCVNLTTRTQLPPAYTNSFTRGVYYPDKVFRSSVLHSTQDLFLPFFSNVTWFHAIHVSGTNGTKRFDNPVLPFNDGVYFASTEKSNIIRGWIFGTTLDSKTQSLLIVNNATNVVIKVCEFQFCNDPFLGVYYHKNNKSWMESEFRVYSSANNCTFEYVSQPFLMDLEGKQGNFKNLREFVFKNIDGYFKIYSKHTPINLVRDLPQGFSALEPLVDLPIGINITRFQTLLALHRSYLTPGDSSSGWTAGAAAYYVGYLQPRTFLLKYNENGTITDAVDCALDPLSETKCTLKSFTVEKGIYQTSNFRVQPTESIVRFPNITNLCPFGEVFNATRFASVYAWNRKRISNCVADYSVLYNSASFSTFKCYGVSPTKLNDLCFTNVYADSFVIRGDEVRQIAPGQTGKIADYNYKLPDDFTGCVIAWNSNNLDSKVGGNYNYLYRLFRKSNLKPFERDISTEIYQAGSTPCNGVEGFNCYFPLQSYGFQPTNGVGYQPYRVVVLSFELLHAPATVCGPKKSTNLVKNKCVNFNFNGLTGTGVLTESNKKFLPFQQFGRDIADTTDAVRDPQTLEILDITPCSFGGVSVITPGTNTSNQVAVLYQGVNCTEVPVAIHADQLTPTWRVYSTGSNVFQTRAGCLIGAEHVNNSYECDIPIGAGICASYQTQTNSPRRARSVASQSIIAYTMSLGAENSVAYSNNSIAIPTNFTISVTTEILPVSMTKTSVDCTMYICGDSTECSNLLLQYGSFCTQLNRALTGIAVEQDKNTQEVFAQVKQIYKTPPIKDFGGFNFSQILPDPSKPSKRSFIEDLLFNKVTLADVGFIKQYGDCLGDIAARDLICAQKFNGLTVLPPLLTDEMIAQYTSALLAGTITSGWTFGAGAALQIPFAMQMAYRFNGIGVTQNVLYENQKLIANQFNSAIGKIQDSLSSTASALGKLQDVVNQNAQALNTLVKCLSSNFGAISSVLNDILSRLDKVEAEVQIDRLITGRLQCLQTYVTQQLIRAAEIRASANLAATKMSECVLGQSKRVDFCGKGYHLMSFPQSAPHGVVFLHVTYVPAQEKNFTTAPAICHDGKAHFPREGVFVSNGTHWFVTQRNFYEPQIITTDNTFVSGNCDVVIGIVNNTVYDPLQPELDS

SEQ ID NO: 3344 - protein, 1147 aa, Artificial Sequence
  SARS-CoV-2/Greece/16/2020__EPI_ISL_418265 spike protein (1-1147)(Q965C_S1003C)
MFVFLVLLPLVSSQCVNLTTRTQLPPAYTNSFTRGVYYPDKVFRSSVLHSTQDLFLPFFSNVTWFHAIHVSGTNGTKRFDNPVLPFNDGVYFASTEKSNIIRGWIFGTTLDSKTQSLLIVNNATNVVIKVCEFQFCNDPFLGVYYHKNNKSWMESEFRVYSSANNCTFEYVSQPFLMDLEGKQGNFKNLREFVFKNVDGYFKIYSKHTPINLVRDLPQGFSALEPLVDLPIGINITRFQTLLALHRSYLTPGDSSSGWTAGAAAYYVGYLQPRTFLLKYNENGTITDAVDCALDPLSETKCTLKSFTVEKGIYQTSNFRVQPTESIVRFPNITNLCPFGEVFNATRFASVYAWNRKRISNCVADYSVLYNSASFSTFKCYGVSPTKLNDLCFTNVYADSFVIRGDEVRQIAPGQTGKIADYNYKLPDDFTGCVIAWNSNNLDSKVGGNYNYLYRLFRKSNLKPFERDISTEIYQAGSTPCNGVEGFNCYFPLQSYGFQPTNGVGYQPYRVVVLSFELLHAPATVCGPKKSTNLVKNKCVNFNFNGLTGTGVLTESNKKFLPFQQFGRDIADTTDAVRDPQTLEILDITPCSFGGVSVITPGTNTSNQVAVLYQDVNCTEVPVAIHADQLTPTWRVYSTGSNVFQTRAGCLIGAEHVNNSYECDIPIGAGICASYQTQTNSPRRARSVASQSIIAYTMSLGAENSVAYSNNSIAIPTNFTISVTTEILPVSMTKTSVDCTMYICGDSTECSNLLLQYGSFCTQLNRALTGIAVEQDKNTQEVFAQVKQIYKTPPIKDFGGFNFSQILPDPSKPSKRSFIEDLLFNKVTLADAGFIKQYGDCLGDIAARDLICAQKFNGLTVLPPLLTDEMIAQYTSALLAGTITSGWTFGAGAALQIPFAMQMAYRFNGIGVTQNVLYENQKLIANQFNSAIGKIQDSLSSTASALGKLQDVVNQNAQALNTLVKCLSSNFGAISSVLNDILSRLDKVEAEVQIDRLITGRLQCLQTYVTQQLIRAAEIRASANLAATKMSECVLGQSKRVDFCGKGYHLMSFPQSAPHGVVFLHVTYVPAQEKNFTTAPAICHDGKAHFPREGVFVSNGTHWFVTQRNFYEPQIITTDNTFVSGNCDVVIGIVNNTVYDPLQPELDS

SEQ ID NO: 3345 - protein, 1147 aa, Artificial Sequence
  SARS-CoV-2/Iceland/319/2020__EPI_ISL_417648 spike protein (1-1147)(Q965C_S1003C)
MFVFLVLLPLVSSQCVNLTTRTQLPPAYTNSFTRGVYYPDKVFRSSVLHSTQDLFLPFFSNVTWFHAIHVSGTNGTKRFDNPVLPFNDGVYFASTEKSNIIRGWIFGTTLDSKTQSLLIVNNATNVVIKVCEFQFCNDPFLGVYYHKNNKSWMESEFRVYSSANNCTFEYVSQPFLIDLEGKQGNFKNLREFVFKNIDGYFKIYSKHTPINLVRDLPQGFSALEPLVDLPIGINITRFQTLLALHRSYLTPGDSSSGWTAGAAAYYVGYLQPRTFLLKYNENGTITDAVDCALDPLSETKCTLKSFTVEKGIYQTSNFRVQPTESIVRFPNITNLCPFGEVFNATRFASVYAWNRKRISNCVADYSVLYNSASFSTFKCYGVSPTKLNDLCFTNVYADSFVIRGDEVRQIAPGQTGKIADYNYKLPDDFTGCVIAWNSNNLDSKVGGNYNYLYRLFRKSNLKPFERDISTEIYQAGSTPCNGVEGFNCYFPLQSYGFQPTNGVGYQPYRVVVLSFELLHAPATVCGPKKSTNLVKNKCVNFNFNGLTGTGVLTESNKKFLPFQQFGRDIADTTDAVRDPQTLEILDITPCSFGGVSVITPGTNTSNQVAVLYQGVNCTEVPVAIHADQLTPTWRVYSTGSNVFQTRAGCLIGAEHVNNSYECDIPIGAGICASYQTQTNSPRRARSVASQSIIAYTMSLGAENSVAYSNNSIAIPTNFTISVTTEILPVSMTKTSVDCTMYICGDSTECSNLLLQYGSFCTQLNRALTGIAVEQDKNTQEVFAQVKQIYKTPPIKDFGGFNFSQILPDPSKPSKRSFIEDLLFNKVTLADAGFIKQYGDCLGDIAARDLICAQKFNGLTVLPPLLTDEMIAQYTSALLAGTITSGWTFGAGAALQIPFAMQMAYRFNGIGVTQNVLYENQKLIANQFNSAIGKIQDSLSSTASALGKLQDVVNQNAQALNTLVKCLSSNFGAISSVLNDILSRLDKVEAEVQIDRLITGRLQCLQTYVTQQLIRAAEIRASANLAATKMSECVLGQSKRVDFCGKGYHLMSFPQSAPHGVVFLHVTYVPAQEKNFTTAPAICHDGKAHFPREGVFVSNGTHWFVTQRNFYEPQIITTDNTFVSGNCDVVIGIVNNTVYDPLQPELDS

SEQ ID NO: 3346 - protein, 1147 aa, Artificial Sequence
  SARS-CoV-2/Congo/94/2020__EPI_ISL_417947 spike protein (1-1147)(Q965C_S1003C)
MFVFLVLLPLVSSQCVNLTTRTQLPPAYTNSFTRGVYYPDKVFRSSVLHSTQDLFLPFFSNVTWFHAIHVSGTNGTKRFDNPVLPFNDGVYFASTEKSNIIRGWIFGTTLDSKTQSLLIVNNATNVVIKVCEFQFCNDPFLGVYYHKNNKSWMESEFRVYSSANNCTFEYVSQPFLMDLEGKQGNFKNLREFVFKNIDGYFKIYSKHTPINLVRDLPQGFSALEPLVDLPIGINITRFQTLLALHRSYLTPGDSSSGWTAGAAAYYVGYLQPRTFLLKYNENGTITDAVDCALDPLSETKCTLKSFTVEKGIYQTSNFRVQPTESIVRFPNITNLCPFGEVFNATRFASVYAWNRKRISNCVADYSVLYNSASFSTFKCYGVSPTKLNDLCFTNVYADSFVIRGDEVRQIAPGQTGKIADYNYKLPDDFTGCVIAWNSNNLDSKVGGNYNYLYRLFRKSNLKPFERDISTEIYQAGSTPCNGVEGFNCYFPLQSYGFQPTNGVGYQPYRVVVLSFELLHAPATVCGPKKSTNLVKNKCVNFNFNGLTGTGVLTESNKKFLPFQQFGRDIADTTDAVRDPQTLEILDITPCSFGGVSVITPGTNTSNQVAVLYQGVNCTEVPVAIHADQLTPTWRVYSTGSNVFQTRAGCLIGAEHVNNSYECDIPIGAGICASYQTQTNSPRRARSVASQSIIAYTMSLGAENSVAYSNNSIAIPTNFTISVTTEILPVSMTKTSVDCTMYICGDSTECSNLLLQYGSFCTQLNRALTGIAVEQDKNTQEVFAQVKQIYKTPPIKDFGGFNFSQILPDPSKPSKRSFIEDILFNKVTLADAGFIKQYGDCLGDIAARDLICAQKFNGLTVLPPLLTDEMIAQYTSALLAGTITSGWTFGAGAALQIPFAMQMAYRFNGIGVTQNVLYENQKLIANQFNSAIGKIQDSLSSTASALGKLQDVVNQNAQALNTLVKCLSSNFGAISSVLNDILSRLDKVEAEVQIDRLITGRLQCLQTYVTQQLIRAAEIRASANLAATKMSECVLGQSKRVDFCGKGYHLMSFPQSAPHGVVFLHVTYVPAQEKNFTTAPAICHDGKAHFPREGVFVSNGTHWFVTQRNFYEPQIITTDNTFVSGNCDVVIGIVNNTVYDPLQPELDS

SEQ ID NO: 3347 - protein, 1147 aa, Artificial Sequence
  SARS-CoV-2/Congo/158/2020__EPI_ISL_417950 spike protein (1-1147)(Q965C_S1003C)
MFVFLVLLPLVSSQCVNLTTRTQLPPAYTNSFTRGVYYPDKVFRSSVLHSTQDLFLPFFSNVTWFHAIHVSGTNGTKRFDNPVLPFNDGVYFASTEKSNIIRGWIFGTTLDSKTQSLLIVNNATNVVIKVCEFQFCNDPFLGVYYHKNNKSWMESEFRVYSSANNCTFEYVSQPFLMDLEGKQGNFKNLREFVFKNIDGYFKIYSKHTPINLVRDLPQGFSALEPLVDLPIGINITRFQTLLALHRSYLTPGDSSSGWTAGAAAYYVGYLQPRTFLLKYNENGTITDAVDCALDPLSETKCTLKSFTVEKGIYQTSNFRVQPTESIVRFPNITNLCPFGEVFNATRFASVYAWNRKRISNCVADYSVLYNSASFSTFKCYGVSPTKLNDLCFTNVYADSFVIRGDEVRQIAPGQTGKIADYNYKLPDDFTGCVIAWNSNNLDSKVGGNYNYLYRLFRKSNLKPFERDISTEIYQAGSTPCNGVEGFNCYFPLQSYGFQPTNGVGYQPYRVVVLSFELLHAPATVCGPKKSTNLVKNKCVNFNFNGLTGTGVLTESNKKFLPFQQFGRDIADTTDAVRDPQTLEILDITPCSFGGVSVITPGTNTSNQVAVLYQDVNCTEVPVAIHADQLTPTWRVYSTGSNVFQTRAGCLIGAEHVNNSYECDIPIGAGICASYQTQTNSPRRARSVASQSIIAYTMSLGAENSVAYSNNSIAIPTNFTISVTTEILPVSMTKTSVDCTMYICGDSTECSNLLLQYGSFCTQLNRALTGIAVEQDKNTQEVFAQVKQIYKTPPIKDFGGFNFSQILPDPSKPSKRSFIEDLLFNKVTLADAGFIKQYGDCLGDIAARDLICAQKFNGLTVLPPLLTDEMIAQYTSALLAGTITSGWTFGAGAALQIPFAMQMAYRFNGIGVTQNVLYENQKLIANQFNSAIGKIQDSLSSTASALGKLQDVVNQNAQALNTLVKCLSSNFGAISSVLNDILSRLDKVEAEVQIDRLITGRLQCLQTYVTQQLIRAAEIRASANLAATKMSECVLGQSKRVDFCGKGYHLMSFPQSAPHGVVFLHVTYVPAQEKNFTTAPAICHDGKAHFPREGVFVSNGTHWFVTQRNFYEPQIITTDNTFLSGNCDVVIGIVNNTVYDPLQPELDS

SEQ ID NO: 3348 - protein, 1147 aa, Artificial Sequence
  SARS-CoV-2/USA/UT-00034/2020__EPI_ISL_417977 spike protein (1-1147)(Q965C_S1003C)
MFVFLVLLPLVSSQCVNLTTRTQLPPAYTNSFTRGVYYPDKVFRSSVLHSTQDLFLPFFSNVTWFHAIHVSGTNGTKRFDNPVLPFNDGVYFASTEKSNIIRGWIFGTTLDSKTQSLLIVNNATNVVIKVCEFQFCNDPFLGVYYYKNNKSWMESEFRVYSSANNCTFEYVSQPFLMDLEGKQGNFKNLREFVFKNIDGYFKIYSKHTPINLVRDLPQGFSALEPLVDLPIGINITRFQTLLALHRSYLTPGDSSSGWTAGAAAYYVGYLQPRTFLLKYNENGTITDAVDCALDPLSETKCTLKSFTVEKGIYQTSNFRVQPTESIVRFPNITNLCPFGEVFNATRFASVYAWNRKRISNCVADYSVLYNSASFSTFKCYGVSPTKLNDLCFTNVYADSFVIRGDEVRQIAPGQTGKIADYNYKLPDDFTGCVIAWNSNNLDSKVGGNYNYLYRLFRKSNLKPFERDISTEIYQAGSTPCNGVEGFNCYFPLQSYGFQPTNGVGYQPYRVVVLSFELLHAPATVCGPKKSTNLVKNKCVNFNFNGLTGTGVLTESNKKFLPFQQFGRDIADTTDAVRDPQTLEILDITPCSFGGVSVITPGTNTSNQVAVLYQGVNCTEVPVAIHADQLTPTWRVYSTGSNVFQTRAGCLIGAEHVNNSYECDIPIGAGICASYQTQTNSPRRARSVASQSIIAYTMSLGAENSVAYSNNSIAIPTNFTISVTTEILPVSMTKTSVDCTMYICGDSTECSNLLLQYGSFCTQLNRALTGIAVEQDKNTQEVFAQVKQIYKTPPIKDFGGFNFSQILPDPSKPSKRSFIEDLLFNKVTLADAGFIKQYGDCLGDIAARDLICAQKFNGLTVLPPLLTDEMIAQYTSALLAGTITSGWTFGAGAALQIPFAMQMAYRFNGIGVTQNVLYENQKLIANQFNSAIGKIQDSLSSTASALGKLQDVVNQNAQALNTLVKCLSSNFGAISSVLNDILSRLDKVEAEVQIDRLITGRLQCLQTYVTQQLIRAAEIRASANLAATKMSECVLGQSKRVDFCGKGYHLMSFPQSAPHGVVFLHVTYVPAQEKNFTTAPAICHDGKAHFPREGVFVSNGTHWFVTQRNFYEPQIITTDNTFVSGNCDVVIGIVNNTVYDPLQPELDS

SEQ ID NO: 3349 - protein, 1147 aa, Artificial Sequence
  SARS-CoV-2/USA/UT-00033/2020__EPI_ISL_417976 spike protein (1-1147)(Q965C_S1003C)
MFVFLVLLPLVSSQCVNLTTRTQLPPAYTNSFTRGVYYPDKVFRSSVLHSTQDLFLPFFSNVTWFHAIHVSGTNGTKRFDNPVLPFNDGVYFASTEKSNIIRGWIFGTTLDSKTQSLLIVNNATNVVIKVCEFQFCNDPFLGVYYHKNNKSWMESEFRVYSSANNCTFEYVSQPFLMDLEGKQGNFKNLREFVFKNIDGYFKIYSKHTPINLVRDLPQGFSALEPLVDLPIGINITRFQTLLALHRSYLTPGDSSSGLTAGAAAYYVGYLQPRTFLLKYNENGTITDAVDCALDPLSETKCTLKSFTVEKGIYQTSNFRVQPTESIVRFPNITNLCPFGEVFNATRFASVYAWNRKRISNCVADYSVLYNSASFSTFKCYGVSPTKLNDLCFTNVYADSFVIRGDEVRQIAPGQTGKIADYNYKLPDDFTGCVIAWNSNNLDSKVGGNYNYLYRLFRKSNLKPFERDISTEIYQAGSTPCNGVEGFNCYFPLQSYGFQPTNGVGYQPYRVVVLSFELLHAPATVCGPKKSTNLVKNKCVNFNFNGLTGTGVLTESNKKFLPFQQFGRDIADTTDAVRDPQTLEILDITPCSFGGVSVITPGTNTSNQVAVLYQGVNCTEVPVAIHADQLTPTWRVYSTGSNVFQTRAGCLIGAEHVNNSYECDIPIGAGICASYQTQTNSPRRARSVASQSIIAYTMSLGAENSVAYSNNSIAIPTNFTISVTTEILPVSMTKTSVDCTMYICGDSTECSNLLLQYGSFCTQLNRALTGIAVEQDKNTQEVFAQVKQIYKTPPIKDFGGFNFSQILPDPSKPSKRSFIEDLLFNKVTLADAGFIKQYGDCLGDIAARDLICAQKFNGLTVLPPLLTDEMIAQYTSALLAGTITSGWTFGAGAALQIPFAMQMAYRFNGIGVTQNVLYENQKLIANQFNSAIGKIQDSLSSTASALGKLQDVVNQNAQALNTLVKCLSSNFGAISSVLNDILSRLDKVEAEVQIDRLITGRLQCLQTYVTQQLIRAAEIRASANLAATKMSECVLGQSKRVDFCGKGYHLMSFPQSAPHGVVFLHVTYVPAQEKNFTTAPAICHDGKAHFPREGVFVSNGTHWFVTQRNFYEPQIITTDNTFVSGNCDVVIGIVNNTVYDPLQPELDS

SEQ ID NO: 3350 - protein, 1147 aa, Artificial Sequence
  SARS-CoV-2/USA/WI-13/2020__EPI_ISL_417516 spike protein (1-1147)(Q965C_S1003C)
MFVFLVLLPLVSSQCVNLTTRTQLPPAYTNSFTRGVYYPDKVFRSSVLHSTQDLFLPFFSNVTWFHAIHVSGTNGTKRFDNPVLPFNDGVYFASTEKSNIIRGWIFGTTLDSKTQSLLIVNNATNVVIKVCEFQFCNDPFLGVYYHKNNKSWMESEFRVYSSANNCTFEYVSQPFLMDLEGKQGNFKNLREFVFKNIDGYFKIYSKHTPINLVRDLPQGFSALEPLVDLPIGINITRFQTLLALHRSYLTPGDSSSGWTAGAAAYYVGYLQPRTFLLKYNENGTITDAVDCALDPLSETKCTLKSFTVEKGIYQTSNFRVLPTESIVRFPNITNLCPFGEVFNATRFASVYAWNRKRISNCVADYSVLYNSASFSTFKCYGVSPTKLNDLCFTNVYADSFVIRGDEVRQIAPGQTGKIADYNYKLPDDFTGCVIAWNSNNLDSKVGGNYNYLYRLFRKSNLKPFERDISTEIYQAGSTPCNGVEGFNCYFPLQSYGFQPTNGVGYQPYRVVVLSFELLHAPATVCGPKKSTNLVKNKCVNFNFNGLTGTGVLTESNKKFLPFQQFGRDIADTTDAVRDPQTLEILDITPCSFGGVSVITPGTNTSNQVAVLYQGVNCTEVPVAIHADQLTPTWRVYSTGSNVFQTRAGCLIGAEHVNNSYECDIPIGAGICASYQTQTNSPRRARSVASQSIIAYTMSLGAENSVAYSNNSIAIPTNFTISVTTEILPVSMTKTSVDCTMYICGDSTECSNLLLQYGSFCTQLNRALTGIAVEQDKNTQEVFAQVKQIYKTPPIKDFGGFNFSQILPDPSKPSKRSFIEDLLFNKVTLADAGFIKQYGDCLGDIAARDLICAQKFNGLTVLPPLLTDEMIAQYTSALLAGTITSGWTFGAGAALQIPFAMQMAYRFNGIGVTQNVLYENQKLIANQFNSAIGKIQDSLSSTASALGKLQDVVNQNAQALNTLVKCLSSNFGAISSVLNDILSRLDKVEAEVQIDRLITGRLQCLQTYVTQQLIRAAEIRASANLAATKMSECVLGQSKRVDFCGKGYHLMSFPQSAPHGVVFLHVTYVPAQEKNFTTAPAICHDGKAHFPREGVFVSNGTHWFVTQRNFYEPQIITTDNTFVSGNCDVVIGIVNNTVYDPLQPELDS

SEQ ID NO: 3351 - protein, 1146 aa, Artificial Sequence
  SARS-CoV-2/India/1-27/2020__EPI_ISL_413522 spike protein (1-1146)(Q964C_S1002C)
MFVFLVLLPLVSSQCVNLTTRTQLPPAYTNSFTRGVYYPDKVFRSSVLHSTQDLFLPFFSNVTWFHAIHVSGTNGTKRFDNPVLPFNDGVYFASTEKSNIIRGWIFGTTLDSKTQSLLIVNNATNVVIKVCEFQFCNDPFLGVYHKNNKSWMESEFRVYSSANNCTFEYVSQPFLMDLEGKQGNFKNLREFVFKNIDGYFKIYSKHTPINLVRDLPQGFSALEPLVDLPIGINITRFQTLLALHRSYLTPGDSSSGWTAGAAAYYVGYLQPRTFLLKYNENGTITDAVDCALDPLSETKCTLKSFTVEKGIYQTSNFRVQPTESIVRFPNITNLCPFGEVFNATRFASVYAWNRKRISNCVADYSVLYNSASFSTFKCYGVSPTKLNDLCFTNVYADSFVIRGDEVIQIAPGQTGKIADYNYKLPDDFTGCVIAWNSNNLDSKVGGNYNYLYRLFRKSNLKPFERDISTEIYQAGSTPCNGVEGFNCYFPLQSYGFQPTNGVGYQPYRVVVLSFELLHAPATVCGPKKSTNLVKNKCVNFNFNGLTGTGVLTESNKKFLPFQQFGRDIADTTDAVRDPQTLEILDITPCSFGGVSVITPGTNTSNQVAVLYQDVNCTEVPVAIHADQLTPTWRVYSTGSNVFQTRAGCLIGAEHVNNSYECDIPIGAGICASYQTQTNSPRRARSVASQSIIAYTMSLGAENSVAYSNNSIAIPTNFTISVTTEILPVSMTKTSVDCTMYICGDSTECSNLLLQYGSFCTQLNRALTGIAVEQDKNTQEVFAQVKQIYKTPPIKDFGGFNFSQILPDPSKPSKRSFIEDLLFNKVTLADAGFIKQYGDCLGDIAARDLICAQKFNGLTVLPPLLTDEMIAQYTSALLAGTITSGWTFGAGAALQIPFAMQMAYRFNGIGVTQNVLYENQKLIANQFNSAIGKIQDSLSSTASALGKLQDVVNQNAQALNTLVKCLSSNFGAISSVLNDILSRLDKVEAEVQIDRLITGRLQCLQTYVTQQLIRAAEIRASANLAATKMSECVLGQSKRVDFCGKGYHLMSFPQSAPHGVVFLHVTYVPAQEKNFTTAPAICHDGKAHFPREGVFVSNGTHWFVTQRNFYEPQIITTDNTFVSGNCDVVIGIVNNTVYDPLQPELDS

SEQ ID NO: 3352 - protein, 1141 aa, Artificial Sequence
  SARS-CoV-2/pangolin/Guangxi/P4L/2017__EPI_ISL_410538 spike protein (1-1141)(Q959C_S997C)
MFVFLFVLPLVSSQCVNLTTRTGIPPGYTNSSTRGVYYPDKVFRSSILHLTQDLFLPFFSNVTWFNTINYQGGFKKFDNPVLPFNDGVYFASTEKSNIIRGWIFGTTLDARTQSLLIVNNATNVVIKVCEFQFCTDPFLGVYYHNNNKTWVENEFRVYSSANNCTFEYISQPFLMDLEGKQGNFKNLREFVFKNVDGYFKIYSKHTPIDLVRDLPRGFAALEPLVDLPIGINITRFQTLLALHRSYLTPGNLESGWTTGAAAYYVGYLQQRTFLLSYNQNGTITDAVDCSLDPLSETKCTLKSLTVEKGIYQTSNFRVQPTISIVRFPNITNLCPFGEVFNASKFASVYAWNRKRISNCVADYSVLYNSTSFSTFKCYGVSPTKLNDLCFTNVYADSFVVKGDEVRQIAPGQTGVIADYNYKLPDDFTGCVIAWNSVKQDALTGGNYGYLYRLFRKSKLKPFERDISTEIYQAGSTPCNGQVGLNCYYPLERYGFHPTTGVNYQPFRVVVLSFELLNGPATVCGPKLSTTLVKDKCVNFNFNGLTGTGVLTTSKKQFLPFQQFGRDISDTTDAVRDPQTLEILDITPCSFGGVSVITPGTNTSNQVAVLYQDVNCTEVPMAIHAEQLTPAWRVYSAGANVFQTRAGCLVGAEHVNNSYECDIPVGAGICASYHSMSSLRSVNQRSIIAYTMSLGAENSVAYSNNSIAIPTNFTISVTTEILPVSMTKTSVDCTMYICGDSIECSNLLLQYGSFCTQLNRALTGIAVEQDKNTQEVFAQVKQIYKTPPIKDFGGFNFSQILPDPSKPSKRSFIEDLLFNKVTLADAGFIKQYGDCLGDIAARDLICAQKFNGLTVLPPLLTDEMIAQYTSALLAGTITSGWTFGAGAALQIPFAMQMAYRFNGIGVTQNVLYENQKLIANQFNSAIGKIQDSLSSTASALGKLQDVVNQNAQALNTLVKCLSSNFGAISSVLNDILSRLDKVEAEVQIDRLITGRLQCLQTYVTQQLIRAAEIRASANLAATKMSECVLGQSKRVDFCGKGYHLMSFPQSAPHGVVFLHVTYVPAQEKNFTTAPAICHEGKAHFPREGVFVSNGTHWFITQRNFYEPQIITTDNTFVSGSCDVVIGIVNNTVYDPLQPELDS

SEQ ID NO: 3353 - protein, 1141 aa, Artificial Sequence
  SARS-CoV-2/pangolin/Guangxi/P5L/2017__EPI_ISL_410540 spike protein (1-1141)(Q959C_S997C)
MFVFLFVLPLVSSQCVNLTTRTGIPPGYTNSSTRGVYYPDKVFRSSILHLTQDLFLPFFSNVTWFNTINYQGGFKKFDNPVLPFNDGVYFASTEKSNIIRGWIFGTTLDARTQSLLIVNNATNVVIKVCEFQFCTDPFLGVYYHNNNKTWVENEFRVYSSANNCTFEYISQPFLMDLEGKQGNFKNLREFVFKNVDGYFKIYSKHTPIDLVRDLPRGFAALEPLVDLPIGINITRFQTLLALHRSYLTPGKLESGWTTGAAAYYVGYLQQRTFLLSYNQNGTITDAVDCSLDPLSETKCTLKSLTVEKGIYQTSNFRVQPTISIVRFPNITNLCPFGEVFNASKFASVYAWNRKRISNCVADYSVLYNSTSFSTFKCYGVSPTKLNDLCFTNVYADSFVVKGDEVRQIAPGQTGVIADYNYKLPDDFTGCVIAWNSVKQDALTGGNYGYLYRLFRKSKLKPFERDISTEIYQAGSTPCNGQVGLNCYYPLERYGFHPTTGVNYQPFRVVVLSFELLNGPATVCGPKLSTTLVKDKCVNFNFNGLTGTGVLTTSKKQFLPFQQFGRDISDTTDAVRDPQTLEILDITPCSFGGVSVITPGTNTSNQVAVLYQDVNCTEVPMAIHAEQLTPAWRVYSAGANVFQTRAGCLVGAEHVNNSYECDIPVGAGICASYHSMSSFRSVNQRSIIAYTMSLGAENSVAYSNNSIAIPTNFTISVTTEILPVSMTKTSVDCTMYICGDSIECSNLLLQYGSFCTQLNRALTGIAVEQDKNTQEVFAQVKQIYKTPPIKDFGGFNFSQILPDPSKPSKRSFIEDLLFNKVTLADAGFIKQYGDCLGDIAARDLICAQKFNGLTVLPPLLTDEMIAQYTSALLAGTITSGWTFGAGAALQIPFAMQMAYRFNGIGVTQNVLYENQKLIANQFNSAIGKIQDSLSSTASALGKLQDVVNQNAQALNTLVKCLSSNFGAISSVLNDILSRLDKVEAEVQIDRLITGRLQCLQTYVTQQLIRAAEIRASANLAATKMSECVLGQSKRVDFCGKGYHLMSFPQSAPHGVVFLHVTYVPAQEKNFTTAPAICHEGKAHFPREGVFVSNGTHWFITQRNFYEPQIITTDNTFVSGSCDVVIGIVNNTVYDPLQPELDS

SEQ ID NO: 3354 - protein, 1141 aa, Artificial Sequence
  SARS-CoV-2/pangolin/Guangxi/P5E/2017__EPI_ISL_410541 spike protein (1-1141)(Q959C_S997C)
MFVFLFVLPLVSSQCVNLTTRTGIPPGYTNSSTRGVYYPDKVFRSSILHLTQDLFLPFFSNVTWFNTITYQGGSKKFDNPVLPFNDGVYFASTEKSNIIRGWIFGTTLDARTQSLLIVNNATNVVIKVCEFQFCTDPFLGVYYHNNNKTWVENEFRVYSSANNCTFEYISQPFLMDLEGKQGNFKNLREFVFKNVDGYFKIYSKHTPIDLVRDLPRGFAALEPLVDLPIGINITRFQTLLALHRSYLTPGKLESGWTTGAAAYYVGYLQQRTFLLSYNQNGTITDAVDCSLDPLSETKCTLKSLTVEKGIYQTSNFRVQPTISIVRFPNITNLCPFGEVFNASKFASVYAWNRKRISNCVADYSVLYNSTSFSTFKCYGVSPTKLNDLCFTNVYADSFVVKGDEVRQIAPGQTGVIADYNYKLPDDFTGCVIAWNSVKQDALTGDNYGYLYRLFRKSKLKPFERDISTEIYQAGSTPCNGQVGLNCYYPLERYGFHPTTGVNYQPFRVVVLSFELLNGPATVCGPKLSTTLVKDKCVNFNFNGLTGTGVLTTSKKQFLPFQQFGRDISDTTDAVRDPQTLEILDITPCSFGGVSVITPGTNTSNQVAVLYQDVNCTEVPMAIHAEQLTPAWRVYSAGANVFQTRAGCLVGAEHVNNSYECDIPVGAGICASYHSMSSFRSVNQRSIIAYTMSLGAENSVAYSNNSIAIPTNFTISVTTEILPVSMTKTSVDCTMYICGDSIECSNLLLQYGSFCTQLNRALTGIAVEQDKNTQEVFAQVKQIYKTPPIKDFGGFNFSQILPDPSKPSKRSFIEDLLFNKVTLADAGFIKQYGDCLGDIAARDLICAQKFNGLTVLPPLLTDEMIAQYTSALLAGTITSGWTFGAGAALQIPFAMQMAYRFNGIGVTQNVLYENQKLIANQFNSAIGKIQDSLSSTASALGKLQDVVNQNAQALNTLVKCLSSNFGAISSVLNDILSRLDKVEAEVQIDRLITGRLQCLQTYVTQQLIRAAEIRASANLAATKMSECVLGQSKRVDFCGKGYHLMSFPQSAPHGVVFLHVTYVPAQEKNFTTAPAICHEGKAHFPREGVFVSNGTHWFITQRNFYEPQIITTDNTFVSGSCDVVIGIVNNTVYDPLQPELDS

SEQ ID NO: 3355 - protein, 1139 aa, Artificial Sequence
  SARS-CoV-2/pangolin/Guangxi/P1E/2017__EPI_ISL_410539 spike protein (1-1139)(Q957C_S995C)
MFVFLFVLPLVSSQCVNLTTRTGIQPGYTNSSTRGVYYPDKVFRSSILHLTQDLFLPFFSNVTWFNTINYQGGFKKFDNPVLPFNDGVYFASTEKSNIIRGWIFGTTLDARTQSLLIVNNATNVVIKVCEFQFCTDPFLGVYYHNNNKTWVENEFRVYSSANNCTFEYISQPFLMDLEGKQGNFKNLREFVFKNVDGYFKIYSKHTPIDLVRDLPRGFAALEPLVDLPIGINITRFQTLLALHRSYLTPGKLESGWTTGAAAYYVGYLQQRTFLLSYNQNGTITDAVDCSLDPLSETKCTLKSLTVEKGIYQTSNFRVQPTISIVRFPNITNLCPFGEVFNASKFASVYAWNRKRISNCVADYSVLYNSTSFSTFKCYGVSPTKLNDLCFTNVYADSFVVKGDEVRQIAPGQTGVIADYNYKLPDDFTGCVIAWNSVKQDALTGGNYLYRLFRKSKLKPFERDISTEIYQAGSTPCNGQVGLNCYYPLERYGFHPTTGVNYQPFRVVVLSFELLNGPATVCGPKLSTTLVKDKCVNFNFNGLTGTGVLTTSKKQFLPFQQFGRDISDTTDAVRDPQTLEILDITPCSFGGVSVITPGTNTSNQVAVLYQDVNCTEVPMAIHAEQLTPAWRVYSAGANVFQTRAGCLVGAEHVNNSYECDIPVGAGICASYHSMSSLRSVNQRSIIAYTMSLGAENSVAYSNNSIAIPTNFTISVTTEILPVSMTKTSVDCTMYICGDSIECSNLLLQYGSFCTQLNRALTGIAVEQDKNTQEVFAQVKQIYKTPPIKDFGGFNFSQILPDPSKPSKRSFIEDLLFNKVTLADAGFIKQYGDCLGDIAARDLICAQKFNGLTVLPPLLTDEMIAQYTSALLAGTITSGWTFGAGAALQIPFAMQMAYRFNGIGVTQNVLYENQKLIANQFNSAIGKIQDSLSSTASALGKLQDVVNQNAQALNTLVKCLSSNFGAISSVLNDILSRLDKVEAEVQIDRLITGRLQCLQTYVTQQLIRAAEIRASANLAATKMSECVLGQSKRVDFCGKGYHLMSFPQSAPHGVVFLHVTYVPAQEKNFTTAPAICHEGKAHFPREGVFVSNGTHWFITQRNFYEPQIITTDNTFVSGSCDVVIGIVNNTVYDPLQPELDS

SEQ ID NO: 3356 - protein, 1147 aa, Artificial Sequence
  SARS-CoV-2/Wuhan/WIV05/2019__EPI_ISL_402128 spike protein (1-1147)(F970C_G999C)
MFVFLVLLPLVSSQCVNLTTRTQLPPAYTNSFTRGVYYPDKVFRSSVLHSTQDLFLPFFSNVTWFHAIHVSGTNGTKRFDNPVLPFNDGVYFASTEKSNIIRGWIFGTTLDSKTQSLLIVNNATNVVIKVCEFQFCNDPFLGVYYHKNNKSWMESEFRVYSSANNCTFEYVSQPFLMDLEGKQGNFKNLREFVFKNIDGYFKIYSKHTPINLVRDLPQGFSALEPLVDLPIGINITRFQTLLALHRSYLTPGDSSSGWTAGAAAYYVGYLQPRTFLLKYNENGTITDAVDCALDPLSETKCTLKSFTVEKGIYQTSNFRVQPTESIVRFPNITNLCPFGEVFNATRFASVYAWNRKRISNCVADYSVLYNSASFSTFKCYGVSPTKLNDLCFTNVYADSFVIRGDEVRQIAPGQTGKIADYNYKLPDDFTGCVIAWNSNNLDSKVGGNYNYLYRLFRKSNLKPFERDISTEIYQAGSTPCNGVEGFNCYFPLQSYGFQPTNGVGYQPYRVVVLSFELLHAPATVCGPKKSTNLVKNKCVNFNFNGLTGTGVLTESNKKFLPFQQFGRDIADTTDAVRDPQTLEILDITPCSFGGVSVITPGTNTSNQVAVLYQDVNCTEVPVAIHADQLTPTWRVYSTGSNVFQTRAGCLIGAEHVNNSYECDIPIGAGICASYQTQTNSPRRARSVASQSIIAYTMSLGAENSVAYSNNSIAIPTNFTISVTTEILPVSMTKTSVDCTMYICGDSTECSNLLLQYGSFCTQLNRALTGIAVEQDKNTQEVFAQVKQIYKTPPIKDFGGFNFSQILPDPSKPSKRSFIEDLLFNKVTLADAGFIKQYGDCLGDIAARDLICAQKFNGLTVLPPLLTDEMIAQYTSALLAGTITSGWTFGAGAALQIPFAMQMAYRFNGIGVTQNVLYENQKLIANQFNSAIGKIQDSLSSTASALGKLQDVVNQNAQALNTLVKQLSSNCGAISSVLNDILSRLDKVEAEVQIDRLITCRLQSLQTYVTQQLIRAAEIRASANLAATKMSECVLGQSKRVDFCGKGYHLMSFPQSAPHGVVFLHVTYVPAQEKNFTTAPAICHDGKAHFPREGVFVSNGTHWFVTQRNFYEPQIITTDNTFVSGNCDVVIGIVNNTVYDPLQPELDS

SEQ ID NO: 3357 - protein, 1143 aa, Artificial Sequence
  SARS-CoV-2/bat/Yunnan/RaTG13/2013__EPI_ISL_402131 spike protein (1-1143)(F966C_G995C)
MFVFLVLLPLVSSQCVNLTTRTQLPPAYTNSSTRGVYYPDKVFRSSVLHLTQDLFLPFFSNVTWFHAIHVSGTNGIKRFDNPVLPFNDGVYFASTEKSNIIRGWIFGTTLDSKTQSLLIVNNATNVVIKVCEFQFCNDPFLGVYYHKNNKSWMESEFRVYSSANNCTFEYVSQPFLMDLEGKQGNFKNLREFVFKNIDGYFKIYSKHTPINLVRDLPPGFSALEPLVDLPIGINITRFQTLLALHRSYLTPGDSSSGWTAGAAAYYVGYLQPRTFLLKYNENGTITDAVDCALDPLSETKCTLKSFTVEKGIYQTSNFRVQPTDSIVRFPNITNLCPFGEVFNATTFASVYAWNRKRISNCVADYSVLYNSTSFSTFKCYGVSPTKLNDLCFTNVYADSFVITGDEVRQIAPGQTGKIADYNYKLPDDFTGCVIAWNSKHIDAKEGGNFNYLYRLFRKANLKPFERDISTEIYQAGSKPCNGQTGLNCYYPLYRYGFYPTDGVGHQPYRVVVLSFELLNAPATVCGPKKSTNLVKNKCVNFNFNGLTGTGVLTESNKKFLPFQQFGRDIADTTDAVRDPQTLEILDITPCSFGGVSVITPGTNASNQVAVLYQDVNCTEVPVAIHADQLTPTWRVYSTGSNVFQTRAGCLIGAEHVNNSYECDIPIGAGICASYQTQTNSRSVASQSIIAYTMSLGAENSVAYSNNSIAIPTNFTISVTTEILPVSMTKTSVDCTMYICGDSTECSNLLLQYGSFCTQLNRALTGIAVEQDKNTQEVFAQVKQIYKTPPIKDFGGFNFSQILPDPSKPSKRSFIEDLLFNKVTLADAGFIKQYGDCLGDIAARDLICAQKFNGLTVLPPLLTDEMIAQYTSALLAGTITSGWTFGAGAALQIPFAMQMAYRFNGIGVTQNVLYENQKLIANQFNSAIGKIQDSLSSTASALGKLQDVVNQNAQALNTLVKQLSSNCGAISSVLNDILSRLDKVEAEVQIDRLITCRLQSLQTYVTQQLIRAAEIRASANLAATKMSECVLGQSKRVDFCGKGYHLMSFPQSAPHGVVFLHVTYVPAQEKNFTTAPAICHDGKAHFPREGVFVSNGTHWFVTQRNFYEPQIITTDNTFVSGSCDVVIGIVNNTVYDPLQPELDS

SEQ ID NO: 3358 - protein, 1147 aa, Artificial Sequence
  SARS-CoV-2/Wuhan/HBCDC-HB-01/2019__EPI_ISL_402132 spike protein (1-1147)(F970C_G999C)
MFVFLVLLPLVSSQCVNLTTRTQLPPAYTNSITRGVYYPDKVFRSSVLHSTQDLFLPFFSNVTWFHAIHVSGTNGTKRFDNPVLPFNDGVYFASTEKSNIIRGWIFGTTLDSKTQSLLIVNNATNVVIKVCEFQFCNDPFLGVYYHKNNKSWMESEFRVYSSANNCTFEYVSQPFLMDLEGKQGNFKNLREFVFKNIDGYFKIYSKHTPINLVRDLPQGFSALEPLVDLPIGINITRFQTLLALHRSYLTPGDSSSGWTAGAAAYYVGYLQPRTFLLKYNENGTITDAVDCALDPLSETKCTLKSFTVEKGIYQTSNFRVQPTESIVRFPNITNLCPFGEVFNATRFASVYAWNRKRISNCVADYSVLYNSASFSTFKCYGVSPTKLNDLCFTNVYADSFVIRGDEVRQIAPGQTGKIADYNYKLPDDFTGCVIAWNSNNLDSKVGGNYNYLYRLFRKSNLKPFERDISTEIYQAGSTPCNGVEGFNCYFPLQSYGFQPTNGVGYQPYRVVVLSFELLHAPATVCGPKKSTNLVKNKCVNFNFNGLTGTGVLTESNKKFLPFQQFGRDIADTTDAVRDPQTLEILDITPCSFGGVSVITPGTNTSNQVAVLYQDVNCTEVPVAIHADQLTPTWRVYSTGSNVFQTRAGCLIGAEHVNNSYECDIPIGAGICASYQTQTNSPRRARSVASQSIIAYTMSLGAENSVAYSNNSIAIPTNFTISVTTEILPVSMTKTSVDCTMYICGDSTECSNLLLQYGSFCTQLNRALTGIAVEQDKNTQEVFAQVKQIYKTPPIKDFGGFNFSQILPDPSKPSKRSFIEDLLFNKVTLADAGFIKQYGDCLGDIAARDLICAQKFNGLTVLPPLLTDEMIAQYTSALLAGTITSGWTFGAGAALQIPFAMQMAYRFNGIGVTQNVLYENQKLIANQFNSAIGKIQDSLSSTASALGKLQDVVNQNAQALNTLVKQLSSNCGAISSVLNDILSRLDKVEAEVQIDRLITCRLQSLQTYVTQQLIRAAEIRASANLAATKMSECVLGQSKRVDFCGKGYHLMSFPQSAPHGVVFLHVTYVPAQEKNFTTAPAICHDGKAHFPREGVFVSNGTHWFVTQRNFYEPQIITTDNTFVSGNCDVVIGIVNNTVYDPLQPELDS

SEQ ID NO: 3359 - protein, 1147 aa, Artificial Sequence
  SARS-CoV-2/Guangdong/20SF028/2020__EPI_ISL_403936 spike protein (1-1147)(F970C_G999C)
MFVFLVLLPLVSSQCVNLTTRTQLPPAYTNSFTRGVYYPDKVFRSSVLYSTQDLFLPFFSNVTWFHAIHVSGTNGTKRFDNPVLPFNDGVYFASTEKSNIIRGWIFGTTLDSKTQSLLIVNNATNVVIKVCEFQFCNDPFLGVYYHKNNKSWMESEFRVYSSANNCTFEYVSQPFLMDLEGKQGNFKNLREFVFKNIDGYFKIYSKHTPINLVRDLPQGFSALEPLVDLPIGINITRFQTLLALHRSYLTPGDSSSGWTAGAAAYYVGYLQPRTFLLKYNENGTITDAVDCALDPLSETKCTLKSFTVEKGIYQTSNFRVQPTESIVRFPNITNLCPFGEVFNATRFASVYAWNRKRISNCVADYSVLYNSASFSTFKCYGVSPTKLNDLCFTNVYADSFVIRGDEVRQIAPGQTGKIADYNYKLPDDFTGCVIAWNSNNLDSKVGGNYNYLYRLFRKSNLKPFERDISTEIYQAGSTPCNGVEGFNCYFPLQSYGFQPTNGVGYQPYRVVVLSFELLHAPATVCGPKKSTNLVKNKCVNFNFNGLTGTGVLTESNKKFLPFQQFGRDIADTTDAVRDPQTLEILDITPCSFGGVSVITPGTNTSNQVAVLYQDVNCTEVPVAIHADQLTPTWRVYSTGSNVFQTRAGCLIGAEHVNNSYECDIPIGAGICASYQTQTNSPRRARSVASQSIIAYTMSLGAENSVAYSNNSIAIPTNFTISVTTEILPVSMTKTSVDCTMYICGDSTECSNLLLQYGSFCTQLNRALTGIAVEQDKNTQEVFAQVKQIYKTPPIKDFGGFNFSQILPDPSKPSKRSFIEDLLFNKVTLADAGFIKQYGDCLGDIAARDLICAQKFNGLTVLPPLLTDEMIAQYTSALLAGTITSGWTFGAGAALQIPFAMQMAYRFNGIGVTQNVLYENQKLIANQFNSAIGKIQDSLSSTASALGKLQDVVNQNAQALNTLVKQLSSNCGAISSVLNDILSRLDKVEAEVQIDRLITCRLQSLQTYVTQQLIRAAEIRASANLAATKMSECVLGQSKRVDFCGKGYHLMSFPQSAPHGVVFLHVTYVPAQEKNFTTAPAICHDGKAHFPREGVFVSNGTHWFVTQRNFYEPQIITTDNTFVSGNCDVVIGIVNNTVYDPLQPELDS

SEQ ID NO: 3360 - protein, 1147 aa, Artificial Sequence
  SARS-CoV-2/Shenzhen/SZTH-001/2020__EPI_ISL_406592 spike protein (1-1147)(F970C_G999C)
MFVFLVLLPLVSSQCVNLTTRTQLPPAYTNSFTRGVYYPDKVFRSSVLHSTQDLFLPFFSNVTWFHAIHVSGTNGTKRFDNPVLPFNDGVYFASTEKSNIIRGWIFGTTLDSKTQSLLIVNNATNVVIKVCEFQFCNDPFLGVYYHKNNKSWMESEFRVYSSANNCTFEYVSQPFLMDLEGKQGNFKNLREFVFKNIDGYFKIYSKHTPINLVRDLPQGFSALEPLVDLPIGINITRFQTLLALHRSYLTPGDSSSGWTAGAAAYYVGYLQPRTFLLKYNENGTITDAVDCALDPLSETKCTLKSFTVEKGIYQTSNFRVQPTESIVRFPNITNLCPFGEVFNATRFASVYAWNRKRISNCVADYSVLYNSASFSTFKCYGVSPTKLNDLCFTNVYADSFVIRGDEVRQIAPGQTGKIADYNYKLPDDFTGCVIAWNSNNLDSKVGGNYNYLYRLFRKSNLKPFERDISTEIYQAGSTPCNGVEGFNCYFPLQSYGFQPTNGVGYQPYRVVVLSFELLHAPATVCGPKKSTNLVKNKCVNFNFNGLTGTGVLTESNKKFLPFQQFGRDIADTTDAVRDPQTLEILDITPCSFGGVSVITPGTNTSNQVAVLYQDVNCTEVPVAIHADQLTPTWRVYSTGSNVFQTRAGCLIGAEHVNNSYECDIPIGAGICASYQTQTNSPRRARSVASQSIIAYTMSLGAENSVAYSNNSIAIPTNFTISVTTEILPVSMTKTSVDCTMYICGDSTECSNLLLQYGSFCTQLNRALTGIAVEQDKNTQEVFAQVKQIYKTPPIKDFGGFNFSQILPDPSKPSKRSFIEDLLFNKVTLADAGFIKQYGDCLGDIAARDLICAQKFNGLTVLPPLLTDEMIAQYTSALLAGTITSGWTFGAGAALQIPFAMQMAYRFNGIGVTQNVLYENQKLIANQFNSAIGKIQDSLSSTASALGKLQDVVNQNAQALNTLVKQLSSNCGAISSVLNDILSRLDKVEAEVQIDRLITCRLQSLQTYVTQQLIRAAEIRASANLAATKMSECVLGQSKRVDFCGKGYHLMSFPQSAPHGVVFLHVTYVPAQEKNFTTAPAICHDGKAHFPREGVFVSNGTHWFVTQRNFYEPQIITTDNTFVSGNCDVLIGIVNNTVYDPLQPELDS

SEQ ID NO: 3361 - protein, 1147 aa, Artificial Sequence
  SARS-CoV-2/Shenzhen/SZTH-004/2020__EPI_ISL_406595 spike protein (1-1147)(F970C_G999C)
MFVFLVLLPLVSSQCVNLTTRTQLPPAYTNSFTRGVYYPDKVFRSSVLHSTQDLFLPFFSNVTWFHAIHVSGTNGTKRFDNPVLPFNDGVYFASTEKSNIIRGWIFGTTLDSKTQSLLIVNNATNVVIKVCEFQFCNDPFLGVYYHKNNKSWMESEFRVYSSANNCTFEYVSQPFLMDLEGKQGNFKNLREFVFKNIDGYFKIYSKHTPINLVRDLPQGFSALEPLVDLPIGINITRFQTLLALHRSYLTPGDSSSGWTAGAAAYYVGYLQPRTFLLKYNENGTITDAVDCALDPLSETKCTLKSFTVEKGIYQTSNFRVQPTESIVRFPNITNLCPFGEVFNATRFASVYAWDRKRISNCVAYYSVLYNSASFSTFKCYGVSPTKLNDLCFTNVYADSFVIRGDEVRQIAPGQTGKIADYNYKLPDDFTGCVIAWNSNNLDSKVGGNYNYLYRLFRKSNLKPFERDISTEIYQAGSTPCNGVEGFNCYFPLQSYGFQPTNGVGYQPYRVVVLSFELLHAPATVCGPKKSTNLVKNKCVNFNFNGLTGTGVLTESNKKFLPFQQFGRDIADTTDAVRDPQTLEILDITPCSFGGVSVITPGTNTSNQVAVLYQDVNCTEVPVAIHADQLTPTWRVYSTGSNVFQTRAGCLIGAEHVNNSYECDIPIGAGICASYQTQTNSPRRARSVASQSIIAYTMSLGAENSVAYSNNSIAIPTNFTISVTTEILPVSMTKTSVDCTMYICGDSTECSNLLLQYGSFCTQLNRALTGIAVEQDKNTQEVFAQVKQIYKTPPIKDFGGFNFSQILPDPSKPSKRSFIEDLLFNKVTLADAGFIKQYGDCLGDIAARDLICAQKFNGLTVLPPLLTDEMIAQYTSALLAGTITSGWTFGAGAALQIPFAMQMAYRFNGIGVTQNVLYENQKLIANQFNSAIGKIQDSLSSTASALGKLQDVVNQNAQALNTLVKQLSSNCGAISSVLNDILSRLDKVEAEVQIDRLITCRLQSLQTYVTQQLIRAAEIRASANLAATKMSECVLGQSKRVDFCGKGYHLMSFPQSAPHGVVFLHVTYVPAQEKNFTTAPAICHDGKAHFPREGVFVSNGTHWFVTQRNFYEPQIITTDNTFVSGNCDVVIGIVNNTVYDPLQPELDS

SEQ ID NO: 3362 - protein, 1147 aa, Artificial Sequence
  SARS-CoV-2/France/IDF0372/2020__EPI_ISL_406596 spike protein (1-1147)(F970C_G999C)
MFVFLVLLPLVSSQCVNLTTRTQLPPAYTNSFTRGVYYPDKVFRSSVLHSTQDLFLPFFSNVTWFHAIHVSGTNGTKRFDNPVLPFNDGVYFASTEKSNIIRGWIFGTTLDSKTQSLLIVNNATNVVIKVCEFQFCNDPFLGVYYHKNNKSWMESEFRVYSSANNCTFEYVSQPFLMDLEGKQGNFKNLREFVFKNIDGYFKIYSKHTPINLVRDLPQGFSALEPLVDLPIGINITRFQTLLALHRSYLTPGDSSSGWTAGAAAYYVGYLQPRTFLLKYNENGTITDAVDCALDPLSETKCTLKSFTVEKGIYQTSNFRVQPTESIVRFPNITNLCPFGEVFNATRFASVYAWNRKRISNCVADYSFLYNSASFSTFKCYGVSPTKLNDLCFTNVYADSFVIRGDEVRQIAPGQTGKIADYNYKLPDDFTGCVIAWNSNNLDSKVGGNYNYLYRLFRKSNLKPFERDISTEIYQAGSTPCNGVEGFNCYFPLQSYGFQPTNGVGYQPYRVVVLSFELLHAPATVCGPKKSTNLVKNKCVNFNFNGLTGTGVLTESNKKFLPFQQFGRDIADTTDAVRDPQTLEILDITPCSFGGVSVITPGTNTSNQVAVLYQDVNCTEVPVAIHADQLTPTWRVYSTGSNVFQTRAGCLIGAEHVNNSYECDIPIGAGICASYQTQTNSPRRARSVASQSIIAYTMSLGAENSVAYSNNSIAIPTNFTISVTTEILPVSMTKTSVDCTMYICGDSTECSNLLLQYGSFCTQLNRALTGIAVEQDKNTQEVFAQVKQIYKTPPIKDFGGFNFSQILPDPSKPSKRSFIEDLLFNKVTLADAGFIKQYGDCLGDIAARDLICAQKFNGLTVLPPLLTDEMIAQYTSALLAGTITSGWTFGAGAALQIPFAMQMAYRFNGIGVTQNVLYENQKLIANQFNSAIGKIQDSLSSTASALGKLQDVVNQNAQALNTLVKQLSSNCGAISSVLNDILSRLDKVEAEVQIDRLITCRLQSLQTYVTQQLIRAAEIRASANLAATKMSECVLGQSKRVDFCGKGYHLMSFPQSAPHGVVFLHVTYVPAQEKNFTTAPAICHDGKAHFPREGVFVSNGTHWFVTQRNFYEPQIITTDNTFVSGNCDVVIGIVNNTVYDPLQPELDS

SEQ ID NO: 3363 - protein, 1147 aa, Artificial Sequence
  SARS-CoV-2/Australia/VIC01/2020__EPI_ISL_406844 spike protein (1-1147)(F970C_G999C)
MFVFLVLLPLVSSQCVNLTTRTQLPPAYTNSFTRGVYYPDKVFRSSVLHSTQDLFLPFFSNVTWFHAIHVSGTNGTKRFDNPVLPFNDGVYFASTEKSNIIRGWIFGTTLDSKTQSLLIVNNATNVVIKVCEFQFCNDPFLGVYYHKNNKSWMESEFRVYSSANNCTFEYVSQPFLMDLEGKQGNFKNLREFVFKNIDGYFKIYSKHTPINLVRDLPQGFSALEPLVDLPIGINITRFQTLLALHRRYLTPGDSSSGWTAGAAAYYVGYLQPRTFLLKYNENGTITDAVDCALDPLSETKCTLKSFTVEKGIYQTSNFRVQPTESIVRFPNITNLCPFGEVFNATRFASVYAWNRKRISNCVADYSVLYNSASFSTFKCYGVSPTKLNDLCFTNVYADSFVIRGDEVRQIAPGQTGKIADYNYKLPDDFTGCVIAWNSNNLDSKVGGNYNYLYRLFRKSNLKPFERDISTEIYQAGSTPCNGVEGFNCYFPLQSYGFQPTNGVGYQPYRVVVLSFELLHAPATVCGPKKSTNLVKNKCVNFNFNGLTGTGVLTESNKKFLPFQQFGRDIADTTDAVRDPQTLEILDITPCSFGGVSVITPGTNTSNQVAVLYQDVNCTEVPVAIHADQLTPTWRVYSTGSNVFQTRAGCLIGAEHVNNSYECDIPIGAGICASYQTQTNSPRRARSVASQSIIAYTMSLGAENSVAYSNNSIAIPTNFTISVTTEILPVSMTKTSVDCTMYICGDSTECSNLLLQYGSFCTQLNRALTGIAVEQDKNTQEVFAQVKQIYKTPPIKDFGGFNFSQILPDPSKPSKRSFIEDLLFNKVTLADAGFIKQYGDCLGDIAARDLICAQKFNGLTVLPPLLTDEMIAQYTSALLAGTITSGWTFGAGAALQIPFAMQMAYRFNGIGVTQNVLYENQKLIANQFNSAIGKIQDSLSSTASALGKLQDVVNQNAQALNTLVKQLSSNCGAISSVLNDILSRLDKVEAEVQIDRLITCRLQSLQTYVTQQLIRAAEIRASANLAATKMSECVLGQSKRVDFCGKGYHLMSFPQSAPHGVVFLHVTYVPAQEKNFTTAPAICHDGKAHFPREGVFVSNGTHWFVTQRNFYEPQIITTDNTFVSGNCDVVIGIVNNTVYDPLQPELDS

SEQ ID NO: 3364 - protein, 1147 aa, Artificial Sequence
  SARS-CoV-2/Germany/BavPat1/2020__EPI_ISL_406862 spike protein (1-1147)(F970C_G999C)
MFVFLVLLPLVSSQCVNLTTRTQLPPAYTNSFTRGVYYPDKVFRSSVLHSTQDLFLPFFSNVTWFHAIHVSGTNGTKRFDNPVLPFNDGVYFASTEKSNIIRGWIFGTTLDSKTQSLLIVNNATNVVIKVCEFQFCNDPFLGVYYHKNNKSWMESEFRVYSSANNCTFEYVSQPFLMDLEGKQGNFKNLREFVFKNIDGYFKIYSKHTPINLVRDLPQGFSALEPLVDLPIGINITRFQTLLALHRSYLTPGDSSSGWTAGAAAYYVGYLQPRTFLLKYNENGTITDAVDCALDPLSETKCTLKSFTVEKGIYQTSNFRVQPTESIVRFPNITNLCPFGEVFNATRFASVYAWNRKRISNCVADYSVLYNSASFSTFKCYGVSPTKLNDLCFTNVYADSFVIRGDEVRQIAPGQTGKIADYNYKLPDDFTGCVIAWNSNNLDSKVGGNYNYLYRLFRKSNLKPFERDISTEIYQAGSTPCNGVEGFNCYFPLQSYGFQPTNGVGYQPYRVVVLSFELLHAPATVCGPKKSTNLVKNKCVNFNFNGLTGTGVLTESNKKFLPFQQFGRDIADTTDAVRDPQTLEILDITPCSFGGVSVITPGTNTSNQVAVLYQGVNCTEVPVAIHADQLTPTWRVYSTGSNVFQTRAGCLIGAEHVNNSYECDIPIGAGICASYQTQTNSPRRARSVASQSIIAYTMSLGAENSVAYSNNSIAIPTNFTISVTTEILPVSMTKTSVDCTMYICGDSTECSNLLLQYGSFCTQLNRALTGIAVEQDKNTQEVFAQVKQIYKTPPIKDFGGFNFSQILPDPSKPSKRSFIEDLLFNKVTLADAGFIKQYGDCLGDIAARDLICAQKFNGLTVLPPLLTDEMIAQYTSALLAGTITSGWTFGAGAALQIPFAMQMAYRFNGIGVTQNVLYENQKLIANQFNSAIGKIQDSLSSTASALGKLQDVVNQNAQALNTLVKQLSSNCGAISSVLNDILSRLDKVEAEVQIDRLITCRLQSLQTYVTQQLIRAAEIRASANLAATKMSECVLGQSKRVDFCGKGYHLMSFPQSAPHGVVFLHVTYVPAQEKNFTTAPAICHDGKAHFPREGVFVSNGTHWFVTQRNFYEPQIITTDNTFVSGNCDVVIGIVNNTVYDPLQPELDS

SEQ ID NO: 3365 - protein, 1147 aa, Artificial Sequence
  SARS-CoV-2/Wuhan/HBCDC-HB-02/2020__EPI_ISL_412978 spike protein (1-1147)(F970C_G999C)
MFVFLVLLPLVSSQCVNLTTRTQLPPAYTNSFTRGVYYPDKVFRSSVLHSTQDLFLPFFSNVTWFHAIHVSGTNGTKRFDNPVLPFNDGVYFASTEKSNIIRGWIFGTTLDSKTQSLLIVNNATNVVIKVCEFQFCNDPFLGVYYHKNNKSWMESEFRVYSSANNCTFEYVSQPFLMDLEGKQGNFKNLREFVFKNIDGYFKIYSKHTPINLVRDLPQGFSALEPLVDLPIGINITRFQTLLALHRSYLTPGDSSSGWTAGAAAYYVGYLQPRTFLLKYNENGTITDAVDCALDPLSETKCTLKSFTVEKGIYQTSNFRVQPTESIVRFPNITNLCPFGEVFNATRFASVYAWNRKRISNCVADYSVLYNSASFSTFKCYGVSPTKLNDLCFTNVYADSFVIRGDEVRQIAPGQTGKIADYNYKLPDDFTGCVIAWNSNNLDSKVGGNYNYLYRLFRKSNLKPFERDISTEIYQAGSTPCNGVEGFNCYFPLQSYGFQPTNGVGYQPYRVVVLSFELLHAPATVCGPKKSTNLVKNKCVNFNFNGLTGTGVLTESNKKFLPFQQFGRDIADTTDAVRDPQTLEILDITPCSFGGVSVITPGTNTSNQVAVLYQDVNCTEVPVAIHADQLTPTWRVYSTGSNVFQTRAGCLIGAEHVNNSYECDIPIGAGICASYQTQTNSPRRARSVASQSIIAYTMSLGAENSVAYSNNSIAIPTNFTISVTTEILPVSMTKTSVDCTMYICGDSTECSNFLLQYGSFCTQLNRALTGIAVEQDKNTQEVFAQVKQIYKTPPIKDFGGFNFSQILPDPSKPSKRSFIEDLLFNKVTLADAGFIKQYGDCLGDIAARDLICAQKFNGLTVLPPLLTDEMIAQYTSALLAGTITSGWTFGAGAALQIPFAMQMAYRFNGIGVTQNVLYENQKLIANQFNSAIGKIQDSLSSTASALGKLQDVVNQNAQALNTLVKQLSSNCGAISSVLNDILSRLDKVEAEVQIDRLITCRLQSLQTYVTQQLIRAAEIRASANLAATKMSECVLGQSKRVDFCGKGYHLMSFPQSAPHGVVFLHVTYVPAQEKNFTTAPAICHDGKAHFPREGVFVSNGTHWFVTQRNFYEPQIITTDNTFVSGNCDVVIGIVNNTVYDPLQPELDS

SEQ ID NO: 3366 - protein, 1147 aa, Artificial Sequence
  SARS-CoV-2/Australia/QLD02/2020__EPI_ISL_407896 spike protein (1-1147)(F970C_G999C)
MFVFLVLLPLVSSQCVNLTTRTQLPPAYTNSFTRGVYYPDKVFRSSVLHSTQDLFLPFFSNVTWFHAIHVSGTNGTKRFDNPVLPFNDGVYFASTEKSNIIRGWIFGTTLDSKTQSLLIVNNATNVVIKVCEFQFCNDPFLGVYYHKNNKSWMESEFRVYSSANNCTFEYVSQPFLMDLEGKQGNFKNLREFVFKNIDGYFKIYSKHTPINLVRDLPQGFSALEPLVDLPIGINITRFQTLLALHRSYLTPGDSSSGWTAGAAAYYVGYLQPRTFLLKYNENGTITDAVDCALDPLSETKCTLKSFTVEKGIYQTSNFRVQPTESIVRFPNITNLCPFGEVFNATRFASVYAWNRKRISNCVADYSVLYNSASFSTFKCYGVSPTKLNDLCFTNVYADSFVIRGDEVRQIAPGQTGKIADYNYKLPDDFTGCVIAWNSNNLDSKVGGNYNYLYRLFRKSNLKPFERDISTEIYQAGSTPCNGVEGFNCYFPLQSYGFQPTNGVGYQPYRVVVLSFELLHAPATVCGPKKSTNLVKNKCVNFNFNGLTGTGVLTESNKKFLPFQQFGRDIADTTDAVRDPQTLEILDITPCSFGGVSVITPGTNTSNQVAVLYQDVNCTEVPVAIHADQLTPTWRVYSTGSNVFQTRAGCLIGAEHVNNSYECDIPIGAGICASYQTQTNSPRRARSVASQSIIAYTMSLGAENSVAYSNNSIAIPTNFTISVTTEILPVSMTKTSVDCTMYICGDSTECSNLLLQYGSFCTQLNRALTGIAVEQDKNTQEVFAQVKQIYKTPPIKDFGGFNFSQILPDPSKPSKRSFIEDLLFNKVTLADAGFIKQYGDCLGDIAARDLICAQKFNGLTVLPPLLTDEMIAQYTSALLAGTITSGWTFGAGAALQIPFAMQMAYRFNGIGVTQNVLYENQKLIANQFNSAIGKIQDSLSSTASALGKLQDVVNQNAQALNTLVKQLSSNCGAISSVLNDILSRLDKVEAEVQIDRLITCRLQSLQTYVTQQLIRAAEIRASANLAATKMSECVLGQSKRVDFCGKGYHLMSFPQSAPHGVVFLHVTYVPAQEKNFTTAPAICHDGKAHFPREGVFVSNGTHWFVTQRNFYEPQIITTDNTFVSGNCDVVIGIVNNTVYDPLQLELDS

SEQ ID NO: 3367 - protein, 1147 aa, Artificial Sequence
  SARS-CoV-2/India/1-31/2020__EPI_ISL_413523 spike protein (1-1147)(F970C_G999C)
MFVFLVLLPLVSSQCVNLTTRTQLPPAYTNSFTRGVYYPDKVFRSSVLHSTQDLFLPFFSNVTWFHAIHVSGTNGTKRFDNPVLPFNDGVYFASTEKSNIIRGWIFGTTLDSKTQSLLIVNNATNVVIKVCEFQFCNDPFLGVYYHKNNKSWMESEFRVYSSANNCTFEYVSQPFLMDLEGKQGNFKNLREFVFKNIDGYFKIYSKHTPINLVRDLPQGFSALEPLVDLPIGINITRFQTLLALHRSYLTPGDSSSGWTAGAAAYYVGYLQPRTFLLKYNENGTITDAVDCALDPLSETKCTLKSFTVEKGIYQTSNFRVQPTESIVRFPNITNLCPFGEVFNATRFASVYAWNRKRISNCVADYSVLYNSASFSTFKCYGVSPTKLNDLCFTNVYADSFVIRGDEVRQIAPGQTGKIADYNYKLPDDFTGCVIAWNSNNLDSKVGGNYNYLYRLFRKSNLKPFERDISTEIYQAGSTPCNGVEGFNCYFPLQSYGFQPTNGVGYQPYRVVVLSFELLHAPATVCGPKKSTNLVKNKCVNFNFNGLTGTGVLTESNKKFLPFQQFGRDIADTTDAVRDPQTLEILDITPCSFGGVSVITPGTNTSNQVAVLYQDVNCTEVPVAIHADQLTPTWRVYSTGSNVFQTRAGCLIGAEHVNNSYECDIPIGAGICASYQTQTNSPRRARSVASQSIIAYTMSLGAENSVAYSNNSIAIPTNFTISVTTEILPVSMTKTSVDCTMYICGDSTECSNLLLQYGSFCTQLNRALTGIAVEQDKNTQEVFAQVKQIYKTPPIKDFGGFNFSQILPDPSKPSKRSFIEDLLFNKVTLADAGFIKQYGDCLGDIAARDLICAQKFNGLTVLPPLLTDEMIAQYTSALLAGTITSGWTFGAGAALQIPFAMQMAYRFNGIGVTQNVLYENQKLIANQFNSVIGKIQDSLSSTASALGKLQDVVNQNAQALNTLVKQLSSNCGAISSVLNDILSRLDKVEAEVQIDRLITCRLQSLQTYVTQQLIRAAEIRASANLAATKMSECVLGQSKRVDFCGKGYHLMSFPQSAPHGVVFLHVTYVPAQEKNFTTAPAICHDGKAHFPREGVFVSNGTHWFVTQRNFYEPQIITTDNTFVSGNCDVVIGIVNNTVYDPLQPELDS

SEQ ID NO: 3368 - protein, 1147 aa, Artificial Sequence
  SARS-CoV-2/Guangdong/GD2020087-P0008/2020__EPI_ISL_413863 spike protein (1-1147)(F970C_G999C)
MFVFLVLLPLVSSQCVNLTTRTQLPPAYTNSFTRGVYYPDKVFRSSVLHSTQDLFLPFFSNVTWFHAIHVSGTNGTKRFDNPVLPFNDGVYFASTEKSNIIRGWIFGTTLDSKTQSLLIVNNATNVVIKVCEFQFCNDPFLGVYYHKNNKSWMESEFRVYSSANNCTFEYVSQPFLMDLEGKQGNFKNLREFVFKNIDGYFKIYSKHTPINLVRDLPQGFSALEPLVDLPIGINITRFQTLLALHRSYLTPGDSSSGWTAGAAAYYVGYLQPRTFLLKYNENGTITDAVDCALDPLSETKCTLKSFTVEKGIYQTSNFRVQPTESIVRFPNITNLCPFGEVFNATRFASVYAWNRKRISNCVADYSVLYNSASFSTFKCYGVSPTKLNDLCFTNVYADSFVIRGDEVREIAPGQTGKIADYNYKLPDDFTGCVIAWNSNNLDSKVGGNYNYLYRLFRKSNLKPFERDISTEIYQAGSTPCNGVEGFNCYFPLQSYGFQPTNGVGYQPYRVVVLSFELLHAPATVCGPKKSTNLVKNKCVNFNFNGLTGTGVLTESNKKFLPFQQFGRDIADTTDAVRDPQTLEILDITPCSFGGVSVITPGTNTSNQVAVLYQDVNCTEVPVAIHADQLTPTWRVYSTGSNVFQTRAGCLIGAEHVNNSYECDIPIGAGICASYQTQTNSPRRARSVASQSIIAYTMSLGAENSVAYSNNSIAIPTNFTISVTTEILPVSMTKTSVDCTMYICGDSTECSNLLLQYGSFCTQLNRALTGIAVEQDKNTQEVFAQVKQIYKTPPIKDFGGFNFSQILPDPSKPSKRSFIEDLLFNKVTLADAGFIKQYGDCLGDIAARDLICAQKFNGLTVLPPLLTDEMIAQYTSALLAGTITSGWTFGAGAALQIPFAMQMAYRFNGIGVTQNVLYENQKLIANQFNSAIGKIQDSLSSTASALGKLQDVVNQNAQALNTLVKQLSSNCGAISSVLNDILSRLDKVEAEVQIDRLITCRLQSLQTYVTQQLIRAAEIRASANLAATKMSECVLGQSKRVDFCGKGYHLMSFPQSAPHGVVFLHVTYVPAQEKNFTTAPAICHDGKAHFPREGVFVSNGTHWFVTQRNFYEPQIITTDNTFVSGNCDVVIGIVNNTVYDPLQPELDS

SEQ ID NO: 3369 - protein, 1147 aa, Artificial Sequence
  SARS-CoV-2/Sweden/01/2020__EPI_ISL_411951 spike protein (1-1147)(F970C_G999C)
MFVFLVLLPLVSSQCVNLTTRTQLPPAYTNSFTRGVYYPDKVFRSSVLHSTQDLFLPFFSNVTWFHAIHVSGTNGTKRFDNPVLPFNDGVYFASTEKSNIIRGWIFGTTLDSKTQSLLIVNNATNVVIKVCEFQFCNDPFLGVYYHKNNKSWMESEFRVYSSANNCTFEYVSQPFLMDLEGKQGNFKNLREFVFKNIDGYFKIYSKHTPINLVRDLPQGFSALEPLVDLPIGINITRFQTLLALHRSYLTPGDSSSGWTAGAAAYYVGYLQPRTFLLKYNENGTITDAVDCALDPLSETKCTLKSFTVEKGIYQTSNFRVQPTESIVRFPNITNLCPFGEVFNATRFASVYAWNRKRISNCVADYSVLYNSASFSTFKCYGVSPTKLNDLCFTNVYADSFVIRGDEVRQIAPGQTGKIADYNYKLPDDFTGCVIAWNSNNLDSKVGGNYNYLYRLFRKSNLKPFERDISTEIYQAGSTPCNGVEGFNCYFPLQSYGFQPTNGVGYQPYRVVVLSFELLHAPATVCGPKKSTNLVKNKCVNFNFNGLTGTGVLTESNKKFLPFQQFGRDIADTTDAVRDPQTLEILDITPCSFGGVSVITPGTNTSNQVAVLYQDVNCTEVPVAIHADQLTPTWRVYSTGSNVFQTRAGCLIGAEHVNNSYECDIPIGAGICASYQTQTNSPRRARSVASQSIIAYTMSLGAENSVAYSNNSIAIPTNFTISVTTEILPVSMTKTSVDCTMYICGDSTECSNLLLQYGSFCTQLNRALTGIAVEQDKNTQEVFAQVKQIYKTPPIKDCGGFNFSQILPDPSKPSKRSFIEDLLFNKVTLADAGFIKQYGDCLGDIAARDLICAQKFNGLTVLPPLLTDEMIAQYTSALLAGTITSGWTFGAGAALQIPFAMQMAYRFNGIGVTQNVLYENQKLIANQFNSAIGKIQDSLSSTASALGKLQDVVNQNAQALNTLVKQLSSNCGAISSVLNDILSRLDKVEAEVQIDRLITCRLQSLQTYVTQQLIRAAEIRASANLAATKMSECVLGQSKRVDFCGKGYHLMSFPQSAPHGVVFLHVTYVPAQEKNFTTAPAICHDGKAHFPREGVFVSNGTHWFVTQRNFYEPQIITTDNTFVSGNCDVVIGIVNNTVYDPLQPELDS

SEQ ID NO: 3370 - protein, 1147 aa, Artificial Sequence
  SARS-CoV-2/Tianmen/HBCDC-HB-07/2020__EPI_ISL_412983 spike protein (1-1147)(F970C_G999C)
MFVFLVLLPLVSSQCVNLTTRTQLPPAYTNSFTRGVYYPDKVFRSSVLHSTQDLFLPFFSNVTWFHAIHVSGTNGTKRFDNPVLPFNDGVYFASTEKSNIIRGWIFGTTLDSKTQSLLIVNNATNVVIKVCEFQFCNDPFLGVYYHKNNKSWMESEFRVYSSANNCTFEYVSQPFLMDLEGKQGNFKNLREFVFKNIDGYFKIYSKHTPINLVRDLPQGFSALEPLVDLPIGINITRFQTLLALHRSYLTPGDSSSGWTAGAAAYYVGYLQPRTFLLKYNENGTITDAVDCALDPLSETKCTLKSFTVEKGIYQTSNFRVQPTESIVRFPNITNLCPFGEVFNATRFASVYAWNRKRISNCVADYSVLYNSASFSTFKCYGVSPTKLNDLCFTNVYADSFVIRGDEVRQIAPGQTGKIADYNYKLPDDFTGCVIAWNSNNLDSKVGGNYNYLYRLFRKSNLKPFERDISTEIYQAGSTPCNGVEGFNCYFPLQSYGFQPTNGVGYQPYRVVVLSFELLHAPATVCGPKKSTNLVKNKCVNFNFNGLTGTGVLTESNKKFLPFQQFGRDIADTTDAVRDPQTLEILDITPCSFGGVSVITPGTNTSNQVAVLYQDLNCTEVPVAIHADQLTPTWRVYSTGSNVFQTRAGCLIGAEHVNNSYECDIPIGAGICASYQTQTNSPRRARSVASQSIIAYTMSLGAENSVAYSNNSIAIPTNFTISVTTEILPVSMTKTSVDCTMYICGDSTECSNLLLQYGSFCTQLNRALTGIAVEQDKNTQEVFAQVKQIYKTPPIKDFGGFNFSQILPDPSKPSKRSFIEDLLFNKVTLADAGFIKQYGDCLGDIAARDLICAQKFNGLTVLPPLLTDEMIAQYTSALLAGTITSGWTFGAGAALQIPFAMQMAYRFNGIGVTQNVLYENQKLIANQFNSAIGKIQDSLSSTASALGKLQDVVNQNAQALNTLVKQLSSNCGAISSVLNDILSRLDKVEAEVQIDRLITCRLQSLQTYVTQQLIRAAEIRASANLAATKMSECVLGQSKRVDFCGKGYHLMSFPQSAPHGVVFLHVTYVPAQEKNFTTAPAICHDGKAHFPREGVFVSNGTHWFVTQRNFYEPQIITTDNTFVSGNCDVVIGIVNNTVYDPLQPELDS

SEQ ID NO: 3371 - protein, 1147 aa, Artificial Sequence
  SARS-CoV-2/Hong Kong/case42_VM20002493/2020__EPI_ISL_414527 spike protein (1-1147)(F970C_G999C)
MFVFLVLLPLVSSQCVNLTTRTQLPPAYTNSFTRGVYYPDKVFRSSVLHSTQDLFLPFFSNVTWFHAIHVSGTNGTKRFDNPVLPFNDGVYFASTEKSNIIRGWIFGTTLDSKTQSLLIVNNATNVVIKVCEFQFCNDPFLGVYYHKNNKSWMESEFRVYSSANNCTFEYVSQPFLMDLEGKQGNFKNLREFVFKNIDGYFKIYSKHTPINLVRDLPQGFSALEPLVDLPIGINITRFQTLLALHRSYLTPGDSSSGWTAGAAAYYVGYLQPRTFLLKYNENGTITDAVDCALDPLSETKCTLKSFTVEKGIYQTSNFRVQPTESIVRFPNITNLCPFGEVFNATRFASVYAWNRKRISNCVADYSVLYNSASFSTFKCYGVSPTKLNDLCFTNVYADSFVIRGDEVRQIAPGQTGKIADYNYKLPDDFTGCVIAWNSNNLDSKVGGNYNYLYRLFRKSNLKPFERDISTEIYQAGSTPCNGVEGFNCYFPLQSYGFQPTNGVGYQPYRVVVLSFELLHAPATVCGPKKSTNLVKNKCVNFNFNGLTGTGVLTESNKKFLPFQQFGRDIADTTDAVRDPQTLEILDITPCSFGGVSVITPGTNTSNQVAVLYQDVNCTEVPVAIHADQLTPTWRVYSTGSNVFQTRAGCLIGAEHVNNSYECDIPIGAGICASYQTQTNSPRRARSVASQSIIAYTMSLGAENSVAYSNNSIAIPTNFAISVTTEILPVSMTKTSVDCTMYICGDSTECSNLLLQYGSFCTQLNRALTGIAVEQDKNTQEVFAQVKQIYKTPPIKDFGGFNFSQILPDPSKPSKRSFIEDLLFNKVTLADAGFIKQYGDCLGDIAARDLICAQKFNGLTVLPPLLTDEMIAQYTSALLAGTITSGWTFGAGAALQIPFAMQMAYRFNGIGVTQNVLYENQKLIANQFNSAIGKIQDSLSSTASALGKLQDVVNQNAQALNTLVKQLSSNCGAISSVLNDILSRLDKVEAEVQIDRLITCRLQSLQTYVTQQLIRAAEIRASANLAATKMSECVLGQSKRVDFCGKGYHLMSFPQSAPHGVVFLHVTYVPAQEKNFTTAPAICHDGKAHFPREGVFVSNGTHWFVTQRNFYEPQIITTDNTFVSGNCDVVIGIVNNTVYDPLQPELDS

SEQ ID NO: 3372 - protein, 1147 aa, Artificial Sequence
  SARS-CoV-2/USA/CruiseA-23/2020__EPI_ISL_414482 spike protein (1-1147)(F970C_G999C)
MFVFLVLLPLVSSQCVNLTTRTQLPPAYTNSFTRGVYYPDKVFRSSVLHSTQDLFLPFFSNVTWFHAIHVSGTNGTKRFDNPVLPFNDGVYFASTEKSNIIRGWIFGTTLDSKTQSLLIVNNATNVVIKVCEFQFCNDPFLGVYYHKNNKSWMESEFRVYSSANNCTFEYVSQPFLMDLEVKQGNFKNLREFVFKNIDGYFKIYSKHTPINLVRDLPQGFSALEPLVDLPIGINITRFQTLLALHRSYLTPGDSSSGWTAGAAAYYVGYLQPRTFLLKYNENGTITDAVDCALDPLSETKCTLKSFTVEKGIYQTSNFRVQPTESIVRFPNITNLCPFGEVFNATRFASVYAWNRKRISNCVADYSVLYNSASFSTFKCYGVSPTKLNDLCFTNVYADSFVIRGDEVRQIAPGQTGKIADYNYKLPDDFTGCVIAWNSNNLDSKVGGNYNYLYRLFRKSNLKPFERDISTEIYQAGSTPCNGVEGFNCYFPLQSYGFQPTNGVGYQPYRVVVLSFELLHAPATVCGPKKSTNLVKNKCVNFNFNGLTGTGVLTESNKKFLPFQQFGRDIADTTDAVRDPQTLEILDITPCSFGGVSVITPGTNTSNQVAVLYQDVNCTEVPVAIHADQLTPTWRVYSTGSNVFQTRAGCLIGAEHVNNSYECDIPIGAGICASYQTQTNSPRRARSVASQSIIAYTMSLGAENSVAYSNNSIAIPTNFTISVTTEILPVSMTKTSVDCTMYICGDSTECSNLLLQYGSFCTQLNRALTGIAVEQDKNTQEVFAQVKQIYKTPPIKDFGGFNFSQILPDPSKPSKRSFIEDLLFNKVTLADAGFIKQYGDCLGDIAARDLICAQKFNGLTVLPPLLTDEMIAQYTSALLAGTITSGWTFGAGAALQIPFAMQMAYRFNGIGVTQNVLYENQKLIANQFNSAIGKIQDSLSSTASALGKLQDVVNQNAQALNTLVKQLSSNCGAISSVLNDILSRLDKVEAEVQIDRLITCRLQSLQTYVTQQLIRAAEIRASANLAATKMSECVLGQSKRVDFCGKGYHLMSFPQSAPHGVVFLHVTYVPAQEKNFTTAPAICHDGKAHFPREGVFVSNGTHWFVTQRNFYEPQIITTDNTFVSGNCDVVIGIVNNTVYDPLQPELDS

SEQ ID NO: 3373 - protein, 1147 aa, Artificial Sequence
  SARS-CoV-2/Hong Kong/case85_VM20002868/2020__EPI_ISL_414519 spike protein (1-1147)(F970C_G999C)
MFVFLVLVPLVSSQCVNLTTRTQLPPAYTNSFTRGVYYPDKVFRSSVLHSTQDLFLPFFSNVTWFHAIHVSGTNGTKRFDNPVLPFNDGVYFASTEKSNIIRGWIFGTTLDSKTQSLLIVNNATNVVIKVCEFQFCNDPFLGVYYHKNNKSWMESEFRVYSSANNCTFEYVSQPFLMDLEGKQGNFKNLREFVFKNIDGYFKIYSKHTPINLVRDLPQGFSALEPLVDLPIGINITRFQTLLALHRSYLTPGDSSSGWTAGAAAYYVGYLQPRTFLLKYNENGTITDAVDCALDPLSETKCTLKSFTVEKGIYQTSNFRVQPTESIVRFPNITNLCPFGEVFNATRFASVYAWNRKRISNCVADYSVLYNSASFSTFKCYGVSPTKLNDLCFTNVYADSFVIRGDEVRQIAPGQTGKIADYNYKLPDDFTGCVIAWNSNNLDSKVGGNYNYLYRLFRKSNLKPFERDISTEIYQAGSTPCNGVEGFNCYFPLQSYGFQPTNGVGYQPYRVVVLSFELLHAPATVCGPKKSTNLVKNKCVNFNFNGLTGTGVLTESNKKFLPFQQFGRDIADTTDAVRDPQTLEILDITPCSFGGVSVITPGTNTSNQVAVLYQDVNCTEVPVAIHADQLTPTWRVYSTGSNVFQTRAGCLIGAEHVNNSYECDIPIGAGICASYQTQTNSPRRARSVASQSIIAYTMSLGAENSVAYSNNSIAIPTNFTISVTTEILPVSMTKTSVDCTMYICGDSTECSNLLLQYGSFCTQLNRALTGIAVEQDKNTQEVFAQVKQIYKTPPIKDFGGFNFSQILPDPSKPSKRSFIEDLLFNKVTLADAGFIKQYGDCLGDIAARDLICAQKFNGLTVLPPLLTDEMIAQYTSALLAGTITSGWTFGAGAALQIPFAMQMAYRFNGIGVTQNVLYENQKLIANQFNSAIGKIQDSLSSTASALGKLQDVVNQNAQALNTLVKQLSSNCGAISSVLNDILSRLDKVEAEVQIDRLITCRLQSLQTYVTQQLIRAAEIRASANLAATKMSECVLGQSKRVDFCGKGYHLMSFPQSAPHGVVFLHVTYVPAQEKNFTTAPAICHDGKAHFPREGVFVSNGTHWFVTQRNFYEPQIITTDNTFVSGNCDVVIGIVNNTVYDPLQPELDS

SEQ ID NO: 3374 - protein, 1147 aa, Artificial Sequence; identical to SEQ ID NO: 3364
  SARS-CoV-2/England/200990660/2020__EPI_ISL_414523 spike protein (1-1147)(F970C_G999C)

SEQ ID NO: 3375 - protein, 1147 aa, Artificial Sequence
  SARS-CoV-2/Australia/NSW09/2020__EPI_ISL_413595 spike protein (1-1147)(F970C_G999C)
MFVFLVLLPLVSSQCVNLTTRTQLPPAYTNSFTRGVYYPDKVFRSSVLHSTQDLFLPFFSNVTWFHAIHVSGTNGTKRFDNPVLPFNDGVYFASTEKSNIIRGWIFGTTLDSKTQSLLIVNNATNVVIKVCEFQFCNDPFLGVYYHKNNKSWMESEFRVYSSANNCTFEYVSQPFLMDLEGKQGNFKNLREFVFKNIDGYFKIYSKHTPINLVRDLPQGFSALEPLVDLPIGINITRFQTLLALHRSYLTPGDSSSGWTAGAAAYYVGYLQPRTFLLKYNENGTITDAVDCALDPLSETKCTLKSFTVEKGIYQTSNFRVQPTESIVRFPNITNLCPFGEVFNATRFASVYAWNRKRISNCVADYSVLYNSASFSTFKCYGVSPTKLNDLCFTNVYADSFVIRGDEVRQIAPGQTGKIADYNYKLPDDFTGCVIAWNSNNLDSKVGGNYNYLYRLFRKSNLKPFERDISTEIYQAGSTPCNGVEGFNCYFPLQSYGFQPTNGVGYQPYRVVVLSFELLHAPATVCGPKKSTNLVKNKCVNFNFNGLTGTGVLTESNKKFLPFQQFGRDIADTTDAVRDPQTLEILDITPCSFGGVSVITPGTNTSNQVAVLYQDVNCTEVPVAIHADQLTPTWRVYSTGSNVFQTRAGCLIGAEHVNNSYECDIPIGAGICASYQTQTNSPRRARSVASQSIIAYTMSLGAENSVAYSNNSIAIPTNFTISVTTEILPVSMTKTSVDCTMYICGDSTECSNLLLQYGSFCTQLNRALTGIAVEQDKNTQEVFAQVKQIYKTPPIKDFGGFNFSQILPDPSKPSKRSFIEDLLFNKVTLADAGFIKQYGDCLGDIAARDLICAQKFNGLTVLPPLLTDEMIAQYTSALLAGTITSGWTFGAGAALQIPFAMQMAYRFNGIGVTQNVLYENQKLIANQFNSAIGKIQDSLSFTASALGKLQDVVNQNAQALNTLVKQLSSNCGAISSVLNDILSRLDKVEAEVQIDRLITCRLQSLQTYVTQQLIRAAEIRASANLAATKMSECVLGQSKRVDFCGKGYHLMSFPQSAPHGVVFLHVTYVPAQEKNFTTAPAICHDGKAHFPREGVFVSNGTHWFVTQRNFYEPQIITTDNTFVSGNCDVVIGIVNNTVYDPLQPELDS

SEQ ID NO: 3376 - protein, 1147 aa, Artificial Sequence; identical to SEQ ID NO: 3356
  SARS-CoV-2/Australia/NSW10/2020__EPI_ISL_413596 spike protein (1-1147)(F970C_G999C)

SEQ ID NO: 3377 - protein, 1147 aa, Artificial Sequence
  SARS-CoV-2/Switzerland/1000477797/2020__EPI_ISL_413023 spike protein (1-1147)(F970C_G999C)
MFVFLVLLPLVSSQCVNLTTRTQLPPAYTNSFTRGVYYPDKVFRSSVLHSTQDLFLPFFSNVTWFHAIHVSGTNGTKRFDNPVLPFNDGVYFASTEKSNIIRGWIFGTTLDSKTQSLLIVNNATNVVIKVCEFQFCNDPFLGVYYHKNNKSWMESEFRVYSSANNCTFEYVSQPFLMDLEGKQGNFKNLREFVFKNIDGYFNIYSKHTPINLVRDLPQGFSALEPLVDLPIGINITRFQTLLALHRSYLTPGDSSSGWTAGAAAYYVGYLQPRTFLLKYNENGTITDAVDCALDPLSETKCTLKSFTVEKGIYQTSNFRVQPTESIVRFPNITNLCPFGEVFNATRFASVYAWNRKRISNCVADYSVLYNSASFSTFKCYGVSPTKLNDLCFTNVYADSFVIRGDEVRQIAPGQTGKIADYNYKLPDDFTGCVIAWNSNNLDSKVGGNYNYLYRLFRKSNLKPFERDISTEIYQAGSTPCNGVEGFNCYFPLQSYGFQPTNGVGYQPYRVVVLSFELLHAPATVCGPKKSTNLVKNKCVNFNFNGLTGTGVLTESNKKFLPFQQFGRDIADTTDAVRDPQTLEILDITPCSFGGVSVITPGTNTSNQVAVLYQGVNCTEVPVAIHADQLTPTWRVYSTGSNVFQTRAGCLIGAEHVNNSYECDIPIGAGICASYQTQTNSPRRARSVASQSIIAYTMSLGAENSVAYSNNSIAIPTNFTISVTTEILPVSMTKTSVDCTMYICGDSTECSNLLLQYGSFCTQLNRALTGIAVEQDKNTQEVFAQVKQIYKTPPIKDFGGFNFSQILPDPSKPSKRSFIEDLLFNKVTLADAGFIKQYGDCLGDIAARDLICAQKFNGLTVLPPLLTDEMIAQYTSALLAGTITSGWTFGAGAALQIPFAMQMAYRFNGIGVTQNVLYENQKLIANQFNSAIGKIQDSLSSTASALGKLQDVVNQNAQALNTLVKQLSSNCGAISSVLNDILSRLDKVEAEVQIDRLITCRLQSLQTYVTQQLIRAAEIRASANLAATKMSECVLGQSKRVDFCGKGYHLMSFPQSAPHGVVFLHVTYVPAQEKNFTTAPAICHDGKAHFPREGVFVSNGTHWFVTQRNFYEPQIITTDNTFVSGNCDVVIGIVNNTVYDPLQPELDS

SEQ ID NO: 3378 - protein, 1147 aa, Artificial Sequence
  SARS-CoV-2/Belgium/BA-02291/2020__EPI_ISL_415159 spike protein (1-1147)(F970C_G999C)
MFVFLVLLPLVSSQCVNLTTRTQLPPAYTNSFTRGVYYPDKVFRSSVLHSTQDLFLPFFSNVTWFHAIHVSGTNGTKRFDNPVLPFNDGVYFASTEKSNIIRGWIFGTTLDSKTQSLLIVNNATNVVIKVCEFQFCNDPFLGVYYHKNNKSWMESEFRVYSSANNCTFEYVSQPFLMDLEGKQGNFKNLREFVFKNIDGYFKIYSKHTPINLVRDLPQGFSALEPLVDLPIGINITRFQTLLALHRSYLTPGDSSSGWTAGAAAYYVGYLQPRTFLLKYNENGTITDAVDCALDPLSETKCTLKSFTVEKGIYQTSNFRVQPTESIVRFPNITNLCPFGEVFNATRFASVYAWNRKRISNCVADYSVLYNSASFSTFKCYGVSPTKLNDLCFTNVYADSFVIRGDEVRQIAPGQTGKIADYNYKLPDDFTGCVIAWNSNNLDSKVGGNYNYLYRLFRRSNLKPFERDISTEIYQAGSTPCNGVEGFNCYFPLQSYGFQPTNGVGYQPYRVVVLSFELLPAPATVCGPKKSTNLVKNKCVNFNFNGLTGTGVLTESNKKFLPFQQFGRDIADTTDAVRDPQTLEILDITPCSFGGVSVITPGTNTSNQVAVLYQGVNCTEVPVAIHADQLTPTWRVYSTGSNVFQTRAGCLIGAEHVNNSYECDIPIGAGICASYQTQTNSPRRARSVASQSIIAYTMSLGAENSVAYSNNSIAIPTNFTISVTTEILPVSMTKTSVDCTMYICGDSTECSNLLLQYGSFCTQLNRALTGIAVEQDKNTQEVFAQVKQIYKTPPIKDFGGFNFSQILPDPSKPSKRSFIEDLLFNKVTLADAGFIKQYGDCLGDIAARDLICAQKFNGLTVLPPLLTDEMIAQYTSALLAGTITSGWTFGAGAALQIPFAMQMAYRFNGIGVTQNVLYENQKLIANQFNSAIGKIQDSLSSAAPALGKLQDVVNQNAQALNTLVKQLSSNCGAISSVLNDILSRLDKVEAEVQIDRLITCRLQSLQTYVTQQLIRAAEIRASANLAATKMSECVLGQSKRVDFCGKGYHLMSFPQSAPHGVVFLHVTYVPAQEKNFTTAPAICHDGKAHFPREGVFVSNGTHWFVTQRNFYEPQIITTDNTFVSGNCDVVIGIVNNTVYDPLQPELDS

SEQ ID NO: 3379 - protein, 1147 aa, Artificial Sequence
  SARS-CoV-2/USA/WA8-UW5/2020__EPI_ISL_413486 spike protein (1-1147)(F970C_G999C)
MFVFLVLLPLVSSQCVNLTTRTQLPPAYTNSFTRGVYYPDKVFRSSVLHSTQDLFLPFFSNVTWFHAIHVSGTNGTKRFDNPVLPFNDGVYFASTEKSNIIRGWIFGTTLDSKTQSLLIVNNATNVVIKVCEFQFCNDPFLGVYYHKNNKSWMESEFRVYSSANNCTFEYVSQPFLMDLEGKQGNFKNLREFVFKNIDGYFKIYSKHTPINLVRDLPQGFSALEPLVDLPIGINITRFQTLLALHRSYLTPGDSSSGWTAGAAAYYVGYLQPRTFLLKYNENGTITDAVDCALDPLSETKCTLKSFTVEKGIYQTSNFRVQPTESIVRFPNITNLCPFGEVFNATRFASVYAWNRKRISNCVADYSVLYNSASFSTFKCYGVSPTKLNDLCFTNVYADSFVIRGDEVRQIAPGQTGKIADYNYKLPDDFTGCVIAWNSNNLDSKVGGNYNYLYRLFRKSNLKPFERDISTEIYQAGSTPCNGVEGFNCYFPLQSYGFQPTNGVGYQPYRVVVLSFELLHAPATVCGPKKSTNLVKNKCVNFNFNGLTGTGVLTESNKKFLPFQQFGRDIADTTDAVRDPQTLEILDITPCSFGGVSVITPGTNTSNQVAVLYQDVNCTEVPVAIHADQLTPTWRVYSTGSNVFQTRAGCLIGAEYVNNSYECDIPIGAGICASYQTQTNSPRRARSVASQSIIAYTMSLGAENSVAYSNNSIAIPTNFTISVTTEILPVSMTKTSVDCTMYICGDSTECSNLLLQYGSFCTQLNRALTGIAVEQDKNTQEVFAQVKQIYKTPPIKDFGGFNFSQILPDPSKPSKRSFIEDLLFNKVTLADAGFIKQYGDCLGDIAARDLICAQKFNGLTVLPPLLTDEMIAQYTSALLAGTITSGWTFGAGAALQIPFAMQMAYRFNGIGVTQNVLYENQKLIANQFNSAIGKIQDSLSSTASALGKLQDVVNQNAQALNTLVKQLSSNCGAISSVLNDILSRLDKVEAEVQIDRLITCRLQSLQTYVTQQLIRAAEIRASANLAATKMSECVLGQSKRVDFCGKGYHLMSFPQSAPHGVVFLHVTYVPAQEKNFTTAPAICHDGKAHFPREGVFVSNGTHWFVTQRNFYEPQIITTDNTFVSGNCDVVIGIVNNTVYDPLQPELDS

SEQ ID NO: 3380 - protein, 1147 aa, Artificial Sequence
  SARS-CoV-2/England/20102000506/2020__EPI_ISL_415147 spike protein (1-1147)(F970C_G999C)
MFVFLVLLPLVSSQCVNLTTRTQLPPAYTNSFTRGVYYPDKVFRSSVLHSTQDLFLPFFSNVTWFHAIHVSGTNGTKRFDNPVLPFNDGVYFASTEKSNIIRGWIFGTTLDSKTQSLLIVNNATNVVIKVCEFQFCNDPFLGVYYHKNNKSWMESEFRVYSSANNCTFEYVSQPFLMDLEGKQGNFKNLREFVFKNIDGYFKIYSKHTPINLVRDLPQGFSALEPLVDLPIGINITRFQTLLALHRSYLTPGDSSSGWTAGAAAYYVGYLQPRTFLLKYNENGTITDAVDCALDPLSETKCTLKSFTVEKGIYQTSNFRVQPTESIVRFPNITNLCPFGEVFNATRFASVYAWNRKRISNCVADYSVLYNSASFSTFKCYGVSPTKLNDLCFTNVYADSFVIRGDEVRQIAPGQTGKIADYNYKLPDDFTGCVIAWNSNNLDSKVGGNYNYLYRLFRKSNLKPFERDISTEIYQAGSTPCNGVEGFNCYFPLQSYGFQPTNGVGYQPYRVVVLSFELLHAPATVCGPKKSTNLVKNKCVNFNFNGLTGTGVLTESNKKFLPFQQFGRDIADTTDAVRDPQTLEILDITPCSFGGVSVITPGTNTSNQVAVLYQGVNCTEVPVAIHADQLTPTWRVYSTGSNVFQTRAGCLIGAEHVNNSYECDIPIGAGICASYQTQTNSPRRARSVASQSIIAYTMSLGAENSVAYSNNSIAIPTNFTISVTTEILPVSMTKTSVDCTMYICGDSTECSNLLLQYGSFCTQLNRALTGIAVEQDKNTQEVFAQVKQIYKTPPIKDFGGFNFSQILPDPSKPSKRSFIEDLLFNKVTLADAGFIKQYGYCLGDIAARDLICAQKFNGLTVLPPLLTDEMIAQYTSALLAGTITSGWTFGAGAALQIPFAMQMAYRFNGIGVTQNVLYENQKLIANQFNSAIGKIQDSLSSTASALGKLQDVVNQNAQALNTLVKQLSSNCGAISSVLNDILSRLDKVEAEVQIDRLITCRLQSLQTYVTQQLIRAAEIRASANLAATKMSECVLGQSKRVDFCGKGYHLMSFPQSAPHGVVFLHVTYVPAQEKNFTTAPAICHDGKAHFPREGVFVSNGTHWFVTQRNFYEPQIITTDNTFVSGNCDVVIGIVNNTVYDPLQPELDS

SEQ ID NO: 3381 - protein, 1147 aa, Artificial Sequence
  SARS-CoV-2/Belgium/VAG-03013/2020__EPI_ISL_415155 spike protein (1-1147)(F970C_G999C)
MFVFLVLLPLVSSQCVNLTTRTQLPPAYTNSFTRGVYYPDKVFRSSVLHSTQDLFLPFFSNVTWFHAIHVSGTNGTKRFDNPVLPFNDGVYFASTEKSNIIRGWIFGTTLDSKTQSLLIVNNATNVVIKVCEFQFCNDPFLGVYYHKNNKSWMESEFRVYSSANNCTFEYVSQPFLMDLEGKQGNFKNLREFVFKNIDGYFKIYSKHTPINLVRDLPQGFSALEPLVDLPIGINITRFQTLLALHRSYLTPGDSSSGWTAGAAAYYVGYLQPRTFLLKYNENGTITDAVDCALDPLSETKCTLKSFTVEKGIYQTSNFRVQPTESIVRFPNITNLCPFGEVFNATRFASVYAWNRKRISNCVADYSVLYNSASFSTFKCYGVSPTKLNDLCFTNVYADSFVIRGDEVRQIAPGQTGKIADYNYKLPDDFTGCVIAWNSNNLDSKVGGNYNYLYRLFRKSNLKPFERDISTEIYQAGSTPCNGVEGFNCYFPLQSYGFQPTNGVGYQPYRVVVLSFELLHAPATVCGPKKSTNLVKNKCVNFNFNGLTGTGVLTESNKKFLPFQQFGRDIADTTDAVRDPQTLEILDITPCSFGGVSVITPGTNTSNQVAVLYQGVNCTEVPVAIHADQLTPTWRVYSTGSNVFQTRAGCLIGAEHVNNSYECDIPIGAGICASYQTQTNSPRRARSVASQSIIAYTMSLGAENSVAYSNNSIAIPTNFTISVTTEILPVSMTKTSVDCTMYICGDSTECSNLLLQYGSFCTQLNRALTGIAVEQDKNTQEVFAQVKQIYKTPPIKDFGGFNFSQILPDPSKPSKRSFIEDLLFNKVTLADAGFIKQYGDCLGDIAARDLICAQKFNGLTVLPPLLTDEMIAQYTSALLAGTITSGWTFGAGAALQIPFAMQMAYRFNGIGVTQNVLYENQKLIANQFNSAIGKIQDSLSSTATALGKLQDVVNQNAQALNTLVKQLSSNCGAISSVLNDILSRLDKVEAEVQIDRLITCRLQSLQTYVTQQLIRAAEIRASANLAATKMSECVLGQSKRVDFCGKGYHLMSFPQSAPHGVVFLHVTYVPAQEKNFTTAPAICHDGKAHFPREGVFVSNGTHWFVTQRNFYEPQIITTDNTFVSGNCDVVIGIVNNTVYDPLQPELDS

SEQ ID NO: 3382 - protein, 1147 aa, Artificial Sequence
  SARS-CoV-2/Belgium/BC-03016/2020__EPI_ISL_415157 spike protein (1-1147)(F970C_G999C)
MFVFLVLLPLVSSQCVNLTTRTQLPPAYTNSFTRGVYYPDKVFRSSVLHSTQDLFLPFFSNVTWFHAIHVSGTNGTKRFDNPVLPFNDGVYFASTEKSNIIRGWIFGTTLDSKTQSLLIVNNATNVVIKVCEFQFCNDPFLGVYYHKNNKSWMESEFRVYSSANNCTFEYVSQPFLMDLEGKQGNFKNLREFVFKNIDGYFKIYSKHTPINLVRDLPQGFSALEPLVDLPIGINITRFQTLLALHRSYLTPGDSSSGWTAGAAAYYVGYLQPRTFLLKYNENGTITDAVDCALDPLSETKCTLKSFTVEKGIYQTSNFRVQPTESIVRFPNITNLCPFGEVFNATRFASVYAWNRKRISNCVADYSVLYNSASFSTFKCYGVSPTKLNDLCFTNVYADSFVIRGDEVRQIAPGQTGKIADYNYKLPDDFTGCVIAWNSNNLDSKVGGNYNYLYRLFRKSNLKPFERDISTEIYQAGSTPCNGVEGFNCYFPLQSYGFQPTNGVGYQPYRVVVLSFELLHAPATVCGPKKSTNLVKNKCVNFNFNGLTGTGVLTESNKKFLPFQQFGRDIADTTDAVRDPQTLEILDITPCSFGGVSVITPGTNTSNQVAVLYQGVNCTEVPVAIHADQLTPTWRVYSTGSNVFQTRAGCLIGAEHVNNSYECDIPIGAGICASYQTQTNSPRRARSVASQSIIAYTMSLGAENSVAYSNNSIAIPTNFTISVTTEILPVSMTKTSVDCTMYICGDSTECSNLLLQYGSFCTQLNRALTGIAVEQDKNTQEVFAQVKQIYKTPPIKDFGGFNFSQILPDPSKPSKRSFIEDLLFNKVTLADAGFIKQYGDCLGDIAARDLICAQKFNGLTVLPPLLTDEMIAQYTSALLAGTITSGWTFGAGAALQIPFAMQMAYRFNGIGVTQNVLYENQKLIANQFNSAIGKIQDSLSSTAPALGKLQDVVNQNAQALNTLVKQLSSNCGAISSVLNDILSRLDKVEAEVQIDRLITCRLQSLQTYVTQQLIRAAEIRASANLAATKMSECVLGQSKRVDFCGKGYHLMSFPQSAPHGVVFLHVTYVPAQEKNFTTAPAICHDGKAHFPREGVFVSNGTHWFVTQRNFYEPQIITTDNTFVSGNCDVVIGIVNNTVYDPLQPELDS

SEQ ID NO: 3383 - protein, 1147 aa, Artificial Sequence
  SARS-CoV-2/Germany/BavPat3/2020__EPI_ISL_414521 spike protein (1-1147)(F970C_G999C)
MFVFLVLLPLVSSQCVNLTTRTQLPPAYTNSFTRGVYYPDKVFRSSVLHSTQDLFLPFFSNVTWFHAIHVSGTNGTKRFDNPVLPFNDGVYFASTEKSNIIRGWIFGTTLDSKTQSLLIVNNATNVVIKVCEFQFCNDPFLGVYYHKNNKSWMESEFRVYSSANNCTFEYVSQPFLMDLEGKQGNFKNLREFVFKNIDGYFKIYSKHTPINLVRDLPQGFSALEPLVDLPIGINITRFQTLLALHRSYLTPGDSSSGWTAGAAAYYVGYLQPRTFLLKYNENGTITDAVDCALDPLSETKCTLKSFTVEKGIYQTSNFRVQPTESIVRFPNITNLCPFGEVFNATRFASVYAWNRKRISNCVADYSVLYNSASFSTFKCYGVSPTKLNDLCFTNVYADSFVIRGDEVRQIAPGQTGKIADYNYKLPDDFTGCVIAWNSNNLDSKVGGNYNYLYRLFRKSNLKPFERDISTEIYQAGSTPCNGVEGFNCYFPLQSYGFQPTNGVGYQPYRVVVLSFELLHAPATVCGPKKSTNLVKNKCVNFNFNGLTGTGVLTESNKKFLPFQQFGRDIADTTDAVRDPQTLEILDITPCSFGGVSVITPGTNTSNQVAVLYQDVNCTEVPVAIHADQLTPTWRVYSTGSNVFQTRAGCLIGAEHVNNSYECDIPIGAGICASYQTQTNSPRRARSVASQSIIAYTMSLGAENSVAYSNNSIAIPTNFTISVTTEILPVSMTKTSVDCTMYICGDSTECSNLLLQYGSFCTQLNRALTGIAVEQDKNTQQVFAQVKQIYKTPPIKDFGGFNFSQILPDPSKPSKRSFIEDLLFNKVTLADAGFIKQYGDCLGDIAARDLICAQKFNGLTVLPPLLTDEMIAQYTSALLAGTITSGWTFGAGAALQIPFAMQMAYRFNGIGVTQNVLYENQKLIANQFNSAIGKIQDSLSSTASALGKLQDVVNQNAQALNTLVKQLSSNCGAISSVLNDILSRLDKVEAEVQIDRLITCRLQSLQTYVTQQLIRAAEIRASANLAATKMSECVLGQSKRVDFCGKGYHLMSFPQSAPHGVVFLHVTYVPAQEKNFTTAPAICHDGKAHFPREGVFVSNGTHWFVTQRNFYEPQIITTDNTFVSGNCDVVIGIVNNTVYDPLQPELDS

SEQ ID NO: 3384 - protein, 1147 aa, Artificial Sequence
  SARS-CoV-2/France/HF1805/2020__EPI_ISL_414628 spike protein (1-1147)(F970C_G999C)
MFVFLVLLPLVSSQCVNLTTRTQLPPAYTNSFTRGVYYPDKVFRSSVLHSTQDLFLPFFSNVTWFHAIHVSGTNGTKRFDNPVLPFNDGVYFASTEKSNIIRGWIFGTTLDSKTQSLLIVNNATNVVIKVCEFQFCNDPFLGVYYHKNNKSWMESEFRVYSSANNCTFEYVSQPFLMDLEGKQGNFKNLREFVFKNIDGYFKIYSKHTPINLVRDLPQGFSALEPLVDLPIGINITRFQTLLALHRSYLTPGDSSSGWTAGAAAYYVGYLQPRTFLLKYNENGTITDAVDCALDPLSETKCTLKSFTVEKGIYQTSNFRVQPTESIVRFPNITNLCPFGEVFNATRFASVYAWNRKRISNCVADYSVLYNSASFSTFKCYGVSPTKLNDLCFTNVYADSFVIRGDEVRQIAPGQTGKIADYNYKLPDDFTGCVIAWNSNNLDSKVGGNYNYLYRLFRKSNLKPFERDISTEIYQAGSTPCNGVEGFNCYFPLQSYGFQPTNGVGYQPYRVVVLSFELLHAPATVCGPKKSTNLVKNKCVNFNFNGLTGTGVLTESNKKFLPFQQFGRDIADTTDAVRDPQTLEILDITPCSFGGVSVITPGTNTSNQVAVLYQGVNCTEVPVAIHADQLTPTWRVYSTGSNVFQTRAGCLIGAEHVNNSYECDIPIGAGICASYQTQTNSPRRARSVASQSIIAYTMSLGAENSVAYSNNSIAIPTNFTISVTTEILPVSMTKTSVDCTMYICGDSTECSNLLLQYGSFCTQLNRALTGIAVEQDKNTQEVFAQVKQIYKTPPIKDFGGFNFSQILPDPSKPSKRSFIEDLLFNKVTLADAGFIKQYGDCLGDIAARDLICAQKFNGLTVLPPLLTDEMIAQYTSALLAGTITSGWTFGAGAALQIPFAMQMAYRFNGIGVTQNVLYENQKLIANQFNSAIGKIQDSLSSTASALGKLQDVVNQNAQALNTLVKQLSSNCGAISSVLNDILSRLDKVEAEVQIDRLITCRLQSLQTYVTQQLIRAAEIRASANLAATKMSECVLGQSKRVDFCGKGYHLMSFPQSAPHGVVFLHVTYVPAQEKNFTTAPAICHDGKAHFPREGVFVSNGTHWFVTQRNFYEPQIITTDNTFVSGNCDVVIGVVNNTVYDPLQPELDS

SEQ ID NO: 3385 - protein, 1147 aa, Artificial Sequence
  SARS-CoV-2/Netherlands/ZuidHolland_9/2020__EPI_ISL_414445 spike protein (1-1147)(F970C_G999C)
MFVFLVLLPLVSSQCVNLTTRTQLPPAYTNSFTRGVYYPDKVFRSSVLHSTQDLFLPFFSNVTWFHAIHVSGTNGTKRFDNPVLPFNDGVYFASTEKSNIIRGWIFGTTLDSKTQSLLIVNNATNVVIKVCEFQFCNDPFLGVYYHKNNKSWMESEFRVYSSANNCTFEYVSQPFLMDLEGKQGNFKNLREFVFKNIDGYFKIYSKHTPINLVRDLPQGFSALEPLVDLPIGINITRFQTLLALHRSYLTPGDSSSGWTAGAAAYYVGYLQPRTFLLKYNENGTITDAVDCALDPLSETKCTLKSFTVEKGIYQTSNFRVQPTESIVRFPNITNLCPFGEVFNATRFASVYAWNRKRISNCVADYSVLYNSASFSTFKCYGVSPTKLNDLCFTNVYADSFVIRGDEVRQIAPGQTGKIADYNYKLPDDFTGCVIAWNSNNLDSKVGGNYNYLYRLFRKSNLKPFERDISTEIYQAGSTPCNGVEGFNCYFPLQSYGFQPTNGVGYQPYRVVVLSFELLHAPATVCGPKKSTNLVKNKCVNFNFNGLTGTGVLTESNKKFLPFQQFGRDIADTTDAVRDPQTLEILDITPCSFGGVSVITPGTNTSNQVAVLYQGVNCTEVPVAIHADQLTPTWRVYSTGSNVFQTRAGCLIGAEHVNNSYECDIPIGAGICASYQTQTNSPRRARSVASQSIIAYTMSLGAENSVAYSNNSIAIPTNFTISVTTEILPVSMTKTSVDCTMYICGDSTECSNLLLQYGSFCTQLNRALTGIAVEQDKNTQEVFAQVKQIYKTPPIKDFGGFNFSQILPDPSKPSKRSFIEDLLFNKVTLADAGFIKQYGDCLGDIAARDLICVQKFNGLTVLPPLLTDEMIAQYTSALLAGTITSGWTFGAGAALQIPFAMQMAYRFNGIGVTQNVLYENQKLIANQFNSAIGKIQDSLSSTASALGKLQDVVNQNAQALNTLVKQLSSNCGAISSVLNDILSRLDKVEAEVQIDRLITCRLQSLQTYVTQQLIRAAEIRASANLAATKMSECVLGQSKRVDFCGKGYHLMSFPQSAPHGVVFLHVTYVPAQEKNFTTAPAICHDGKAHFPREGVFVSNGTHWFVTQRNFYEPQIITTDNTFVSGNCDVVIGIVNNTVYDPLQPELDS
